United States Patent Application Publication US 2005/0228172 A9 - sequence listing, part 22

SEQ ID NO: 71289 - DNA, 616 bp, Homo sapiens
tgtggagcttagctctaacgagctccttcgctcagaaaaaggaatctggccaggcacggtggctcacgcctgtaatcccaggactttgggaggccaaggcgggtggatcacctgaggtcagaagtttaagaccagcctggccaacatggcaaaaccccgtctctactaaaaatacaaaaaaattagctgggcatggtggcacgcacctgtaatcccagctactcaggaggctgaggcaggagaatcactagaatccgggaggcggaggttgcagtgagctgagatcacaccattgcactccagcctggtaaaaacaagagcaaaactcagtctcaaaaaaaaaaaaaaaaaagaaaagaaaaggaaaaaagaatctttttcccacatccaagccaccagctggccccagagtgggcagacaaytacctggaattctgaaactgatgtcttctggttaacagggaggtcacttgggtgaggaggaagcagcatgatcttattctcatcaaccctcactaaagccaccccaaaataaacatctaaacataaagtcgtacagatgccagacaggtatttgccatgcttaaaacaatgcccagtcctgcttcccagcact

SEQ ID NO: 71290 - DNA, 616 bp, Homo sapiens
tgtggagcttagctctaacgagctccttcgctcagaaaaaggaatctggccaggcacggtggctcacgcctgtaatcccaggactttgggaggccaaggcgggtggatcacctgaggtcagaagtttaagaccagcctggccaacatggcaaaaccccgtctctactaaaaatacaaaaaaattagctgggcatggtggcacgcacctgtaatcccagctactcaggaggctgaggcaggagaatcactagaatccgggaggcggaggttgcagtgagctgagatcacaccattgcactccagcctggtaaaaacaagagcaaaactcagtctcaaaaaaaaaaaaaaaaaagaaaagaaaaggaaaaaagaatctttttcccacatccaagccaccagctggccccagagtgggcagacaactacctggaattctgaaactgatgtcttctggttaacagggaggtcacttgggtgaggaggaagcagcatgatcttawtctcatcaaccctcactaaagccaccccaaaataaacatctaaacataaagtcgtacagatgccagacaggtatttgccatgcttaaaacaatgcccagtcctgcttcccagcact

SEQ ID NO: 71291 - DNA, 693 bp, Homo sapiens
aaaactaaatcccttttgcttcacgtgacagtccagaaatgtttcgttttgtttttaaaagcaaccctgcttatcggcatctaactctgctgggggccgacatgagctaccagaggacgaaaactacggcccaactgactccacgaagctcactcaggactgaggaagtaaaaacgggataaccagaggcgcgcccgacaccccagaacaagcacggactattctgggttaggaacagtcgcggggcagccctggcgtgagtgtgaggggcagagccgcgggcgccacaaactgcggggccggcggccgacagggagaggccgcggggcacgccctccccgcaaacgcccggaaagtccgagggcggcctgcgcgctcaggagacctggtctaggcgcaggccaggcgcgsagtggggaaccccgcggcagggacccagcggtgcctgcccggcggccccggcgcccaggtgcgcgttcaggacgagcagcgttttctggtcgcggcgtcggcacaggtaatttcacaatcccaagcggcgcattccaacgacaagaatcacaccccaggaccttagcctttcgctcgccccagtcggcgccgcgagccggaggcggtgggggaagggcgcctggagggggggtggggttgcggctgcggcgcgacccccgccagccgcacagacctggttcc

SEQ ID NO: 71292 - DNA, 918 bp, Homo sapiens
ttaaatggatatttctagattttgaacccagttgtgacattgcttggtatttaggcaatttccaatgttgcatgcttaggatcaattttagatgttcaaaaatacagcccakgtttccatctagatttcacacccatcagtactgcagggtagagcttaggggactgttgctcagtatcattcattttccttactagtcgttaaggtttcaaatacacagttaagaatgaaaaatgaataaacaaattggccttgtcagagcttgtatcacccagttagagaggcaagaaaggaaaacaaagagaaaaagttaatatggccttgttccactggcggagcagcgctaaagcacatagttcagaaaaattccctttacctccatttacccaacatggagacaaatgtagttctagtagtgcggggaaacatacacttgtgcaaggaatctgacagaaaaggacttccacacaaacatcccactgctcgctctgctctcctcgaatgcaggactgtgtagagactgctgacaatatcacatgctaaattcattttgtgcttggtgggcatgatttgttctcctgacagagacagaaattcactagagacacaaatgagactgtcacactcattccacttgtgtgctgaaacaaattgaagtgccacagttggcggagtgggggttacataaagaagtagttattggacccctcagccttttttcttagagaaatcagaggggaatagctgaggcaggcatctttctcagctctcactagggagaaatcctcaacaaccatcgccaaatacaaggtaaaaaagaaaggacacccattatgattcttttaagtttaggtttaaaatgcgttggaggactttgagttgttattttaagtagcatcatcccactctgtaaatgca

SEQ ID NO: 71293 - DNA, 918 bp, Homo sapiens
ttaaatggatatttctagattttgaacccagttgtgacattgcttggtatttaggcaatttccaatgttgcatgcttaggatcaattttagatgttcaaaaatacagcccatgtttccatctagatttcacacccatcagtactgcagggtagagcttaggggactgttgctcagtatcattcattttccttactagtcgttaaggtttcaaatacacagttaagaatgaaaaatgaataaacaaattggccttgtcagagcttgtatcacccagttagagaggcaagaaaggaaaacaaagagaaaaagttaatatggccttgttccactggcggagcagcgctaaagcacatagttcagaaaaattccctttacctccatttacccaacatggagacaaatgtagttctagtagtgcggggaaacatacacttgtgcaaggaatctgacagaaaaggacttccacacaaacatcccactgctcgctctgctctcctcgaatgcaggactgtgtagagactgctgacaatatcacatgctaaattcattttgtgcttggtgggcatgatttgttctcctgacagagacagaaattcactagagacacaaatgagactgtcacactcattccacttgtgtgctgaaacaaattgaagtgccacagttggcggagtgggggttacataaagaagtagttattggacccctcagccttttttcttagagaaatcagaggggaatagctgaggcaggcatctttctcagctctcrctagggagaaatcctcaacaaccatcgccaaatacaaggtaaaaaagaaaggacacccattatgattcttttaagtttaggtttaaaatgcgttggaggactttgagttgttattttaagtagcatcatcccactctgtaaatgca

SEQ ID NO: 71294 - DNA, 1187 bp, Homo sapiens
atataaacatgagtaggaggtaaaattaaactgaaaagtagcatccagccatgatactggagaggtaggctggggttatattgtaagtgctttctatgccatgatttatttttattttttattttttgagacagggtctcactctgttgcacaggctggagtgcagtggtgtgatctcggctcactggagccttgacctctyggcctcaatcaattctctcacctcagcctcccaagtagctgggaccacaggtgtgcaccaccacacttggctaatttttgtattttttgtggaggcagggtttcaccatgctgcccaggctgatcttgaactcctgggctcaagccatctgcctgcctaggcctcccaaagtgctggaattacaggcatgagccactgtgcctggcctcatgatttttaaattttttggaatgtaatacattttatgtatcaaatcaattaatgagtttcaatttttcaagaatttctacaagaatcctaattatatctaatagaaatagtggtattattacattttacataaaagaaaattaatgtaattaaatatgttgattgattgtaaccactgaaattaatgtgtccatgatggtattagctccagatgctcctttaatacaaaatatgcacatactatacatatctttttaggagattgttctctttactgtaatatctaattaaaatatgcaaaaaaagatttttgtgtgaaatactgggcagcttattatcagcttctattgtttttatttgctcaaatgttagattttaaagctcagtttaatagagaaagctatgaaacattttctgaaatcttaagttcggctgcttacattttttttagttatctactcttctgactaacaggtggggagttaataggcatacaaatcattaaagcaatgtcacagtgataaaattgtgataaaaggactaaaaacttcccctgaatttggcagctctttaagagtatgctgaaatatagattggaataaatgttataatcagttattatagaaggagagtatgtgacaagcatgcttgatatacatgttgaaggccattatttagatttaaagtaattccttggaaaccacaggggattgcttccaggacccctcacaaataccaaaacccatggatgctcaagtaccttatataaaatggt

SEQ ID NO: 71295 - DNA, 1187 bp, Homo sapiens
atataaacatgagtaggaggtaaaattaaactgaaaagtagcatccagccatgatactggagaggtaggctggggttatattgtaagtgctttctatgccatgatttatttttattttttattttttgagacagggtctcactctgttgcacaggctggagtgcagtggtgtgatctcggctcactggagccttgacctcttrgcctcaatcaattctctcacctcagcctcccaagtagctgggaccacaggtgtgcaccaccacacttggctaatttttgtattttttgtggaggcagggtttcaccatgctgcccaggctgatcttgaactcctgggctcaagccatctgcctgcctaggcctcccaaagtgctggaattacaggcatgagccactgtgcctggcctcatgatttttaaattttttggaatgtaatacattttatgtatcaaatcaattaatgagtttcaatttttcaagaatttctacaagaatcctaattatatctaatagaaatagtggtattattacattttacataaaagaaaattaatgtaattaaatatgttgattgattgtaaccactgaaattaatgtgtccatgatggtattagctccagatgctcctttaatacaaaatatgcacatactatacatatctttttaggagattgttctctttactgtaatatctaattaaaatatgcaaaaaaagatttttgtgtgaaatactgggcagcttattatcagcttctattgtttttatttgctcaaatgttagattttaaagctcagtttaatagagaaagctatgaaacattttctgaaatcttaagttcggctgcttacattttttttagttatctactcttctgactaacaggtggggagttaataggcatacaaatcattaaagcaatgtcacagtgataaaattgtgataaaaggactaaaaacttcccctgaatttggcagctctttaagagtatgctgaaatatagattggaataaatgttataatcagttattatagaaggagagtatgtgacaagcatgcttgatatacatgttgaaggccattatttagatttaaagtaattccttggaaaccacaggggattgcttccaggacccctcacaaataccaaaacccatggatgctcaagtaccttatataaaatggt

SEQ ID NO: 71296 - DNA, 1319 bp, Homo sapiens
gtaccgatgccctggatgaagacgaagccggtgaccatgagcactgggtgccagttaaactctagtgcgctcccatcccagccaagcccctctcggtagtggaggacccagacgagggcgaagatcaccgacaggaagccgacgagcagtgccgaccccagcagcgccaggaagcgccagtagccctccatggccatcagcgccccatactccgcaccgcgggggccacaagaacttggagaggcggcggcagccctctgggtagtggccgggcggcgggaccggggcgtcgacttcttggggctgtctccgcctgcggggagggactttctgggctgctggcccggaatgtggggcctcttgggggtggggagctggccccaactcagaaatgggccccacccccgggatcacgcggccgccgagggcgctcattgcctggtggcctcaccctctccctcgtccagcatccaagctcgcagagggcttcagtaacagacctagttagttgctcaaagagaaaattccgaggattttatactcaccacttgcttttaacacttcccgtgtctcgtccttatttgtggggaggttgagtagggcagtggtgcgccctcttggttaagagaagagagggatccgttgggtagggttatgtgtgtgcttttaactactaacgaagcctccttagccacagtgctggagaattggctgtctctgacatcaaagggtgttaaggaggaacctgtaaggtggtgtaaactaaaaataaaatcctaagcccctcactgactgaatggacctccttggccaagcagaccccagaaaaaccttaaagctgagtttctagctacagccggaagggaagtctaccccctccattttggaatttagactcaacagctgactagcattaatgtttaaaatagaaatcataaggcggacagaacagactctttgtagcaataagacatcaaattataaaaaggacctaagtcacacactcctacacttaagaaataaactatggtctaactgccacaaasgttttcttttcctctagaggctaaacaagcactggcttgagataagcaatattaaaacaattacaacttaatcagttcacagatgctgaccagctgaacccctgttgcaccagccagaactacagctttcactgggctgatttcaggaactttttcatgataagaagaccgaccatggaccggttctggccagtgtacagggattgtgcacttgtatgcattcacgtcctgaaaagaccttttgaagtgtaggtttgaagtaatacatttaaa

SEQ ID NO: 71297 - DNA, 815 bp, Homo sapiens
ttcttgctttatgtgagaacctgcgcactagataagttattctagccagatacctactattctagggtacagtgcccccaacagtctttgataagaatcactgtattcgtgtataagttagttatttaaaagcacatacattgatgaaaacaacatttggtaactttgtccacagtttaaacagacagagataggtttccagctgctaccactatacaacaaaaactaaatttacactgacaaaaatactttgatatactcaaaattatatttaactgtttattctgaggttgttttcctaagcacccttgcttggtttccccaaacttaattcatggaaattaaatcataaaccttcgctgatccttgtgctcagaaattgctccaagcaacaccccttcaacccgatactacaagtcatacacatactgttgactaagaacctattatctcttacacccacctaactttttccatccatcatcctggctttgcactaaaagttctgacttcatgtgcttagcctggggtgcctccctgcgatgctgctacaatctaacaaagctattattgcatctgtaagtgagtattctctcaggcaggttgtttagaagtagaattaatgctattaaatgaaatgcttttatatttatgggtataatcctcacaatctgaagaggactgttcaatggggagagacttagattttaggcataatctgcaaattatatattattctttaatttaatatgaccgtattgctggagtcttctaattattagtacctgtgttaraagtggtggtggttgggggta

SEQ ID NO: 71298 - DNA, 739 bp, Homo sapiens
gttggaggcttttcacacaataaaatgtacctctctttgtttttaacatgtttytcccttcctctcttctttttttgtgaaatgtgtatttactttatttgtagtaagtcacttccatgcacatattaattttttaaagtaataagtatgtgtattgtctacgtgtgaaataaaacacacatttatttttatgctttggaagttatccagaatcatggaattctcaatcacagtcaatcacccaacctactcacctttccagtgtaatcttagtcaaatttttttttgttatccaatgagatgcagtatttcaactcagaaagataaatagagtgaatttatagagactattaactaagaacatacagttttatttatactcagaagcaagtagattatgtacatatatatgaagataaaaattaaaaggataattgtgtaaatttgcatgtagagggctttgaaaacctgtttacttgttaatgccgttttgatgtattgtgtctttgttctcccgacccatcatccagagctctctgcaggagctaagtgctcatcagttccatgacttggaaactaagtttagaggcacttgtatttgttagtaaataaggcaagatgatattgtttcacaggttttagtgccgaagactgaatagatatgctgctccacccagtacactggtgttcatttcatggtcatctcatctgttaaccatggatataaaacatttatctt

SEQ ID NO: 71299 - DNA, 739 bp, Homo sapiens
gttggaggcttttcacacaataaaatgtacctctctttgtttttaacatgtttttcccttcctctcttctttttttgtgaaatgtgtatttactttatttgtagtaagtcacttccatgcacatattaattttttaaagtaataagtatgtgtattgtctacgtgtgaaakaaaacacacatttatttttatgctttggaagttatccagaatcatggaattctcaatcacagtcaatcacccaacctactcacctttccagtgtaatcttagtcaaatttttttttgttatccaatgagatgcagtatttcaactcagaaagataaatagagtgaatttatagagactattaactaagaacatacagttttatttatactcagaagcaagtagattatgtacatatatatgaagataaaaattaaaaggataattgtgtaaatttgcatgtagagggctttgaaaacctgtttacttgttaatgccgttttgatgtattgtgtctttgttctcccgacccatcatccagagctctctgcaggagctaagtgctcatcagttccatgacttggaaactaagtttagaggcacttgtatttgttagtaaataaggcaagatgatattgtttcacaggttttagtgccgaagactgaatagatatgctgctccacccagtacactggtgttcatttcatggtcatctcatctgttaaccatggatataaaacatttatctt

SEQ ID NO: 71300 - DNA, 739 bp, Homo sapiens
gttggaggcttttcacacaataaaatgtacctctctttgtttttaacatgtttttcccttcctctcttctttttttgtgaaatgtgtatttactttatttgtagtaagtcacttccatgcacatattaattttttaaagtaataagtatgtgtattgtctacgtgtgaaataaaacacacatttatttttatgctttggaagttatccagaatcatggaattstcaatcacagtcaatcacccaacctactcacctttccagtgtaatcttagtcaaatttttttttgttatccaatgagatgcagtatttcaactcagaaagataaatagagtgaatttatagagactattaactaagaacatacagttttatttatactcagaagcaagtagattatgtacatatatatgaagataaaaattaaaaggataattgtgtaaatttgcatgtagagggctttgaaaacctgtttacttgttaatgccgttttgatgtattgtgtctttgttctcccgacccatcatccagagctctctgcaggagctaagtgctcatcagttccatgacttggaaactaagtttagaggcacttgtatttgttagtaaataaggcaagatgatattgtttcacaggttttagtgccgaagactgaatagatatgctgctccacccagtacactggtgttcatttcatggtcatctcatctgttaaccatggatataaaacatttatctt

SEQ ID NO: 71301 - DNA, 739 bp, Homo sapiens
gttggaggcttttcacacaataaaatgtacctctctttgtttttaacatgtttttcccttcctctcttctttttttgtgaaatgtgtatttactttatttgtagtaagtcacttccatgcacatattaattttttaaagtaataagtatgtgtattgtctacgtgtgaaataaaacacacatttatttttatgctttggaagttatccagaatcatggaattctcaatcacagtcaatcacccaacctactcacctttccagtgtaatcttagtcaaatttttttttgttatccaatgagatgcagtatttcaactcagaaagataaatagagtgaatttatagagactattaactaagaacatacagttttatttatactcagaagcaagtagattatgtacatatatatgaagataaaaattaaaaggataattgtgtaaatttgcatgtagagggctttgaaaacctgtttacttgttaatgcygttttgatgtattgtgtctttgttctcccgacccatcatccagagctctctgcaggagctaagtgctcatcagttccatgacttggaaactaagtttagaggcacttgtatttgttagtaaataaggcaagatgatattgtttcacaggttttagtgccgaagactgaatagatatgctgctccacccagtacactggtgttcatttcatggtcatctcatctgttaaccatggatataaaacatttatctt

SEQ ID NO: 71302 - DNA, 622 bp, Homo sapiens
tatctttgttctctgctcttagctcttacccggtgttttctaaaactgaagtctaggagcggcatacattgcttcagaaatgcttccacaaagagacgcccatactgaagaagagagacacactgttacctctagctgaggtatctcactgaaaggcccctgaggcagaatagtctcatccagcccaagggttttattttcttatttatatatataaaaaacaaattgggaagggtccaaaaggtttatttggagaatgtaacttaatacaaaaatcaaataggcctgttaactaagccccagaattaggcagacttacctaccacagatacagtcgatggacagggaacttgctcagcttaggagtgagagcatagagtagaggggagctctatctgaggataacttactcccaagagggaaaaactgggtaaagctgagaaagcatatgaccaatttctaaatttcccaatcagataaatgactcctctctccaactygcccatctcccacattgcgcaagggtggagtaaaaagggagagtgaccaggagatgacaagaatggggcaccatccacttggaaggaaacttgaggagtggcgaagtagcattctccccata

SEQ ID NO: 71303 - DNA, 1418 bp, Homo sapiens
cacctgggaggcaggcagcatctgaactgttatccttcatgacagaaaaggagcctgtctcctctgtccagtcctctgagccctgggccctgctggactctagccctggcagcatttcctgcagggcttgcctggcagtccactggtcacatgtgcctacactccactacacccagcagctcccagctgtctgtgtccctctttgtctgctctcctggttcagaaagaaaagctaaaactggttcttcttcccacattgactgttctcactgacattttgcccatcgcctgagcccaggcagaagtttagaaacaccttttctcactgggtgctatttttttgttttggcagggagggtgggaatagagaaagtaacctttcctcatagtgtgattctggcacgaggcttaaaaacagctgcttgtggccgtaaaatgggcatcggctttgcttggagacttctgggtcccagcttcttgtgctcacttatccctggcagaatggtccgtgctcccctccaccatcaggttggcacatgaggacgctggcaggcagggttgttcaagtggcctttgcctgttgattggggactgggagattgcctcaaatcaggaattcttaaatgtctctcagccccagtccctggggagaagctgatgggcactgtggcccctctctcagaaaatcagccaaccacacgcaacaggtgtggctcacactatttgtgggtttctagaccccctcaaagcagggttgtggaccctagttaagaaaaccacctaccactcccaccagaaaggctccccagagctgggaagttgagcagctcacggccaagttccagcaaccttgcagggccatttccggctggttcctgggagcccgctctgtactgctagagggagtattgcctagctgagacaggaaccctatctgctctctctgtacatcccatgcccaacctcatgcctggcacagatgaggacccggtaaaaccctgagacacagctactaagtcccagcctaaggtgggggagctctcagacagctgagtagcccaagctgcagataatcaagaccaagtgcagcaaggaccccaggactcagcactagtgaggctggtgggcagtgaaggtcagggaaggcttcatggaagggaaggtgtttggacttggctatggaggaaagagaagggaaagcatgtagtatggcctacagcagcatttcttagagggkattccacagaataactggtatgctgcaagaagtgaggcttcaggtgaaaagtaaagaactctgttttctcatctgtaaaatggaaacaataatgacatctctattgctctgccacctgccagccgtgtgcctttgggccttttcgtctgacctctctgagccttggtctcctggtcattca

SEQ ID NO: 71304 - DNA, 733 bp, Homo sapiens
cttcctctagcaaaagtaactgataaatcctgaaaaaatgcaaaagaactgcttgccaagtaaagttttttatggaaccatgtgggtggattcacagtgctaagtccctctggcatcaaggaagactgctgtctcatcagacctcaaagccaaaaaaaagaaaaaaagaaaaagatgccacattgctggactctttaggaattggagacagaatgtacctctcttgggcattcyacttgtcctttatattggcttatccaaaaatcataatttgcatagggcccaaaccaacagtctccactgaaagctgttcagcgaactgaaatacgctttccattttgggaactcacaggcttaactccatcttgagtgaccagtgatttgctactttgtgcctctgataaagagaagctgcctccattcggaggtgcccattagggtctggacttgtcctcttcttgagacagacgatgcagttagggagagggtaagtcctgaccccaatgggaacggtgaatgcagacagcttctctaccagaggctccaagtagcaaattataacgccctttataaagcagcttctgacataaaaaacatgacctactgaggccttgtgacttgctggtctgatatccacattgggcagcgggcgggtctgtttggaatcaatgacaagttgggaagggcccaccgagccttggctggcaaaaggaagcagcatatttatgaatgc

SEQ ID NO: 71305 - DNA, 632 bp, Homo sapiens
ttaaaaagggaaaagagccaaaaatcctgtaatcaccagaaacttagcaaatatgaattaaatatttagttagttttgagaatttagttttgttccgtaatgtaatggttgagattgcattcatagtaacctaaaactcatttccttcaaactggagaaragttggtggaaaggtaccctgagttggaaattttcaaagtatccatcccaaactctctgaaatatacacacatgatgcacacatacatttatacataaaggagcacatgcactcacaacccacatatagtgtaattttctacgtgtgtgagtcctatgacagtggacttttattttaatggagaacttggagcagatgtcagatttgtaggagcaggaagggccgattaaatacaaaaagatcaatcataaggtattatctgggggaaagatcataaactagaagagtggcagaggcagagagaagactgctttcagaaggagataaaaatgacaaaagattattttggattggttttcaagagaagatgattcgataacatttaggatttgtaatatagataatgggacaaacagtgatgacagttactaggacagaaaaagtattggcaaactttttctgtaaagagcca

SEQ ID NO: 71306 - DNA, 911 bp, Homo sapiens
ggagttgagggtctcctcttccaaagttggtggcagttgaactgggaggctggatggtgttcctctgcatctcatcaggagatgaagccaggtagaaataggctgggtctgcctaccaccagctactcatttccaaactgagctgctcttctggcccatatgggacacctggattttttttttttttttgaagaaatggtcacttggctaagagagtggacaacgtccccttctagccctgtggttctcccatcttctctccatgacccagatgagtgactgaggaacaaactaacaagtatttttacattaaagtaagctaacatcctcagggcctgtgaaaaaatgtccagaaagccataaatgcaccagtaacaacttctcctggtttataacaggaaaattggattcagattccaagattctcttagtgatgagtgatgaaaccaccacagcaacattgagggtacagttaggtgataacctccaaattctattctaattcctgacttgggcactagaaacgggactaagaagctgagaaatgttggagaggtgcaaaaaagacaatcaatcagaactgggggcacccagcttaacgtaaagtagaartctcaaaattatgtgatcgagattcttctttccttctatctctttgggtcagtcctcttgtgatgattaatttgctccctaaagcatcctacatcctgttatatttaaggctctattgacttcctgtgctcagaacgatcttctttaaacatttgagataagactcttagaatgtgtatattcttggtggttattatataggaaacatatgaatccaaatgttatcctccaagacaaattggcaggaatgtcaggatccttttggggctctgttttgtaaacacggagaggtaatgcat

SEQ ID NO: 71307 - DNA, 960 bp, Homo sapiens
ctatctttacatggttgcatgcagagattagctctcagtacacatattagtttattttcatttttaattttaaattgacaaacatttatatttatggagtgcaaagtgatgttataatttatggatgaaatatggaataactaaatcaagctaattaacatatccatcatctcaaagccttttcttgtggtgagaacatttgaaatttacttgcttagtgattttgaactgtataatacgttattatttatttgctgttttcaccatgccatgcaatagatctcaaagtaaaaaataaataaataaataatttttttgaaaaagcacttcctcttcctctctaattgaggttttgcaccttactcttactagtttcttattgctgcaataacaaattaccttaaacttggtggcttgagacaacatagatttattatctcagtgtgctgaaattcggaaatccaaaaatcgatctcactgggttaaacaaaatcgacagtcaaggttttggcagtgctgtttctttctggaagctttaggggaaaatccattttttcttgccttttctagctcttacaggtagcctgcattctttggctcatggtctctttgcatcaatctgacctctcttcccatcctcacgtcttctctgacacaggccttcctgcctttctcttataacgacccttgtgactacattgggattacctggataattcagggtaacatccccatctcgtgatccttaatcatgtctgtaaagtcccttttgccatgtgagtaacatattcaaagattcctgagattaggatgtgggcagcattgagagcccttattcagcctgcaagggcactccaccacaacttcctggctagcttgccttcccttctcttacttagcttggacttcccmccaccagggtttctctcatgagctagatcagagtagtgcaggtgtccc

SEQ ID NO: 71308 - DNA, 689 bp, Homo sapiens
atcctaactgtatatatttataactaatgtaaggaccctactttattgccaaaacctatttttatccattgtctcatatatataaacatgtcatatatataaacatatatatataaacatatatgtatatagtaaacattcaataaattgcaacatattattttggtgtttttagacctagttctgattgtatcctctacctatcatctatcyatttatatctatctatctatctagggggatatgtttctatgaggcaaaaagtatatatatacgtatatatatatatatatatacgtatatatatatacgtatatatatgagttataaaaagaggtataaataacttttgatggattttatttatttcaaatttgcaatgttctttaagtatctggagaattgatgaaaattaacactcgtcaattcttacgcctggaactacccctaagttaaagtaggtctagtgaaaattagacagtggcctaatcaaatccagacctagggctgaaagaaataggaggtttctgcttttcctttctcttccctgtttgtgagggacattcatggaaagaactgtttggcagccaaatgttggcactctcccaacacaatccaacagaggttcagggaagagtgaggaagcttaggagtgtattgatgagaatgtatggggccatgcaagtttt

SEQ ID NO: 71309 - DNA, 689 bp, Homo sapiens
atcctaactgtatatatttataactaatgtaaggaccctactttattgccaaaacctatttttatccattgtctcatatatataaacatgtcatatatataaacatatatatataaacatatatgtatatagtaaacattcaataaattgcaacatattattttggtgtttttagacctagttctgattgtatcctctacctatcatctatctatttatatctatctatctatctagggggatatgtttctatgaggcaaaaagtatatatatacgtatatatatatatatatatacgtatatatatatacrtatatatatgagttataaaaagaggtataaataacttttgatggattttatttatttcaaatttgcaatgttctttaagtatctggagaattgatgaaaattaacactcgtcaattcttacgcctggaactacccctaagttaaagtaggtctagtgaaaattagacagtggcctaatcaaatccagacctagggctgaaagaaataggaggtttctgcttttcctttctcttccctgtttgtgagggacattcatggaaagaactgtttggcagccaaatgttggcactctcccaacacaatccaacagaggttcagggaagagtgaggaagcttaggagtgtattgatgagaatgtatggggccatgcaagtttt

SEQ ID NO: 71310 - DNA, 689 bp, Homo sapiens
atcctaactgtatatatttataactaatgtaaggaccctactttattgccaaaacctatttttatccattgtctcatatatataaacatgtcatatatataaacatatatatataaacatatatgtatatagtaaacattcaataaattgcaacatattattttggtgtttttagacctagttctgattgtatcctctacctatcatctatctatttatatctatctatctatctagggggatatgtttctatgaggcaaaaagtatatatatacgtatatatatatatatatatacgtatatatatatacgyatatatatgagttataaaaagaggtataaataacttttgatggattttatttatttcaaatttgcaatgttctttaagtatctggagaattgatgaaaattaacactcgtcaattcttacgcctggaactacccctaagttaaagtaggtctagtgaaaattagacagtggcctaatcaaatccagacctagggctgaaagaaataggaggtttctgcttttcctttctcttccctgtttgtgagggacattcatggaaagaactgtttggcagccaaatgttggcactctcccaacacaatccaacagaggttcagggaagagtgaggaagcttaggagtgtattgatgagaatgtatggggccatgcaagtttt

SEQ ID NO: 71311 - DNA, 1335 bp, Homo sapiens
atgcaactttgggaacagggagaggatggagatgaatatgaagcatgctacaaatgattttacaaatagaccatcctggtaatgtgtagcacaaaccgctggaattcaggggtggggaattgtccctgtcactttaaccaactgctcatatcaccaaagctatccaaaaatctgcatgggaagaactcttgctaaattttaggaggagaaaaattgaaatggaaaagaaaactttagatgttatcatctatgaatcatgcaccataatcaatcaatataatctctgcaagcaaatggctactaaggaaggaatcatattttygaatgtcctcaacctctatgctttaatgataaccaaaaaattttcaacattgtgctatttaacagcataacgactattggatttggattgttaaggctctcttgttctaatattttttaatctatcgcctggatctcttgtgactgcatactctttgaaaggaggaggaggaaaacaaatactttcaatatttgccttcatagtctccctttactggtcaccttcacattcatctaaagtacttcctcagaaaactcctaaaagaaaaataacaatttcccactaatattacaaaaaaaagatactttttgtaagtaaattttcaattttagaagagttttaggtttacagaaaagctgctcagagagtacagtgggttcccttctaccctggagccagtttccttgtgttaagctcatatgggtgacacatttacaactgatgaaccaatgttgatgcattattattaactgaaatccaaactttatttggatttcaagacttactctattaaaagaactttgcccactggaaacagagcactgtaactctggggaggtgggggaataaatatttaccttaacgggtatggattttgacctcaactgctcattttatctgaccatagcatttttctaccaattcaaaacatcacagggacagtagaccaaaggacagagcaccagtctggagaaacgtgttcatggagaagtatgtctcagccttaatcctgttctgccttagaaaaacgactcaacttttctttgatcctaagttctatttcctacaaaataaagaaatcaaattattaataggtgatttctgaaactctttacagcttgaaattctatgattctagaatatctgaaaacatcttaatgtttatgtggcaaaggtttaaatataaggttagaagattgtaattctggctttttttttttttttttttgagtctcactctgtcaccaggctggagtgcagtggtgcaacctcgactcacttcaatctctgcc

SEQ ID NO: 71312 - DNA, 625 bp, Homo sapiens
atgttgaagccctaaccaccaatgtaatggtatttggagatgggcctttggtaggtaattagggttatatgaggccatggggtggggccctcatgatggatctggtaagaaaagagaacagtgtctctctctacccaccaagtgaggacacaaagagaatgtggctgcgtgcaaaccaggaggagagccctcaccaggaaccaatctaactgacaccttgaacttggacttccaaacctccagtactgtgaaaaataaatgtatgtttttaaagtcatctagtctacactattttggtttgactaatacaacctgaaaatacattttcccctcaccctacctgagcaatatctaagttgcttaaggcacccagggcacatcagaggagaaatgtcccatgcacaaggcacagccatgcccaggagaagcagcccggcacagaagggagcacacaggctcrgggctctgccactcattcttcctgtgaccctgggcaagtcactgagggggtgcttcagctgacctgtttatagcgggcttaatagtgcttgccttgcctcctgtggaaggctgcagagaccggatgttaaagcactttgttatctgtagggtttatttgaatgag

SEQ ID NO: 71313 - DNA, 730 bp, Homo sapiens
ggaaacagggcttcagcgattgttctggggcgattccgagactcaggcagtgcatgctcccctgccgttgccgtgcctctcagctcttccctcagctccttgggtctatggtgctgccgctgtgctgtcttttttgagctggaggtcagcaggccttctccacataaggaactgttggtgcccatttattactcacctgggaaaggacctgatcattgccattggcagcatggttcaatggctgcaaatggatctgatggagagcgtgtggctttgggaggagtgtgccgccttccgcagtgagcagcgaggctgggaccggcagggatgaggtcccgggwggggatgcggcagcccttgagtgctggccggggaaggagagatgcccccagtgaggaggcgccgggctgagtggcccagactccttaggagaggcctggttttgggcttccttggtgattttccttcatgtctgcctcctgtaggcggagcaggccaggaggaagcagcgagaagaacgcctgcagcagctgcagcacagggtgcagctcaagtatgcagccaagcgcctggtgagcctcatttcttggggggcaggattatgtccaggcagggttgctctgcttggaggctcatgggtgcgtggtcagggccttggtctcccctccgtgaccctcactggctatgtgctcccgtacagaagctgggctgtgagtggttgaggcgtgga

SEQ ID NO: 71314 - DNA, 730 bp, Homo sapiens
ggaaacagggcttcagcgattgttctggggcgattccgagactcaggcagtgcatgctcccctgccgttgccgtgcctctcagctcttccctcagctccttgggtctatggtgctgccgctgtgctgtcttttttgagctggaggtcagcaggccttctccacataaggaactgttggtgcccatttattactcacctgggaaaggacctgatcattgccattggcagcatggttcaatggctgcaaatggatctgatggagagcgtgtggctttgggaggagtgtgccgccttccgcagtgagcagcgaggctgggaccggcagggatgaggtcccgggaggggatgcggcagcccttgagtgctggccggggaaggagagatgcccccagtgaggaggcgccgggctgagtggcccagactccttaggagaggcctggttttgggcttccttggtgattttccttcatgtctgcctcctgtaggcggagcaggccaggaggaagcagcgagaagaacgcctgcagcagctgcagcacagggtgcagctcaagtatgcagccaagcgcctggtgagcctcatttcttggggggcaggattatgtccaggcagggttgctctgcttggaggctcatgggtgcgtggtcagggccttggtctcccctccrtgaccctcactggctatgtgctcccgtacagaagctgggctgtgagtggttgaggcgtgga

SEQ ID NO: 71315 - DNA, 1179 bp, Homo sapiens
tccagaaatgagactgaggtggcctcagagagctccctcctgaaggggatgstgctgctgtcgtcctgcccggcgccttggactgcagtggccggggcctggggtggggatgagggtgcactgaccagcaccgcagcagctgggggaggttggggtgctgttaacgtgccatcttataggtaggaagtggaaatgggagaaagtgtggggtgcctagggaaggaggtgactgagcagggagcctggctgccatcctaacacccagctcactgggcttgagcgacttgagcctggtgccagggcagagtgggtgatgctggggcccaggctggcaccatacttgaggtctgccaggcaggtcaggtaggatggcacatcgaccttgggggacttggcccaggtctggcatgtagaagtagttctctgggacccatgggattaggtggggacatgtgagaggtgacagggacctgcaggagcagctagcgagacctcatgtgcaccctgcacagctgtggtggcataagggattcaatagagcctctcctagagaggagcctggcagggcccccagcccttgcacctgcccctccctctccaccttctgctccagctgctctctcactgatggacaaggggcactgaacagtttatctgtctctacccccagcatcacatgggtctttgttacagcaccagccagtccgtctgggaagacagacttcttgtatctacaggggcgacgtggaggtcaggcaagccggcacctgctgtcctgggaccatgttcctgacctacctctcccatgtcatcagggacactgcactgaggggtcccaggccactgagccaagccaccctggtcaccttctggctcccacctctgtgctgcacctgagtgtgatgccctaggaccccattaagtcaggctgagtcttgcacccacaccctgcgactccattttctgctacacaggatctctctgatgttgacgagcagcatggagacctggggagaccccccaagcgcctcctccatgtcatccttgggctccagcttggcgctcacacacacaggaaaggacttcagcttctcctgggagggctgggtggctgaggggtggtggatttcggagttggactagcagctggcctagaggctactggggaggagggagcag

SEQ ID NO: 71316 - DNA, 1179 bp, Homo sapiens
tccagaaatgagactgaggtggcctcagagagctccctcctgaaggggatgctgctgctgtygtcctgcccggcgccttggactgcagtggccggggcctggggtggggatgagggtgcactgaccagcaccgcagcagctgggggaggttggggtgctgttaacgtgccatcttataggtaggaagtggaaatgggagaaagtgtggggtgcctagggaaggaggtgactgagcagggagcctggctgccatcctaacacccagctcactgggcttgagcgacttgagcctggtgccagggcagagtgggtgatgctggggcccaggctggcaccatacttgaggtctgccaggcaggtcaggtaggatggcacatcgaccttgggggacttggcccaggtctggcatgtagaagtagttctctgggacccatgggattaggtggggacatgtgagaggtgacagggacctgcaggagcagctagcgagacctcatgtgcaccctgcacagctgtggtggcataagggattcaatagagcctctcctagagaggagcctggcagggcccccagcccttgcacctgcccctccctctccaccttctgctccagctgctctctcactgatggacaaggggcactgaacagtttatctgtctctacccccagcatcacatgggtctttgttacagcaccagccagtccgtctgggaagacagacttcttgtatctacaggggcgacgtggaggtcaggcaagccggcacctgctgtcctgggaccatgttcctgacctacctctcccatgtcatcagggacactgcactgaggggtcccaggccactgagccaagccaccctggtcaccttctggctcccacctctgtgctgcacctgagtgtgatgccctaggaccccattaagtcaggctgagtcttgcacccacaccctgcgactccattttctgctacacaggatctctctgatgttgacgagcagcatggagacctggggagaccccccaagcgcctcctccatgtcatccttgggctccagcttggcgctcacacacacaggaaaggacttcagcttctcctgggagggctgggtggctgaggggtggtggatttcggagttggactagcagctggcctagaggctactggggaggagggagcag

SEQ ID NO: 71317 - DNA, 1179 bp, Homo sapiens
tccagaaatgagactgaggtggcctcagagagctccctcctgaaggggatgctgctgctgtcgtcctgcccggcgccttggactgcagtggccggggcctggggtggggatgagggtgcactgaccagcaccgcagcagctgggggaggttggggtgctgttaacgtgccatcttataggtaggaagtggaaatgggagaaagtgtggggtgcctagggaaggaggtgactgagcagggagcctggctgccatcctaacacccagctcactgggcttgagmgacttgagcctggtgccagggcagagtgggtgatgctggggcccaggctggcaccatacttgaggtctgccaggcaggtcaggtaggatggcacatcgaccttgggggacttggcccaggtctggcatgtagaagtagttctctgggacccatgggattaggtggggacatgtgagaggtgacagggacctgcaggagcagctagcgagacctcatgtgcaccctgcacagctgtggtggcataagggattcaatagagcctctcctagagaggagcctggcagggcccccagcccttgcacctgcccctccctctccaccttctgctccagctgctctctcactgatggacaaggggcactgaacagtttatctgtctctacccccagcatcacatgggtctttgttacagcaccagccagtccgtctgggaagacagacttcttgtatctacaggggcgacgtggaggtcaggcaagccggcacctgctgtcctgggaccatgttcctgacctacctctcccatgtcatcagggacactgcactgaggggtcccaggccactgagccaagccaccctggtcaccttctggctcccacctctgtgctgcacctgagtgtgatgccctaggaccccattaagtcaggctgagtcttgcacccacaccctgcgactccattttctgctacacaggatctctctgatgttgacgagcagcatggagacctggggagaccccccaagcgcctcctccatgtcatccttgggctccagcttggcgctcacacacacaggaaaggacttcagcttctcctgggagggctgggtggctgaggggtggtggatttcggagttggactagcagctggcctagaggctactggggaggagggagcag

SEQ ID NO: 71318 - DNA, 1179 bp, Homo sapiens
tccagaaatgagactgaggtggcctcagagagctccctcctgaaggggatgctgctgctgtcgtcctgcccggcgccttggactgcagtggccggggcctggggtggggatgagggtgcactgaccagcaccgcagcagctgggggaggttggggtgctgttaacgtgccatcttataggtaggaagtggaaatgggagaaagtgtggggtgcctagggaaggaggtgactgagcagggagcctggctgccatcctaacacccagctcactgggcttgagcgacttgagcctggtgccagggcagagtgggtgatgctggggcccaggctggcaccatacttgaggtctgccaggcaggtcaggtaggatggcacatcgaccttgggggacttggcccaggtctggcatgtagaagtagttctctgggacccatgggattaggtggggacatgtgagaggtgacagggacctgcaggagcagctagcgagacctcatgtgcaccctgcacagctgtggtggcataagggattcaatagagcctctcctagagaggagcctggcagggcccccagcccttgcacctgcccctccctctccaccttctgctccagctgctctctcactgatggacaaggggcactgaacagtttatctgtctctacccccagcatcacatgggtctttgttacagcaccagccagtccgtctgggaagacagacttcttgtatctacaggggcgacgtggaggtcaggcaagccggcacctgctgtcctgggaccatgttcctgacctacctctcccatgtcatcagggacactgcactgaggggtcccaggccactgagccaagccaccctggtcaccttctggctcccacctctgtgctgcacctgagtgtgatgccctrggaccccattaagtcaggctgagtcttgcacccacaccctgcgactccattttctgctacacaggatctctctgatgttgacgagcagcatggagacctggggagaccccccaagcgcctcctccatgtcatccttgggctccagcttggcgctcacacacacaggaaaggacttcagcttctcctgggagggctgggtggctgaggggtggtggatttcggagttggactagcagctggcctagaggctactggggaggagggagcag

SEQ ID NO: 71319 - DNA, 1179 bp, Homo sapiens
tccagaaatgagactgaggtggcctcagagagctccctcctgaaggggatgctgctgctgtcgtcctgcccggcgccttggactgcagtggccggggcctggggtggggatgagggtgcactgaccagcaccgcagcagctgggggaggttggggtgctgttaacgtgccatcttataggtaggaagtggaaatgggagaaagtgtggggtgcctagggaaggaggtgactgagcagggagcctggctgccatcctaacacccagctcactgggcttgagcgacttgagcctggtgccagggcagagtgggtgatgctggggcccaggctggcaccatacttgaggtctgccaggcaggtcaggtaggatggcacatcgaccttgggggacttggcccaggtctggcatgtagaagtagttctctgggacccatgggattaggtggggacatgtgagaggtgacagggacctgcaggagcagctagcgagacctcatgtgcaccctgcacagctgtggtggcataagggattcaatagagcctctcctagagaggagcctggcagggcccccagcccttgcacctgcccctccctctccaccttctgctccagctgctctctcactgatggacaaggggcactgaacagtttatctgtctctacccccagcatcacatgggtctttgttacagcaccagccagtccgtctgggaagacagacttcttgtatctacaggggcgacgtggaggtcaggcaagccggcacctgctgtcctgggaccatgttcctgacctacctctcccatgtcatcagggacactgcactgaggggtcccaggccactgagccaagccaccctggtcaccttctggctcccacctctgtgctgcacctgagtgtgatgccctaggaccccattaagtcagkctgagtcttgcacccacaccctgcgactccattttctgctacacaggatctctctgatgttgacgagcagcatggagacctggggagaccccccaagcgcctcctccatgtcatccttgggctccagcttggcgctcacacacacaggaaaggacttcagcttctcctgggagggctgggtggctgaggggtggtggatttcggagttggactagcagctggcctagaggctactggggaggagggagcag

SEQ ID NO: 71320 - DNA, 1414 bp, Homo sapiens
acctcctctgctgacaggctctgtctctctgtttctgcattcatattaaacacacagaagcaacattttaccttttagaagacattaattgaacaattgatatgtaattttccttcttgcaaaaatagattataactattgtttagaatagaaaactagcagaaaaatttttggaattataataacatagacacatttttaaatagagaagacaaaacagtcacagagagaagataagagtaattccacagagtttgcctgggaggggaatgggtcttggaaggaagtctttagaagaaatattggtgccaaagagactgcttaaagaaagggctcaccaaggcttagaaatgagagagagcgagcaagagagagaatactccacccatctgcaaggaggcagatactaacttgccctgagaatcaagacagccttgtttgtacagaataagcacaartacttctcatgtaaagatattttctaagatgaatgttttaaaggtaaaatgttaagattgtatatgtctcaacagtttctaaacacaattaagcatgaagtgatcacaaactcatcaatttatgcccctctgtcataatcattatgagcatcccctttcactctaaaaaatggctccgactgcataataaattatatggttgtgctgatcaggaggagcatttggaaacaggacctttattgagttgttacgtcatagaattctatctttgccgttaaagattttgtaatctcaagcagaaaactctgaaataatattcagtgtagagggagggtgaatgtttctgtcttgtgttaaagaaatatgcaaggggtggcctcaagttctcatttctgacttccttttctggtaatgccggccggagcatctccaagaagtttaatcttcctttgtacagggttaagaaaggaacaaaggacaggatttttctaaacaatgatatgtgcaagtcattatttagaacatgacatatgtacaaacatatctttcacatgagcaaggcaaatacaactcacttggattttcctgctaaacgtatacaatgggctgccaaaagtttcagtctcaggaaattagaaaaaacaccaagggaggtctctgaccacttgattaagtctagaacctgccactaatagaaaattcagtggagagattcttatctttctgtggctgttgcaacaatgaggagacatatatgtaaatactaatgttgctacctaaccacagcattgaaacagaattctttccttatagccttggactgcttagtcatcctgagagagtacccctctctcaaatgctccctctacaacagtgagactgtgatgagaacaattgcagttcaacaatctgttgaaggagggagaagccaggagctccaatactgactggtgtat

SEQ ID NO: 71321 - DNA, 725 bp, Homo sapiens
ggttttaccatgttggtcaggctggtctcgaactcctgacctcaaatgatccacccacctccaccttccaaactgctgggattacaggtgtgagccactatgcctgactgattattttcataaccaagaaaagaaataaatacaattaatgctggtgcatggtattaaatctagtttttaaaaaattcacacataaacaaggcagaaccctataccctccatgataaatgcagtagcagtgtatgtgggtctgtggargttgaaagggacttggtagatgtcaagaagctagtggcagtcctgctgggcttttaaagggtctgaagaagtgacaggatgctgtggttgaatcctagcatgtattttagcatttgttcatttggagttgattatttcacgttgctttcatttgccattacctggaaagccaagggctctactctcatttccttgctgctctttctttgccttccttggtccgtgaagaagatggtccaggagaagctcattccatgcttgttaaccaggcacgcccctaagttccagtccctgagtcattcatgagtagcactgccaatgaactgacagccatgctgtgtccctccacatcccctaggtgactcgaagaagccttccaaaaagcatgtgaaaaggaagccctactctactaccaaggtaaagtagcctgtctttgcctaagatgtaaatgttgttttcttggatcc

SEQ ID NO: 71322 - DNA, 725 bp, Homo sapiens
ggttttaccatgttggtcaggctggtctcgaactcctgacctcaaatgatccacccacctccaccttccaaactgctgggattacaggtgtgagccactatgcctgactgattattttcataaccaagaaaagaaataaatacaattaatgctggtgcatggtattaaatctagtttttaaaaaattcacacataaacaaggcagaaccctataccctccatgataaatgcagtagcagtgtatgtgggtctgtggaggttgaaagggacttggtagatgtcaagaagstagtggcagtcctgctgggcttttaaagggtctgaagaagtgacaggatgctgtggttgaatcctagcatgtattttagcatttgttcatttggagttgattatttcacgttgctttcatttgccattacctggaaagccaagggctctactctcatttccttgctgctctttctttgccttccttggtccgtgaagaagatggtccaggagaagctcattccatgcttgttaaccaggcacgcccctaagttccagtccctgagtcattcatgagtagcactgccaatgaactgacagccatgctgtgtccctccacatcccctaggtgactcgaagaagccttccaaaaagcatgtgaaaaggaagccctactctactaccaaggtaaagtagcctgtctttgcctaagatgtaaatgttgttttcttggatcc

SEQ ID NO: 71323 - DNA, 725 bp, Homo sapiens
ggttttaccatgttggtcaggctggtctcgaactcctgacctcaaatgatccacccacctccaccttccaaactgctgggattacaggtgtgagccactatgcctgactgattattttcataaccaagaaaagaaataaatacaattaatgctggtgcatggtattaaatctagtttttaaaaaattcacacataaacaaggcagaaccctataccctccatgataaatgcagtagcagtgtatgtgggtctgtggaggttgaaagggacttggtagatgtcaagaagctagtggcagtcctgctgggcttttaaagggtctgaagaagtgacaggatgctgtggttgaatcctagcatgtattttagcatttgttcatttggagttgattatttcacgttgctttcatttgccattacctggaaagccaagggctctactctcatttccttgctgctctttctttgccttccttggtccgtgaagaagrtggtccaggagaagctcattccatgcttgttaaccaggcacgcccctaagttccagtccctgagtcattcatgagtagcactgccaatgaactgacagccatgctgtgtccctccacatcccctaggtgactcgaagaagccttccaaaaagcatgtgaaaaggaagccctactctactaccaaggtaaagtagcctgtctttgcctaagatgtaaatgttgttttcttggatcc

SEQ ID NO: 71324 - DNA, 744 bp, Homo sapiens
tatttatatgtgagatttaatatagataggtatatagattgttgatttcatatttcatgttccaagaagaggttctagatcaaatttctgtgttcagaatcaccagagaaatcaattaagattttggttcattttaaacattgcaatttttgaaagccaagataattccaaatctaattagggaaagctacattttacttmtttgtgtaagttattggtgatttatatgcagtatggaccatcctccccccagaaattattcttatattccaattgtgcattagttttagaaccattttaattttaaaaccataagaaaataattttatgtttgcctatgtccaggagctgaagaaatcagcgattactttaaaaaatatatggcaatgtcaaaataaatgccaagaatcatatttctaggaatgcaaaagtgcttctcatatactcatatattaggtttcacagtattggttgcttactatatttgtttttatttttattatatatcataattacacatttttatttgcatttgttgcttattgtagtaaaaaggtaaaaaaaaaatgaacttgttaatgattagcttttatttgactaaccagttgaccaattttgctctgttttcaaattgcatatgatggggtattatgctgaaactgctaatatattgggtatttattgatacttaggaatagtcagtatttataaatatttaagaatgtcatggtccttatgttttga

SEQ ID NO: 71325 - DNA, 744 bp, Homo sapiens
tatttatatgtgagatttaatatagataggtatatagattgttgatttcatatttcatgttccaagaagaggttctagatcaaatttctgtgttcagaatcaccagagaaatcaattaagattttggttcattttaaacattgcaatttttgaaagccaagataattccaaatctaattagggaaagctacattttacttctttgtgtaagttattggtgatttatatgcagtatggaccatcctccccccagaaattattcttatattccaattgtgcattagttttagaaccattttaattttaaaaccataagmaaataattttatgtttgcctatgtccaggagctgaagaaatcagcgattactttaaaaaatatatggcaatgtcaaaataaatgccaagaatcatatttctaggaatgcaaaagtgcttctcatatactcatatattaggtttcacagtattggttgcttactatatttgtttttatttttattatatatcataattacacatttttatttgcatttgttgcttattgtagtaaaaaggtaaaaaaaaaatgaacttgttaatgattagcttttatttgactaaccagttgaccaattttgctctgttttcaaattgcatatgatggggtattatgctgaaactgctaatatattgggtatttattgatacttaggaatagtcagtatttataaatatttaagaatgtcatggtccttatgttttga

SEQ ID NO: 71326 - DNA, 1829 bp, Homo sapiens
atgcatatattataaattatattatatawgcatatattataaattatattatacgtaaatatataattataaattatattatacgtaaatatataattataaattatattatacgtaaatatataattataaattatattatacgtaaatatataattataaattatattatatgtaaatatataattataaattatattatatgtaaatatataattataaattatatataaatatataattatattatatataatatataattataaattatatataaatatataattatattatatataattataattataattatatataaatatataattataattatataatagattgtctatccatttgcttcacatcacaaagattcctttgatctttctttgtgctgcctcacagccaagcttctcgtagcggcctcggacactcgtctcctccatgcccgaccacctctcatgtcttcaggacctgagtttggattgtggtggccatccggaccccctcagagactaagtcccctcatgtcttctcaagtccttttcctgggcttttcaccgcacttgacactgtgggctgctgacgctcccttctccccggcctccctgacctaacaacctctgctttctgactcgagccgactgtctccgtcctccttcctccctccctactccgccagcatcagttgcgcttcactcccagcactcgcacacacacctccagctgacacgtctatgtggatgactccccaaatgctgacagttcctgatattcagtctcagtgattggttacctttcccagggtcttccgctaatgccaccaacccagtttgtaacacataaaccaggcatctatctgctagcattgcttcctaccacgccttcattttctgtttttaagaagcaatactctccttgcagcgactcaagcttgaaaatgtagcttcatctctgcctccacctctatagcacccggtgctctcagctttccaggagctgccatttctgggtgtgtccctggggtgattttctatctccgccctctggatttgttttctgaaagtctccatatgacttcatggccctggcccgggacaatcttccagtttcttctgcagtcattctggtcccaatatgaagctcatgctaaacacaccagaatcggcatccactgctccctaaacacacatgcatcttcatacctctgctcattgtagtctttctctttggaatggccttcttcccatttctcctgtgacccaaatgtgttcttccttcaaggtccctggggtacttaatgccagtcagtaaaggagactgaaaaaatgcacccagagatgtaagactataacggccatgggagaacagcatttaaagaaggatataatcaaaagcaatgatatttaggggaaaatgaaaataaggatttagaaaagtccactgatgactcttctctaaggagctgtctgttcttgcgatttccaattctggtctcccttctctcttagatccactccagtcgggcttctacatcactccacggaaactgctcctcagggtaacagtggtccccatgtgtgaaaccccatggtcaattcccagacctcttcctactccaaaacccactcctcatcccagttgatggtaaccccatgcttccaagtgagccaataattttggtgccatcttagacacctttctctcaaatccccaagcccgtgggctctacccttcagaatccccacttctcatactctctgcttccaccacagtgctgcaagccatcattgccatctgattcttggattctttttttt

SEQ ID NO: 71327 - DNA, 1829 bp, Homo sapiens
atgcatatattataaattatattatatatrcatatattataaattatattatacgtaaatatataattataaattatattatacgtaaatatataattataaattatattatacgtaaatatataattataaattatattatacgtaaatatataattataaattatattatatgtaaatatataattataaattatattatatgtaaatatataattataaattatatataaatatataattatattatatataatatataattataaattatatataaatatataattatattatatataattataattataattatatataaatatataattataattatataatagattgtctatccatttgcttcacatcacaaagattcctttgatctttctttgtgctgcctcacagccaagcttctcgtagcggcctcggacactcgtctcctccatgcccgaccacctctcatgtcttcaggacctgagtttggattgtggtggccatccggaccccctcagagactaagtcccctcatgtcttctcaagtccttttcctgggcttttcaccgcacttgacactgtgggctgctgacgctcccttctccccggcctccctgacctaacaacctctgctttctgactcgagccgactgtctccgtcctccttcctccctccctactccgccagcatcagttgcgcttcactcccagcactcgcacacacacctccagctgacacgtctatgtggatgactccccaaatgctgacagttcctgatattcagtctcagtgattggttacctttcccagggtcttccgctaatgccaccaacccagtttgtaacacataaaccaggcatctatctgctagcattgcttcctaccacgccttcattttctgtttttaagaagcaatactctccttgcagcgactcaagcttgaaaatgtagcttcatctctgcctccacctctatagcacccggtgctctcagctttccaggagctgccatttctgggtgtgtccctggggtgattttctatctccgccctctggatttgttttctgaaagtctccatatgacttcatggccctggcccgggacaatcttccagtttcttctgcagtcattctggtcccaatatgaagctcatgctaaacacaccagaatcggcatccactgctccctaaacacacatgcatcttcatacctctgctcattgtagtctttctctttggaatggccttcttcccatttctcctgtgacccaaatgtgttcttccttcaaggtccctggggtacttaatgccagtcagtaaaggagactgaaaaaatgcacccagagatgtaagactataacggccatgggagaacagcatttaaagaaggatataatcaaaagcaatgatatttaggggaaaatgaaaataaggatttagaaaagtccactgatgactcttctctaaggagctgtctgttcttgcgatttccaattctggtctcccttctctcttagatccactccagtcgggcttctacatcactccacggaaactgctcctcagggtaacagtggtccccatgtgtgaaaccccatggtcaattcccagacctcttcctactccaaaacccactcctcatcccagttgatggtaaccccatgcttccaagtgagccaataattttggtgccatcttagacacctttctctcaaatccccaagcccgtgggctctacccttcagaatccccacttctcatactctctgcttccaccacagtgctgcaagccatcattgccatctgattcttggattctttttttt

SEQ ID NO: 71328 - DNA, 1829 bp, Homo sapiens
atgcatatattataaattatattatatatgyatatattataaattatattatacgtaaatatataattataaattatattatacgtaaatatataattataaattatattatacgtaaatatataattataaattatattatacgtaaatatataattataaattatattatatgtaaatatataattataaattatattatatgtaaatatataattataaattatatataaatatataattatattatatataatatataattataaattatatataaatatataattatattatatataattataattataattatatataaatatataattataattatataatagattgtctatccatttgcttcacatcacaaagattcctttgatctttctttgtgctgcctcacagccaagcttctcgtagcggcctcggacactcgtctcctccatgcccgaccacctctcatgtcttcaggacctgagtttggattgtggtggccatccggaccccctcagagactaagtcccctcatgtcttctcaagtccttttcctgggcttttcaccgcacttgacactgtgggctgctgacgctcccttctccccggcctccctgacctaacaacctctgctttctgactcgagccgactgtctccgtcctccttcctccctccctactccgccagcatcagttgcgcttcactcccagcactcgcacacacacctccagctgacacgtctatgtggatgactccccaaatgctgacagttcctgatattcagtctcagtgattggttacctttcccagggtcttccgctaatgccaccaacccagtttgtaacacataaaccaggcatctatctgctagcattgcttcctaccacgccttcattttctgtttttaagaagcaatactctccttgcagcgactcaagcttgaaaatgtagcttcatctctgcctccacctctatagcacccggtgctctcagctttccaggagctgccatttctgggtgtgtccctggggtgattttctatctccgccctctggatttgttttctgaaagtctccatatgacttcatggccctggcccgggacaatcttccagtttcttctgcagtcattctggtcccaatatgaagctcatgctaaacacaccagaatcggcatccactgctccctaaacacacatgcatcttcatacctctgctcattgtagtctttctctttggaatggccttcttcccatttctcctgtgacccaaatgtgttcttccttcaaggtccctggggtacttaatgccagtcagtaaaggagactgaaaaaatgcacccagagatgtaagactataacggccatgggagaacagcatttaaagaaggatataatcaaaagcaatgatatttaggggaaaatgaaaataaggatttagaaaagtccactgatgactcttctctaaggagctgtctgttcttgcgatttccaattctggtctcccttctctcttagatccactccagtcgggcttctacatcactccacggaaactgctcctcagggtaacagtggtccccatgtgtgaaaccccatggtcaattcccagacctcttcctactccaaaacccactcctcatcccagttgatggtaaccccatgcttccaagtgagccaataattttggtgccatcttagacacctttctctcaaatccccaagcccgtgggctctacccttcagaatccccacttctcatactctctgcttccaccacagtgctgcaagccatcattgccatctgattcttggattctttttttt

SEQ ID NO: 71329 - DNA, 1829 bp, Homo sapiens
atgcatatattataaattatattatatatgcatatattataaattatattatacgtaaatatataattataaattatattatacgtaaatatataattataaattatattatacgtaaatatataattataaattatattataygtaaatatataattataaattatattatatgtaaatatataattataaattatattatatgtaaatatataattataaattatatataaatatataattatattatatataatatataattataaattatatataaatatataattatattatatataattataattataattatatataaatatataattataattatataatagattgtctatccatttgcttcacatcacaaagattcctttgatctttctttgtgctgcctcacagccaagcttctcgtagcggcctcggacactcgtctcctccatgcccgaccacctctcatgtcttcaggacctgagtttggattgtggtggccatccggaccccctcagagactaagtcccctcatgtcttctcaagtccttttcctgggcttttcaccgcacttgacactgtgggctgctgacgctcccttctccccggcctccctgacctaacaacctctgctttctgactcgagccgactgtctccgtcctccttcctccctccctactccgccagcatcagttgcgcttcactcccagcactcgcacacacacctccagctgacacgtctatgtggatgactccccaaatgctgacagttcctgatattcagtctcagtgattggttacctttcccagggtcttccgctaatgccaccaacccagtttgtaacacataaaccaggcatctatctgctagcattgcttcctaccacgccttcattttctgtttttaagaagcaatactctccttgcagcgactcaagcttgaaaatgtagcttcatctctgcctccacctctatagcacccggtgctctcagctttccaggagctgccatttctgggtgtgtccctggggtgattttctatctccgccctctggatttgttttctgaaagtctccatatgacttcatggccctggcccgggacaatcttccagtttcttctgcagtcattctggtcccaatatgaagctcatgctaaacacaccagaatcggcatccactgctccctaaacacacatgcatcttcatacctctgctcattgtagtctttctctttggaatggccttcttcccatttctcctgtgacccaaatgtgttcttccttcaaggtccctggggtacttaatgccagtcagtaaaggagactgaaaaaatgcacccagagatgtaagactataacggccatgggagaacagcatttaaagaaggatataatcaaaagcaatgatatttaggggaaaatgaaaataaggatttagaaaagtccactgatgactcttctctaaggagctgtctgttcttgcgatttccaattctggtctcccttctctcttagatccactccagtcgggcttctacatcactccacggaaactgctcctcagggtaacagtggtccccatgtgtgaaaccccatggtcaattcccagacctcttcctactccaaaacccactcctcatcccagttgatggtaaccccatgcttccaagtgagccaataattttggtgccatcttagacacctttctctcaaatccccaagcccgtgggctctacccttcagaatccccacttctcatactctctgcttccaccacagtgctgcaagccatcattgccatctgattcttggattctttttttt

SEQ ID NO: 71330 - DNA, 1829 bp, Homo sapiens
atgcatatattataaattatattatatatgcatatattataaattatattatacgtaaatatataattataaattatattatacgtaaatatataattataaattatattatacgtaaatatataattataaattatattatacgtaaatatataattataaattatattatatgtaaatatataattataaattatattatatrtaaatatataattataaattatatataaatatataattatattatatataatatataattataaattatatataaatatataattatattatatataattataattataattatatataaatatataattataattatataatagattgtctatccatttgcttcacatcacaaagattcctttgatctttctttgtgctgcctcacagccaagcttctcgtagcggcctcggacactcgtctcctccatgcccgaccacctctcatgtcttcaggacctgagtttggattgtggtggccatccggaccccctcagagactaagtcccctcatgtcttctcaagtccttttcctgggcttttcaccgcacttgacactgtgggctgctgacgctcccttctccccggcctccctgacctaacaacctctgctttctgactcgagccgactgtctccgtcctccttcctccctccctactccgccagcatcagttgcgcttcactcccagcactcgcacacacacctccagctgacacgtctatgtggatgactccccaaatgctgacagttcctgatattcagtctcagtgattggttacctttcccagggtcttccgctaatgccaccaacccagtttgtaacacataaaccaggcatctatctgctagcattgcttcctaccacgccttcattttctgtttttaagaagcaatactctccttgcagcgactcaagcttgaaaatgtagcttcatctctgcctccacctctatagcacccggtgctctcagctttccaggagctgccatttctgggtgtgtccctggggtgattttctatctccgccctctggatttgttttctgaaagtctccatatgacttcatggccctggcccgggacaatcttccagtttcttctgcagtcattctggtcccaatatgaagctcatgctaaacacaccagaatcggcatccactgctccctaaacacacatgcatcttcatacctctgctcattgtagtctttctctttggaatggccttcttcccatttctcctgtgacccaaatgtgttcttccttcaaggtccctggggtacttaatgccagtcagtaaaggagactgaaaaaatgcacccagagatgtaagactataacggccatgggagaacagcatttaaagaaggatataatcaaaagcaatgatatttaggggaaaatgaaaataaggatttagaaaagtccactgatgactcttctctaaggagctgtctgttcttgcgatttccaattctggtctcccttctctcttagatccactccagtcgggcttctacatcactccacggaaactgctcctcagggtaacagtggtccccatgtgtgaaaccccatggtcaattcccagacctcttcctactccaaaacccactcctcatcccagttgatggtaaccccatgcttccaagtgagccaataattttggtgccatcttagacacctttctctcaaatccccaagcccgtgggctctacccttcagaatccccacttctcatactctctgcttccaccacagtgctgcaagccatcattgccatctgattcttggattctttttttt

SEQ ID NO: 71331 - DNA, 852 bp, Homo sapiens
ccggctttggtcaatcaaggaataaataacatgcacaattttactgaatgtgaatgtctggtattctgaaaagtcctcctggtgaagatggctgataagtgcctttgtagttgagtggagtctgaacaaccctgtcccgctgggcattcatgggaaagcactgggctggggttaggaaaactagacctggtcttagacatatcatggaggtgaccttgggcaagtcaggtatttctttcagtcactttccttgttctgaagtgggaactattctgtcactgccatctgcattgggagaaatgatatatgtgagaacactggaaaaaatatgtagagaaggcatttaagtgactatattttgattgaattaaaattttaaaataaattgtttttatgtggaaggtccatttagtaggaacatatctcaggaattatagtgttaactagtaaacaaaatgactcaaaatacaaatattcacwtgaaatataattgttcaggaatgtgtgctttgcaagattggaaatcatcccatttcaggagcttttaaacatacaactttattgtgtaaggggaaaataatacatgatcatgttaaggaagtggacagtgtggaaaactgcaaagaagaaactcaaagctgcctggagctctgctccccgaaggtggccagcttgagcagtttgcacactcactactacaacaccttgctcgtggatgtgctttacatccatggaaatgtgctctgcatgctgctctgtaatctccctttttccccactaaactaggtgttgagggaccagtcctgaatttcagtaactcctgttcccaggctgcctccttattgtatagag

SEQ ID NO: 71332 - DNA, 852 bp, Homo sapiens
ccggctttggtcaatcaaggaataaataacatgcacaattttactgaatgtgaatgtctggtattctgaaaagtcctcctggtgaagatggctgataagtgcctttgtagttgagtggagtctgaacaaccctgtcccgctgggcattcatgggaaagcactgggctggggttaggaaaactagacctggtcttagacatatcatggaggtgaccttgggcaagtcaggtatttctttcagtcactttccttgttctgaagtgggaactattctgtcactgccatctgcattgggagaaatgatatatgtgagaacactggaaaaaatatgtagagaaggcatttaagtgactatattttgattgaattaaaattttaaaataaattgtttttatgtggaaggtccatttagtaggaacatatctcaggaattatagtgttaactagtaaacaaaatgactcaaaatacaaatattcacatgaaatataattgttcaggaatgtgtgctttgcaagattggaaatcatcccatttcaggagcttttaaacatacaactttattgtgtaaggggaaaataatacatgatcatgttaaggaagtggacagtgtggaaaactgcaaagaagaaactcaaagctgcctggagctctgctccccgaaggtggccagcttgagcagtttgcacactcactactacaacaccttgctcgyggatgtgctttacatccatggaaatgtgctctgcatgctgctctgtaatctccctttttccccactaaactaggtgttgagggaccagtcctgaatttcagtaactcctgttcccaggctgcctccttattgtatagag

SEQ ID NO: 71333 - DNA, 1192 bp, Homo sapiens
atattttgccatttaatatttttagatggaggctccacaaagagtaattcctgtaattcttcagaactgcctgtcatattcattcatggctagacttgctccagcctggaatagaactggtcatctcttgatacaaggtaactttatctttttagtcattggggctttctgaactagattacgtctgttatgtgtgtattagtctattctcatgctgctaataaagacatactggagactggaaaatttataaaggaaaggtttagtggattcacagttccacatggctggagaggcctcacaatcatggcggaagatgaaggaaaagcaaagggacatcttacttggcagcaggcaagagagcatgctcatgggaactcccctttataaaaccatcagatctcatgagacttattcaccatcatgaaaacagcacatggaagccccacccccatgattcagtgatctcccacygggtccttcccacaacatgtgggaattatgggagctacaattcaagattcagatggggacacagccaaaccatatgaatgtgcatctgttcttaattttaagatatacaatttttagaaaataactcttaaaactgacccaattaagcaatctcaagcaagcccacaacaacataaatgtcatttctttactttgggattatatacagaggcctgatgtttctttaaaaaaatcagtatgtaatacttgatacttaggaataaatgtaagttacaaagcagtatgataaaatgagcacaatactgttaaaactgagaagctatcctgaatttttcttgaagtctgactgttttctaaatattttatagcaggaaatagacatttgggggaagaattgggtatttccattcttttaattgaagagataccttttgaatgattatattttttcagctgtcatcaggtattactttatataacaactgcattttaaagtattttctttagctttgataatctcacatcaagcatagttataaatatcaagcatgattatttatgagttgtaataacatggcatattctatgaattttttaaggaagagattttctttctcagatgggaaaacaaagtgctgttggtaagtaaaaatgcataagtcaatagataaaacaatataattcatagttgctaaagaaaacagtatcatatgctggg

SEQ ID NO: 71334 - DNA, 919 bp, Homo sapiens
acttgtcagatgttgatgatattgtttgatcattgggaaataagagcttagaaaagaaggcaaaagaatcacttattctggagaagagaaagttgaagtgtcacccgaggggatgttcagttcatgaaatacttccctgtactccaggtccctcatgttatattgatactgttgttttgcttgtctgtgtctcaaccagaacgagagtggacgggggcagggactgtgtctaccaagatcttattctcctctgtagctcctgtgcttagcacagagtagacgcctaaggaatgttgaattgagaatgcaccatagaattttagagcccaaagtagcctcggaaatcaccaatttcaatggttctaaacgaatagatgtgcttgggttgggggtttggkcaatggtggttggggggagaataaggaaaatgagatgtatctgggagggatttttttgaaatgcaccactcccaaacccacctgccactctagccccgacaacttatgtggtacgtcaggacccagtgagagtgaacattgtattttggaaagattaactggtaaccccctccccaaccatgctgagaaacactgcccaatacttacccacccaactatctggcaatccttcctgcttccagggttcagctcagcgcctggtgcaaaacaggtgccatcaggagttgctgagtgaatgactgtcacaagagagactgtttagaagaagtaataataatttacccaatgccacacacagccaggtcataaaggattatcatatatgcaaaactcttagaacaatggcatttagtaaatgctatccaagtgtgagctgtcattagaattattattgcagaggaaatgctgaccaacgtatttcaacacctgcctctccatccctaaaatcagggaaaagctga

SEQ ID NO: 71335 - DNA, 919 bp, Homo sapiens
acttgtcagatgttgatgatattgtttgatcattgggaaataagagcttagaaaagaaggcaaaagaatcacttattctggagaagagaaagttgaagtgtcacccgaggggatgttcagttcatgaaatacttccctgtactccaggtccctcatgttatattgatactgttgttttgcttgtctgtgtctcaaccagaacgagagtggacgggggcagggactgtgtctaccaagatcttattctcctctgtagctcctgtgcttagcacagagtagacgcctaaggaatgttgaattgagaatgcaccatagaattttagagcccaaagtagcctcggaaatcaccaatttcaatggttctaaacgaatagatgtgcttgggttgggggtttggtcartggtggttggggggagaataaggaaaatgagatgtatctgggagggatttttttgaaatgcaccactcccaaacccacctgccactctagccccgacaacttatgtggtacgtcaggacccagtgagagtgaacattgtattttggaaagattaactggtaaccccctccccaaccatgctgagaaacactgcccaatacttacccacccaactatctggcaatccttcctgcttccagggttcagctcagcgcctggtgcaaaacaggtgccatcaggagttgctgagtgaatgactgtcacaagagagactgtttagaagaagtaataataatttacccaatgccacacacagccaggtcataaaggattatcatatatgcaaaactcttagaacaatggcatttagtaaatgctatccaagtgtgagctgtcattagaattattattgcagaggaaatgctgaccaacgtatttcaacacctgcctctccatccctaaaatcagggaaaagctga

SEQ ID NO: 71336 - DNA, 1173 bp, Homo sapiens
ataaataaacacaacagtggtaccccaaaatgtgattaacagtgttattaaatgctattagctctctgtgagatatgtgttttaattttcttaaagaacactcttgattttataatttttttaaccaaaaaattaaaaataaaagactcagtgatgtttgtacaggtgggaaaggatgaaaggagcttctgtttgtagagcaggcagacaggtggatgtgtgagactctttagatgagtctctagcggaggtcaggaagacaccacttctccatcagtccttcacacgcccagatgcagggtgggagagttgcgattaggacttattggccactcctgagtcaggtgctttgcctcttaactcactgaatccttagtatgttcctgcccctgaagaacataattatctccaggatgggagcaggagttataggaaggcatattctagcttgctgtgagggcaacaacctattaaattggattttttaaaaaattatactttaaattctgggatacatgtgcagaatgtgcaggtttgttatataagtatacatgtgccatggtggtttgctgcacccatcaacctgtcatctacattaggtgtttctcctaatgctatccctcccctagccacccaccccctgacaggctccagtgtgtgatgttcacctccctgtgtccatgtgttaaagtcatgcaccggccagtccaacatgttcattttcaaaggtgatataaaaattttggctcaatgactttaaatgctaccactcacctcaagggtagtaagaggccaggttgtgtaaccattggtggagaggacttttggagagaactataagtgtgctccaaagtcccccaaccccaacacaaaggggagagagtgggggcagtgatgtaccaaagggtggggcaggaagagtctgtcccagcagggggaggtactttgtcrcagacactgtttagtattgccagagcatgttgatcataaaaattagaccagcatttagctggtttcactatgatttaaaaattctctgcaacactgcacctcctcactgcctgtacccagggcagaatgctcccatcacccctgaaccttaggatgctgctggagggatgaatctttgtcttccataagtcaagagagaaatgctattttctttcttctcca

SEQ ID NO: 71337 - DNA, 1173 bp, Homo sapiens
ataaataaacacaacagtggtaccccaaaatgtgattaacagtgttattaaatgctattagctctctgtgagatatgtgttttaattttcttaaagaacactcttgattttataatttttttaaccaaaaaattaaaaataaaagactcagtgatgtttgtacaggtgggaaaggatgaaaggagcttctgtttgtagagcaggcagacaggtggatgtgtgagactctttagatgagtctctagcggaggtcaggaagacaccacttctccatcagtccttcacacgcccagatgcagggtgggagagttgcgattaggacttattggccactcctgagtcaggtgctttgcctcttaactcactgaatccttagtatgttcctgcccctgaagaacataattatctccaggatgggagcaggagttataggaaggcatattctagcttgctgtgagggcaacaacctattaaattggattttttaaaaaattatactttaaattctgggatacatgtgcagaatgtgcaggtttgttatataagtatacatgtgccatggtggtttgctgcacccatcaacctgtcatctacattaggtgtttctcctaatgctatccctcccctagccacccaccccctgacaggctccagtgtgtgatgttcacctccctgtgtccatgtgttaaagtcatgcaccggccagtccaacatgttcattttcaaaggtgatataaaaattttggctcaatgactttaaatgctaccactcacctcaagggtagtaagaggccaggttgtgtaaccattggtggagaggacttttggagagaactataagtgtgctccaaagtcccccaaccccaacacaaaggggagagagtgggggcagtgatgtaccaaagggtggggcaggaagagtctgtcccagcagggggaggtactttgtcacagacactgtttagtattgccagagcatgytgatcataaaaattagaccagcatttagctggtttcactatgatttaaaaattctctgcaacactgcacctcctcactgcctgtacccagggcagaatgctcccatcacccctgaaccttaggatgctgctggagggatgaatctttgtcttccataagtcaagagagaaatgctattttctttcttctcca

SEQ ID NO: 71338 - DNA, 594 bp, Homo sapiens
tacctccagggaactaaatccacctaatgacaaataatggtagctatagcatttgtacagccatttccaattcacaaagtgcttttttcacagacattagctccttgattccccaccacaagtctatgcggtaggtgacactctccccacttctgcagggsagtaaaaggaaacccggagaggttaagagacacatccaagggtataactagcaagtggcagcatgtctttgtcaacaggagtgcaacgaagtcagaagtgaggtctaaaatgcagtcttgacttagcccaatagcccatcaaagacagcctggccccaggccctctccagtcctttgcttggatctggacaaactcagacatttcatcctaaagccccatttttgccagtggcaggagcccaaccatcgtctctgctgttagcaactgctccaagtgtgctcagaagtcacctgattggtcagaagcaaccccaccccgctcaggactggagctgaggccctgcaggagaatctagtgcacgtgtgccctccctcactgaaaccaaggcccagcacatcacgcatgagcaggatgtgcagttcctgcagctgg

SEQ ID NO: 71339 - DNA, 1009 bp, Homo sapiens
tggagctaaataaaattttctcccaagaaaaaatggttagaagcagcgtgtcccctgcccaggcctgaaatctcttcattccctttccctttccccagggttcccaaaggtcttctgcattgcccacctgctgctctctttcctgccctgtttgttttgatggcattaaaaggcctgcctgcctactttacaaggaccctcatttctttacccatcatgttttgatatattttttcttgctttttcttgaggtttgcaatcaagagccctttaactgaaatcctgggctgcctgcagcagctgtggggttcccagccaactgccttgtcctctgagggataaattccctttgaccgtgccacttgtgaaaacacagagcaagtgtagagtattttacatataatttagaaagagagaggacttatcggtgggtggtaggaaaggacagaagatggattaatattttttctttatcacttggcatgttaaacttaattatatttcttgaaagacctctaaacagttataattagaaattatgataatagctgcrgttgccttacacatgttcattttactgcttgcttctttgtgaatgtgggctgtgattaataaataaccaccaacatcattaggacaagacctctccttgcctgctgggacccctttgactttggatggacagtgtcaaggatcaggagcacctagactagccccatgagccatggccttcataggctagatggtcattggaaatgaagttgttggcaccgacagtcacagttatgaaaataagaatttggatctcagatttttctgctccctcttctcctgtgtattagtccgttcttatgctgctaataaagacatacccgagactgagtaatttataaaggaaagaggtttaatggactcacagttccacttggctagggaggcctcacaatcacgacggaagatgaaggaagagcaaagggatgtcttacacggaggcaggctagagagaatt

SEQ ID NO: 71340 - DNA, 1173 bp, Homo sapiens
tgtacgtgcatgtgtgtgtggtccacgtgtgcgattcttccctctgagcctctagcggcccatgccagctggtgactccctcagccaaggcatccccagccaacccactggcatctgggtggggggatcgacagtttctgtggctgtcccaccagttccagagcggcctgggaagtcccagccctttcttctcagactttcattaagggtccagggtccccaggggcagactcttgtcccctccccgcagactcctcctgtgtgaatgaatgtggaagggaaggcagaggtggcgcctgcaaaccatccgcactgggccactgtgccctctagttatgatcatgggcgatagtgatcatcccatgtagatgctgagaaattcttagaatgagcatttgttggaaatctgcttgtgtgggtggcaaagacatgagaggtctagggaagagcagattttcagacaaggcactttagggagggggaggtacagccctttggcccagaatgcccattgatggagagggcgggtcaggggagagggtatcttaaccctcaagtgccagcgtagtgatgaggaaaggctggcctggtgggccccccatggactaagcatccttaggcacttcacctgactcctctgagactgtggtgcctccttcacccctgacctgcctgctttctacctagcttctcccggtgcccacttgagcccagctgaggcctcaggcccttgagtggcctgggggtggtagagggacttggcccgtgagatctggccacggctgctccatttcgcagaagccactctcacgggctgccaccgaagcacrggcttccccctttccgggaacctgcctcctgccagcttcctctcctgtgacatcacttctcttgtgattcgccccaccatttccactcactcccagccagtggggacaggcagaaccatgggttccctaggccagctggagccacccccgacccggcctggcctggctatggggtggcccttgtgttctccggagcgctagtggccagcacaggcggcagccacagacacttagtaggaacttcagtgtggctgacctgagctgggctggccgtgcaggagagtgcaagctgcttcctccatgagctcacagcctgacgtcagcaagtgcttcaaagaagtca

SEQ ID NO: 71341 - DNA, 706 bp, Homo sapiens
tgatgccagagtctgattttaaaaacaaagctatctcacgatttcaaatggagaaaacagggagggagaataaaatcacagcaagcttaattaggtgtgagcatcatgacctcaggagaacctgggccagagaagtcaggagtattaatgtttaccatggaactggtaatttcatttaaaccaagcagcatcagctgtcacattaaattaatattattgaaattttatagcatttatatttatttgtatttaatttataaatgggtgttggttgtgtaagtgctataagtataaatggattgtagctagttttatgtttgtgtatatatatgtgtgtgtatatatacatatatgtgtgtgtatatatacatatacacatgtgtgtgtgtatacatatacgcacacatgtgtatatacatatacacacacatgtgtgtgtatatatatatacatatgtgtgygtatatgtatacacacacacatatgtatatatatgtaatgctaacaaaaaataatttgaatgattgccaggggtccccaagaatgagctttttcttttaaaattggcctgtactttctttgagaagccttgccacgggtagaggagctattcagtgcctattgagtcaaaatttggccttaatataaatggggaggttttcccttgccatgtttggtgcctgctaggtatagtcacttgctctaa

SEQ ID NO: 71342 - DNA, 1394 bp, Homo sapiens
caagtgacttgcccacgatcacacagctaataagtgataaagttagaactcaggaccagatttgtctccagagcccatggtcttaactcctatgctgtattgattatggctttaagagtattagtataccttctaattaaataggacccatgtttggaccaataaagtgtaagcgcagtgttgtaaaagttattttccatgttatacaagagttctatttttcagttttttcacttgaaataattgtattccttggagactgttaataaatttcgagtctcaccttaaagaggaattgatgtatattgaggcctactcaagggtcagtttgctttccgtttctttcccttttacttttatcctaagtggattcacccaaagtggaaaatgtgaggttggagtgtaaaggttggaactatgaaccagttgggcttcaatactttcacctcaaagtattctgttcttcacaatattataattccacagtgcatgtgcttgttgcacacgtctccaggarttgaaatacttgatattagagccagtggtccaaatgaaaatgaccagaagaggccaaatgtataatgttctcaatcccttatcaaaaatagatgggaataaacacacatatatttaagtacaataaaatgtgactaatatgtttttttctaaaacccagtcccatataggtgtcggatccacagaagtaatttaagaatggtttatttgaagatctctttgtataatttatagatttctcagtgtgattaagaaatgaagttattacatttttttctctaattagtaatgcacgtatgcctccttttaatgatattatgatgtttactactcatagggccattctttcttgagtatagccatcactttctgttgaagaattgatttcactctttgtttaaatgtacatacttgttgctatatgaaatatatgactgaatatcattaaagatttagcaagaatgtaggtgaatttggtgaggtttgttcagcttttagagtagccctgtataagaatacttatatttagaaggttgtttgcgcttcagtcaaactagcaaatgaggcatggggcaaataactcattctcatgcacatgtttctaaaacagttcttactaatgtttgagataaattaaaataaacaccaacaagaacatgaaaagagactaagaacaatgttaatgcggcaacttaaacaaatttggttttccaaatgaccttccatctttcacaacttttaacagcatgcaagattgctatccttagtgccagatactatcaatctggtgtggaaaacttaaaacttttttctaaatgtctttaaagctgaggtggagaagaatgactctctgtcactttcagaagggtctaaggttg

SEQ ID NO: 71343 - DNA, 524 bp, Homo sapiens
cctgacctcccctcatcggccccatccattttgctctgctcaggttttcttcaccacatttattgctacctggcatattacactgctctttttttatctggttattgtctgtctcccccaatttgaatgtaggctccataacaccaggggctggctgctctgtccattgtcatcctcatctctagagttgtgcccagcctgaggacgtgaagatgctcaacaaagagttgctgaaggaaagaatgaatgactgtcagcggggatgacacagtgggaggctgtgatccactttgccattcacttttgaaaagttctccctagaaagtgtaaaactgtttacaagccaagcattcaggacaagagtcttaccctatcaacatagaagcaggagcagtgatttgtatggaagttgcattggtgactgagctgagagagtctgtatttacaacaaagaactttacagttggattcacagctcctgcctaggaaaaaayaatcacagaattggtattgacaaaaaaaaa

SEQ ID NO: 71344 - DNA, 780 bp, Homo sapiens
aagggctgtttctagcttgaattggaggaaaaacaatttaaaaaacacactcttagaatgtgtctaagttattgaccacttagaaagttgtacaggaggccccatagaaaaatggagttttattactttattacttggagaagagttataaaaccaagggtgcggtccattgtcaagtgtttcataaatttatattaagggccgaagttaacagtaaaaatgtatggatacttacagcccagggcctcagtagctggctatgggctgccctttgtgtcagcagtggggagggtcacatagaagcctcagatgaggasggttttgctgtgtgctgcaagtatcagggagaaagcatttctgccctctctggaacatggtgtgaacttcatccctgtaatgatattgtttgaattttccatgaaaaattgtcagcatgagagtaagaaaagtgtacgatgggaaaatattgaaccaaacagacaaaaatggtagagtcacatgaccagtttactcattggtaaagttaatgagagggtgagattaaacagaaattggtaaagttaatgagagggtgagattaaacagagggtgagattaaacttgggaatgagtttgtctgaggagtgaggtgaagcatcattcctctgatgcacagggtaagggtttgtctgtaaagagatagcacaggtgtctggagagcagcgtgcatggtaacctgtcctccaggccagtggagctgtctgtctaacctggccaaggtacagtcttcatcaaaggtca

SEQ ID NO: 71345 - DNA, 780 bp, Homo sapiens
aagggctgtttctagcttgaattggaggaaaaacaatttaaaaaacacactcttagaatgtgtctaagttattgaccacttagaaagttgtacaggaggccccatagaaaaatggagttttattactttattacttggagaagagttataaaaccaagggtgcggtccattgtcaagtgtttcataaatttatattaagggccgaagttaacagtaaaaatgtatggatacttacagcccagggcctcagtagctggctatgggctgccctttgtgtcagcagtggggagggtcacatagaagcctcagatgaggagggttttgctgtgtgctgcaagtatcagggagaaagcatttctgccctctctggaacatggtgtgaacttcatccctgtaatgatattgtttgaattttccatgaaaaattgtcagcatgasagtaagaaaagtgtacgatgggaaaatattgaaccaaacagacaaaaatggtagagtcacatgaccagtttactcattggtaaagttaatgagagggtgagattaaacagaaattggtaaagttaatgagagggtgagattaaacagagggtgagattaaacttgggaatgagtttgtctgaggagtgaggtgaagcatcattcctctgatgcacagggtaagggtttgtctgtaaagagatagcacaggtgtctggagagcagcgtgcatggtaacctgtcctccaggccagtggagctgtctgtctaacctggccaaggtacagtcttcatcaaaggtca

SEQ ID NO: 71346 - DNA, 780 bp, Homo sapiens
aagggctgtttctagcttgaattggaggaaaaacaatttaaaaaacacactcttagaatgtgtctaagttattgaccacttagaaagttgtacaggaggccccatagaaaaatggagttttattactttattacttggagaagagttataaaaccaagggtgcggtccattgtcaagtgtttcataaatttatattaagggccgaagttaacagtaaaaatgtatggatacttacagcccagggcctcagtagctggctatgggctgccctttgtgtcagcagtggggagggtcacatagaagcctcagatgaggagggttttgctgtgtgctgcaagtatcagggagaaagcatttctgccctctctggaacatggtgtgaacttcatccctgtaatgatattgtttgaattttccatgaaaaattgtcagcatgagagtaagwaaagtgtacgatgggaaaatattgaaccaaacagacaaaaatggtagagtcacatgaccagtttactcattggtaaagttaatgagagggtgagattaaacagaaattggtaaagttaatgagagggtgagattaaacagagggtgagattaaacttgggaatgagtttgtctgaggagtgaggtgaagcatcattcctctgatgcacagggtaagggtttgtctgtaaagagatagcacaggtgtctggagagcagcgtgcatggtaacctgtcctccaggccagtggagctgtctgtctaacctggccaaggtacagtcttcatcaaaggtca

SEQ ID NO: 71347 - DNA, 780 bp, Homo sapiens
aagggctgtttctagcttgaattggaggaaaaacaatttaaaaaacacactcttagaatgtgtctaagttattgaccacttagaaagttgtacaggaggccccatagaaaaatggagttttattactttattacttggagaagagttataaaaccaagggtgcggtccattgtcaagtgtttcataaatttatattaagggccgaagttaacagtaaaaatgtatggatacttacagcccagggcctcagtagctggctatgggctgccctttgtgtcagcagtggggagggtcacatagaagcctcagatgaggagggttttgctgtgtgctgcaagtatcagggagaaagcatttctgccctctctggaacatggtgtgaacttcatccctgtaatgatattgtttgaattttccatgaaaaattgtcagcatgagagtaagaaaagtgtacgatgggaaaatattgaaccaaacagacaaaaatggtagagtcacatgaccagtttactcattggtaaagttaatgagagggtgagattaaacagaaattggtaaagttaatragagggtgagattaaacagagggtgagattaaacttgggaatgagtttgtctgaggagtgaggtgaagcatcattcctctgatgcacagggtaagggtttgtctgtaaagagatagcacaggtgtctggagagcagcgtgcatggtaacctgtcctccaggccagtggagctgtctgtctaacctggccaaggtacagtcttcatcaaaggtca

SEQ ID NO: 71348 - DNA, 634 bp, Homo sapiens
cattttagtggtaggcaaagcatctagccaaaatttgtagctggggagagatctgctccccataagttggccttctgtatcaaggctgctgcttttgccactatgctcattgtggtggtagtctgctcaggaaactggtaactattaaaaccaccttctccttggcttgtcatggttactatgtatgctgaacccaagtccttttatacatttgttcttttccttacattctaaaatagacacatacctacctacacctagagctggcaggaagtctgtcagcttttcttggtatgcctctttatacttggtagcataataaatgcaatttttaatgacactgtcaatcyaatacttgaatgagcttcatttcctttctcgtctgttccttagtgattgctttaaccattgcctattcatgactgagccttggcattaagatctcataggggcatggccctaaagtcttgcttgttctgtttcattttggccttcttaggattcaagaggaaggaccttcataggatggtgagctgaaaatgggaacctgtgggcaaagttggtacaatatatacctttgatgtgacattaatttgagttaagtgaagggtcaggaccacgttttcagattttt

SEQ ID NO: 71349 - DNA, 634 bp, Homo sapiens
cattttagtggtaggcaaagcatctagccaaaatttgtagctggggagagatctgctccccataagttggccttctgtatcaaggctgctgcttttgccactatgctcattgtggtggtagtctgctcaggaaactggtaactattaaaaccaccttctccttggcttgtcatggttactatgtatgctgaacccaagtccttttatacatttgttcttttccttacattctaaaatagacacatacctacctacacctagagctggcaggaagtctgtcagcttttcttggtatgcctctttatacttggtagcataataaatgcaatttttaatgacactgtcaatccaatacttgaatgagcttcatttcctttctcgtctgttccttagtgattgctttaaccattgcctattcatgactgagccttggcattaagatctcataggrgcatggccctaaagtcttgcttgttctgtttcattttggccttcttaggattcaagaggaaggaccttcataggatggtgagctgaaaatgggaacctgtgggcaaagttggtacaatatatacctttgatgtgacattaatttgagttaagtgaagggtcaggaccacgttttcagattttt

SEQ ID NO: 71350 - DNA, 543 bp, Homo sapiens
gtggtataaattattaactgtttaccacaatcattcccttttccttctggacacagagctaggttgtatttcgcagcctctctcacagtttagtgtgaccacaagactgaggacattgaaatgtggtggaagtgatggctgtctctttcagacctgggctataaaaacctcttagaccaccgttactctttatgaccactggctgacagtgaaggacttagaagtcctgaaagatggtggggtcatgagatggaaaagactgggcccctaaatcaccctgtgatagttcatctcctgaccacgctcattgaattgtcagcaagacagtaatttttattatggtaaatcactatgatttctggggatttatctactacagaaggaagtattaccctaatttataygccacttagtcctgttatacattacactccatgttgctttctaagatttcgtttttcccttctctgtaatcttcttcatagaaggtacttgaccctcagtgagagggattttgaaattcaaagtaaaatatcacaatca

SEQ ID NO: 71351 - DNA, 2094 bp, Homo sapiens
atatttagaagaatcacaatttyttggcaagatttccaaatatgtgttgaggttcttcaccttggcttcttctcctccctcaacccctttctctcaacacagggtgccatttgttgcaaattatttgcaagtccagaaatgtggctctgacaccttagttcttttcccagtcagacatgatgatgctaccatttcaagtgagtaattaccaggcacgtaatattatcagcgtggtgaataccttatgaaaatcagactagtcacaaagctcaggtcttcctgaagccatttttggaaatttagaagtttggccatttggtaaaaacacgtgaacaaatcattcttgaacccaactgtttttgttcccatattgtttgagttgcagaaaacatagctgggaaaagaactgatctggcttgcatagagacaccatctggaaagcctgtttcatgcagtcccacctagagcccagtaaattggctattttgtgcctcttcccaaagcacagtcacctctttgcatttccaaaatgatcctgcttcaacattcttcagcaaccaagagcaatctgtcttgcaatgtgtcctttctgccaagctggtaattaccaagattctctcgccaagaagtgatcaaatcattgcatcttccttgctgcctttcttatcttcagccttgatggtatagtttcccataccactcagctttcatgtccatctgtatatagcccctgtggaactgagtgctttttgttcagcttgccttgtgtgctttcatttgttactttccaatcttattatttacatggatgcgcaaagcatctttgtggatctcagactccacaacctcatctgggcaatttttactagcagagccgctctccatcatcctctcagtacccattgtttgtcactgcctccaaagcttcatttccattgtctttttctcatttagatgtagtccaaaccatcactggcttttatcacttgcactgttggcttttatagaggtgtttgagattgggaacaccatcaagaagcctgttcccttctttgagtcttgttggtaaagttcataaatccttgcatgggagaaggcttcttttagaagaatgttgttcaacttgataattattctgaggcaaatgcattataaatatttgctatatatgctctgtcatgggcctgctcttggcttcctcatgatttattccaagcttgattgctgtttggtgccacacctacatctatagtctgctgtctttgccaattctgcctccatctttttcttcatgctccttcactgatggccaatggagaaaaaaaatgaatatgcttactgtgcaaaatagccacaaatgactgctttcaaagttctgaaagagtcaagaatgtgagaccccatacacacacattttcaatgattttgccaagaaaattacacccatttattctgtcatgtggcatggcaaagttgctgttttttttcagaagaagccatcatagtttaatgtacaatcaaaaaagaaatacttaaatcttctttcttttttccctgtgtttatacacatgggattcaaagccacggcttctctgaaatatatgaaagcccccaggaaagttacatttgttagaagtcaacctctctacccaaacagaagagatttggacatattatttccattttgccaagaaaaatgattttgatgtcaaaacagagagccacgtttttagtcttatgctggcatgatgaacatatgttaagcaaaatgcgcaattatgtcttatgtcagcgtgtttttgttttatgtgattctatgtatacaaactgagaaaggcctcttgtcttgtgtctgcttttggcttgagaggtggggacagataattcaacaggtcacggaggagaatggatacaaaagctctccaggcatcatgacggcgatctggagaaataaagcagtccaggatgtgtttctgtgtatgctcatccacacaactgctatctaagaaataccattggtttcctacctggcaattaggtttttttttttgtcattggcttaaacctgtctcaaccaaaaagtgacattcttat

SEQ ID NO: 71352 - DNA, 759 bp, Homo sapiens
tccagtaaygctgcctcaaatttgattcagtcacctcacatacttaacattctggctttcctttcctctgtttctggcatctggagatttcctttttttgtgtgtgagctcatttatggttatctgttgttatgtttaatacaaccattcctggctgaggctgccacatctagagctggaaaaccattaagaaataaacttctggctgggcatggtggctcacgcctgtaatcccagcactttgggaggctgaggcaggtggatcacttgaggtcaggagttcgagatcagcctggccaacgtgaagaaaccccatctctactaaaaatacaaaaatgagccgggcatggtggcacacacctgtaatcccaactattttggaggctgagacaggagaattgcttgaactcaggaggcagagattgcagtgagctgagatcgtgccactgcactccagcctgggtgacagagtgagactccatctcaaaaaaaaaaaaaaaaagaacttctaattctaaaatattatagaaattattgggagcaaaatggagtgactgtggatgattaagagctttcttagagtcctcatcaaatcatgcaggtgattaatgatacctgtccaccaagttatatagtcatgtacagcataatgatgttttggtcaagtaaggaccacatagacagtggtcccacaagattataatggagctgaaaagttcctataaccgagtgtgggtagcctagcacaaggcagtactc

SEQ ID NO: 71353 - DNA, 760 bp, Homo sapiens
gatcctcttttccccaggtggccctgcccgcagcttgcataactgatgctggattgtgatggccatgcaatggttaagagtacgggctctcagccagattgcttggatcaaataccgacaacatcatttcctcatcctgggacctcagggcatagggcatcttgcacaacctatgcacttcaatttcgtcatctgtcaaatggggataatcctggtatctcccctatatagagtttgtggtaagaattatgaaagcaaataaattgcctcgtttaaatatggaatgattagaacagctgcattttcttgagttcggttattttgttgctcggttgagactcctgaaaattgccgcaacagaatgactttctaatggckcacccttgtcacaatagctgcagcagtagacgaatgtcacaagccaaacaaattccacaactgatgaacacaaaaattgcctgctatcagacaggctgtgcagtcctggaaggagaggcacctgtggcagctctgtggcaagccccgttccactgctctttgttccatgaagcaaggctcaggttctaaaattaaacccttctccagtaccccaaactgccatgtgcatttgagggtttttcttctgatctcattaccatagttacacctcgaagagtaaaaaatatatggctgcagcttttgtgaaatcaggcccactttcccttgattctggccccgctgttgcaaagcagctgacggctgctccccagaggagcataca

SEQ ID NO: 71354 - DNA, 780 bp, Homo sapiens
ttctaccagcaaacacttcctaagcatttgctgtgggccaggtcctgtgctacgttcagggagcacagagctgaagctgacatcctcccctgccatctaggagcacactgtctcctgtgactggtcttggagatggggatgagacagtatcattgtcatggggagaagaggtgctggggagaggaaacatgaagctaacagtgcaattactgttttcataaaacaaaatatagaaaactaagctcgacagtttttcataattaaaaagaaaaaagagtcagttagaattatagggtcatgctttttgaaaggatgagaaacaatgaactatgtaacctatgtctcctgtgattgaaacattccttcrctcactgcaatgtatgaaaacatttcttatattaaaggcccagatcaaacacgacctgtggcctgaaaccttcccagatatccccatctagaaacaacctctctccttccggagccccagacctctctctctcatccagttatgatagcaatgcggggtatgcctgtgcctcccctgtcacccccaggggagactccctggagaaggagttgccttggtcccaatactgcacatccacaacacctagcatgcttggtatacagcaggccgtcagagcggtggcgatttgagctccacctgctttcagagctccaccaactgcttattcaaccagaaataagcatctggttgaatccaaacaccaccaccaccaactttagagttgggcttttttcagcctatgcccaggatac

SEQ ID NO: 71355 - DNA, 780 bp, Homo sapiens
ttctaccagcaaacacttcctaagcatttgctgtgggccaggtcctgtgctacgttcagggagcacagagctgaagctgacatcctcccctgccatctaggagcacactgtctcctgtgactggtcttggagatggggatgagacagtatcattgtcatggggagaagaggtgctggggagaggaaacatgaagctaacagtgcaattactgttttcataaaacaaaatatagaaaactaagctcgacagtttttcataattaaaaagaaaaaagagtcagttagaattatagggtcatgctttttgaaaggatgagaaacaatgaactatgtaacctatgtctcctgtgattgaaacattccttcactcactgcaatgtatgaaaacatttcttatattaaaggcccagatcaaacacgacctgtggcctgaaaccttcccagatatccccatctagaaacaacctctctccttccggagccccagacctctctctctcatccagttatgatagcaatgcggggtatgcctgtgcctcccctgtcacccccaggggagactccctgkagaaggagttgccttggtcccaatactgcacatccacaacacctagcatgcttggtatacagcaggccgtcagagcggtggcgatttgagctccacctgctttcagagctccaccaactgcttattcaaccagaaataagcatctggttgaatccaaacaccaccaccaccaactttagagttgggcttttttcagcctatgcccaggatac

SEQ ID NO: 71356 - DNA, 780 bp, Homo sapiens
ttctaccagcaaacacttcctaagcatttgctgtgggccaggtcctgtgctacgttcagggagcacagagctgaagctgacatcctcccctgccatctaggagcacactgtctcctgtgactggtcttggagatggggatgagacagtatcattgtcatggggagaagaggtgctggggagaggaaacatgaagctaacagtgcaattactgttttcataaaacaaaatatagaaaactaagctcgacagtttttcataattaaaaagaaaaaagagtcagttagaattatagggtcatgctttttgaaaggatgagaaacaatgaactatgtaacctatgtctcctgtgattgaaacattccttcactcactgcaatgtatgaaaacatttcttatattaaaggcccagatcaaacacgacctgtggcctgaaaccttcccagatatccccatctagaaacaacctctctccttccggagccccagacctctctctctcatccagttatgatagcaatgcggggtatgcctgtgcctcccctgtcacccccaggggagactccctggagaaggagttgccttggtcccaatactgcacatccacaacacctagcatgcttggtatacagcaggccgtcagagcggtggcgatttgagctccacctgctttcagagctccaccamctgcttattcaaccagaaataagcatctggttgaatccaaacaccaccaccaccaactttagagttgggcttttttcagcctatgcccaggatac

SEQ ID NO: 71357 - DNA, 712 bp, Homo sapiens
gactggttcacagggcaggactgagacaaaaatttgggtatgaacaaatctaggatgtacagtagagacaaaatcaatagtagactgctgtcacagtattctgtgagcacacaggcaggcatgaggccccctagaatttacaagagttttcttaaagcccactgtgatccatttcccagagcaaaatcaatcaaacatcaacttcatgggaggcaggaaacygcttgccactctaaatggcactaatttccaagggctgctcagtgagggactgaaacccgagttgtgaagtaatggtccacacatcgaatcaacattccagatgcgctttttctgacccccagggtgggatgttttaaaaattcatttacttaacaaatacttgttgagcacttactgtgtgccaggtccctctgtaggcacttggcaaaaacagtgaacaaaacagggaaaaatcctcacccttatatactttgagtataatgggaggatatgggcagtcagccaataatttttaaaattctattattctacaggatgataagtagtatagagaaaaattgaaaagcagggaaggagagagagtacaaggtggaaagaaggaggtgttgcaatttttaaaagagtaattaggaaaggcctccctgagaaggtgacatttgggaaaacacctgagcagaagaagaagtaaggcttgtgggcatagagggga

SEQ ID NO: 71358 - DNA, 712 bp, Homo sapiens
gactggttcacagggcaggactgagacaaaaatttgggtatgaacaaatctaggatgtacagtagagacaaaatcaatagtagactgctgtcacagtattctgtgagcacacaggcaggcatgaggccccctagaatttacaagagttttcttaaagcccactgtgatccatttcccagagcaaaatcaatcaaacatcaacttcatgggaggcaggaaactgcttgccactctaaatggcactwatttccaagggctgctcagtgagggactgaaacccgagttgtgaagtaatggtccacacatcgaatcaacattccagatgcgctttttctgacccccagggtgggatgttttaaaaattcatttacttaacaaatacttgttgagcacttactgtgtgccaggtccctctgtaggcacttggcaaaaacagtgaacaaaacagggaaaaatcctcacccttatatactttgagtataatgggaggatatgggcagtcagccaataatttttaaaattctattattctacaggatgataagtagtatagagaaaaattgaaaagcagggaaggagagagagtacaaggtggaaagaaggaggtgttgcaatttttaaaagagtaattaggaaaggcctccctgagaaggtgacatttgggaaaacacctgagcagaagaagaagtaaggcttgtgggcatagagggga

SEQ ID NO: 71359 - DNA, 712 bp, Homo sapiens
gactggttcacagggcaggactgagacaaaaatttgggtatgaacaaatctaggatgtacagtagagacaaaatcaatagtagactgctgtcacagtattctgtgagcacacaggcaggcatgaggccccctagaatttacaagagttttcttaaagcccactgtgatccatttcccagagcaaaatcaatcaaacatcaacttcatgggaggcaggaaactgcttgccactctaaatggcactaatttccaagggctgctcagtgagggwctgaaacccgagttgtgaagtaatggtccacacatcgaatcaacattccagatgcgctttttctgacccccagggtgggatgttttaaaaattcatttacttaacaaatacttgttgagcacttactgtgtgccaggtccctctgtaggcacttggcaaaaacagtgaacaaaacagggaaaaatcctcacccttatatactttgagtataatgggaggatatgggcagtcagccaataatttttaaaattctattattctacaggatgataagtagtatagagaaaaattgaaaagcagggaaggagagagagtacaaggtggaaagaaggaggtgttgcaatttttaaaagagtaattaggaaaggcctccctgagaaggtgacatttgggaaaacacctgagcagaagaagaagtaaggcttgtgggcatagagggga

SEQ ID NO: 71360 - DNA, 712 bp, Homo sapiens
gactggttcacagggcaggactgagacaaaaatttgggtatgaacaaatctaggatgtacagtagagacaaaatcaatagtagactgctgtcacagtattctgtgagcacacaggcaggcatgaggccccctagaatttacaagagttttcttaaagcccactgtgatccatttcccagagcaaaatcaatcaaacatcaacttcatgggaggcaggaaactgcttgccactctaaatggcactaatttccaagggctgctcagtgagggactgaaacccgagttgtgaagtaatggtccacrcatcgaatcaacattccagatgcgctttttctgacccccagggtgggatgttttaaaaattcatttacttaacaaatacttgttgagcacttactgtgtgccaggtccctctgtaggcacttggcaaaaacagtgaacaaaacagggaaaaatcctcacccttatatactttgagtataatgggaggatatgggcagtcagccaataatttttaaaattctattattctacaggatgataagtagtatagagaaaaattgaaaagcagggaaggagagagagtacaaggtggaaagaaggaggtgttgcaatttttaaaagagtaattaggaaaggcctccctgagaaggtgacatttgggaaaacacctgagcagaagaagaagtaaggcttgtgggcatagagggga

SEQ ID NO: 71361 - DNA, 712 bp, Homo sapiens
gactggttcacagggcaggactgagacaaaaatttgggtatgaacaaatctaggatgtacagtagagacaaaatcaatagtagactgctgtcacagtattctgtgagcacacaggcaggcatgaggccccctagaatttacaagagttttcttaaagcccactgtgatccatttcccagagcaaaatcaatcaaacatcaacttcatgggaggcaggaaactgcttgccactctaaatggcactaatttccaagggctgctcagtgagggactgaaacccgagttgtgaagtaatggtccacacatcgaatcaacattccagatgcgctttttctgacccccagggtgggatgttttaaaaattcatttacttaacaaatacttgttgagcacttactgtgtgccaggtccctctgtaggcacttggcaaaaacagtgaacaaaacagggaaaaatcctcrcccttatatactttgagtataatgggaggatatgggcagtcagccaataatttttaaaattctattattctacaggatgataagtagtatagagaaaaattgaaaagcagggaaggagagagagtacaaggtggaaagaaggaggtgttgcaatttttaaaagagtaattaggaaaggcctccctgagaaggtgacatttgggaaaacacctgagcagaagaagaagtaaggcttgtgggcatagagggga

SEQ ID NO: 71362 - DNA, 715 bp, Homo sapiens
attgttttaatgaagtataggacatacagaaaagtgcctaaagcacatgcaaaatctttgcctgtatctgatactaggctgcaaactcatggaggacagaggatatctttttcatctttatgcccccacagcatctgggatcaagccttaacctactcattaatgcttattaagtggttaaataatacattaatagccaaaagaaaataaatgcccccttgtcttaatagttttcaacttttggtacatgtcaccatcacccatggaactctaaatgtcataactgccaataccccatgcctggagacctgatgcaatgaatggagcctgatttagtagctggatttttgattagacaaatattttcttttttttttttttttttwaatttatttttttattgataattcttgggtgtttctcacagagggggatttggcagggtcatgggacaatagtggagggaaggtcagcagataaacaagtgaacaaaggtctctggttttcctaggcagaggaccctgcggccttccgcagtgtttgtgtccctgattacttgagattagggattggtgatgactcttaacgagcatgctgccttcaagcatctgtttaacaaagcacatcttgcaccgcccttaatccatttaaccctgagtggacacagcacatgtttcagagagcacagggttgggggtaaggtcacagatcaaca

SEQ ID NO: 71363 - DNA, 1478 bp, Homo sapiens
aagaaaacaacatttacatcttaggcaaagacaggctactttaccttggtagtagagtagggcttccttttcacacgctttttggaaggcttcttcgagtcacctaggggatgtggagggacacagcatggctgtcagttcattggcagtgctactcatgaatgactcagggactggaacttaggggcgtgcctggttaacaagcatggaatgagcttctcctggaccatcttcttcacggaccaaggaaggcaaagaaagagcagcaaggaaatgagagtagagcccttggctttccaggtaatggcaaatgaaagcaacgtgaaataatcaactccaaatgaacaaatgctaaaacacatgctacgattcaaccacagcatcctgtcacttcttcagaccctttaaaagcccagcaggactgccactaccttcttgacatcgaccaagtccctttcaacctccacagacccacatacactgctactgcatttatcatggagggtatagggttctgccctgtttatgtgtgaattttttaaaaactagatttaataccatgcaccagcattaattgtatttatttcttttcttggttatgaaaataatcagtcaggcatagtggctcacacctgtaatcccagcagtttggaaggtggaggtgggtggatcatttgaggtcaggagttcgagaccagcctgaccaacatggtaaaaccccatcattgaagataaatgttttatatccatggttaacagatgagatgaccatgaaatgaacaccagtgtactgggtggagcagcttatctattcagtcttcggcactaaaacctgtgaaacaatatcatcttgccttatttactaacaaatacaagtgcctctaaacttagacagtttccaagtcatggaactgatgagcacttagctcctgcagagagctctggatgatgggtcgggagaacaaagacacaatacatcaaaacagcattcacaagtaaacaggttttcaaagccctctacatgcaaatttacacaattatccttttaatttttatcttcatatatatgtacataatctacttgcttctgagtataaatcaaactgtatgttcttagttaatagtctctataaattcactctatttatctttctgagttgaaatactgcatctcattggataacaaaaaaaaaaatttgactaagattacactggaaaggtgagtaggttgggtgattgactgtgattgacaattccatgattctggataacttccaargcataaaaataaatgtgtgttttctttcacacgtagacaatacacatgcttattactttaaaaaattaatatgtgcatggaagtgacttactacaaatatattaaagtaaatacacatttcacaaaaaaagaagagaggaagggaaaaacatgttaaaaacaaagagagttacattttattgtgtgaaaagcctccaac

SEQ ID NO: 71364 - DNA, 1478 bp, Homo sapiens
aagaaaacaacatttacatcttaggcaaagacaggctactttaccttggtagtagagtagggcttccttttcacacgctttttggaaggcttcttcgagtcacctaggggatgtggagggacacagcatggctgtcagttcattggcagtgctactcatgaatgactcagggactggaacttaggggcgtgcctggttaacaagcatggaatgagcttctcctggaccatcttcttcacggaccaaggaaggcaaagaaagagcagcaaggaaatgagagtagagcccttggctttccaggtaatggcaaatgaaagcaacgtgaaataatcaactccaaatgaacaaatgctaaaacacatgctacgattcaaccacagcatcctgtcacttcttcagaccctttaaaagcccagcaggactgccactaccttcttgacatcgaccaagtccctttcaacctccacagacccacatacactgctactgcatttatcatggagggtatagggttctgccctgtttatgtgtgaattttttaaaaactagatttaataccatgcaccagcattaattgtatttatttcttttcttggttatgaaaataatcagtcaggcatagtggctcacacctgtaatcccagcagtttggaaggtggaggtgggtggatcatttgaggtcaggagttcgagaccagcctgaccaacatggtaaaaccccatcattgaagataaatgttttatatccatggttaacagatgagatgaccatgaaatgaacaccagtgtactgggtggagcagcttatctattcagtcttcggcactaaaacctgtgaaacaatatcatcttgccttatttactaacaaatacaagtgcctctaaacttagacagtttccaagtcatggaactgatgagcacttagctcctgcagagagctctggatgatgggtcgggagaacaaagacacaatacatcaaaacagcattcacaagtaaacaggttttcaaagccctctacatgcaaatttacacaattatccttttaatttttatcttcatatatatgtacataatctacttgcttctgagtataaatcaaactgtatgttcttagttaatagtctctataaattcactctatttatctttctgagttgaaatactgcatctcattggataacaaaaaaaaaaatttgactaagattacactggaaaggtgagtaggttgggtgattgactgtgattgacaattccatgattctggataacttccaaagcataaaaataaatgtgtgttttctttcacacgtagacaatacacatrcttattactttaaaaaattaatatgtgcatggaagtgacttactacaaatatattaaagtaaatacacatttcacaaaaaaagaagagaggaagggaaaaacatgttaaaaacaaagagagttacattttattgtgtgaaaagcctccaac

SEQ ID NO: 71365 - DNA, 611 bp, Homo sapiens
atcttattcattaataataagctccaatggagacttttaatcatgtttgtaagggctgccatttcaaagcaacccattagaaccaaagccttcattatttgagagatgtttttatgggaagtctgttgatatcacactttgaaagtgaattaatgatgagcttgggtaaattgaatattcaaaaagaagtcaaggaaggcccccatgggaaatatggcatatagtgtggtagtaaatggggttcctgtctcatcctcgtaggttgcagctctgaactctggttcccctctctctcttgggttgctctgccaagaagagaccagttgaagaataacactgtatttcactatatggcattgttattacttctatttgcatattaatgttctagaatcagatggcagtgcaactacatacatgacaccagggagtataggaagaaggagygggtggtttactacaggacacagattcctgtgtttgatctaaaaaataaaaaggcagtaaatacaaaatgtttttaaacaagagaagctttaaacctcaatgggctttggttcttgggcttgttagaacagtttggtctttgaaacactgagtgagctctcagg

SEQ ID NO: 71366 - DNA, 753 bp, Homo sapiens
ttccccaaactgaccttcctacccccagagacatgattatttcagagaagatactgatacctcacagattgactctgtgggtgataaggctaagatcattttgtgaaaagtaattaggaagtccaagttcttgcagatcataaaatctacttatgctgaatgagcagaaagaaaattaccacagagaattaggtagcttaccaaattttctggaggaccaggaatcaagctgagatctatgtaaccaagaacatgtggtcaagagaaatgcccaaccatcgtatgaaatgttctgaatgaaaccccactcctgacattcatgtcacttggtaccagtgatgttgagacttcttcctgaactgcccctggaagagctctccatctttctcatcatgcttggccaaagctctactctctctttgcggacacctccctgtagggctcatactgaacttccaagtatcctggaggtgtgtgtctgtcttgtggcccattggctacccatataactctctgcaagggagactrggaaatgcagtcctctctgttcaggaaggtgtttctgactagagtgggagccataggtgcctacctgccacaagggagtagtttcagcatgctgttcacctattctcagaccttcctccatcttcaggacctctttccaaaatcagaaaactagtcaagggaaaaggaagaaattcagtgatgttgagttttatggtacctaatatactttgggggcatttctaa

SEQ ID NO: 71367 - DNA, 1678 bp, Homo sapiens
ccatatcgatccaaggaggtgaaggcctgatcagtgtttccgaggagctcggtttctctggggagtcaggaccaaccctgggctaaagcaattgggcaagaagtcctggaggagaggaaactttgagttgagacctctatgttctgagccaagccctggcgctaaagccactccactggggagacatgtacaaataaccatgagacaaagacgagttaggagcaggcagagagacagagacagggctgagggatgggagtggctacagcctgaagggctggctacaccccagaccctgtaattccacccaagactaagttatctggagcagtgaggagatagggtcttgataacgggaggtaggaatccgatctgccctggcctctctgcttaccccacctgttggagctctttgcatcagacctgctgggggccagatcccatctcctctgcccactgcaaacccgtctgccttcttctgccaggcttctcgggaacactggccctgctaccagagccgcaggatcccccatgagtgcctgtgaagggagtcctggatagtgaggccctggctggtccaggggtgggtactccgccatgccacccatcctccagcgcctgcagcaggccaccaagatgatgagccgccggaaaatcctgctgctggtgctagggtgcagcaccgtaagccttctcatccaccagggggcgcagctcagctggtaagggggcggggccccaggggggccggagctcccctccccattcttccacctgctagaagggtcctgctaggctttgctcctcccctctattctgaaagtgctttccctttagggccacacagcctccctggacagggactgctcttcaaygaaagggctgagtgacttgctcaaagttacagaatcagttagctgagatccgaatccagctcaactccccacagcatgcagctaagcatttccccagtggaaacaacttctcacaacttccgtagtgctgggcaaggccaagtcccctcacttctccgagcccccgttttctcatctataaagtgagacatgatatgtgtgacacagccagtcaccctcacacaggataccatgtgattcatgggaaccccaaccctactcctgactcactgtgtgaacccaacaaatccctgcacctctcggagacttcatgtccccattttctacactgtctgcccctgagaatggtgtgaatgcgcccagccccccttgccagataatttggtttgaaatcccaaacacccatgttttaagaatgaagcaacagaaatgaaagcttcacgagggctaggattgtttttgtatattactgtatttcttgaacctagcattaacctggcacatagtggacacccaaaaaatatttgatgactgaattaatgaggctttagaagcctcaagagaaacataacaatgggttgctgcaaagcccagtgccaaccatctacaaagtgaggagccagttaaagagtaaaaatgagaaagagcaaaaggatttagtgaccatgtgagtcgtctccagactttgtgtaagtgattgttctccttttggccctcagtttctacatatacaaagtgggattcctcaaagatctccaggggtctttgtcccttatttatttctacataaacaaattatctta

SEQ ID NO: 71368 - DNA, 573 bp, Homo sapiens
cagtgagctatgatcatgcctgtgaaagccaccatactccagcctcggtgacacagtgagaacttgtctatatatgtataaaaaaawtttttttttttaaatcaggagacatttgatatgagtgttggtagtttatcaaagggtcatgaagcaatcaggcatgtaataagtactttttaattatttcaattccatgaatcatcaatgagactaaggtaagatataactactccctcaatctcaatgctttcagagaagtcaattatactctcataaacatatctgagcacaggcaccagatccgtttaaagtaaatggcaaccaagacaaacttaatttaatgttatgtgtgtcccgttgagaggggaaaaagaaatactggcatactatgtaaggaagtctctggagctataacttatcaaatcacttgtgccgtttatatcttaagaacttcacaaaatactgcatcagtaactgtaatttcataaacagagtattaatgctggctgacaacctcccttatcacttattaatggcaaacagtaggctctaacaggaacagctttcacttaa

SEQ ID NO: 71369 - DNA, 762 bp, Homo sapiens
taccctgccatattatcagaaataaaacttcactttaactctttccttaaaattatatgctgctctcctgggtcaragtcctctcaaatttgaagcataagttgttctaagagataacctgaataattctagacctataatggatcacaaagtcatagtcataaatcttttgtacctaataaatatttttatattttttcagccatatgagtagtatctttgaggattcatctgtgttagttttttaccaattgactcttcttttagaagtttgtgaaactctgtcaacgagaatcttttcaatcctttcagggctatcttcacgtatcacttttttaagaatcatgagcatatcaagttctagaagacagccaatttgtgcaagtaagactatccacattgtccacataattagttctttggttgaccattttcatattttacatttaacgtccttgaacaaactgtattttttaaaagtcctacacagatatgtattttgttaatgtaatttctctaagaatgaggcagacattaagatttgctgagcatcaacaaggcaccatgcattgtgctgagagtgtacatgtgttaattcacataaaccttataataatcctgtgaggtaggtggtaatatttctattttaaagaaaaagaaatatgtactcatgtaaaacagatattctgcgatacagtcaaaatgcaacccaactatacatgactcctaaaaagtaaactcttctgtaactatgcaaaaaaa

SEQ ID NO: 71370 - DNA, 1209 bp, Homo sapiens
gaagtcagactggcttcatactgattactagtaacatgatcttcctaatgacaggagactcagtttccccatctgtaaaactccttcttctgcagtgtaaaggagaaaactgactctgttaaatattaaaggtgggccaggcatggtagctcacgcctataatcccagcactttgggaggccaagacgggtggatcacctgaggtcaggagtttgagaccagcctggccaacatggtaaaccctagctctactaaaaatacaagaaattagctgggtgtggtggtgcgcgcctgtagtcccagccacttatgaggctgaggcacaagaattgcttgaacccgggaggcagaggtcacagtgagctgagatcacaccactgcactccagcctggctgacagagtgagactccgtctcaaaaaaagaaaaaaaaaaattaaaggtgaaagtctcacaggggttcagccagcaagagaaagacgggcttgtcatatttaatcaagattcatgttattttgctacctgtgagttttctgaatatgataaacttttttttactgatccaatgaatggttgtgctacaatggaaaaacatacatacatagagtgttacctgaaagagtaacgcagacaaaatgcaacagtcagttttcttttcaacattcaatgacttaataaatctaagtaagtataagaaaaaaaaattgattagtagaaattttccaaaaacattttgatataaatgtctttacatatatatctagaacacaaaaagtataagaaaaatgcatacatataaatatataagaaaatagaaggaaaatatattaaagaagataaaaaatcccctataatcctactgcctaaatatgattactagtaacattttagtcaatttccttatatgtactttttctgtatataattatacacayggagaaacatatacatacatattaagactagaattatgcaatacatactactttataaacaaatttttcattcacagacataacgaactatatcattattctaaagaactttaatgttttatcatacagatgtgccataacataaaaatatgaatctccactttggcattttccaatgctgaggtaaacattgttatgcctacacttttgagcacttatcctattggttccactgaatgaacccctggacgtggaagtttttggtaaaagggggc

SEQ ID NO: 71371 - DNA, 579 bp, Homo sapiens
atgaaagctctgtgccccttcccctctgcctcaccctatgtatctcttcatctgtatcttttgtgattttcyttataataaactggcgaatgtaagcaagtgtttctctgagttctgtgagccactctagcaaattaatcgaacccaaggagtgggtcataagaaccctaatttgtcacctgtcagtcagaagcacaggtcacaacctggggcttgagatcaacactggaagtcagaacagagcccccaacctctggggtctgatgctatctccacgtagattgtatagaaattgcattgaaagacacctagctggtgtccactgcagaactgatttcttgcttagtggtggggagaaatccccaaacatctggtgtcagaatcatgtaagagcatagtgggagacattgagtttattttttcccctccagagataagatagacttgtcttactagttttgctcttctggttgaactttggctgatataggcagttagatatatcaacacaaaattcaggagaaagatctagaatgcagatgtaattacaaaattcatcatgatagagatggtacttag

SEQ ID NO: 71372 - DNA, 579 bp, Homo sapiens
atgaaagctctgtgccccttcccctctgcctcaccctatgtatctcttcatctgtatcttttgtgattttccttataataaactggcgaatgtaagcaagtgtttctctgagttctgtgagccactctagcaaattaatcgaacccaaggagtgggtcataagaaccctaatttgtcacctgtcagtcagaagcacaggtcacaacctggggcttgagatcaacactggaagtcagaacagagcccccaacctctggggtctgatgctatctccacgtagattgtatagaaattgcattgaaagacacctagctggtgtccactgcagaactgatttcttgcttagtggtggggagaaatccccamacatctggtgtcagaatcatgtaagagcatagtgggagacattgagtttattttttcccctccagagataagatagacttgtcttactagttttgctcttctggttgaactttggctgatataggcagttagatatatcaacacaaaattcaggagaaagatctagaatgcagatgtaattacaaaattcatcatgatagagatggtacttag

SEQ ID NO: 71373 - DNA, 1039 bp, Homo sapiens
ttacttcgaacaaagatttccatgaagtaagtgtgcactaggtactagtattttacccaatttacagatgaggaaatggagtcatgggttcagcgtggctaacccattgttctaggtgctgggaattcagcagcgagcaagggaaactgggtctgccctcatgctgcttacgttcatttcgggagacggacactagaaaagtagacatataaaaacataatttcaagcaataagaagttttataaagaaaaataaagcagaaatgagttggaacctgacagagcattacaggacaggttgctttagacagggtggtcaggaaagaagtcctctctgatgaggtagcatttgagcaaacatctgaatattgaacaagtcatgtgaaagtggcagtgagggtgttgggtggagaagagcatttgaggctcagggaacagcaaggtgaaactgagggctgaggatggaacaaactaagtgctttcaagactgctgacccatgggagtgagccaaacaacagcaagagtaagaggagctgagttctgcaaggtgctcaggaccagctcttccagggccctgaagctggaggccaggataggattcgatgcttatggtcaaagcaggtgatccaggtttacattacattatgtaaaaatcactctgtccactccatggggcatatgagaacctgtcttcctttcttatctagaaaggatagatttctctttacctcttgaggagtttaaagtatatgccctatgcccttcctgctgtgaaaaaaagaaactgatttctttgtagctaacaattccaattctgggtttaatcatgtctcatataatatttaagaagaaaaagaaagaaaagcatttgagagaacatggaagtgatggraagaaggagaccgggggcaagggcagggttctcttagagcctagaaagatctttccctgtcctagaaagaaaagagagatctatggtacccccaagagagatcaagtccccatagaggaaccccttgcattatgagagaaccccatg

SEQ ID NO: 71374 - DNA, 1223 bp, Homo sapiens
ctttcactttccttttcgttttctgttgcctttttcctttttgctgaactctcttctctggtaattagataccaagttcctttttggtcttccattcattgttacttttcagtacatgaaaaatatttgctaaagaagaaagagacagtatttgtattatttctgaactcacgtgatgtatggtatcctttccttagtcgatgttactgatggaagctgaggacaggctaaacttccttctgtccgaggtggaacagaagaccctgtctcagtgctccgctggcgagctggagattgtggtggaggcccggcttcagctggctgcagttgctctgcagaggcaccgggcggcatacaggtgcgtctctccatgcacaggggagggatacctttgaagagagttccttcaccctagtttattaaatagacttaaattttatgtaagttttagaaattcctatatccatagtatgcttgctttttattattcagggaagttttcatacatgatttcacttaaaattatagctctggctgggtgtggtggctcatgcctgtaatcccagcactttgggaggctgaggtgggcagatcacttgaggccaggagttggagaccaggctggccaacacgaagaaaccctgtctctactaaaatatgaaaattaaccaggctttgtggcggcacatgtaatcccagctactcgggaggctaaggcaggagaatcacttgagcccgggaggcagaggttgcagtgagctgagattgcccctctgtactccagcctggatgacagagcaagactctgtctcaaaaaaaaaaaaaattacagttctcaataaagcaattattttatgaaggcacacagctgggttgtttaatttcatatatagaatgaacaaattaacaatgctttgatttttttatacatttaatttactttttaaaaagactaaacctttttacgaataaaagctatggagtgttttctttttttctaaaacattgacttaaaatattaaaaacaaacctattttgaaaaagtaagtttctgcatcatattgcactgaactgtttaataaactgttgtaggtagctaattatttaaatgtgctrcaattgttagtgtcagctctttcatttagtttgttcatcgatttatttatttagtcaaccagtatctgttaactctctcactgccaggctctgatctaggcagtgaa

SEQ ID NO: 71375 - DNA, 1178 bp, Homo sapiens
tttcagcttctagacagaggctatcctccccagcctgtcagaatggccaccatgctctcctttccaaaattatgaacctcattattcctcagttgatactacctacactttagtattgggtactctaggtttatgactcgtctcagcaatatgcatcttaaaggcaaagagatgcttcttattctaatttaactgattgtacacaatgaatttttatttggtgctagcttaattttttaaaaacctattttaagaccaaattgtactgatacatatactatcaaaagaaaaacttcagacaaattaaatttaagagagtttaatttagcaaagaagggttcaccaactgggcagcagcccaacgtgaatagactcagagcaattccagcaatgccatgttgtcagagaggatttatggatggaaaagggaatgtgatgtatagagattggaagtcaggtgcagaaacagaaataagataatctgtgtttatcttatttgaacagggtttgaacagtctgtgcctgtgartggtgcaagtatggctgctgtgattggctgagacttcatggctgcttgttacaggagtaagttacagcctgtttacacaaccagttaggttacttcaccatgtatggtgaaagctttaggccgaacttaaaatatgtaaagagggagctatagactaaacttaatttaacaatacttatcggtacagtgtactaattttgcatctttgagaatttcagttacattggctacagattggatcctaagcacaccacatctatttctattgtgtatatctgtgatattgtgaaatatttatttggtctttgtcccatttcctggcataaaaatctaaaaatccttagaatgtccaaagtcgtgggagtctttttttacactaatgagttgactgatggctagcagtccctaggtagattcaggatggggcctggccactggaaagacaaaggcagggttagagggttgggactttcagccccacccccccaccaatctcctgggaagggagaggggctgaaggttgagttgatcaccaatggctgagttgaatcaatcacacctatataataaagttttttttttgaaaaaaaaaaacaaaaaggctgtgtttaggagcttccagatagctgaacatgtggaggttcctggg

SEQ ID NO: 71376 - DNA, 1178 bp, Homo sapiens
tttcagcttctagacagaggctatcctccccagcctgtcagaatggccaccatgctctcctttccaaaattatgaacctcattattcctcagttgatactacctacactttagtattgggtactctaggtttatgactcgtctcagcaatatgcatcttaaaggcaaagagatgcttcttattctaatttaactgattgtacacaatgaatttttatttggtgctagcttaattttttaaaaacctattttaagaccaaattgtactgatacatatactatcaaaagaaaaacttcagacaaattaaatttaagagagtttaatttagcaaagaagggttcaccaactgggcagcagcccaacgtgaatagactcagagcaattccagcaatgccatgttgtcagagaggatttatggatggaaaagggaatgtgatgtatagagattggaagtcaggtgcagaaacagaaataagataatctgtgtttatcttatttgaacagggtttgaacagtctgtgcctgtgaatggtgcaagtatggctgctgtgattggctgagacttcatggctgcttgttacaggagtaagttacagcctgtttacacaaccagttaggttacttcaccatgtatggtgaaagctttaggccgaacttaaaatatgtaaagagggagctatagactaaacttaatttaacaatacttatcggtacagtgtactaattttgcatctttgagaatttcagttacattggctacasattggatcctaagcacaccacatctatttctattgtgtatatctgtgatattgtgaaatatttatttggtctttgtcccatttcctggcataaaaatctaaaaatccttagaatgtccaaagtcgtgggagtctttttttacactaatgagttgactgatggctagcagtccctaggtagattcaggatggggcctggccactggaaagacaaaggcagggttagagggttgggactttcagccccacccccccaccaatctcctgggaagggagaggggctgaaggttgagttgatcaccaatggctgagttgaatcaatcacacctatataataaagttttttttttgaaaaaaaaaaacaaaaaggctgtgtttaggagcttccagatagctgaacatgtggaggttcctggg

SEQ ID NO: 71377 - DNA, 1178 bp, Homo sapiens
tttcagcttctagacagaggctatcctccccagcctgtcagaatggccaccatgctctcctttccaaaattatgaacctcattattcctcagttgatactacctacactttagtattgggtactctaggtttatgactcgtctcagcaatatgcatcttaaaggcaaagagatgcttcttattctaatttaactgattgtacacaatgaatttttatttggtgctagcttaattttttaaaaacctattttaagaccaaattgtactgatacatatactatcaaaagaaaaacttcagacaaattaaatttaagagagtttaatttagcaaagaagggttcaccaactgggcagcagcccaacgtgaatagactcagagcaattccagcaatgccatgttgtcagagaggatttatggatggaaaagggaatgtgatgtatagagattggaagtcaggtgcagaaacagaaataagataatctgtgtttatcttatttgaacagggtttgaacagtctgtgcctgtgaatggtgcaagtatggctgctgtgattggctgagacttcatggctgcttgttacaggagtaagttacagcctgtttacacaaccagttaggttacttcaccatgtatggtgaaagctttaggccgaacttaaaatatgtaaagagggagctatagactaaacttaatttaacaatacttatcggtacagtgtactaattttgcatctttgagaatttcagttacattggctacagattggatcctaagcacaccacatctatttctattgtgtatatctgtgatattgtgaaatatttatttggtctttgtcccatttcctggcataaaaatctaaaaatccttagaatgtccaaagtcgtgggagtctttttttacactaatgagttgactgatggctagcagtccctaggtagattcaggatggggcctggccactggaaagacaaaggcagggttagagggttgggactttcagccccacccccccaccaatctcctgggaagggagaggggctgaaggttgagttgatcaccaatggctgagttgaatcaatcacacctatataataaagwtttttttttgaaaaaaaaaaacaaaaaggctgtgtttaggagcttccagatagctgaacatgtggaggttcctggg

SEQ ID NO: 71378 - DNA, 1178 bp, Homo sapiens
tttcagcttctagacagaggctatcctccccagcctgtcagaatggccaccatgctctcctttccaaaattatgaacctcattattcctcagttgatactacctacactttagtattgggtactctaggtttatgactcgtctcagcaatatgcatcttaaaggcaaagagatgcttcttattctaatttaactgattgtacacaatgaatttttatttggtgctagcttaattttttaaaaacctattttaagaccaaattgtactgatacatatactatcaaaagaaaaacttcagacaaattaaatttaagagagtttaatttagcaaagaagggttcaccaactgggcagcagcccaacgtgaatagactcagagcaattccagcaatgccatgttgtcagagaggatttatggatggaaaagggaatgtgatgtatagagattggaagtcaggtgcagaaacagaaataagataatctgtgtttatcttatttgaacagggtttgaacagtctgtgcctgtgaatggtgcaagtatggctgctgtgattggctgagacttcatggctgcttgttacaggagtaagttacagcctgtttacacaaccagttaggttacttcaccatgtatggtgaaagctttaggccgaacttaaaatatgtaaagagggagctatagactaaacttaatttaacaatacttatcggtacagtgtactaattttgcatctttgagaatttcagttacattggctacagattggatcctaagcacaccacatctatttctattgtgtatatctgtgatattgtgaaatatttatttggtctttgtcccatttcctggcataaaaatctaaaaatccttagaatgtccaaagtcgtgggagtctttttttacactaatgagttgactgatggctagcagtccctaggtagattcaggatggggcctggccactggaaagacaaaggcagggttagagggttgggactttcagccccacccccccaccaatctcctgggaagggagaggggctgaaggttgagttgatcaccaatggctgagttgaatcaatcacacctatataataaagttttttttttgaaaaaaaaaaamaaaaaggctgtgtttaggagcttccagatagctgaacatgtggaggttcctggg

SEQ ID NO: 71379 - DNA, 1178 bp, Homo sapiens
tttcagcttctagacagaggctatcctccccagcctgtcagaatggccaccatgctctcctttccaaaattatgaacctcattattcctcagttgatactacctacactttagtattgggtactctaggtttatgactcgtctcagcaatatgcatcttaaaggcaaagagatgcttcttattctaatttaactgattgtacacaatgaatttttatttggtgctagcttaattttttaaaaacctattttaagaccaaattgtactgatacatatactatcaaaagaaaaacttcagacaaattaaatttaagagagtttaatttagcaaagaagggttcaccaactgggcagcagcccaacgtgaatagactcagagcaattccagcaatgccatgttgtcagagaggatttatggatggaaaagggaatgtgatgtatagagattggaagtcaggtgcagaaacagaaataagataatctgtgtttatcttatttgaacagggtttgaacagtctgtgcctgtgaatggtgcaagtatggctgctgtgattggctgagacttcatggctgcttgttacaggagtaagttacagcctgtttacacaaccagttaggttacttcaccatgtatggtgaaagctttaggccgaacttaaaatatgtaaagagggagctatagactaaacttaatttaacaatacttatcggtacagtgtactaattttgcatctttgagaatttcagttacattggctacagattggatcctaagcacaccacatctatttctattgtgtatatctgtgatattgtgaaatatttatttggtctttgtcccatttcctggcataaaaatctaaaaatccttagaatgtccaaagtcgtgggagtctttttttacactaatgagttgactgatggctagcagtccctaggtagattcaggatggggcctggccactggaaagacaaaggcagggttagagggttgggactttcagccccacccccccaccaatctcctgggaagggagaggggctgaaggttgagttgatcaccaatggctgagttgaatcaatcacacctatataataaagttttttttttgaaaaaaaaaaacaaaaaggctgtgtttargagcttccagatagctgaacatgtggaggttcctggg

SEQ ID NO: 71380 - DNA, 891 bp, Homo sapiens
tggcttgacctgtaaggtggacacatttcaggctttctaagccaaatactaattttaaattttttttattttaatgttgaagagagtaggatggatcaacaacaaaagcaccacagccctagtgagtcgatggaagctttggctggcctccataaatgcttattgtagagagcgttttaaaagcaatcttacgtttgtttgaatgcttacatttgcagaatgcttagaatgttgatttgttttatctctatatctattagaatgagagaacagaactaagggggaaaaccaattttactttcaaaaatgtattattctgcaaattagttttaaaactacaaataaatactggtttggaatgagaagtttgaaagaatgaagaactcttcacttctagactgtaaattcctttaggacagggtctgtaccacattcatctttgaatcctcagaactgagcatggatcctgacaataataattatccagaagtattgtttttaaaaatttattttaattartttatttttctagagatggtgtctcgctacattgcatgacctgaagtgcagtggctattcataggtgcaattgtagtgttctatagccttgaactcctgagctcaagaaatcctcctgcctcagcctcctgagtatctaggactacaggtgtgggccaccatgcccagctcatattgttttttttttttttaatcatgaattaagaaatcagtctcctgagtaagaaaaacatcaaatagcttattttagtaaagagaacaaaaataactaattagctaaagctttcatttttatagattatattgatattgtatatataaccaggaaaagtcagccaaaataaaatgaaaaaattttaattagattgcatt

SEQ ID NO: 71381 - DNA, 891 bp, Homo sapiens
tggcttgacctgtaaggtggacacatttcaggctttctaagccaaatactaattttaaattttttttattttaatgttgaagagagtaggatggatcaacaacaaaagcaccacagccctagtgagtcgatggaagctttggctggcctccataaatgcttattgtagagagcgttttaaaagcaatcttacgtttgtttgaatgcttacatttgcagaatgcttagaatgttgatttgttttatctctatatctattagaatgagagaacagaactaagggggaaaaccaattttactttcaaaaatgtattattctgcaaattagttttaaaactacaaataaatactggtttggaatgagaagtttgaaagaatgaagaactcttcacttctagactgtaaattcctttaggacagggtctgtaccacattcatctttgaatcctcagaactgagcatggatcctgacaataataattatccagaagtattgtttttaaaaatttattttaattagtttatttttctagagatggtgtctcgctacattgcatgacctgaagtgcagtggctattcataggtgcaattgtagtgttctrtagccttgaactcctgagctcaagaaatcctcctgcctcagcctcctgagtatctaggactacaggtgtgggccaccatgcccagctcatattgttttttttttttttaatcatgaattaagaaatcagtctcctgagtaagaaaaacatcaaatagcttattttagtaaagagaacaaaaataactaattagctaaagctttcatttttatagattatattgatattgtatatataaccaggaaaagtcagccaaaataaaatgaaaaaattttaattagattgcatt

SEQ ID NO: 71382 - DNA, 891 bp, Homo sapiens
tggcttgacctgtaaggtggacacatttcaggctttctaagccaaatactaattttaaattttttttattttaatgttgaagagagtaggatggatcaacaacaaaagcaccacagccctagtgagtcgatggaagctttggctggcctccataaatgcttattgtagagagcgttttaaaagcaatcttacgtttgtttgaatgcttacatttgcagaatgcttagaatgttgatttgttttatctctatatctattagaatgagagaacagaactaagggggaaaaccaattttactttcaaaaatgtattattctgcaaattagttttaaaactacaaataaatactggtttggaatgagaagtttgaaagaatgaagaactcttcacttctagactgtaaattcctttaggacagggtctgtaccacattcatctttgaatcctcagaactgagcatggatcctgacaataataattatccagaagtattgtttttaaaaatttattttaattagtttatttttctagagatggtgtctcgctacattgcatgacctgaagtgcagtggctattcataggtgcaattgtagtgttctatagccttgaactcctgagctcaagaaatcctcctgcctcagcctcctgagtatctaggactacaggtgtgggccaccatgcccagctcatattgttttttttttttttwatcatgaattaagaaatcagtctcctgagtaagaaaaacatcaaatagcttattttagtaaagagaacaaaaataactaattagctaaagctttcatttttatagattatattgatattgtatatataaccaggaaaagtcagccaaaataaaatgaaaaaattttaattagattgcatt

SEQ ID NO: 71383 - DNA, 891 bp, Homo sapiens
tggcttgacctgtaaggtggacacatttcaggctttctaagccaaatactaattttaaattttttttattttaatgttgaagagagtaggatggatcaacaacaaaagcaccacagccctagtgagtcgatggaagctttggctggcctccataaatgcttattgtagagagcgttttaaaagcaatcttacgtttgtttgaatgcttacatttgcagaatgcttagaatgttgatttgttttatctctatatctattagaatgagagaacagaactaagggggaaaaccaattttactttcaaaaatgtattattctgcaaattagttttaaaactacaaataaatactggtttggaatgagaagtttgaaagaatgaagaactcttcacttctagactgtaaattcctttaggacagggtctgtaccacattcatctttgaatcctcagaactgagcatggatcctgacaataataattatccagaagtattgtttttaaaaatttattttaattagtttatttttctagagatggtgtctcgctacattgcatgacctgaagtgcagtggctattcataggtgcaattgtagtgttctatagccttgaactcctgagctcaagaaatcctcctgcctcagcctcctgagtatctaggactacaggtgtgggccaccatgcccagctcatattgttttttttttttttartcatgaattaagaaatcagtctcctgagtaagaaaaacatcaaatagcttattttagtaaagagaacaaaaataactaattagctaaagctttcatttttatagattatattgatattgtatatataaccaggaaaagtcagccaaaataaaatgaaaaaattttaattagattgcatt

SEQ ID NO: 71384 - DNA, 989 bp, Homo sapiens
gcatttctcttatatgagtattagatactaatggtatcctaattatttatatgggcaagagattttcaatatctaaaactaactatagatttacagatagtcaaacagttgcataactttctattgtaatttattatttgctgttggaaagcaaattcatttattgtaaccaaaagatgtgttacagggttatttcatayatgggagattttcaaagtcctgcaatgatgacattgatatagtgccactactctgttataacctttgtatattatttaagtgtaacaaatacttcattcattgcttgccctaaactttgcatttggtgacattcttgctgctgtgttaatatcaggtctattaagctggacctcatggtccattaccctttctttagatttgaccccatgaagtttaggggtcttgagcacagtgtgaaaaagcaaagggtttcactctcacccaaggagctcattaggactttatagaaacacaataaatactcacacagtactaacatttgcactgagggatgctcaccagacacacagcctggtgtcagaaggtgtccattgttccctttatttaggcctgcacactgatttagcctgctaactaaagagagtgctcatttgtaagctggcattttttttctttgtaagaaagattcatttactggtatcttagctttgtgggatttttttccacctttctctgtcttgatccatttcttaatgcttctacttaaattttgaattgcataatttaaatcaacctccacaatccatgaaggaattccagtgagaactgctgacagcaatatctgtactggagacctttattctctcataaactacaatgtattataattcatcaaacccatttgccttattaaatacagtcttataatgcaagtaaatattactaggttggtttagaggagaactgccgccaacaaagctactttagctttaattttaaagtccagt

SEQ ID NO: 71385 - DNA, 530 bp, Homo sapiens
cataaatttcccacttgctttatagaaatggacatatatatatatttggaatctgacttccctcatttagcatactatgtttgaagttaattgaygtgttagcacgtgctggtcatgtgttttccttcatagtctgctgtgtttattcatacagatagtgtttattcatttatcagttaatggacatttaattgttttgttattttctttgatgagtaatgtagctttgtgcattcatatacagtcatgtaatgcataatgacattttggtcaaaaaaaatttttttttttctgagacccaggctggagtgcagtggcacaatctcggctcactggaacctccatctcccaggtttaagcaattctcatgcctcaacctcccgagtagctgggacaactggcacacaccaccacgcctggataatttttgtattttcagtagagacaggattttgctgtgttggtcaggctagtctcaaactcctagcctcaggtgatccacccacctctgcctcccaaagtgctgggat

SEQ ID NO: 71386 - DNA, 556 bp, Homo sapiens
caaaatgccagggactctatttcttgctccttagctcctcgttcttgcctgtctttccacgagggaggattttctagcaggagctcaagctgtgcttttaatgaaacacatccacacacactgtcctgttgtccacattaakcagagctccctgaatagctcatgaacaaaagcatctatgactaactgttgctctgtgtcctcctagcctctgaggagtctctagttcacaaggacagaggagatggagagaggccagtcaacgtgagggtaaggttgccttgctttctctgaaatagaaatgttcctttcttgttgtctttctttttcaactgactttacatgtgaaaagatgacaatgtccatgacaggtattaaatgcagttttctgagggggaggaagaagtgactcttagcaactgatatgtaatccaaaatggcatttagctatgatggcttcaggttgtagactgtatccttggggtccttgtccttggaagcaatgtcttctccttggattcagtattttgcacttgccaacctacgtggacctgag

SEQ ID NO: 71387 - DNA, 521 bp, Homo sapiens
aaatgttgctttaaaacaagtgtaaatctcrtacatacaacaggcaaatgcagaagcagtgtggtctcgcaagttgtaaagaggacagtcgcaattttgctggacttcaacctgggtagaagacacgagggaactctgtcactaaatcacggcagagttcaaggccgcttgtagactatttcgtgttatagaaggtggcctttagctactaggcaaaggcctctgtttctcatttctttcctgttcatctccttggtcatccttcttccgcaagggaaacgagcccaagcaaaaggcagtttcaatattaatttgaccgaggttttgtgcagttaattatcatccaggtaatcaggtgcaacccagtctgcctagcagcccccctatctctgctctgtgttttcatttaataaacattttggtctacttactatgtgctagattttctcgagaccaagtaaatgagatagaatctttatgttggcagctaagttagatttcacataactgacaaaaattaa

SEQ ID NO: 71388 - DNA, 521 bp, Homo sapiens
aaatgttgctttaaaacaagtgtaaatctcgtacatacaacaggcaaatgcagaagcagtgtggtctcgcaagttgtaaagaggacagtcgcaattttgctggwcttcaacctgggtagaagacacgagggaactctgtcactaaatcacggcagagttcaaggccgcttgtagactatttcgtgttatagaaggtggcctttagctactaggcaaaggcctctgtttctcatttctttcctgttcatctccttggtcatccttcttccgcaagggaaacgagcccaagcaaaaggcagtttcaatattaatttgaccgaggttttgtgcagttaattatcatccaggtaatcaggtgcaacccagtctgcctagcagcccccctatctctgctctgtgttttcatttaataaacattttggtctacttactatgtgctagattttctcgagaccaagtaaatgagatagaatctttatgttggcagctaagttagatttcacataactgacaaaaattaa

SEQ ID NO: 71389 - DNA, 521 bp, Homo sapiens
aaatgttgctttaaaacaagtgtaaatctcgtacatacaacaggcaaatgcagaagcagtgtggtctcgcaagttgtaaagaggacagtcgcaattttgctggacttcaacctgggtagaagacacgagggaactctgtcactaaatcacggcagagttcaaggccrcttgtagactatttcgtgttatagaaggtggcctttagctactaggcaaaggcctctgtttctcatttctttcctgttcatctccttggtcatccttcttccgcaagggaaacgagcccaagcaaaaggcagtttcaatattaatttgaccgaggttttgtgcagttaattatcatccaggtaatcaggtgcaacccagtctgcctagcagcccccctatctctgctctgtgttttcatttaataaacattttggtctacttactatgtgctagattttctcgagaccaagtaaatgagatagaatctttatgttggcagctaagttagatttcacataactgacaaaaattaa

SEQ ID NO: 71390 - DNA, 1412 bp, Homo sapiens
tagacaaattgattaaatacttggggctgtgggatcaggcaagttgaagtctagttcagttctgtgaactatagcaagttatttaatctcttggagcctaatttttctcatttttaaaatgggtatgaacataaaaatggattgttcttcatagagctgttgtgaggcttaaatgagccattgcatggaaagttcttagcacagagtttagcttaataactcaacaatttgcagtgtcatcatcaccatcatcaycatgaattcagtatttctggctttttacaagatccaaggggatcagttgctgttttatgttcctctttgctcatgctagtccctccatgtagactggcccctcctctcatcttccatttggttaccctctgcccacctttgcactcaccacctcctcgacattttccctccattcggtgccccaatgtctagtacttaccatgttcacacttgatcccaactccctctctgttaagactgagagatctcttggggacagggtcaatgttcatttatgtttataatcacagtgcctggcatgcagtaggaactcaaaaatgcttggtgaagtgaacaaatgtgcacaactcacctctgagacagaggatcccaccctccttgttttacagatgtgccaccgaggtgctgaaaggcaggtggatctgtgtggatctcacagggagtttgtggccaagctgggttcacatgaaacctgctgagccagctcagaacccctgctgcagcccagtgagtgggcagctgtgtagggacttcaggccagaggctgacaagtgcatgggggctgggcaggggcagcaaagtctgcctggaccatcccctgaagggccgtggttggcattcttgtcttgggtggctgatatctttctggtctctgctgctcatttaatcatgtggcttaatccctggggacctgttcattaaggcccatcctttgggcctcactgctacctatgatcagacaaatgggcctggagtgtccctgtgtcacccaggcatggggaggggcttggcccatcagcagctgggccacttatacccggcagtggcatctctggctaccactgtcaagcacctgctgtggcactgctctgcattccctaggagactataaagtgtgtgtgtgcctgtgtgggtgtgcatgcagacgtgtactagtgtacgggtgtgccagagagagaaagcaagaaagagagaaactctctctgaaatacaggaacatttttcttatttcttcttatttccctaaagcatttcctgagatgctgctttggagttcatagaagcagaaaggaacaactgaccctcttaaggacaagacccagagctggagcctcacagcagtccacattttttccctcactccctggagttatgca

SEQ ID NO: 71391 - DNA, 935 bp, Homo sapiens
tgcatgagctatgtgtgaggacaggtgcttcatgctcctgggagtcctgtgaggctggaggaggtcattctctctggggcggcctgtcctctccaagaggaccatgagtggccattgttggcaggcagaggcctcttcatttccctggccggctcaggctaccagtgtggctgccccgctgaacacgccatacatcacacgcctaatggtgcgttttagaacataagtggtaaccaccaaatgggacccgagaagggaattagagccagacacacagtggggaggggaaaaaaaatcaagagtagcctcagaggaaatggggccagatacaatcatcctgagacaggagaaaaccatctcccaagcatcaagaggccaggggagttcattttatttaaaatgggttccctttatggagagctggcctggatgctgggcaccatcaatgctacctgcactgggtctgcctagcctgacctgggccacagctttctgaaatgctctgtgacctccttccagccacctattcaggttttcattcaacaaatattttggcacacatactatgtggctcaaggttatgtactgtaacatttaaacttatgcaatgtgagccaaatcgcctgtctttgaatgatggttctgcccccaaactgggtagttagtgaatttcccttgcttcagttcttcctggtattaccctccatcttacaaaggctgtcatgatgttaasaaataaaaccggttaagtgtttagaatggcagtgagtaggtccccaagggtccctgtcctcctggaacacacattctaacattcaagcagagtgaggtggctgggggccagttgttttcaggtcccccgtgtccagttcaaggtctgcacacagtaggcattcagggcattttatgtgaaccaagcacagagcacacacaca

SEQ ID NO: 71392 - DNA, 1186 bp, Homo sapiens
cttttatttttgcacaataaatctttgtagaatcctaacatgtaagggagcatgtttttgtcaaccagttttattgttttgaagaaatacctcatctaaaacacttctgacacacttttgggcagctttagggtttcccagcccatatgaaatcctgataagtttctctggtattttggattgtccacacgactactctcagctcctcacatgcatgggtgattcagagctgactctggtcttcctcaaagcacagggcatagcttttattttcaggtgtcggcagcttctgttctttgcattctaagagaaagctgctatttgttttccatgctttccttcccactatcaaaaagcagccaaggccaggggaggtggctcatgcctataatcccagcattttgggaggccgcagcaggcgaatcacttgaacccaggagttcaagacccgcctgggcaacatggcgaaactccatctctctacaaaaaaatacaaaaatcagccaggcatggtggtgcatgtctgtgaccccaactaccccagctactcaggaagctgaggtgggaggatcaccagagctcaggaggtctaggctgcagtgagccgtggtcacaccactgcattccagcctgggcaacagagcgagaccctgtctcaagaaaaaaaaaaaaaaaaaaaaaaagcagccaaaagatgtggtatctgctattgcatgatccacactccgctttctatgcttttgttttaaaacagcgaggagttaggactgagwagatttcaagtaagagttctttaggagccctttatagcaagtgacagagcccagggtcatatattttggctggccaagaaacaagtgagactctctcagctttaaaaagaacagctgagattccaccagagatgatacgcaaaatctgtgtgtttgaggaatgagagatagtgatgttctggaaggtacacaggcagggtcagggagaggcagtatgaagaatggaagagggctaagtctcaaaaaataataatattcatcaaagcctggttccaaaagaaggggtgttttagtcagcttctgctgggataatatcacgtaacaaacaactccaaaacttagtagcttatggcaacaagtgagtctaggttggctgggcttggctgggcttggctccagtctgcaggctgaat

SEQ ID NO: 71393 - DNA, 1186 bp, Homo sapiens
cttttatttttgcacaataaatctttgtagaatcctaacatgtaagggagcatgtttttgtcaaccagttttattgttttgaagaaatacctcatctaaaacacttctgacacacttttgggcagctttagggtttcccagcccatatgaaatcctgataagtttctctggtattttggattgtccacacgactactctcagctcctcacatgcatgggtgattcagagctgactctggtcttcctcaaagcacagggcatagcttttattttcaggtgtcggcagcttctgttctttgcattctaagagaaagctgctatttgttttccatgctttccttcccactatcaaaaagcagccaaggccaggggaggtggctcatgcctataatcccagcattttgggaggccgcagcaggcgaatcacttgaacccaggagttcaagacccgcctgggcaacatggcgaaactccatctctctacaaaaaaatacaaaaatcagccaggcatggtggtgcatgtctgtgaccccaactaccccagctactcaggaagctgaggtgggaggatcaccagagctcaggaggtctaggctgcagtgagccgtggtcacaccactgcattccagcctgggcaacagagcgagaccctgtctcaagaaaaaaaaaaaaaaaaaaaaaaagcagccaaaagatgtggtatctgctattgcatgatccacactccgctttctatgcttttgttttaaaacagcgaggagttaggactgagaagatttcaagtaagagttctttaggagccctttatagcaagtgacagagcccagggtcatatattttggctggccaagaaacaagtgagactctctcagctttaaaaagaacagctgagattccaccagagatgataygcaaaatctgtgtgtttgaggaatgagagatagtgatgttctggaaggtacacaggcagggtcagggagaggcagtatgaagaatggaagagggctaagtctcaaaaaataataatattcatcaaagcctggttccaaaagaaggggtgttttagtcagcttctgctgggataatatcacgtaacaaacaactccaaaacttagtagcttatggcaacaagtgagtctaggttggctgggcttggctgggcttggctccagtctgcaggctgaat

SEQ ID NO: 71394 - DNA, 670 bp, Homo sapiens
ccccagctctgcgatgatggcagaagagcacacagatctygaggcccagatcgtcaaggatatccactgcaaggagattgacctggtgaaccgagaccccaagaacattaacgaggacatagtcaaggtaggctctgcaggcctgcctcggcgggcggagagtgtcaggtttgcgagacgtgggcgcttggcaggggagggtatctgctgcagacacagtttccctgaaaagagacttgttgctctgttgtctctgtatcacccccccaaccccaccccacccccaaaaaaaggcttctaaatcaccgaaggatctttagcaaaatcaagagcaaaaaattagcctcatctccatgacctaagtgctaatcagggcaggaggagcgagtcacaaagaaaatccctccttactactgtgacgctcctgccactcactcctggctctcaccctgggaggaacaggaacgggcggccaagttgggctcctttctgtgccaaggggcatttctgcggtctctccagtgggtgcagggttaatccccagagggcagcttccagcagggccggcagcccctcgaggtacactcactcccccagagcactgcccaatatctgtccccaaggccgagggccatgcccagccctcccctagctaccccctcaccccagg

SEQ ID NO: 71395 - DNA, 670 bp, Homo sapiens
ccccagctctgcgatgatggcagaagagcacacagatctcgaggcccagatcgtcaaggatatccactgcaaggagattgacctggtgaaccgagaccccaagaacattaacgaggacatagtcaaggtaggctctgcaggcctgcctcggcgggcggagagtgtcaggtttgcgagacgtgggcgcttggcaggggagggtatctgctgcagacacagtttccctgaaaagagacttgttgctctgttgtctctgtatcacccccccaaccccaccccacmcccaaaaaaaggcttctaaatcaccgaaggatctttagcaaaatcaagagcaaaaaattagcctcatctccatgacctaagtgctaatcagggcaggaggagcgagtcacaaagaaaatccctccttactactgtgacgctcctgccactcactcctggctctcaccctgggaggaacaggaacgggcggccaagttgggctcctttctgtgccaaggggcatttctgcggtctctccagtgggtgcagggttaatccccagagggcagcttccagcagggccggcagcccctcgaggtacactcactcccccagagcactgcccaatatctgtccccaaggccgagggccatgcccagccctcccctagctaccccctcaccccagg

SEQ ID NO: 71396 - DNA, 670 bp, Homo sapiens
ccccagctctgcgatgatggcagaagagcacacagatctcgaggcccagatcgtcaaggatatccactgcaaggagattgacctggtgaaccgagaccccaagaacattaacgaggacatagtcaaggtaggctctgcaggcctgcctcggcgggcggagagtgtcaggtttgcgagacgtgggcgcttggcaggggagggtatctgctgcagacacagtttccctgaaaagagacttgttgctctgttgtctctgtatcacccccccaaccccaccccacccccaaaaaaaggcttstaaatcaccgaaggatctttagcaaaatcaagagcaaaaaattagcctcatctccatgacctaagtgctaatcagggcaggaggagcgagtcacaaagaaaatccctccttactactgtgacgctcctgccactcactcctggctctcaccctgggaggaacaggaacgggcggccaagttgggctcctttctgtgccaaggggcatttctgcggtctctccagtgggtgcagggttaatccccagagggcagcttccagcagggccggcagcccctcgaggtacactcactcccccagagcactgcccaatatctgtccccaaggccgagggccatgcccagccctcccctagctaccccctcaccccagg

SEQ ID NO: 71397 - DNA, 651 bp, Homo sapiens
agcaggcttgggctcaggaactctgggctcatagtcactggtgtcagggttagttcagtatgaagaggtacaagaggaaagtagttagctaaggagtctcctcctcttccagaactcaaagttaaataatgcttaggtgagagacagtaatgcagccaaaatctcaaacttacataaaatgctactgcttgaaccaccaaatatctcataataaaaccatgtgtgccctggatacaccatacttttccactctcccagtgattcagctatgaaactacaaaatgtcaactgcacagcaagcctctccacctttggaaagatagtagagtttaatggttgagggtgctgacttttgacaattaggttagaatctcatctccatcacttattacttattgctatatgaccttgggctggagacttacccctttgagcctcagtttcctcactgtaaaacagggataatagwacatcataatgttatatttaaatgagatcacacatgtatttactatgagttaggctcatgttgacagtggggttaaaatgcctaacttataagccagtgggagtgatggacaaacaaataatcatataaatgtgctggaaagagatggacacagtgctgtaagcgcctactgtaggaggact

SEQ ID NO: 71398 - DNA, 651 bp, Homo sapiens
agcaggcttgggctcaggaactctgggctcatagtcactggtgtcagggttagttcagtatgaagaggtacaagaggaaagtagttagctaaggagtctcctcctcttccagaactcaaagttaaataatgcttaggtgagagacagtaatgcagccaaaatctcaaacttacataaaatgctactgcttgaaccaccaaatatctcataataaaaccatgtgtgccctggatacaccatacttttccactctcccagtgattcagctatgaaactacaaaatgtcaactgcacagcaagcctctccacctttggaaagatagtagagtttaatggttgagggtgctgacttttgacaattaggttagaatctcatctccatcacttattacttattgctatatgaccttgggctggagacttacccctttgagcctcagtttcctcactgtaaaacagggataatagaacatcatartgttatatttaaatgagatcacacatgtatttactatgagttaggctcatgttgacagtggggttaaaatgcctaacttataagccagtgggagtgatggacaaacaaataatcatataaatgtgctggaaagagatggacacagtgctgtaagcgcctactgtaggaggact

SEQ ID NO: 71399 - DNA, 571 bp, Homo sapiens
tctgcttcctctggctgagatgcagcttggcaggctgcagtgaggcagtgagcacggtctgagatggcctggggcaaatgcaaacacacttgggaatggaaggatagaggctagtgcttggcatcctaaatcaccagtgctagaagagatctaggccagcactttcattttataagkgagaaaaccgagacctagagaggagaaataatttgctcaaactcatgtagcaagttagtgacagagctgagtctagaatctaggttttttcatctccagctaatctcttcccactacccactgctttatctccaatttctaagattttggaatctttgctggaccccttttcacttggttctacaggcttctgagcccccagatgtccccctaatgcgtgccacccacttccaaactttatgaccttccttggattctaatcagcctgatctcttcactggtaccttgacctcccactgcttcccaatttctatactggaagtttcgccatcccttttgcctgggatgccacaccctctcatccttactcagtcaatcctgtgcatccttcaag

SEQ ID NO: 71400 - DNA, 710 bp, Homo sapiens
cccaggctggagtgcagtggcacaatctcacctcactgcaacctccgcctcccgggttcaagtgattctcctgcctcagcctcccaggtagctggtattacaggtgtgcaccaccacgctgtgctaatttttgtatgttttatagagatggggtttcgccatgttggccagactggtctagagctcctggcctcaagtgatccacccgcctcagtctcccaaagtgctgggattacaggtgtgagtcaccacgcccagccctgggcagctagctatcttgataacatctgccatctaagaggacattcattttgccaattttattgtcaccaacaacgtaatatttacccttggaagtgataagactaggtggatctactctcttcctacattaaacgggaagttgatataatcactgaagctgctataagcttctttgaatagcagagygtagacctggtgagacagaccaatgccttcagatctgagcttaacagagcctgcctatgatgactagtgacaggtgcttgcacactattttccacaggcccatctggactgcacacactcaacggatgccaattacataacgatcatacacagctgggaatagacccacttgtacaaaatggatccagtggtaatggtgtctccccattctcaccttcatagcgatgctttcagaaattcattaaagtttgttgagtttt

SEQ ID NO: 71401 - DNA, 710 bp, Homo sapiens
cccaggctggagtgcagtggcacaatctcacctcactgcaacctccgcctcccgggttcaagtgattctcctgcctcagcctcccaggtagctggtattacaggtgtgcaccaccacgctgtgctaatttttgtatgttttatagagatggggtttcgccatgttggccagactggtctagagctcctggcctcaagtgatccacccgcctcagtctcccaaagtgctgggattacaggtgtgagtcaccacgcccagccctgggcagctagctatcttgataacatctgccatctaagaggacattcattttgccaattttattgtcaccaacaacgtaatatttacccttggaagtgataagactaggtggatctactctcttcctacattaaacgggaagttgatataatcactgaagctgctataagcttctttgaatagcagagcgtagacctggtgagacagaccaatgccttcagatctgagcttaacagagcctgcctrtgatgactagtgacaggtgcttgcacactattttccacaggcccatctggactgcacacactcaacggatgccaattacataacgatcatacacagctgggaatagacccacttgtacaaaatggatccagtggtaatggtgtctccccattctcaccttcatagcgatgctttcagaaattcattaaagtttgttgagtttt

SEQ ID NO: 71402 - DNA, 710 bp, Homo sapiens
cccaggctggagtgcagtggcacaatctcacctcactgcaacctccgcctcccgggttcaagtgattctcctgcctcagcctcccaggtagctggtattacaggtgtgcaccaccacgctgtgctaatttttgtatgttttatagagatggggtttcgccatgttggccagactggtctagagctcctggcctcaagtgatccacccgcctcagtctcccaaagtgctgggattacaggtgtgagtcaccacgcccagccctgggcagctagctatcttgataacatctgccatctaagaggacattcattttgccaattttattgtcaccaacaacgtaatatttacccttggaagtgataagactaggtggatctactctcttcctacattaaacgggaagttgatataatcactgaagctgctataagcttctttgaatagcagagcgtagacctggtgagacagaccaatgccttcagatctgagcttaacagagcctgcctatgatgactagtgacaggtgcttgcacactattttccacaggcccatctggactgcacayactcaacggatgccaattacataacgatcatacacagctgggaatagacccacttgtacaaaatggatccagtggtaatggtgtctccccattctcaccttcatagcgatgctttcagaaattcattaaagtttgttgagtttt

SEQ ID NO: 71403 - DNA, 669 bp, Homo sapiens
agtaacccaatgctctttgcatggttggctccctggaaagcatacatgaaggctatgctgacttagttaaggcttcttgctctggatttgctattgtgactaggtttttccttctagaagaagcttgacttcctttacctccatcatatctgtttctgcaaccagctcctccaacacctttacccctgaagcaagccaagtcactgagagccaattctccagaaagaaaaattgctgaatgaccaattcattgagagacaatttagcaaatatgtgtgtacagcagacaaggccagtacaatcctgtaagtactaactgtatgaaggggaaatgagaaagtggacctgtggtgacaaagtattaggcacttgcatccaccaagcaccatttcctttcaatactctyaggacccaggtcagctcagggaagaggctgcttgtccaagtatcacacagcttaggaatgtctattttgatttcagaagaaaaatgccttcttttactcaggtgcatttttcagtattaacacatcaatgtgaatcttttttattttattttattttgagccagagtcttgctctgtcacccagggatcaacgtgaatctcgagagaagacatttgatttccagtatctttgccctctgctcttcgtgtctaatttgaactca

SEQ ID NO: 71404 - DNA, 669 bp, Homo sapiens
agtaacccaatgctctttgcatggttggctccctggaaagcatacatgaaggctatgctgacttagttaaggcttcttgctctggatttgctattgtgactaggtttttccttctagaagaagcttgacttcctttacctccatcatatctgtttctgcaaccagctcctccaacacctttacccctgaagcaagccaagtcactgagagccaattctccagaaagaaaaattgctgaatgaccaattcattgagagacaatttagcaaatatgtgtgtacagcagacaaggccagtacaatcctgtaagtactaactgtatgaaggggaaatgagaaagtggacctgtggtgacaaagtattaggcacttgcatccaccaagcaccatttcctttcaatactcttaggacccaggtcagctcagggaagaggctgcttgtccaagtatcacacagcttaggaatgtctattttgatttcagaagaaaaatgccttcttttactcaggtgcatttttcagtattaacacatcaatgtgaatcttttttattttattttattttgagccagagtcttgctctgtcacccagggatcaacgtgaatctcgagagaagacatttgatttccagtatctttgccctctgctcttygtgtctaatttgaactca

SEQ ID NO: 71405 - DNA, 687 bp, Homo sapiens
caaatatggaagattctgataaactaaaaatattgtttttraagtgtttactctttaagacagatacctttaagatactgatactgatatctttaatatagatatcagttatagctaattggggtcattacacttgcttccaaattacatttactttagtctaaagttaacagttttaacttctaaatgttttgctttcaatgtctaaaaaattattttaaatatattttaacttgaaaaagtcgcttatccctttctccttggatcataacaagaaagaattttcaatgaagggaaagaagagataattttgtggatttttttttctttttaaagtatctgtattctgaaaatgaaaaacacaaattttaattctgaaggagaaaaaaaatcacaatgtagattgtatataaagttattacatgtgcaatgactacaaaacatcatactacagtttaattggcatgaggtattcatttctcaccattgtcttcgttaatggcaaaatgaaatctagtcagacaatttaccttagtgggggataccttagtgcactcttcagtcattgaaagtctctggaacctgagcatcttttccttccggtctctctaatggtccctacctggatgcagtacaagatgctgagcttcctctttgcatatcagattctgcttaacatcaattgta

SEQ ID NO: 71406 - DNA, 861 bp, Homo sapiens
catgctttctcatctaattgattttttgcatttcggcaaagtaaaggatgtgtttttctagataattatatctttagaacaagactggtcacatatactggcctgctatcaaatgactttctaattttgattgtgttgtagataagcactcactcaatcaccattagtttattaagagaatttttttttcttttgcacaggaatgtactggtcttctgagtatactgaattaaatacaaaggcactaccctcaaagaaatttagatttacataaarataaatctgtcagaaaatatatgaaagtgtcagaaaatataccaaactatattcaaaggtagctgatgtagtacagcctggaaatcccgtagaaggtgccaagattccttattttcatttgattctaattggagaactagcaatctgagttctcctttatttttttctatgatataaatgctatcttctgaaactattattctcccagtcctcgattgtgttattcatgcctgctctcacctgtttatgcctgaatctcttgattcaagtcgatcatttattgaaattacatttgagaaataaaaagagtagcttgtctatgggaaaaaaagtgagagtgggggggttaatgtgggactgacaagtggtgtatgcaggtaattccaccagagacaattgatgctcctctacaataggaaaccaaacaagatgagattttccctagtcctctggggaaatcattcaaatatacactcttaccaaactctaatattgttcttgcttttgcctgtttgctttgatgaagctgataataacagaaatttacatttatttgcatttttctactagaagtcactgaagcat

SEQ ID NO: 71407 - DNA, 931 bp, Homo sapiens
agatctatgtcttcaagatttaactcagatcaccacattctagaacgtggtgttttgaatagaagcattacatctatctaaccacctttccccatctgtggaatccaggcagtttcactagaaaggacttcttagtaaaagcagcattaccagccagctcagcctgctatgaccctgctcaccattgctattctccctgatctcccatataaaaagatgaaaggccagactgctgtgattcctctaagactcagttccttccatcctggggtgtgagttgtgatacaacaccaataaaaattctaatcagtcattttccaccttcagtcacctcctccagcctcagactcaggtctccattttgggtgggatttattggcaccttttgttaagctatgggcaaggggaaggatgatgaccaaaatgtaaagtgaaaaacaaactctctagaaaaccaaaaagggtgctgtaaaggtgccacaatctctatttgtacctaaattattattttgttacccctgtaattattattttttgttttatcaaatgtttctctcatcttttttgagacaaagtctcactctgtcatccaggctggagtgcagtggcacaatcttggctcactgcaacctgtgtctcctgagttcatgcaggtctcatgcctcagcgtcccaagtagctgggactacaggcgtgcgccaccaagcccagctaatttttgtatttttagtagagacagggtttcaccatgttggccaggctggtctcaaactcctgacctcagttgatctgccctcctcagcctcccaaagtgttggaattacaratatgagcctccacgaccaaccaaatgtttctttcttgaggccagcagagtcttggtatgtccccaaacatttaaggtgggcttattggaaggtttactgtacag

SEQ ID NO: 71408 - DNA, 1397 bp, Homo sapiens
tagatgtactattattttccattgatatatatatatatatatatatatatatgtatctatcatttactagaaatatatattttaatgctataactttctaacatttttatgtttgctaagccaaaattggtatttctcttaggatactttgaacagccattacaaaataccatacatagcatggcttaaacaaaagaaattattttttcacagttctagaggttggtaagtccaagataaagatctggcagtgttcagtttctggtgagggctctcttcctggtttgcaggtagccaccttctcattgtgtcctcatatggcagagagggagagcaagctctctggtgtcttttcttagaaggacatgaataccatcagaccatgtcctcaccttcatttcttcctctaatcctaattacctccaaatacaaacatgagtaatttccaaatgcagtcacactgggagttatggcttcaatgtgtgaactgagaagggggggtataatcattcagtccataacagtattgaacttccatttataaataacataaatttttgttatttgtttattcttacagataaaattcatccatctctgccctggctttaggtaataatactctattgagtttactttcatatgtcagcttcaatctttttttgaacaaagtgtagtataaaaaattttattgtactagagaattttggcttcaacttattttttctaaatgatgcattttgataacttccacctaaagtttggttggaagtatttttagagaaaaggtatttaaatttagtaacagtgtcttcagtaaagttaagctcacccatctgatggtaggaaatgtatagctttttgcctactctcaagaaatcaaatattctttcctgaaccaatacttctagtcccataagagaaaaaatttgaatgattttatacatgaagaacagagatcatttatycttatacctattggaatgtaggaattcacacatgaaatgaaagtgacactgataagtttgcagaagtgcaactatgaaggacatctactgagaaactgtgtcttagagtgtattgggatgtattattgaaagctggcataaggagaataggttcattagcttatgacatcttctgagtcatggttgaagccattcaagtcactttattaaatttctccctacaaagatttttggcctggtttattgtgttttccagacataataagcctaaaggggggattgtaacagagtcatgactaccactaaccattttagctcactaagaacacatatgaaagtgttcaccatgcaagagtatgcacaggctctaaacaatgtctgtggttttaaatatttttttatgagaagttattgtcttttccataggat

SEQ ID NO: 71409 - DNA, 1015 bp, Homo sapiens
ctgagtcacagcacagagtgccacacagtagagcccaccaacctgcactactctttgcataaggggcaaagaaatgcttattgggtttagccaatgatatatacatatgttattttttaaaacagcaatcagtggtatcttgactagtacacaaaattataatggtatttttctcttttttaaaagaatacatctaatgttaagcatttaaaataccttagaattaaaataatagaggaataaaaggtgagttgtctaatttgttaacatgaaaaatgttttagaaacaaaaaattctaataccttccaatatgaatctgtagactactagctggaatagaaagtaaaagcaaacaactattggagtggctacagaattcttctttgttctttggccttttggttttatcagaacatctctgacaaaaagtttacaaacaaactaaaagttgatttttgagtataatggagcaatggcaccatttttgtatgtggattttcgacattttttattataaagtkatcaaatatatccctgcatttgtatttataaaatattgttttcagtgggagaaagtaattcaagcgtagaccaccaaaaaccttttataatgtattataaaatatcatttatgctatgaaagtgaaaattttaagtaagcaggagcttttattgttcaacttgcaggactatcaaaattctactgcgtataatttattttaggtccatctaaatagtcttttgttgctggaagcacagactgctatggttttccacaaattttctatatgatatataatagtattgatcatcatgtgatcattattaataacagattatcacatgatctgttaattctgtaatcacacactgttggaaagagatatgttaccagaatatcaaagaagagtatgttaccagattactcctagactaagttaagtctttttgagccctccagtattctgcagagaacaatacactaaggatcagaaaatctaggtttcaggatcc

SEQ ID NO: 71410 - DNA, 705 bp, Homo sapiens
ctgggaaaggaagcacccgaagccggggtccccaggagctctccctcccctcaacaggagctctgactcacaacctgtttggcactgctgagtcctctccggtttcctgaatctccctctctctaatgcaaaaagcctccatggcagatgttttagaacaatgatcacgtcaatgacgctgtaacccactactttctttttgcatcatagaattttttaagtgtttttgcagacttactctttaaggttaattacatgttttggattgagcctttgggaagactttacagtggtcctatcggataactgcgggccccaaggctggagatctgttaatagggtgggcagaaagggactgggagygagactgggttcagaatctcaagtaatttggagtgtgcctagggattgggatgatttggctgggcattaatttgaaggtgaatatgcgtctagagattgcggggatttctttttcttggagggcaaccgtgggtgtggaggaatttggtgtgcagaaacagaaaggtctggttcgggcttcctctgggaaggcaaggccaagtggccaaggctgagaaggggcaggggcgaccgtgctggggcgggtccgcaccagctcctgggagcagagagcagagccgggcaaagagatggggttgtccaggctagggtgaggacgcggccggtgacagcgcgggtggg

SEQ ID NO: 71411 - DNA, 737 bp, Homo sapiens
ctaatactgtgcatgctcactctgcttaaacccttccactcccaatcctgtctctcttctgtgcccccatagaactatgttcatttctttactggtctgtagtattttgtcatgaggattacaaagcaattcttgagattttggagaatattaattggttgcttcaacagctattttgaaaaccattaaaatttaagttgttttccttaccaagtagtggcagaacaaactgagcctgtagggaaactttragggttggcatcagaatcaaggtgctgaatttggggcttccaggtctaaggactgtaccaagttggccgcatcaaaatatcctgcttttcccttctgtacgggcttggactgggtgactgctttgggatcttggggcctggtccccgactgccttgtgttctggctcggagtatatgggccatctccccttctaagactgagcactgtgtgtcaggactgggcgggttttgtctttgctctcacagtgatgccctgaacagcttttacagcttctgcaaagatgtgtgaaattgaatcataaaccagaagttccatccagccgcccagtgaacttggcaaagacagaagtgttcatcttccttgtgttgtgttcgcccacatgaatctctcctcccattcccagaatggccccgtcatcctctccttttccctgtataagtgagttctcagccagttggctctgctcttccaccctagactcacca

SEQ ID NO: 71412 - DNA, 1290 bp, Homo sapiens
ttgaaaatttatatttttttctttgtgaaatgccagtttatgtccttgctcatatttttttttatttggtcctgagattattcttgggaacagcatgccaaggcccgacataaagtttctctcatcctaaccaacatacaaactcttcccaagcaacagtctacacagagacccgttcttctcacatcctggctctctctctctccctctgcgagtcctcctcttcttttgacaccactcacataagcagttcacacttgtgcctgcttctccatgaggatttccactctctaaggaggtagaggagtgcagagatttatttgctggggtcacatgcagagggcgtcggagaaggcagccaggacaacggccaatgtcattgttcagccgtcattgggactgacattggagacagcgtcttgggctctggaaggaagggagcgttgacaactgtcattatttctagtctccccagggcatgcagaacattacatgcaccttgctaatggcctgcaatgataagatatgtatcagtgtgaataatcttgcttagtgagagtaatgggctgggtgacggggtctgtctgtctcatttctattggcataaatagatctgggcactatgacttccacagaggagtggaattacagagtcactgagggcctaactttagttttggaaagagcagaactctggagacaaggctgagctcaggagtgttgtgtatgtttgtgtttctagctgtcatagtctgaatgctgggtcccccaagtttatctgttgaaatccaaatccccgaggtgctgatactaggaccaggggctttgggaggtgattacgccctgagaatggagccccgatgagtgggattggaggccaagggagctttttggcctgtcccccttaagaagtaagaaggtgtcttccgtgaaccaggaagcaatccccgcccccgcccccacccacccctcrccagacaccgaatccctcagggctttgatcttgcacttccagcctccagaactgtgagaaatcaatgcatgcacaagtcacccaggttatggctgaatgttacagcaatgaatggactaagacagtgcccatgtgatgcctgactttactgcagacacctgtactctctcctgcagcgtcctcactggcaccatccccccaaggtggagtggaggaacgttgtcaccatctggcacagacattgtcactgtcatggatgggcagtcggccaccaaagtgtctggtgccagcagttgcacccctaaactcccctgatg

SEQ ID NO: 71413 - DNA, 1290 bp, Homo sapiens
ttgaaaatttatatttttttctttgtgaaatgccagtttatgtccttgctcatatttttttttatttggtcctgagattattcttgggaacagcatgccaaggcccgacataaagtttctctcatcctaaccaacatacaaactcttcccaagcaacagtctacacagagacccgttcttctcacatcctggctctctctctctccctctgcgagtcctcctcttcttttgacaccactcacataagcagttcacacttgtgcctgcttctccatgaggatttccactctctaaggaggtagaggagtgcagagatttatttgctggggtcacatgcagagggcgtcggagaaggcagccaggacaacggccaatgtcattgttcagccgtcattgggactgacattggagacagcgtcttgggctctggaaggaagggagcgttgacaactgtcattatttctagtctccccagggcatgcagaacattacatgcaccttgctaatggcctgcaatgataagatatgtatcagtgtgaataatcttgcttagtgagagtaatgggctgggtgacggggtctgtctgtctcatttctattggcataaatagatctgggcactatgacttccacagaggagtggaattacagagtcactgagggcctaactttagttttggaaagagcagaactctggagacaaggctgagctcaggagtgttgtgtatgtttgtgtttctagctgtcatagtctgaatgctgggtcccccaagtttatctgttgaaatccaaatccccgaggtgctgatactaggaccaggggctttgggaggtgattacgccctgagaatggagccccgatgagtgggattggaggccaagggagctttttggcctgtcccccttaagaagtaagaaggtgtcttccgtgaaccaggaagcaatccccgcccccgcccccacccacccctcaccagacaccgaatccctcagggctttgatcttgcacttccagcctccagaactgtgagaaatcaatgcrtgcacaagtcacccaggttatggctgaatgttacagcaatgaatggactaagacagtgcccatgtgatgcctgactttactgcagacacctgtactctctcctgcagcgtcctcactggcaccatccccccaaggtggagtggaggaacgttgtcaccatctggcacagacattgtcactgtcatggatgggcagtcggccaccaaagtgtctggtgccagcagttgcacccctaaactcccctgatg

SEQ ID NO: 71414 - DNA, 1290 bp, Homo sapiens
ttgaaaatttatatttttttctttgtgaaatgccagtttatgtccttgctcatatttttttttatttggtcctgagattattcttgggaacagcatgccaaggcccgacataaagtttctctcatcctaaccaacatacaaactcttcccaagcaacagtctacacagagacccgttcttctcacatcctggctctctctctctccctctgcgagtcctcctcttcttttgacaccactcacataagcagttcacacttgtgcctgcttctccatgaggatttccactctctaaggaggtagaggagtgcagagatttatttgctggggtcacatgcagagggcgtcggagaaggcagccaggacaacggccaatgtcattgttcagccgtcattgggactgacattggagacagcgtcttgggctctggaaggaagggagcgttgacaactgtcattatttctagtctccccagggcatgcagaacattacatgcaccttgctaatggcctgcaatgataagatatgtatcagtgtgaataatcttgcttagtgagagtaatgggctgggtgacggggtctgtctgtctcatttctattggcataaatagatctgggcactatgacttccacagaggagtggaattacagagtcactgagggcctaactttagttttggaaagagcagaactctggagacaaggctgagctcaggagtgttgtgtatgtttgtgtttctagctgtcatagtctgaatgctgggtcccccaagtttatctgttgaaatccaaatccccgaggtgctgatactaggaccaggggctttgggaggtgattacgccctgagaatggagccccgatgagtgggattggaggccaagggagctttttggcctgtcccccttaagaagtaagaaggtgtcttccgtgaaccaggaagcaatccccgcccccgcccccacccacccctcaccagacaccgaatccctcagggctttgatcttgcacttccagcctccagaactgtgagaaatcaatgcatgcacaagtcacccaggttatggctgaatgttacagcaatgaatggactaagacagtgcccatgtgatgcctgactttactgcagacacctgtactctctcctgcagcgtcctcactggcaccatccccccaaggtggagtggaggaacgttgtcaccatctggcacagacattgtcactgtcatggatggrcagtcggccaccaaagtgtctggtgccagcagttgcacccctaaactcccctgatg

SEQ ID NO: 71415 - DNA, 1069 bp, Homo sapiens
aacagtatccaagaagtcatttgccagcagatttcttagaggtgcgataaagaagaggacattgccagtcgtcacagcagctgcaatagctcctctctattgttaaacagtgggatatcttgtacaggttttcagttgacaatcaattttaaagattagtttcagtccccatcaatcaattatttattaacccatcaataaaaatttaaatgctctgtgaggtacaatagctattaaaagagacagaggcactttctgtgtccagaggggcttttagtctgctctggaaagcaagatgtgtgcagatgagtgaygcagtgcatcgtgtggatgcaaagggagggactcacatgggaaccagaggagctatgaagggaggcagcggggactggtgggtcgagacctggaaataacacatgaataggcaacaaaggtttccgttcctcttccatgcacttcagtccttgaaaaatgtcttaccacagaattccacagcgtaccaagcgattccacagcttgatggcacactgtcctttctcagcattcttgaaaatggcatgtgagccaagccatcttactgagaaattaccttaaaccatttgatgaaccaaaaatattttgtaatacccatctctgacattaggtaggcaaatcacacagaaacagtgaggtcttctgagtcatatttatctgaaaaatcacagcttgggtgcatgtgaagccagaggggcagtcctggggcctgcggtgccatcgctcagctcccctgggcttcacatggccatggagcatccagcaagtgcaggctctgagccttcagggaggggcggcatcagccagcaccatcgtctcctgggtcttgtgcctcttccttggttgcggtgttgtcagggccagaatggggcagttccgggtgacatccaggtgtggttgctgatacggagcacaggtgaggttcactgggttaagtgggccatggccttgggcttctagtgcagagcacaccatccactcagcatgtgaacccagctccaaagtgtatgtgtgcatgtgtgtacctgtgcacatt

SEQ ID NO: 71416 - DNA, 664 bp, Homo sapiens
ggatccaattagagtgaatttaggttggaagaaggttctttcttcatctttctttatctctgaataatttcaaagttgacagaccatggttgctgacatctttattgagaaaacaagagttttgcccacgcttatttaaatgtacttatattttcctgtttgctttacatattacatatgatgaacttttgaggatgggggtcataatttcctttttttctatctttctgaactaaaatatatatgtaaaaactcaataaatgatagagaattaattactgaacatatgtttgtattcacacagaaaggyggtaaatatagaagttgataggcagcttctagagccagatcacttgtgtttaaatcccagcattgctatgtggcttcaagaaagttactcaatttctctgtgcctcagtgacttcaattcaagtataacatgaagaaaataatgctactcatctttggagtggtgaagtgacttaatgcttaccaaacacttagaatatgctggcatatggcacatttagctattatcatttcaagataatttccttgctaagtgactataatgattacaactcataactgtagctttgaggaatacgtacacatattcaaagctgggaattgtttgttggcagctctactggtatatggaggg

SEQ ID NO: 71417 - DNA, 734 bp, Homo sapiens
tttttggcctgcttatgtggtggatttcattcatgtttcaaatgttgaatcggccatacatacctagattaaatgtgtgctacatgtttatttattatattttttttgtgatggatagattgaaataatcttttttattataaataaatttaagtaatctaggataaaaaatagcttcaatttttattcaaattgggtttagattgctgttttagtaccattttgtcraggatttctgtgtctatcttcataagaggtattggtccataatttttctttttgtactattttttctggtttggtattaaggtaatgctggcatcataaaatattttaggaagtatttcctctgcttcttctttctggaaaaattgtgaggaattggtattcttttttcttaactatttggtagaattcaccaatgaaactactgggcctggtgctttctttgttggaagtataattattgattcaacttctacaacaggtataggattattcaggttatgtatttatccttgtgtattttggtagttttgtgtgttttgatagttttgtgtgttttgatagtttgtgtatttcaagaagtttttttcattgtaactaagttataaacttgatagatgtagccttgttcatactatttctttattgtccttttgatgtttataacatcagtagaactaatgattttctcaaactacagatctaagtagtgcaagaaacactaacag

SEQ ID NO: 71418 - DNA, 1031 bp, Homo sapiens
tgcatttcaaagtaaattgcaaaaacatgagtacacttccctctaagtacttcagcatgcaggtcattacccagagtggaatatcttttttcttttgatgtgagatttgtatacagcgtatactatacatctgtttaaccagatctcatatcaagatgtaaacagtttggtttttaaaaacttcaatcattgtcattatttgtgatctaaactggcatttagtgtgttatatggtcaagtatggttgagaactaactttattaagatctgttgcttgatcttccaactccccatagattctttgactgtctctcttacgtattctgtaatagaaaaaaaatagttgttcgtaaatatggtatggaaagaagatggctgtaagattggtttaaatccccaactatacttctttagtagtaaaactagtctgtcggctccagacaggtttgtttaacctctctgagccaccgttttctcatctgtcttatagggctggtaacttccttatagagtaattagaacaaatgttattcttttctacacatgtaattcttaaaatgatttcccctgtatgggaaatgtactgcctggcctctgattttatgcttctctctcatttcagttgcctaaaatagacttttttgactattctaaattgacccctcttgaccagcgctgcttcatccaagctgctgacctcctcatggccgacttcaaagtgctcagtagtcaggacatcaagtgggccctgcacgagctcaaaggacactatgcaatcacccgaaaggtactctacttggtcttcctgttggggtcacacctcttgactacatcttcccatggtaacagaatgaacagttcagcttgtggaaattgggatggtttatgattgctaaggaatttattagggtgaagataaatagatgggtatttgctcatcgtgacggactaaatgaaaagaaataatagatagatgagaagcagagaagttctgctttgaccgtaaaaacatggagtgtaatacmttctac

SEQ ID NO: 71419 - DNA, 828 bp, Homo sapiens
ccaaattagagacagctggaaagcttgtggtcataagggtgaggtggtgaaacagcagataaacagctcctttgataagtttctctacaaagaggggaagaagaaagaggggctggcattgaaagagagatgagatcaccttctcaacaccgccacactggggattaagtttcagcaggagtttcaggcaaacactgcatcatagccaccccgcttctcattgctgcccagactgggaccccagcctgccctgcaccctaacagcgtagccacaggacatgagccccaaggcctcctatcccctgccacagtcaggagtcccacccagtcttcctgaaaggctcccastcttccttcttctcttgcaggcggaatggccttacctcacacacccttccttccgtttcaaatcaggtaccccttctccctcctgtttttaggatggcaaagacttgagcactttttttttttttttttaagacagagtcacgctctgtcgcctaggctggagtgcagtggcgcgatctcagctcactgcaacctccgctttccaggttcactgattctcatgccttagccccccaagtagctgggattacaggcgcttgctaccacgtccagctaattttttgtatttttactagagacggggttttgccatgttgtccaggctggtcttgaacacctgacctcaggtgatccacctgcctcggcctcccaaagtgctgggattacaggcgtgagccaccgcgcccaccctgatttgaacacatttaaatcctgataagggaaatctaacagagagaagctgaaggtaggaaagaaaag

SEQ ID NO: 71420 - DNA, 732 bp, Homo sapiens
atcctaaaaaatacagccatcggggaaacaccaggaattcattacattctactcaagatttttgcaatgtctgtaactcaaagtgaatttatatctaaaaaatatgaaaaaaatgctaaaaataagaaaaagacaaccctgaaggaaatacaggcaaaggtgatgaacatacaaagcaatcttatactgtttatggctacactcctgtctagtaaataaacaaaaacacgtatcaattttggccaggtgcagtggctcacgcctgtgatcccagcactctgggaagccaaggtgggtggatcacttgaggtcaggagtttaacaccagcctgcccgacatggggaaacycgtctctaccaaaaatacaaaaattagccaggtgtggtcgtgggcgcctgtgatcccacctactcgggagacagaggttgccgtgagcccagatccagccactgcactccagcctgggcgacaagagactcaaccccccaaaataaaagatatatagcaattttaagtttaatctcagtgagggagagtacaaagggtcgtcaacagtatttaggaggttttagttctgtaagaaaatctgaacccagcatactttttttttcacatccattcggctcagaatgaagtaaacttttgacatctgctcaatttggatcatgagtacaaaggctccattttcttttactttgctatgtatttagatctcttccaatattactaat

SEQ ID NO: 71421 - DNA, 732 bp, Homo sapiens
atcctaaaaaatacagccatcggggaaacaccaggaattcattacattctactcaagatttttgcaatgtctgtaactcaaagtgaatttatatctaaaaaatatgaaaaaaatgctaaaaataagaaaaagacaaccctgaaggaaatacaggcaaaggtgatgaacatacaaagcaatcttatactgtttatggctacactcctgtctagtaaataaacaaaaacacgtatcaattttggccaggtgcagtggctcacgcctgtgatcccagcactctgggaagccaaggtgggtggatcacttgaggtcaggagtttaacaccagcctgcccgacatggggaaacccgtctctaccaaaaatacaaaaattagccaggtgtggtcgtgggcgcctgtgatcccacctactcggsagacagaggttgccgtgagcccagatccagccactgcactccagcctgggcgacaagagactcaaccccccaaaataaaagatatatagcaattttaagtttaatctcagtgagggagagtacaaagggtcgtcaacagtatttaggaggttttagttctgtaagaaaatctgaacccagcatactttttttttcacatccattcggctcagaatgaagtaaacttttgacatctgctcaatttggatcatgagtacaaaggctccattttcttttactttgctatgtatttagatctcttccaatattactaat

SEQ ID NO: 71422 - DNA, 678 bp, Homo sapiens
aaaaactcaaattcagaggcattctactacaaaatactgacctgtaatctccaaaagtggcaaggtcatgaaagctaaggaaagattaagtaactgttttagacctaaggagaataaagagacataataatcaaatgtaacacatgattctgaactgtatcattctactctagagggcattaataggaaaaattgatggggctgttgagtggggtctgagaattcagtgatgttgcaatcacaatggctgtgtaataaatcatcccatacatgctaatcacatgcacactaaaatagaagtgatttgggcaacaggttactgcttgctctcaaacggttcagcaaaaaatatatatatttatactgtactttcaatacttctgtaaatttattgtttcaaagcttaaaaagtatatatgttaataaacaaaataattttcttaaaaagtgaatgagggaaaatgaagatgtataaactcactgcatcagttctgtccctccatgtcctctgcagagatcagactgaaactcacagtaaatgtagtcccgagtcatccaggaattccttctctgacatcataccaatctactgtctgctgcacacrtctttatcttaaacccttttatatttatttatatatatatatacacacacacacactatatatatgtatatgt

SEQ ID NO: 71423 - DNA, 678 bp, Homo sapiens
aaaaactcaaattcagaggcattctactacaaaatactgacctgtaatctccaaaagtggcaaggtcatgaaagctaaggaaagattaagtaactgttttagacctaaggagaataaagagacataataatcaaatgtaacacatgattctgaactgtatcattctactctagagggcattaataggaaaaattgatggggctgttgagtggggtctgagaattcagtgatgttgcaatcacaatggctgtgtaataaatcatcccatacatgctaatcacatgcacactaaaatagaagtgatttgggcaacaggttactgcttgctctcaaacggttcagcaaaaaatatatatatttatactgtactttcaatacttctgtaaatttattgtttcaaagcttaaaaagtatatatgttaataaacaaaataattttcttaaaaagtgaatgagggaaaatgaagatgtataaactcactgcatcagttctgtccctccatgtcctctgcagagatcagactgaaactcacagtaaatgtagtcccgagtcatccaggaattccttctctgacatcataccaatctactgtctgctgcacacatctttatcttaaacccttttatatttatttatatatatatayacacacacacacactatatatatgtatatgt

SEQ ID NO: 71424 - DNA, 678 bp, Homo sapiens
aaaaactcaaattcagaggcattctactacaaaatactgacctgtaatctccaaaagtggcaaggtcatgaaagctaaggaaagattaagtaactgttttagacctaaggagaataaagagacataataatcaaatgtaacacatgattctgaactgtatcattctactctagagggcattaataggaaaaattgatggggctgttgagtggggtctgagaattcagtgatgttgcaatcacaatggctgtgtaataaatcatcccatacatgctaatcacatgcacactaaaatagaagtgatttgggcaacaggttactgcttgctctcaaacggttcagcaaaaaatatatatatttatactgtactttcaatacttctgtaaatttattgtttcaaagcttaaaaagtatatatgttaataaacaaaataattttcttaaaaagtgaatgagggaaaatgaagatgtataaactcactgcatcagttctgtccctccatgtcctctgcagagatcagactgaaactcacagtaaatgtagtcccgagtcatccaggaattccttctctgacatcataccaatctactgtctgctgcacacatctttatcttaaacccttttatatttatttatatatatatatacacacacacacactatatatatrtatatgt

SEQ ID NO: 71425 - DNA, 678 bp, Homo sapiens
aaaaactcaaattcagaggcattctactacaaaatactgacctgtaatctccaaaagtggcaaggtcatgaaagctaaggaaagattaagtaactgttttagacctaaggagaataaagagacataataatcaaatgtaacacatgattctgaactgtatcattctactctagagggcattaataggaaaaattgatggggctgttgagtggggtctgagaattcagtgatgttgcaatcacaatggctgtgtaataaatcatcccatacatgctaatcacatgcacactaaaatagaagtgatttgggcaacaggttactgcttgctctcaaacggttcagcaaaaaatatatatatttatactgtactttcaatacttctgtaaatttattgtttcaaagcttaaaaagtatatatgttaataaacaaaataattttcttaaaaagtgaatgagggaaaatgaagatgtataaactcactgcatcagttctgtccctccatgtcctctgcagagatcagactgaaactcacagtaaatgtagtcccgagtcatccaggaattccttctctgacatcataccaatctactgtctgctgcacacatctttatcttaaacccttttatatttatttatatatatatatacacacacacacactatatatatgtatrtgt

SEQ ID NO: 71426 - DNA, 885 bp, Homo sapiens
tccatcarcctttgaagattcctacagactttataaagtgagaaatagccaatataaattaattatgtaacaaatagaaggttttttttttaaattttgaaccatatgaaaatgctggttttccaggtcaaaaatagacatcatgaattgtgtattcatcctaaataggctacttattaagacgttttaaagaatgttaaaacgctttaaagaatcaagatcctgctaggattattcctataaacatagtcacctactttttgagcaaataaattaatctcttacattggcctagtgctataaatggaaaacgaatagtctattcctctaatgaaacagaaaagacactttcaaatgtttaccattgcggtatcacctaagtgaatttcatattgagaaggctaacacatttgttaggctccctgacttgactgttctggggagaagggatcaaaatggtactagaatgctgactctcagggccttctgaaagactgttggctttagcctggtacttcttggaaaggagcaaagtttgatgattactctaaacttgtttttacagcatgctgttgagtatttccactgcatggtgcattttagccaatgcttttagtttggtactagggtcctgaagaaaatagctcgtaacctgaccaattttgtaaaatgaataaaccttactattatcgttgtcatttatggcatatgtataaaaaaatgcaaagaatgacggctaactacatatattttgctaggactatttcagtttagaagagaaaactcaaaaaacagtttttggtaataaaaatgtaaacaaaacggctggatgcggtggctcacgcctgtaatcccagcactttgggaggccaaggtgggtggatc

SEQ ID NO: 71427 - DNA, 885 bp, Homo sapiens
tccatcagcctttgaagattcctacagactttataaagtgagaaatagccaatataaattaattatgtaacaaatagaaggttttttttttaaattttgaaccatatgaaaatgctggttttccaggtcaaaaatagacatcatgaattgtgtattcatcctaaataggctacttattaagacgttttaaagaatgttaaaacgctttaaagaatcaagatcctgctaggattattcctataaacatagtcacctacyttttgagcaaataaattaatctcttacattggcctagtgctataaatggaaaacgaatagtctattcctctaatgaaacagaaaagacactttcaaatgtttaccattgcggtatcacctaagtgaatttcatattgagaaggctaacacatttgttaggctccctgacttgactgttctggggagaagggatcaaaatggtactagaatgctgactctcagggccttctgaaagactgttggctttagcctggtacttcttggaaaggagcaaagtttgatgattactctaaacttgtttttacagcatgctgttgagtatttccactgcatggtgcattttagccaatgcttttagtttggtactagggtcctgaagaaaatagctcgtaacctgaccaattttgtaaaatgaataaaccttactattatcgttgtcatttatggcatatgtataaaaaaatgcaaagaatgacggctaactacatatattttgctaggactatttcagtttagaagagaaaactcaaaaaacagtttttggtaataaaaatgtaaacaaaacggctggatgcggtggctcacgcctgtaatcccagcactttgggaggccaaggtgggtggatc

SEQ ID NO: 71428 - DNA, 885 bp, Homo sapiens
tccatcagcctttgaagattcctacagactttataaagtgagaaatagccaatataaattaattatgtaacaaatagaaggttttttttttaaattttgaaccatatgaaaatgctggttttccaggtcaaaaatagacatcatgaattgtgtattcatcctaaataggctacttattaagacgttttaaagaatgttaaaacgctttaaagaatcaagatcctgctaggattattcctataaacatagtcacctactttttgagcaaataaattaatctcttacattggcctagtgctataaatggaaaacgaatagtctattcctctaatgaaacagaaaagacactttcaaatgtttaccattgcggyatcacctaagtgaatttcatattgagaaggctaacacatttgttaggctccctgacttgactgttctggggagaagggatcaaaatggtactagaatgctgactctcagggccttctgaaagactgttggctttagcctggtacttcttggaaaggagcaaagtttgatgattactctaaacttgtttttacagcatgctgttgagtatttccactgcatggtgcattttagccaatgcttttagtttggtactagggtcctgaagaaaatagctcgtaacctgaccaattttgtaaaatgaataaaccttactattatcgttgtcatttatggcatatgtataaaaaaatgcaaagaatgacggctaactacatatattttgctaggactatttcagtttagaagagaaaactcaaaaaacagtttttggtaataaaaatgtaaacaaaacggctggatgcggtggctcacgcctgtaatcccagcactttgggaggccaaggtgggtggatc

SEQ ID NO: 71429 - DNA, 746 bp, Homo sapiens
caggtatgcccgcacagagtggaaatgccctggcagaagcgagggtgcaaatgcaaaggcagatggatgagataaagatgcctctggaattcagatcctccagaaggaatcatttttgtcatctatgatgggaggatagtttatagatcactttgtaaaaataaatcacttctctttgtttcacaaagtgggtaattacaattaaatgtgcgaagagataggaaggtgggatggccattatcccttcctccaggcttctgcagaccttgttccctgaggtttgagttgaagaaacaaaaccaggacatttgggaagataaatgggctgaggctggagagctgacctggatgtcacctcacccttgcttaccaaggtccatgctcttcgaggctttcaaattaattgattcaggctgcctggccggtgtcacagatctgaagttgatgtgctgatctggaaaatatactgctgaatccaccccagagctgtggaaggaagccatatgttgtatttaggtttagaataaaatcttttaaaaaatgaggaagcagttctcattttgaacacagccactcatcactctgcgcagctcccaaccacatattttcaactaattcttaaatctcaggtttcttttatgagatgtagcaactctgttttcatgtattttatcacaytgtacaatttaaataaaatattctctgggcaatatcgtgttttactcttcactgatttctgctaattg

SEQ ID NO: 71430 - DNA, 1201 bp, Homo sapiens
atcaacagtgcaaaagctaccctcagagtgtaatttgcttgattgtccaggcaattctcaactgtatctycaggaaatcatggtgagtcttagactatgaccttagcttgctggagaaaaattaagctttgtgctttatggaattaatatgtaaaatgccttatttattcaaaaacatgatccaatcagataaaaatatgttttggaataagtgctcacaatgaaagttggctgctgtcatttttcaaagggctgaggagtgaaattattaaatctaaggaaaatgccttatgagtctttgatgctgactctcagatttgaaaaacatacatggaaaatggagaatattatcaaaatgcttccctctgacagaaagaagaaacagtgtcacctatctgacagagagcattttaaattgatatttcatgacctcattttaaacagcttctattacctttccgtgttggagccctgacttctaacaatgcagctgctacatttatttatgtcaacgtgaccctgtggctgagagatgagtttatatggcatatcaacttaacatttgcatccccagacatgttattaatagtgagttcaacatgaatcatgatcaagatttgataagaaaagaaatgtaactcattctaggtagacttagttagtgaatcacatttattcaaattgtccaggcttatatagggcaaaattgggaaaaaaagaatagctcaaggctttattctgcagatcatacagacaaatgtaataaaaaatcaaacgggtataagcatatcaatgaccaattgaccatttagaagtcacatgaaattgtcacctgagctctctgaatgaggccaaacaatattgacagtgtatcctaatcccaaatgcttgggtaaacaaatacggaaaaaagagtccccaaaattcttaaactataaaataagcataatattgaaaacattatacacacacataaaatactgaatgtttcccatgctagtacaagaaatgcaagaacctatatataaggttattgatgatataacttacctcaaagagaactggaagaagttttgttagcttggaatagtctgtagatatatttgctttgtttagcaccacaggagagaatgtgaagccattataagtgtccaaactgcttagagagtaaatgatgctttccaaatatttaaaggggttg

SEQ ID NO: 71431 - DNA, 546 bp, Homo sapiens
tgccttataaaccacttataagcaaacacttcagattggatgagtggcagctgaaggaatctgacrtatttgactccacctgtttctttgaaagaacaagcttctggtcaggcatggtggctcatgcctgtaatcccaacactttgggagacctatgtgagaggatcgcctgagcccaggagtttgagaccagccttggcaacagtaagaccttgtcgctacaaaaaaaaaaaaaaaaattagccaggcatggtggtgcatgcttgtgttcccagctatgtgggaggctgagggtgggaagattgcctgggcccaggagattgagactgcagtgagctgagattgcaccaaacaaacaaacaaacaaagagctcctatttgttttagtctgtatagtgaaaaaatatagttatatggaatattttgattccaggggtttgttcacaaaggctgcttctcttgtttctcagggtcagtttaaattcagttcctgttctatgctgagactttgatattcatcatgatgttctttgaactgctctttca

SEQ ID NO: 71432 - DNA, 555 bp, Homo sapiens
gcactggcccaccagtgtagtcacctgagcaatgacctggtgatcctctgctgtgtcaggtaacaactctttagttgtgggatcctggggatgcttgtgcatcctggagaagaggccaggggagcaaggtagcggtgcttgctgggctcaggcagcagctatctaccaacctcatggaagtagttcagtattcaataaccagtatggctgcaccaatcctgatgccaaatacttgaaaagaaaacagaaaaggactaccgccctcatcaagtaatggataggttccaggtagctagtcaactcgctcatgacagaaccattcttttgccttgtacaccacaccaaaccttctcagagttaaaattccctatttgccaggttttctgtgaggtctgggttgctctttgttatracagaccatgacgactctccacaagtgcaacctcctagatgtcagagatcagggcacccatcagtgtactgtaatgaaagacaagtagccgccgccccccatcacttaccaacacaggtacggctgtcattgtggttgatgat

SEQ ID NO: 71433 - DNA, 1471 bp, Homo sapiens
cgggaggggcgctgcaggtggaaagctgcgctctgagcagagcccgggaccgcgccgcccagcagagaactccgctagggagggcaggctgcaaacggcggagaacctcgttctcccgcaaagtgctttccaggagcatcggaccaacgcccgtgggaacaaagacagggtctccgtggggtgcgctgtcaccgaaactggcggggctgctttctcaagtttgctgccgctcagttcctggcgagcgaagaggggcgctcccgctccggcttcgcgaagcaacctgagcgccccaccgggagcagctcccgcgccgccgcccggccctagcccctgcccggacgctctcccctccggcctcccgcggacccgaccctgccacagccggggaagtgggggctccacgagaggctcyggctgggctcttaccttggccactggccggcgctaggcaggcgacgagagccaggagcagcgtgcacgccactgctgccggcccgcgatccatctccgcgacggtccccggcctcgccgttccttccccgggaggtgggcgcgcgtagcacaccgcaccggcagcgcctctgctagcgaacgctcctttaggtctgcacctccgccagctcctagtggccaaaagcctgcccccacgcccgaggcatcccgttttctacccgcgccagtccccaccctccagacagtgcataaagccctttagacccgaccgccccggaacaagcatgcgggaatccagcgggcaggccccctgccgcccggcccgccccctgcactttgcagcgcggggaggagtgggcactcgaacacacgcgtgctcacacagggacactcacacaggcgtgtgcacactcacacacgcactcatacaggcgcatgcactcctaagtgtcacaccaactgacacagattcactcatacacgccagtcacacacgcgcgcacattccacagtcacacttcaacgccgacatacacagtcccctttacgcgtgcatacaagagcacactcctgtgcgcacactctcacaggcacactcacacgtgcacacgcgctgccctcgcctctccgcagggtttgccccgcacagaagccggcgaggcggctcacggggaaatctgcacggacgcagttttactaaatgagcaatggaaagaaatggacgaggaggaaagtcaagaatagagaagagaaagaaaaaataagaaatggaaaaggaaagcacaaccagacaagtaaaaatgaaggaaagagaaagaaagggaaagaggcgggggtagggaagggaaggagtaaagagcctgctggatggagatctgtgaccttcattcctggcctgatctctctaggctccttcggatatcttggtttcccctgataggatacaggctgctgagatggggtgctttgtgtttttacaaattagagagggaggtggatctttgttggggaggtt

SEQ ID NO: 71434 - DNA, 1471 bp, Homo sapiens
cgggaggggcgctgcaggtggaaagctgcgctctgagcagagcccgggaccgcgccgcccagcagagaactccgctagggagggcaggctgcaaacggcggagaacctcgttctcccgcaaagtgctttccaggagcatcggaccaacgcccgtgggaacaaagacagggtctccgtggggtgcgctgtcaccgaaactggcggggctgctttctcaagtttgctgccgctcagttcctggcgagcgaagaggggcgctcccgctccggcttcgcgaagcaacctgagcgccccaccgggagcagctcccgcgccgccgcccggccctagcccctgcccggacgctctcccctccggcctcccgcggacccgaccctgccacagccggggaagtgggggctccacgagaggctctggctgggctcttaccttggccactggccggsgctaggcaggcgacgagagccaggagcagcgtgcacgccactgctgccggcccgcgatccatctccgcgacggtccccggcctcgccgttccttccccgggaggtgggcgcgcgtagcacaccgcaccggcagcgcctctgctagcgaacgctcctttaggtctgcacctccgccagctcctagtggccaaaagcctgcccccacgcccgaggcatcccgttttctacccgcgccagtccccaccctccagacagtgcataaagccctttagacccgaccgccccggaacaagcatgcgggaatccagcgggcaggccccctgccgcccggcccgccccctgcactttgcagcgcggggaggagtgggcactcgaacacacgcgtgctcacacagggacactcacacaggcgtgtgcacactcacacacgcactcatacaggcgcatgcactcctaagtgtcacaccaactgacacagattcactcatacacgccagtcacacacgcgcgcacattccacagtcacacttcaacgccgacatacacagtcccctttacgcgtgcatacaagagcacactcctgtgcgcacactctcacaggcacactcacacgtgcacacgcgctgccctcgcctctccgcagggtttgccccgcacagaagccggcgaggcggctcacggggaaatctgcacggacgcagttttactaaatgagcaatggaaagaaatggacgaggaggaaagtcaagaatagagaagagaaagaaaaaataagaaatggaaaaggaaagcacaaccagacaagtaaaaatgaaggaaagagaaagaaagggaaagaggcgggggtagggaagggaaggagtaaagagcctgctggatggagatctgtgaccttcattcctggcctgatctctctaggctccttcggatatcttggtttcccctgataggatacaggctgctgagatggggtgctttgtgtttttacaaattagagagggaggtggatctttgttggggaggtt

SEQ ID NO: 71435 - DNA, 3913 bp, Homo sapiens
agttaaatagtgtctcctcaaaattcatgtcaactcagaaactcaaatgtgaccttatttggaaataggatctttgcacatgtaattaattagggatcaagatgagacactgaattagggtaaaccctgaaaccaatagcgcgtgtccttacatgaaacagaagggacacacagagggaagaagagcatgtgaagatggaggaagagattcgagtgagacatctacaagccaaggagtgccaatgattgccaggagcaccaccactaaaggggcaaggagggatttttttctagagctttcagagggagcatagtcttgccacatgttgattttgaaattccaaaactgtgacagaaatgcatttctgtagttttaagacgtgtatttatggtgatttctcgcaacagttgcaggaaactaatatagactctatcaagaccaacacatagagctgcccagtgaagaccaatacatctctggatcaacacatcatgttgcataaacataaacctatcaccatagggtgagagtgagtcagcatgtgcactagcaaaagtagtacaagcacattagggtccatcaagaataaaaaccctgagtttttaatagtttgaagacagttgtctcaattataggctacatgctgtacatctacctttccaacaagaaaaagtcagccctctggccaggacctgaacctcacctacaccaaagccctcctatgggatccaatctccagtgaaaacccaggcagtctgcagcaagagaaaggatacatatcacatctactaagcaaacattcactggaggttaaggtagggtcttctagccccaccccaaagtatgtgcctgtgatcattgtatgcagaagaagacttggttgagatagattgataatattttattggataaagttttgctctgctgagtgattctctgataaataaactgaattgtagcagttaacctcttacagtttccatgttggggagtgagtgtagtgtggttctagttttgacacagtgcatccctatatcccctaatctaatattatcttacatctcaccttccagtgttgtgtttatagaagccccaattagaggatgggtgtcttatgcttaataataacccactctgtgctctggtgctgggcctctgaaatcggaatcatcattcccttcctctgcttgtcttcaggtttctggcactttaatgccactgttaagctctgtcttctggtccttctcacaaatccctagccatgtttttttgtttgtttgttttctttcacatcctcaggagatgcaataataaaataaaaagaatttgctataaactatattgtcatttactatttttatcagtcatgttggaaaagagtacaataaattcaaaatagacgactgctaaattttaaaattcatttgcagtgggagttaaatatccatatttattatggattattagtagaaaatgattacttggtgaatgtgttttcacattcttattttaggggtacttatttaggtactattgctttgaccccctcatatggtctatcgaatgacctttctgattccaaattccatgcctctgttgccttttcattagaagaaattagcaggcctttcacattttttgaaggaagcatcagctagggtccatagaaaaagtaatggcttagaaatcttgatgaatgccagttctcgcaggggacatcaactctaagtgtgcctgtgtatgcatagagaaaatggcagatttgcataaacatcctgaaacattttgatggagttccaggatctgctgcctatctgaatttgttgtaggctttatttgtgctccttcaacaatgaagttaacccttatattagctgcatggggagaaaagtttctatgttacaaatggcccaattatattcattcaaaaatgacttatctagcccctagtttgagtaacacatgacacaaagaatgcttggtggatgccaaaactatgccctgctctcaaagaccttttgtaataacaagcagaaagacacatacacaataaatcagaatagaataataaaatgggtcataaagtaacctcagacaggtagcaccccaatatgcatgtatgtttgggtataacaaagactagagaggaagtctactgggaatctagctgcatgtgtgactgaaaatcattaagcaaaataactgaaatctcaggggaaaaaagggttgcaacataccggattgatctgaaaacaaagcctgaggatcaaattattttgagcacagatcaaggatgatcattcagatgatcatacaacccatttcttatgartgtgtgaccaatcgtaggaccagaggaactgttacaaaaactgaaagagctagagtaccaaattcttgatgaggtacccgaattttcaagaatcagaggtgagaagtttaggtagtattgctttcagagagagtgtacaacaaaggtggacaggctttgccaatgaaggatattgaaaaattttattacagtagcaaaaaaaaaaaaaaaaaaaaaaaagggagaggatacctagagcagcattgacaggggatttggtatattgctttggaatatccataggtcctttgcaccatcttcagaaatctcaatacaagagatctgaagagctaatgtgagaaagaaaatggtagattctacacggatggtagacactgtttaaatgaacagatattagacagccttataggttttccagaaatacaggggagaagttttcaaagggcttgcagatgctgaaattgcaataggaagagaaccatatgaacagtcttgtggctgtcttactgaaaggtaaaggtaggatttttttccccaaggcaatagtggcccaggaaacacatattatgccaaggagaatgaaataagtgtaggaatagagtgggaaaagacttgtgtcatgctgaggagtgagtgattcttttcagctagagtcaacagaaaaggtttctttagaaagggaaatgttgagccatatatgttggtggggccagggggagagggataaattctggcctcaggaaacaatataagcaagagcttggtagctggtgttgagagaacagcatgcaggctaatataggtagaagaaaagctggaaatcgtgggtgggaaaatcaagagttgagttaggaaagaatggatggactgaatcacagaaggtctcaaatattatgctaaaatgttttgaggtttatatgcagatgctacatagccatttgtgtgtgtgtgtgtgtgtgtgtgtgtgtgtgtgtgtaattttgaaaatggaaaaggatgacatctgacttgaactttaggaggaagagaaaaggagaactgtggctggtccccaaagtagttagtcacaccttaattaccaaaacctgtgactatgttcccgtacatggcaaaaagtaaaatacacacacacatatatatgtatatgaagattttgtatatgcgattaaattaaggatcttgaggtgtaggttgagttatatgagcgaaccagtgtaatcacaagggtacttatagggaaaaaagagacacaaagaggctgagcaggagatgctttgatgaaagcagaacttgagcaatgtcattgcagaaagagcccgcaagcccagggaaaatcaggctggaaaaatcaaggaacagacagccctctacagcctccggaaggaacagagcttaccgatgagacagccaggtgggagggggtccccagaaaaactccaagcagcctgcccactggggtagagccctgggaagttcgtgccctttgcagaggggagcctggccccttctcttcctgtgtggaatctgggattcaagctgcgggtgggaagcgctcgagcacgggactctagccttgcaga

SEQ ID NO: 71436 - DNA, 2297 bp, Homo sapiens
gcatgaggctttcctatggctcagcatttactgactacatatgtgtgtgcttgttgtcatctgcgttctgaacaaatgaagatccacaaaggaaggctttctgttttcttcgcttctattccgccagcacctggcacagtgcccagctgcccgtgagctctctcacagtgtttgttgaaggaatgaagggcatcagtacctattgttgattgttcaacttccccagtgaagtgttttgtattctaaacatctaaagaagaaactaattttggagctacactttaaactgatgcttttgaagtttcttattgacagagccctaggttccaagctcatttttggcagaaaggacacaaagagaaaagcatgaagacaaaaagccccactcctgatttgactgacattccctgctaaaaatgctaaccagccagctgagtaacttgagtccttggtacagttcctaaatgggtttgaaaaggagcagactgacccttgtaaatgagtttaacttgctttttcacatggatggaaactgtcagttttctgtcatctatgctgccttgagtagctcttcatcttctgtgtcgggcagctccattgtttttttgcccctgatttcatacaacttcaggaaagacttctccctttccttagaaacacaccacagtgatggaaccaaacccaggtccttcttcctcactttacctttagctcattgccaaggtccttgtcttctctttaaaaaccctttaattttttttgagaaatggaaaggccgagcctgctttccaactgcttttgtctatttgcccagggcataactactctcagggttcttgggaaaggttatctggttgaaaagggcaataacatattcggattattgggaaaccacatgggaacacctctatgaaggcaaggcatcttctgaagcagatcaccattccaggggcaggagtggatattaggtagggtcctttgtaccctcagctctccgtccttctcttgttccagcccagcatgtagcagtgtgactgacagcttcctctcccccacgctcaggcctgaccctgaagaaggtgccagaagcccaagcctgaaaacattagcttctggtgccagaatcaaaggtcaaggcacatagctttctcactgtccagctcccagttttgctaaggtgcccgcttggaaggcacaaagtacaccagtggcattgcaaagagcaaaggtatatttcctcattctctcatcccctctcccactctttaaaaaaatactattatctgattatgaacaaagaaccttctctttaatgcatcctacaaatctcaaaactaaagagatcacacaattttagataagaaaaaaaattgatgttttcaagcacaagggctaataattacagtaattttctattccttggatctctgattgccaatatcttcagatggcttcaaatatcattttatagctttagatagagcttcactgatgcttttgaacattctagtaagtattgacaatttatctttgaatggatgacagtgttatagttttatttaaatgggagaaaacaagagtcattttacactggctttatagaaagagatgaatattccaggcaaacagttatggggaaatgtgcacaggagggatgattgtacccactgaggaataaagtgcaaatagcaccattccctcagaaggactcccacataaaggtacaaaagcaattatacaatgcaggtatttatcctctttataaacttagcggaaaataagagaaggcatcactgtttaggaaagtaatagagaaaagaaaagcaaactccaaatgctatatgctgccttcagtctcttcaagaactttgctgtgacctcctgtagagattgagggcaagtataggttgacaattctgaagcggactcctttggttgaccttatcccattcaccagccaatcaagctcctcagtgctttcccctcaagtttctctggttggttgatctggttaataaactctcactttctatattttcactagtagaagtgcaactctaaagctgtataaatgcactgcaattattttgtgatgagttgctccttgaccttggcagtgacctttccagataatatttttaagtgacagtgacaaatttgaagcttatgccattttctttgctattgtaaattattttggggatcaagattgctaacattcctgtgtattagtctygatttctttctttttttttttttgctacctcttccatttatatttcaagtccttgaatcca

SEQ ID NO: 71437 - DNA, 1157 bp, Homo sapiens
tgcaaagtatcagcacagtggttacttcagagtgaagagggagagggaaatggtagagggctggatgatggttacactgatgttaatttcatcatcattactttaaacagtatgtattcatttgtatattcagcttcactctatagaacatctcctgggacagtgtttttcaggaagaaattctcttgatttttaatatctagacttcacagaacatgtgtatctttaaaacaatgttttctgctggtatttatatagaaaatatttatcattctgtttctaaaactcaagacagcatttttctaaaactaattgtggaaaaggtcttgaatttcattccaacacgactagtagaatgtcacaatcacataaactttttgaaaaatattgtttggccgggcgcggtggctcacgcctgtaatcccagcactttgggaggccgaagcgggtggatcatgaggtcaggagatcgagaccatcctggctaacaaggtgaaaccccgtctctactaaaaatacaaaaaattagccgggcgcggtggcgggcgcctgtagtcccagctactcgggaggctgaggcaggagaatggcgtgaacccgggaagcggagcttgcagtgagccgagattgcgccactgcagtccgcagtccggcctgggcgacaragcgagactccgtctcaaaaaaaaaaaaaaaaaaaaaaaaaaaaaaaaaaaagaagaaaaatattgtttgtttgagaccttatttgttgcttggtaattaggaaacaaaattgaaaacatcttaaatcataaaatgctatttatacaggcataaaagtcgcttatgtataggtatgtaaaatacgtatgtgtttttgggaatggggtgtgaggtgtgaggttaatgtctaataatttattgatttgcacatttaaaataatgggaaatagattcctgaaaaactatcagtgcagaacatccagatttcaggattttctgaatttatgactttaagttgagatggcactacagtatgtgtgatacattatataacatagttttgaactcacactttttttttcaccttaagttctgggatacatgtgcaattgttacctagatatacatgtactatggtgttttgctgcacctatcaatctgtcatctagatt

SEQ ID NO: 71438 - DNA, 2913 bp, Homo sapiens
ctttctggcagaagatacatgccttttctttcccccctgcaggatcttgctctgttacctaggctagagtgctcactgcagcctcaaattcctgtgctcaagaggttctcttgcctcagccttccaagtagctgggactataggggcatgccaccaggctcagctaattttttaatttttttgtggagatggggtctcgctatgttgcccaggttggtcttgaattcctggcctcaggagatcctcctgagtgatcttcttgtgttggcctaccaaagtactgggattacaggtgtgagccaccatgtccagcctacacccaacccttaacagtgattatctttgaaaagtggaattatgtttgggtttatttctgccccttttaaaataactttattttctgttactacattaattcatttaggattatggcctccaactgcatcggtgtttctgcaaagggagctaagcattgggcacacatgggcataaacatgggaacaatagactctgcagagaactaccagagggaggtgggaggaggacacaggttgaaaaactacctatcgggtatctataccccaaacttcagcattatgcaatattcccatgttactaacctgcgtatgtacccccatatctaaaatgaaagttgaaatgaaaaataattcaaaaatgaaattacttattgtctgactgtatttcaatctaattaaatttataattggaagtaaagggtaacttaatttttagaagtaagaaagtatatagatctgagctgttgtattcctcgggatggcaagcaagaggcaattgtgacaggtatgatagtttaagccttggctctttgtttctgtctgtaaattggtatgttaataacttctctagcacagaggtaacttcaatattcatgaaatgacctcagtagaatactaaattagaaactttgtaatggaaaatagatattaccatagattttcctgcattataaccatggcttgtgtttgtgtatttgttagcatgttgtgtcaagaaaataagcattagctacccaaatacttggaatttgaaattagcaactccccactttcctccatcagtctactaatattggatactgtattagtctgttcccaagttgctaataaagacatacccaagactgggtcatttataaagcaagagaggtttaatgaactcacagctccacatggttggggaggcctcaaaatcatggaggaaggtagaaaaggaggagcaaaggcatgtcctacatggcagcaggccagagagcgtgtgcaggggaactgccctttataaaaccatcagatctcatgagactatcatgacaacagcatgggaaaaacccgcacctgtgattcaattacctcacactaggtccctcccatggtatgtggggagtatgggagctacaattcaagatgatatttgggtggggacacagccaaaccatatcagatacttagccctaaacctatctatacaccctgattcttaccaactttatctactcatttaaacatatctctttgttacaggcagctttctgttttgtttgtttttggttttgtttttaaaagctcagtactacagaacatagtaagctagttatcaacatttccgtatctgtaggcatggttatgcatgtgttaaattaatacttcttccttcaaccatcagcctttcttcatttctstatgcaataaacatatgttgtattgggcttacactgtgtgctagatacagttcacattatcattatattcactaaccattacagggatgaatgatatcatacagtatttacagtattaaaatggttatattatttgatcttagaatagcattgtaaaatatattattattgtcacttcacaaataaggaaatagaggcccggagagattaggtggtttagacgtagttttgcatataggaagtagaaccaggactcaaggttttgtcctctgttcccaagcccattattctttttcctggcagacccaagggattcctacctttttattactgaggacatcttttattttatattttttctaaagattccttttattgcaagcaataaaaccagacacattagtcgtgctgccatcacaacaatctaattttagaacatttcatcaccccaaaacgaagccctgaggattagcagccaatccacaacccattctcccccacccaagccctaggcaaccagtagtctacttcctgtctctatagatttgcctattccggatatttcatacaagtgggatgatattatatgtggcatattgtgattgatttagttttcacttaatgcaatgttttcaaggtacagctatgatatagcatgtatcactacatcattttttagtgatgaataatattcatcattgaatcataattgagaaatattcttcatccctgatgcacctgtgtgtgatttccaaattttgactatcatgaataatgctactatgaacatatgtgtacaagtttttgtgtggacatatgttttcatttttcttgggtatatagctgtaagttgaattactggatcaaggtaactctatgcttaacattttgaagaactgccaactacgttccaacgtaactgtgccattgtaaatgtctttttgaagtattttgaagtatatacctatttgaggtatttgcactctcatattcaactgagaacatctcctgtgagtatctcatgttcaactgatttcagctcttgtgtatctcgtgttcaactcttatgctcaactgatttcaactccaatgaatatctaccaagaagtgggactgctggatgaaatgctactctcatttttaattatttggcaaaacttccatagtgtttttccagaatggataaagagaatgca

SEQ ID NO: 71439 - DNA, 2913 bp, Homo sapiens
ctttctggcagaagatacatgccttttctttcccccctgcaggatcttgctctgttacctaggctagagtgctcactgcagcctcaaattcctgtgctcaagaggttctcttgcctcagccttccaagtagctgggactataggggcatgccaccaggctcagctaattttttaatttttttgtggagatggggtctcgctatgttgcccaggttggtcttgaattcctggcctcaggagatcctcctgagtgatcttcttgtgttggcctaccaaagtactgggattacaggtgtgagccaccatgtccagcctacacccaacccttaacagtgattatctttgaaaagtggaattatgtttgggtttatttctgccccttttaaaataactttattttctgttactacattaattcatttaggattatggcctccaactgcatcggtgtttctgcaaagggagctaagcattgggcacacatgggcataaacatgggaacaatagactctgcagagaactaccagagggaggtgggaggaggacacaggttgaaaaactacctatcgggtatctataccccaaacttcagcattatgcaatattcccatgttactaacctgcgtatgtacccccatatctaaaatgaaagttgaaatgaaaaataattcaaaaatgaaattacttattgtctgactgtatttcaatctaattaaatttataattggaagtaaagggtaacttaatttttagaagtaagaaagtatatagatctgagctgttgtattcctcgggatggcaagcaagaggcaattgtgacaggtatgatagtttaagccttggctctttgtttctgtctgtaaattggtatgttaataacttctctagcacagaggtaacttcaatattcatgaaatgacctcagtagaatactaaattagaaactttgtaatggaaaatagatattaccatagattttcctgcattataaccatggcttgtgtttgtgtatttgttagcatgttgtgtcaagaaaataagcattagctacccaaatacttggaatttgaaattagcaactccccactttcctccatcagtctactaatattggatactgtattagtctgttcccaagttgctaataaagacatacccaagactgggtcatttataaagcaagagaggtttaatgaactcacagctccacatggttggggaggcctcaaaatcatggaggaaggtagaaaaggaggagcaaaggcatgtcctacatggcagcaggccagagagcgtgtgcaggggaactgccctttataaaaccatcagatctcatgagactatcatgacaacagcatgggaaaaacccgcacctgtgattcaattacctcacactaggtccctcccatggtatgtggggagtatgggagctacaattcaagatgatatttgggtggggacacagccaaaccatatcagatacttagccctaaacctatctatacaccctgattcttaccaactttatctactcatttaaacatatctctttgttacaggcagctttctgttttgtttgtttttggttttgtttttaaaagctcagtactacagaacatagtaagctagttatcaacatttccgtatctgtaggcatggttatgcatgtgttaaattaatacttcttccttcaaccatcagcctttcttcatttctctatgcaataaacatatgttgtattgggcttacactgtgtgctagatrcagttcacattatcattatattcactaaccattacagggatgaatgatatcatacagtatttacagtattaaaatggttatattatttgatcttagaatagcattgtaaaatatattattattgtcacttcacaaataaggaaatagaggcccggagagattaggtggtttagacgtagttttgcatataggaagtagaaccaggactcaaggttttgtcctctgttcccaagcccattattctttttcctggcagacccaagggattcctacctttttattactgaggacatcttttattttatattttttctaaagattccttttattgcaagcaataaaaccagacacattagtcgtgctgccatcacaacaatctaattttagaacatttcatcaccccaaaacgaagccctgaggattagcagccaatccacaacccattctcccccacccaagccctaggcaaccagtagtctacttcctgtctctatagatttgcctattccggatatttcatacaagtgggatgatattatatgtggcatattgtgattgatttagttttcacttaatgcaatgttttcaaggtacagctatgatatagcatgtatcactacatcattttttagtgatgaataatattcatcattgaatcataattgagaaatattcttcatccctgatgcacctgtgtgtgatttccaaattttgactatcatgaataatgctactatgaacatatgtgtacaagtttttgtgtggacatatgttttcatttttcttgggtatatagctgtaagttgaattactggatcaaggtaactctatgcttaacattttgaagaactgccaactacgttccaacgtaactgtgccattgtaaatgtctttttgaagtattttgaagtatatacctatttgaggtatttgcactctcatattcaactgagaacatctcctgtgagtatctcatgttcaactgatttcagctcttgtgtatctcgtgttcaactcttatgctcaactgatttcaactccaatgaatatctaccaagaagtgggactgctggatgaaatgctactctcatttttaattatttggcaaaacttccatagtgtttttccagaatggataaagagaatgca

SEQ ID NO: 71440 - DNA, 692 bp, Homo sapiens
agcaagaccctgtctccacaaagaaaatgaaaaaacaaaacaaacaaacaaaaaacattagccgggtgaggtggggtgcacgtgtggtcctagctactcaggaggctgaggattgcttgagcctgggaggttgaggctgcagtgaggtgctattgcaccactgcactccagcctgaccacagagcaagacggtgtctccaatcaatcaattaatcaatcaatcccaatgctggagttgcatcccacaccagttaaactggaaactctggggtaagcccagggcaggggtattttctaactttcctgagatggctctgctgtgmagccacagttgagaaccaccgaggcatccaggcagatggaaaaagctccctccaaggcaggccttgataaagggtccagcatggaagaggacacgtgatgactccgagggcttatagttgattagaaagagagctagaccctgtgcgcagagatgggttgactcaatgcgacttgggtactggaatgcagagaaaggaggcagctcaggtagggtggggttaagcaggccagtctttctggagaaggttctggaagcagttttgggaggcaagtcccccatcctggtgaacggactcttcagatccttgctaagggttttcccaggggctccttatctgataagccagcccctttgtgactctggctca

SEQ ID NO: 71441 - DNA, 692 bp, Homo sapiens
agcaagaccctgtctccacaaagaaaatgaaaaaacaaaacaaacaaacaaaaaacattagccgggtgaggtggggtgcacgtgtggtcctagctactcaggaggctgaggattgcttgagcctgggaggttgaggctgcagtgaggtgctattgcaccactgcactccagcctgaccacagagcaagacggtgtctccaatcaatcaattaatcaatcaatcccaatgctggagttgcatcccacaccagttaaactggaaactctggggtaagcccagggcaggggtattttctaactttcctgagatggctctgctgtgcagccacagttgagaaccaccgaggcatccaggcagatggaaaaagctccctccaaggcaggccttgataaagggtccagcatggaagaggacacgtgatgactccgagggcttatagttgattagaaagagagctagaccctgtgcgcagagatgggttgactcaatgcgacttgggtactggaatgcagagaaaggaggcagctcaggtagggtggggttaagcaggccagtctttctggagaaggttctggaagcagttttgggaggcaagtcccccatccyggtgaacggactcttcagatccttgctaagggttttcccaggggctccttatctgataagccagcccctttgtgactctggctca

SEQ ID NO: 71442 - DNA, 1327 bp, Homo sapiens
aggcatgagccaccgcacccagctcagagcccttcactcttaagggaagtgggaggaatcgtgtctccagttcactggacttctcaggaggggacgtagatgacccctattccaggaagtgctgcttcttcacaccctttgaggcagaggccctcttcagggctgctgaatgcaagctttgctctagctgaaatggaagtcattcctacataatcagagaaagagaatggcattgccctgcccatccctacccaccagcctgagcctgcctggacactttcactggacctcagccaggagctctttacccagctctgggctcatttcctatttgcacccactggccatgaagcagggcagggagctcagctggtggggtttcctgtcccggacccaggaacatgggctaagttggatgggcctctctttatcatgtatcctgtctgctctatggggctgttaagaaatcaagtgatgtagcagatctgggatggtgactcctaccctgcacaggccaaatgacgggggcattctctataagaaaagccttcaagaaaattgacacagaggatcccttaaaggagcctcttcatatttgcagtaacatttgccatatgactgcttcgagtcggcagcctgcaggctgtgcaatgtggaattcggttggcaaagggtactttccacaccacttctaaatgagccagaaaatcataggacacagaattctagagctggggagccttctggaaatcatctactacaacctgcttgtttcaaatgggggattgcaggccagggaggtgggttcattcgcccaagttcccagtgactctcaataaatagctttccaggaggtgggtgtgcacacgtgtgtgtgcgtgtgtgtgtgtgtgcgtgcatgtatgtgtgtgcatgtgcgcatacgtgtcagctgtaaataccagaatagaactcagccctttcagtgctgattccctcctgggaattggaaaaactcaccaaatcccctttatatatttttttattttacttctttttkttctgagatggaatctcgctgtgttgccaagggtggagtgcaggtggcttgctgcaacctctgcctcccagattcaagacatcctcctgcctcagcctcctgagtagctgggactacaggcatgcgccaccacacccagctaatttctgtagaaatagggtctcaccatgttggccaggctggtcttgaacgcctaaccttgagtgatctgcccacctcagcctcccagtgctaggattacaggcatgagccatcatgcctggcgaaaaacctctttaaaaaggactt

SEQ ID NO: 71443 - DNA, 1327 bp, Homo sapiens
aggcatgagccaccgcacccagctcagagcccttcactcttaagggaagtgggaggaatcgtgtctccagttcactggacttctcaggaggggacgtagatgacccctattccaggaagtgctgcttcttcacaccctttgaggcagaggccctcttcagggctgctgaatgcaagctttgctctagctgaaatggaagtcattcctacataatcagagaaagagaatggcattgccctgcccatccctacccaccagcctgagcctgcctggacactttcactggacctcagccaggagctctttacccagctctgggctcatttcctatttgcacccactggccatgaagcagggcagggagctcagctggtggggtttcctgtcccggacccaggaacatgggctaagttggatgggcctctctttatcatgtatcctgtctgctctatggggctgttaagaaatcaagtgatgtagcagatctgggatggtgactcctaccctgcacaggccaaatgacgggggcattctctataagaaaagccttcaagaaaattgacacagaggatcccttaaaggagcctcttcatatttgcagtaacatttgccatatgactgcttcgagtcggcagcctgcaggctgtgcaatgtggaattcggttggcaaagggtactttccacaccacttctaaatgagccagaaaatcataggacacagaattctagagctggggagccttctggaaatcatctactacaacctgcttgtttcaaatgggggattgcaggccagggaggtgggttcattcgcccaagttcccagtgactctcaataaatagctttccaggaggtgggtgtgcacacgtgtgtgtgcgtgtgtgtgtgtgtgcgtgcatgtatgtgtgtgcatgtgcgcatacgtgtcagctgtaaataccagaatagaactcagccctttcagtgctgattccctcctgggaattggaaaaactcaccaaatcccctttatatatttttttattttacttctttttgttytgagatggaatctcgctgtgttgccaagggtggagtgcaggtggcttgctgcaacctctgcctcccagattcaagacatcctcctgcctcagcctcctgagtagctgggactacaggcatgcgccaccacacccagctaatttctgtagaaatagggtctcaccatgttggccaggctggtcttgaacgcctaaccttgagtgatctgcccacctcagcctcccagtgctaggattacaggcatgagccatcatgcctggcgaaaaacctctttaaaaaggactt

SEQ ID NO: 71444 - DNA, 642 bp, Homo sapiens
cccagcagcaggggactgaagctcagggctctcaccccaggagctgtgccgccatggtgtgggggtgtctgtgtctgggactcatttgcttccggctcctgttcaccactccagatgccccctccctcctggctcctctgagactcaagggcttcactgcccaagagtgggaagcagtgagtgtcacaaacacctgcgtgcctacagagtccagtttccaggagcacaaaatcaggacaaatgggctgggtggggtggctcacacctgtaatcacagcactttgggaggctgaggcaggtgatcacttgaggtcagcagttcaaaaccagcctggccaacatggtgaaaccctgtctctactaaaaatacaaacattagctggatatagtggcggatgcctgtaatcccagctacttgggaggctgcggaaggagaatcgcttgaacccagraggcggaagttgcagtgagccaagatcactccattgtactccagccagcctgggcaacagagtaaggctctgtctcaaaaaaaaaaaaaaaaaaaaaaaaaaaaaagacaaatgtttgagacagagtctaaggggatggacagctgggtgtggggtcatccgctgcactgcctggactagtcatgtccct

SEQ ID NO: 71445 - DNA, 684 bp, Homo sapiens
gggtggcagagctgaaagcagaatctgggtgggaggctaacagggccctgcgctccctctgtgctggctgaagtgaggagatcccagcttctcctgctggacctgagagacccatggcatggggagcaaggaggttttcagaagaggaaagagctagaggcttaacaacagtgcagagcaggaaagccagggcttgtctaaggaatagcagtttggccaagggtaggaaacctgtgggagctgctctcacagccagttgcccctggsggtaggaggaggggaggagggcgccggaggggagggcacgtcctgcagttcagctggtgatggagctgggggcttctgctggcctttttagtttatttgttgcaatttaaaaattcagctggggagagggcctgtcttggacattattgcttctttttgtttttctttttctttcttgtttttatttttattttatttatttttttgagacggagtctcgctctgtcacccgggctggagtgcagtggcgtgatcttggctcaccgcaagctccgcctcctgggttctcgctattctcctgcctcagcctcccaaatagctaggactacaggcgcccgccaccacacctggctaattttttctatttttagttgagatgaagtgtcaccgtgttagccaggatggtctcgatctcct

SEQ ID NO: 71446 - DNA, 570 bp, Homo sapiens
aggtcagaagttggagaccagcctggccaacatggtgaaaccccgtctatactaaaaatacaaaaattagccaggtatggtggtgcatgactgtaatcccagttacttgggaggctgaggcaagagaatckcttgaacctgggaggtggaggttgcagtgagctgagatcatgccattgcacttcagcctgggcaacagagtgagactttgtctcaaaaacaaaaaaaaaaaaaaaaggaaaagggacaagagactgtccccagcccaggggcctagttggccaacccttggccaaagagccacagaggtagaatctgtcctaggtcttcctccctcatatccctctcctgactctggcacattttctgcctctgcaagtaactggccttatgctttgcctcctttagcctggccctggtccccggcttctggctcccaccattctcccttcctctctacctccaggaggtacccacttgcaaaccaaaaaaaaaaaaaaaaatctgagacagggcctggtgtggtggctcatggctgtaatcccagcactttgggaggctgaggcaggc

SEQ ID NO: 71447 - DNA, 570 bp, Homo sapiens
aggtcagaagttggagaccagcctggccaacatggtgaaaccccgtctatactaaaaatacaaaaattagccaggtatggtggtgcatgactgtaatcccagttacttgggaggctgaggcaagagaatctcttgaacctgggaggtggaggttgcagtgagctgagatcatgccattgcacttcagcctgggcaacagagtgagactttgtctcaaaaacaaaaaaaaaaaaaaaaggaaaagggacaagagactgtccccagcccaggggcctagttggccaacccttggccaaagagccacagaggtagaatctgtcctaggtcttcctccctcatatccctctcctgactctggcacattttctgcctctgcaagtaactggccttatgctttgcctcctttagcctggccctggtccccggcttctggctcccaccattctcccttcctctctacctccaggaggtacccacttgcaaaccaaaaaaaaaaaaaaaaatctgagacagggcctggygtggtggctcatggctgtaatcccagcactttgggaggctgaggcaggc

SEQ ID NO: 71448 - DNA, 704 bp, Homo sapiens
ctctccttttcagaaaattctagaatctaaaacttcccccccaaacagaataatccctaggatctcaagacagtccttttctttaagccagtgttttccagactttcttgagggaaagcagtcaacaagatactgttttttaaaggtttcaaggccaaattatagtttggaaaatattaaacaaaagactcctctaagcttttattatgatactatgtgtggtgaatgttggagatgaatataatattctatgtcttccaacacgtatggctcctttgcttaggtggtgcgcctcagaacagtccgaaaatggttacttcagataagcatgggatatatatacatacatatacatattctggctctttaagcttctcagaatgaaaagcaagatactaaatgagtttttcaatgctggtcattgcttcctggtagcaaattaggtacataaagatttgtgattactcaatcagatcattaggcctccatttaaggtattgtagccacaaactaatgggacartggtagtcacacactaaaatcccttcagctgtaagcaccaatcactgtgtaaagctactgattataagacatctggaagaggcaaaagaagagcatatttacattccaatgctttataaaacactgtgctggccaaacaaaacatatatgcaggctgaacttgacccctgggtcacaaattt

SEQ ID NO: 71449 - DNA, 1178 bp, Homo sapiens
ccattgttggatttacccaaattaacctcttgggattactacctaagtaaataagagcttaaaagtgagctcttattccaggcagtttaggaaggggtctttaggtggagctcacatggcaattatcacagagaaggagggagaaaggggttttaatgtttatgagactcatatttcctctctcagttgtatgctagcccctccctcctgccttttcctcccagagttctagaatcatgcacttttagaactagaggtgccctggtctggagtcatttccccccatccctttgcttaacagatggggagactgaggcgcaaagatgttcagtgatgtgtgcagggtcccagagctcctctgtgctcctctccttccacccataaatgtggccctctgaggaaacttccaaagccacgaggaagcaagcccagctcattctttcattactggaaaaggataattgctcactgagsctttaagtgacccagggaatggcctgcctcttctccctccatgagctcctgggccagtaggaatggatcctagaggcagtgctgtggcagtgttgtgtgagggttcaaagtggccctggagcccccaagacacactgctccctgccctaccttgggcctgccccctctgggatgcatacctgcgtttgcgctggagcaaaggtagctacaccttgtcttggctctgcaggaacccacctcctctctttgaagggcatgagccaatgagaaatctctctcatacagactgagggagaaagaaggttgaaatactccttgctgttgctttatgaccatgttacatccagtgtgtgagctcctgcctcagccctaaggagagccagggcatgtacaagccactaagaaccatgaagtcccttggcactcagtagacctcagcagagagtgtatttctgccctgtaggccatgtggcctttaaaaatattaatatcttgatattttaaatatcctagaaaaactttgtagtaggcttctttgttatatttagcaggccaaacatggttaatatttagtttatacttggacataatttggcttttgtgttctcacttttctcatagagtaaattgactttcatttttattttaagttctggggtacacgtgcaggatgtgcaggtttattacataggtaaatgtgtgcc

SEQ ID NO: 71450 - DNA, 1423 bp, Homo sapiens
ttacaggtgtgagccactgcgcccgaaccacctttattatttttatttccgagtcagcaccagatgaattatggaatattcttttcagaaagagggaggagccaaagtaggagaaaaaaagtccaaaggtccacaagcaacatatcggttggtttcaagccttagaaccccttgtcactgcagagtcacctgatcacggccgacccaagatacaacacagctcaagggtgtagccaaagtagtctttcttttaggacttggcatttctaaatgccagcaccttgtacatctcgtagattggagtttaaatatctgactttcagaggcatwtgaaccagagtgactccatcttgaataggggctgggtaacctactgaggctgagacctactgagctgcatacccaggtggttagacattctaagtcacaggatgaggtaggaggtcagcacaagatacaggtcataaagaccttgctgataaaacaggtttcagtaaagaagccggccaaaacccaccaaaaccaagatggcaatgaaagtgccatctctggtcgtcttcactgctctttttacactaattataatgcattagcatgctaaaagacccaattttacccaatttggtctgatgctggagaaacaaatcgagctcattggtagctcttataactgattctgggaaactgggatccctaggagagattccactgagtcattcattcaacaaatgcccattgcgtacctactgtgtgccatagtgtgacgggctcagtatattgcctcattcattacctcacaaggttatctgttaacagccacaagtcagaggcttttgacgtacagggtcccgggagagccaaaatagtatttgtttgtttggaataataaaagctgtcttcccaggccacaggaattaaaactaggagtgctaaatcagcaattgtctagccttgcctgagcttctcaaactgtactttagaattgcttgggggaacttgttagaagtacaaaccttggccagaacctcaaagaaccagactcaggcaatccaggatggggtccaccaatccaaggttttaaaaacaagaaccagatggggataggtgatgagttagccactggggattcagaaacccgagagggtggggtggcagtagttgggctttgcaggccagactggtctgggacactttgtgatgaacacaaaccttccctcttccattttgacctttctgccctggtgggctgcttttacgtaagagtattatttcttccttttgtaggcaaagcaaaaagtgtgagaaccagctgctctaaataaaacaattgaaggtggagttcagattgagagctctcagtggctgcttttgttttcctttgaaagttttgggagaaaggagccaaagattcagtagagggggc

SEQ ID NO: 71451 - DNA, 1096 bp, Homo sapiens
gtctccatctcctgacttcgtgatccacccgcctcggcctcccagagtgctgggattacagacgtgagtcactgtggccggcctgcatataatcttccaatctgacttaagactgaagacctacctcctgaagctggtttatcaagctgtaaatcttcacatcttaaattcataacttcatgtctgaaaggtgagaatacttaatattcactaggcaatattcagcaaagtaacatccactagtacatatttaacattgaatcaccaaggatggttttgaaaagacaagacaggctgggcacgatcgctcacacctgtaatcccagcactttgggaggccgagactggcagatcacaaaatcaggagttctagaccagcctggccgacatgatgaaacactctctctactaaaaatacaaaaattagccgtgtgtggtggcaggtgcctgtaatcccaactactcgggaggctgaaacaagagaattgcttgaacccaggaggcggaggttgcagtgagccaaggtcatgccactgcactccaacctgggtgacagagcaagactccatcttgggaaaagaagaaaaaataagaagagaaaagataatctggatgcttgagcccaactacaccttcatttgaggtttctacagagtracaaaacaaaacaataattgtaaattgtcacataaggtgcttcatggagcatgtgccctcaaaagtggtaactttgcaacccacaggtctttgaagcatattacaaaaatcttaaatgggatcctttaatatcacactgcattcaagactatcttcctctacacatctagaaaaacaatcatatattcccacatatgctataaaaatcttaggcctaaaagcaagacatggatattattatttttagcaaaagtagcagaaaattgtgaaagaaaatgtcagttgcatgccagtcaggtgcgggcagtgttcatgtttcaaaagctaacactggcatgactgactcaatgttggacccaaataaattaaaaagtgatacataaaaatacatataataggacggacgtggtggctcaagtctgtaatcccagcactttgg

SEQ ID NO: 71452 - DNA, 1265 bp, Homo sapiens
agggaaccatcttgtgcctgtagaatgtttagtagcatacttggcctctacccactagatgttagtagcaccccacagctgtgacattttaaaatgtctccaggcccggcttcgtggctcacacctgtaatcctagtactttggaaggtaaaggtgggaagaccaattgagtctaggaggttgagaacagtcaaggcaacatgatgaaactctgtttctacagaatgtaaacaacaattagctgggcgtggtggcctgtggtcccagctacttgggaggctgaggcggaaagatcgcttaagcctgtgaggtcaaggctgcagtgagccatgattgtgccactgcactccagcctgggtgacagagagatcctgtctcaaaaataaataaataaaaatgtctccggatgttgtcaaatgaacccaggaccactagtgcctggctgagaaccactgcccccatagccacacagaagtcatgcaagcggagccaaatgggaaagggtgtctgtcaacagatgaatggataaagaaaacgtggcacacatacacagtggagtactattcagccataccaaagaacgggatccagtcatttgcaacaacatggatgaaacaggaggatattatgttaagtgaaataagccaggcacagaaagacaaccatcacatgttctcactcatttgtgagagctaaaaaattaaaacaactgaaggatgttttaccagaaggatggttagcagaggataggaaaggtagtggggggcaagggggatagtggggatggccaaggggtaccagaaaagttagaaagaatgaataagacctagtattgctagcacggaaggggaactgtagtcaaaagtaatttaattgtacatttaagagtaaktaagagaatataactgggttgtctgtaacataaaagctaaatgcttcagaggatgaaccccatttcccctaaggtgattacgactcattacctgccttgatcacaatagctcatggaactcataaatatatacacctattatgtacacataaaaattaaaaattaaaaaaacaaaacagagagaaagggaaatttccaccatcagccacaggccctgacactctctttgtcctaaactcttggagctaagaggagctgatgatggactctctggtccccttcctggggtgacacacacttcctttcagaagtcctgaagagtgttcgacctcagggcagagcacttgatgactctcaaaattttatgcagttc

SEQ ID NO: 71453 - DNA, 1541 bp, Homo sapiens
ctgacctttgggcttctcattactcaaggaatagaaaaaccccaaaccgtgtttgcttaagaccctcttgtcaggtttctaagtctttattatttgcaattataactgataatttcctatgtcctctgggaatttgggtcatgggtggagttttctggcgagaagaagggctcagggactctctaatttcatcattttgcccagggtccagtttcctctgaagtttgcaaggacacatggaaggtcagcagaaacttggccatctcagtgtcctggtgggtgatttttacgaggatttctcatcacagaggatgggaacccaaaggagaatggccgccattggagcctttcctgtccctccactgctcaaaacaactgaactctgtgtcagttgggctgcaagtaaagaaaactcaactaatggaggcctcattgaacaggagttcattttactcacgtaacaaacctatgtggtcccaggattgtctcacggcccagtaaaggcaaagcatggcgttagcaagtctgagatgttcttgaatttccccccattgctgcaagatggcccctacagctccaaacatcacatcctcaatggtgaataaagctgatctccaactgggaagaacctctgtctcctggtgtggtgaaggctgttggagcatctgcaggagcatccaaaccctgtgctattggggtagtccatgcccttcaagccagtcatggctttcctgtttcctctgtcaaatactggctaaggataggtctgtgatgcaattctggccagtgagacatgatggaagagctgctgggtgaaattctgggaaaagttcccttactctttagaagatggatccaggagaagagagtctcttttgctgrgtgttgtcatatctggaggtgatgcctggaactgtggcagctgacttgtgattatgagggaagctggcctgaaaacagactggcccactgaagaggagggcagcatggaatgtggaataaacctgggtccctgttggcttcctgcggccctgatctaaccagccctgagctgtcctacctctgcactgcttggcacaggagacacatcttgattgtttaagcccctttgagttgggttttctgttccttgcagctgacagcactctaaccaatccacacatttccctctgctcgatttcctgctccagagagacaggcacagaccagtaccgggcagccccactctggggaaaaacaacagtgcttattgtttgccggcacagtgggagctctgcctcctggcacagtgggagctctgcctcctgtggcaggctggccattccaaaaccacactgcctgccactgccataaagaggccaggactgtgttcaaaaccccaggcagcaggaggagtggtttgtgggaggtgttgtggtagtgcataaaggaaggtcatttcctgaccctcagaacccacactgccctcagccccacacagccctacccagcccagcatcgcccccagtgcccctggagacaataatggcagccacccactg

SEQ ID NO: 71454 - DNA, 1541 bp, Homo sapiens
ctgacctttgggcttctcattactcaaggaatagaaaaaccccaaaccgtgtttgcttaagaccctcttgtcaggtttctaagtctttattatttgcaattataactgataatttcctatgtcctctgggaatttgggtcatgggtggagttttctggcgagaagaagggctcagggactctctaatttcatcattttgcccagggtccagtttcctctgaagtttgcaaggacacatggaaggtcagcagaaacttggccatctcagtgtcctggtgggtgatttttacgaggatttctcatcacagaggatgggaacccaaaggagaatggccgccattggagcctttcctgtccctccactgctcaaaacaactgaactctgtgtcagttgggctgcaagtaaagaaaactcaactaatggaggcctcattgaacaggagttcattttactcacgtaacaaacctatgtggtcccaggattgtctcacggcccagtaaaggcaaagcatggcgttagcaagtctgagatgttcttgaatttccccccattgctgcaagatggcccctacagctccaaacatcacatcctcaatggtgaataaagctgatctccaactgggaagaacctctgtctcctggtgtggtgaaggctgttggagcatctgcaggagcatccaaaccctgtgctattggggtagtccatgcccttcaagccagtcatggctttcctgtttcctctgtcaaatactggctaaggataggtctgtgatgcaattctggccagtgagacatgatggaagagctgctgggtgaaattctgggaaaagttcccttactctttagaagatggatccaggagaagagagtctcttttgctgagtgttgtcatatctggaggtgatgcctggaactgtggcagctgwcttgtgattatgagggaagctggcctgaaaacagactggcccactgaagaggagggcagcatggaatgtggaataaacctgggtccctgttggcttcctgcggccctgatctaaccagccctgagctgtcctacctctgcactgcttggcacaggagacacatcttgattgtttaagcccctttgagttgggttttctgttccttgcagctgacagcactctaaccaatccacacatttccctctgctcgatttcctgctccagagagacaggcacagaccagtaccgggcagccccactctggggaaaaacaacagtgcttattgtttgccggcacagtgggagctctgcctcctggcacagtgggagctctgcctcctgtggcaggctggccattccaaaaccacactgcctgccactgccataaagaggccaggactgtgttcaaaaccccaggcagcaggaggagtggtttgtgggaggtgttgtggtagtgcataaaggaaggtcatttcctgaccctcagaacccacactgccctcagccccacacagccctacccagcccagcatcgcccccagtgcccctggagacaataatggcagccacccactg

SEQ ID NO: 71455 - DNA, 560 bp, Homo sapiens
taaaacgttgaaccctgtcctcagttgtatgcacctctgcacaacaggtctatcttctggaagggtaaggtatttcttctcacatttttttccttctgtcttctaaaaagcttcatgtgaaagcagaagactcatgagaagacatctagagactggccctaaagtgcttttctccacaggaatgtcacccaggcactacatccaggagtctcaggtgccactgggttcccatcctcagtgaggcagagctgggagaaggcacacagcattcaaatttccttcaagtcacttgcttaaggtayacattgaaggttcaaactaaattcgaaatcttttttttgttgttttttacaattagcacttttttgttatttttttaatatatatattttttattacactttaagttctggggtacatgtgcacaacgtgcacgtttgttacatgtgtatacatgtgccatgttggtgtgctgcacccattaactcgtcatttacattaggtatatctcctaatgctatccctcccccatacctccaccccacaaaaggacccagtgt

SEQ ID NO: 71456 - DNA, 1415 bp, Homo sapiens
ctgggttgaagagagcagggacagtgtggtgcagcaggagcctattcccatactgtgcactcgctgagagcttgtttcccctgggacatgagagatgcaccaccttcctgcccagctgggcaagaacatcaggagagccaagggttacaggaggcctggaggaagcagtgttttcagtaatgcaatatgcagcattgaccagcactgcagcataccaggtgcaatgctaggggataacagatcatggagaaagggctgcggcacacaagagctcacagtgcagcagagtggccagcagacaagtggctggagaatgatgtgrgaaattccacagtgaagacatttgaaggcagcaagacagggctttgagttctgcctaggggagctcagaagcctttgcagaggtgggggaatttgagttgggctttaaaggatgactaggagttcaccaatttgaggagactagaggggtctggcagcagccaaagcaaagagaaagcaacacacttttcacctagagaggcatcaaagggcagtggtggaaaatgaggctggaaatactccccagatagtgttgagcctttgtatttgtgagggtgcttttggctgtcagtaaacgaattgtccaataaagtgtataaacatacatcatgtcttaccgtgtgatatagtttggatggtccctccaaatctcatgttgagatgtaatcctcttgactgccagagccttgaatgtgaagacacttaggccacagtgggagggagaaccattagggctcagagcccagggtgtctggttgagaaggaggcactgatgtccttggttgctcccagcacctccctttgagtcctcactctgttcctaggaagcagcagcaaagctgtgtctgagctgcagcccttgaggttcaggctgaggatggatcagcgatgcaggcagcagggccagagcaacagcctcatggattctggcctttcctgagtccccagggagaggcccctgcactggcagcactttgcagcagcctggaggagtagagctggccttgtgctctgtggagtgccacgcgcaggccctgagcaggtgtgctgcacagatgacctcatcgaatcctcaaagtgaccacctcctagagtggacactatcactacacccacatcacagacaaggcaactgaggcccagcaaggctccacacacagctgaaattgcaagctgagggaagaaaggcaggacttcagtatgctcctgcccccaccctatgctgcctgggaggctggggctgtggggtgggggctccctccacctctgagaccccttcccttgccagtaagtgctctgggcttcccacagagagataggagtgagaaatcaacttccatggtattcaggtgctgttactcacagcagaaatg

SEQ ID NO: 71457 - DNA, 534 bp, Homo sapiens
caaatgtcttcataacacctactgaaattatcacttgatttcgtttactggacctattaatagttatgttatcaattccacatatcaagcatctttgtagctctagaataaaacctacacagttatggtaaattattcttttaatatatggtttctaggttctttatttaggattttctcattggtatttataaattacactggcccatatgtttttatgtgagagtatgtgtgggatagagagaaacatatgatwgctttgtcatttttggcattcagtgttttgctggctttataaaatacatttggtaaccttgtaggtcttctaaccatttccaaagtataaaaatcttttgttttttaaagccttgaagcctttacccataaaatgatctgggctcagaatgtaatattttaaggtcatttgttctatcttccttggtacaggttttctatttttttcttgagtcaacttcagtaacttaattttttctctgagattattcaccatgtatgtaaatacatgtaaatcct

SEQ ID NO: 71458 - DNA, 534 bp, Homo sapiens
caaatgtcttcataacacctactgaaattatcacttgatttcgtttactggacctattaatagttatgttatcaattccacatatcaagcatctttgtagctctagaataaaacctacacagttatggtaaattattcttttaatatatggtttctaggttctttatttaggattttctcattggtatttataaattacactggcccatatgtttttatgtgagagtatgtgtgggatagagagaaacatatgatagctttgtcatttttggcattcagtgttttgctggctttataaaatacatttggtaaccttgtaggtcttctaaccatttccaaagtataaaaatcttttgttttttaaagccttgaagcctttacccataaaatgatctgggctcagaatgtaatattttaaggtcatttgttctatcttccttggtacaggttttctatttttttcttgagtcaacttyagtaacttaattttttctctgagattattcaccatgtatgtaaatacatgtaaatcct

SEQ ID NO: 71459 - DNA, 1979 bp, Homo sapiens
tatcagcatcatttttagactttaattaagagaataagtttgagcattattgtctttttctcagctcccatcactactgtaacatgtaatagacaagattgaaaaggaaaaggcatatatctacaaattcaggtatactctctttggaaataaatcacctttccagcaaatgtcatttttatttcatttgtgaataataattccaacaaatatcaggaagatcagcatctcaagattatagttcttctggattatgctgacatgctcaaacattttacttaaagcagaactgttccgtcaaagtggctgggtcagacaggtttttcggagtaaacatcaggctcatgtagaaccagccctcatctaagaacatgtaaaccctagtatgactcttcgggatttgttttatctggaaaccttcactttttgacagaggttttaacagggtgaatctttagtgaggcagaaatctggattactttttctcaagatgttccttatccctatgcaaaggaacacggattttttttattatactttaagttctgaggtacatgtgcagaatgtgcagattagttacataggtatacacgtgctgtggtggtttgctgcactcgtcaacccgtcatctacattaggtatttttttcctgatgctatcccttccctagacccccacccactgacaggccctggtgtgtgacgttcccctccctgtgtccatgtgttctcattgttcaactctcacttatgagtgagaacatgcagtgtttggttttctgttcttgtgttagttttctgagaatgatggtttccagcttcatccacatccctgcaaaggacatgaactcatccttttttatggctgcatagtattccatggtatacctgtgccacattttctttatccgttctatcattattgggcatgtgggttggttccaagtctttgctattgtgaacagtgccgcaataaacatacgtatgcatctgtctttatagtagaatgatttataatcctttgggtatgtacccagtaatgggattgctgggtcaaatggtatttctagttctagatccttgaggaatcaccacactgtcttccacaatggttgaactaatttacactcccaccaacagtgtaaaaactttcctatttctccacatcctctccagcatctgttgtttcctgactttttaatgatcaccattctaactggcatgagatggtatttgtggttttgatttgcatttctctaaaaaagtcagatgattttaatgtgctttcaggattgagaaacaccatcataaagcagtggttctcaaagtgtagtatggccacatttgtatctcctggaaacttattggaactgcaggttctctggtccaaccttgaccttctggatcaaatactctgggggaagagcccccagtaatttttagtaatattcaagtttgtgaacaatgtcataatgtcatataaagagctgtaattcttctactgatgaatatgaatcagacttgttcgttaatcagtcgcaaccaagaggatgtcttggagacaagaaccatattctatgtttctcctgtattcacctgaaatgtagataaatgtgtgaaacatacattaagttatcaataaatatatgctgattaatttgctcctttgtatttaaagatttttatgcctaaaatgacagaatactgattgctgtggactgaacatttgttttcccccctccaaattcatatgttgatattttaatcccaaatgtgatggcatttagaaataatatttttgggaggtatctggatttggataaaattgatattctaatatggagatgaagagaccagatctctctctstctcccccatgtgagggtagagcaagggtgtagccttctgcagatctggaagttggccttcaccagacactgagtctgccagcaccttgaatttgaatttctcagcctccgt

SEQ ID NO: 71460 - DNA, 519 bp, Homo sapiens
tagtttattgatatagstattgtttagtctcaatgctatccatattatcttatcttataaataatatatatatatataatatctactgtgtttctttttacctatatcatttggggaagcttggaatatttgtatttatattattttagtaattatgtttgttttatgcttttataatgccctagtaccactttttaaaaaattaccttttactatctaagttgtcagttttaaatagtatcctgccaactatttaggtgatgggttgactaccatcaaccaactattcaataataaaagaattattttgtcttccttttgttgcccctgtcttagtcaaagtagtgttatttctaatttgtattttaatggacctggtgcttttcaaggagtagtttcttggtctcctactaatttttgtagtatagcttcatctccagtttattgatgtatatctttttgcttttctctgaatgcaaaattgactagataatgctcactataaatctttggcccaaa

SEQ ID NO: 71461 - DNA, 1575 bp, Homo sapiens
cacaacagacgtctctccacacagccagcccgggcgcggcctgagactggggtggggagcggggacccacagctgtccaaggctgcctctccaaggagaccccggcccctcagcagaatctgccaagctggggtaagggaaagcttctcttccgtaattaaagtctgagtcttttctattttttatttttttgcagtagttttaggttcacagcaaaactgagcagaaagtaaagagaattcccatatacaccccgttcccacatattcatactcacaaccacccactatcaatatcctgcaccagagtatgactgtaaaatcaatgaagcgtatattgacacatcatcacctgacgtccatcgtttacattagggttcactgttggtaatgtacattctatagatttgtacaratgtagaatgccatggagccaccattgtaggatcacacagaatagttttgctgccctaagaatcctctgtgctctgcctatttatcctccttccctcaacccctagcagccactgaccttgttactatcgctatcgttttgtcttttgcagatggtcatatagttagaatcatagaataagtaggcttttcagattggcatctttcacttactgctgggaatttaaggttcctccatatcttcttgtaagcctgagtcttttatttatttatttatttatttatttatttatttacttattttcagacagaatctcgctctgtctccaggctggagtgcagtggcaacctctgcctcccgggttaagcctgagtctttgaataggagctgcagacttaggagcactagtttagggatgaggtcaatgtggctttaggttctaactttgttatttgtgagcttggaccattcactcactccctccagtcccagcactgcacactaccttctcctccccttggaggtcttgtcagtctttctcttctattttgttttatttacctcagcaccaagccagggcccaactatggtttccacgcagtgaaaggccagaaagccgtggaccaattaatggataagtgggacaacaggaactcaaaagccccccgccccttttttgagacaggatcttgctatgttgcccaggctgatctcaaaatcctgggctcaagaaattctcttatctcagcttcccaagtagctacaattacaggcttaagtgatcatgcccatcaaaacaccattttaactgaaaaatgtgacgcgctgtttcctaagtgagtgccactgtagagtaagaagaccccagaaaccggagatgtgggttccagctccaactcgacctcctgggctaccggggatgtgtctcggggctctctttgccctctgtcaacaccgtggagatgtcagtgacctcaaaggcagggtgtgaaaatgaaacaagatgctggcaagaagcagggccccgggaactataaactctgggctccaggaggcagtattttggaggacagaagggtcatccccaaaattcaggccagctggctgtccctgtcttctgcaaagcacagagagaggtcatatggggacatggcttcccta

SEQ ID NO: 71462 - DNA, 2083 bp, Homo sapiens
ttgccatgtagtggcagaaagtttagcaacactgtagcctgcagtaacatggaaaataggaaggtatctaataatcttgatgatctagctragattccaggcagatattgaaagtgcctcctgacttcttactacctatgataaaatgtgagaggagggagatgagctcaagaacccggaacagctgggctcaaaaattaaatgttctaggttgggcaacatagcaagaccccaactccaaacaaagtttaaaatagctaggaatagcagctcacacttataatcccagctacttgggaggctgaggcaggaggatcatttgagcccaggagttcaaggctgcaatgagctgtggtcatgcaactgtattccagtgtgggcaacagagcaagacctcatctcttaaaaaaaaaaattaaaagtaaaagtaaagtcaattgttttcatttccaagtctttccagatacaaacaattctcaaagtaagaaaggaactctggccaaatataaatccagtatgagtgcctcttaggatctctcagacagacgaaagttcctctaagaatcttttttttttttcttttgaggcggagtctcgctctgtcgcccaggctggagtgcagtagggcgatttcggctcactgcaagctctgcttcccaggttcacgcccttctcctgcctcagcctccggagtagctgggactacaggcacccgccaccatgcctggctaattttttgtgtttttagtaaagatggggtttcaccgtgttagccaggatggtctcgatctcctgaccttgtgatccgcccgcctcagcctcccaaggtcctctaagaatcttaagggcatgtttcagccaagcagatacagctgatgccctatggcacaaagatgaactgtccccactgagcaccatccaaattatcaatttatgagcaaaattaatgattgcgttgtgttaagccactaagttttggggtcgttggttatgcagcaattgataactggaccagatggaaactacacggttctctattctccgtccattacccacggaaacaatggcctctctgatgtgaagctggggcttagcattctgtctcctgacccacagcatcttacctggtggacaggttctggttggcattggagacagggaagtctccattcatttggtggcttttctgaatcccagaggaacctacactttcgatagagagacatcacgaagactgacctcccaggcttcagtctcaggagaggtgccgcggggcagggagaggtataaggtgagctgggctgggactcagggagggaaatgacctgactctgaagaagcagctgggtgttctcttccaggatcccttcttagagcagattccaatggggcatcggggtgatgttcagagaagtactcagaatcctcctccttcctgctggatcagggagcaggctgatttctgtgtgaggtctgaggagcggcgcctgtaggagccctcaccctccttcccctcactcatttattattgatcagtcattggccgaggcctccaccatgaaaggcacaggggacaggtattaatcaaagagccatcatctggtggaggaggcaggcagggacacaggtgacctccgcaggctctttagagtctccactgaagactcgctggggctgtgagaggccagagaaaggaaccacgaaggcctgggatgtagggaagggctgcggacacaggagacacacaggtaggcaaggctccttgcctaaaggggagcaacactcacaatctcagtgtgaccttgtccctcccctatgctccaggctcacaccccagccatcaagaacaattaccagtttcctccaggctgtaccactgagcttttgttaaagctgttctttattcctggaaagcttctccccgccttgcctggctaattcctattcctcattagaaattcgtataaactcgataacaccattcatttgatccttatcttctgagatatgtataatccctctcccttattttacaggtgaggaagcaaagggtcagctagttttaggcactttctcagtgtcc

SEQ ID NO: 71463 - DNA, 1660 bp, Homo sapiens
caactctcagattctggtttcagttttaatccctttggctggtctctcttcctctctaggcctgtattttactgtctgtaaaaggaaatgttttgaaataaaccagcggttcttctccaggcacagagacaggaggcatgtccatctggggtagaggtgacttttcagactataatgttctaggccacccagtcatcccttggagatcctgatatgcccctcgagcgatgggaacctccaggttaagattcactgtgtctgaccagagacggtcctgatgggagtcattgtgcagggaaatggtttggaaacagacacatgaaaaagcttgaaaatctaccatgtgatctggatgggccctctgggcaggcgctctctgagaaaaaaagattggatgggagtgaggagacccaagttctggaacagttttgtgacatctttgtaggtagctgtgaatgggtccattcacatagcctgtgttcttatctctaagcaaggaataaagcaccacctgctcgcagcgagatgctcctagggagaatgctttgtgccctgcaggtgctgcacaagcaagaggccagattccagtgcctgtaacctgtggtcccaagaagtgagcagcagagtggccgagaaaagtgtccatgtgttcaggctcacctgcattctcccagctttgcagagactgctcccttaccgtccccctcaccaccctagtctttatcacctttcagaccttggaatatccttgaagctcactcagatgtcccctcccagaggatgcttctgacccccaatctgacccccaacccttgctgtagaatgcctctcttgaaggcaaagggatagcagagactttttagggacacccttcttatgggtgggagaagcctgggtatcccactccctcttcctcaaaccctgtcttatgagtaggcagtcagaaaatgaagggagtcacgtgttttactgctgggatccagccatgctttaaaggacttgtgttcaacccaacacaggtgggcacaaatgtgatttagggaaagcaacaaatagggttctggttctgaataatatggagcaagcaaactccaccttgtccctcccactgaaagcaattataaaacctagacagaatgcagggagcaattacarcagaagacttcagaacatctctctcagtagagatagaaccagtagacgaaatcagcaagcatatttgaagagctacacaaacatcaaccaactggagctaaatgacatttatagagttatagagtacttcacccaacaacaggaggaaacacattcttttcaagtacacatggaacatccaccgagaaataccatatactggctcactaaaaaagaaccataacaaatgtaagagcatggaaatcatacaaggtacattctttgatcataaagaaattaaaatagaaatcaataacagaaagataaaaggaaaaactccaatttggaaattaaacaatgcacttataaataatccatagtcaatgaagaagtatcagggagatcagaaaatatttttaactgaacataaatgaaaatacaacatgccaaaatttgtgctatgcagctgaagtagtgcttagaggaaagcttacagcattaaatattaatataagaaaaaaagaga

SEQ ID NO: 71464 - DNA, 1660 bp, Homo sapiens
caactctcagattctggtttcagttttaatccctttggctggtctctcttcctctctaggcctgtattttactgtctgtaaaaggaaatgttttgaaataaaccagcggttcttctccaggcacagagacaggaggcatgtccatctggggtagaggtgacttttcagactataatgttctaggccacccagtcatcccttggagatcctgatatgcccctcgagcgatgggaacctccaggttaagattcactgtgtctgaccagagacggtcctgatgggagtcattgtgcagggaaatggtttggaaacagacacatgaaaaagcttgaaaatctaccatgtgatctggatgggccctctgggcaggcgctctctgagaaaaaaagattggatgggagtgaggagacccaagttctggaacagttttgtgacatctttgtaggtagctgtgaatgggtccattcacatagcctgtgttcttatctctaagcaaggaataaagcaccacctgctcgcagcgagatgctcctagggagaatgctttgtgccctgcaggtgctgcacaagcaagaggccagattccagtgcctgtaacctgtggtcccaagaagtgagcagcagagtggccgagaaaagtgtccatgtgttcaggctcacctgcattctcccagctttgcagagactgctcccttaccgtccccctcaccaccctagtctttatcacctttcagaccttggaatatccttgaagctcactcagatgtcccctcccagaggatgcttctgacccccaatctgacccccaacccttgctgtagaatgcctctcttgaaggcaaagggatagcagagactttttagggacacccttcttatgggtgggagaagcctgggtatcccactccctcttcctcaaaccctgtcttatgagtaggcagtcagaaaatgaagggagtcacgtgttttactgctgggatccagccatgctttaaaggacttgtgttcaacccaacacaggtgggcacaaatgtgatttagggaaagcaacaaatagggttctggttctgaataatatggagcaagcaaactccaccttgtccctcccactgaaagcaattataaaacctagacagaatgcagggagcaattacagcagaagacttcagaacatctctctcagtagagatagaaccagtagacgaaatcagcaagcatatttgaagagctacacaaacatcaaccaactggagctaaatgacatttatagagttatagagtacttcacccaacaacaggaggaaacacattcttttcaagtacacatggaacatccaccgagaaataccatatactggctcactaaaaaagaaccataacaaatgtaagagcatggaaatcatacaaggtacattctttgatcataaagaaattaaaatagaaatcaayaacagaaagataaaaggaaaaactccaatttggaaattaaacaatgcacttataaataatccatagtcaatgaagaagtatcagggagatcagaaaatatttttaactgaacataaatgaaaatacaacatgccaaaatttgtgctatgcagctgaagtagtgcttagaggaaagcttacagcattaaatattaatataagaaaaaaagaga

SEQ ID NO: 71465 - DNA, 357 bp, Homo sapiens
tgcatcttatcaactttacagatattttaatagaacttttgctcaaacagtggtgactgagtttgtgagtttgttgttatgcgaataccaccaggatctctgcataagaccaactcaccaggcgtgaagcgtcaactccctgggctgtgttgtacatgttcccatctggagagggagctccacatccatgcacagtaaccgttcagaggtacatttgtgtgcagtgaacattaacaaagggttagagattctgttcccactgccttgkgagctgatgtatatagacaagcaaacccaaactctgataactatttttgttttttttgagaaggagtcttgctctgttgcccaggctgg

SEQ ID NO: 71466 - DNA, 585 bp, Homo sapiens
tgaaataacaagaaaaagggagtcaactagcaaaaagcaaacaaaatcaacgcaataattctgtaacacatttcacagaggtgttaatctcaattgatgatgataagatactttgaagttggaaagaactacattctgagtaatagcatggtactgcagtcaaccacatattaaagatggaatcagataaaatgttaagtggcaactgaataacaatttcagggcaaaaagctagaagaaaaactgcacacactagccctttagtaagtgggtcagcactgcatgcttttcaggcgggcaggatggctggagaacggcacaaggcggtggctacctggcaacagcggctccaaggctggctcgccaggggccagagaggcatccctgacctttatggtctctgcgtccagttacatakttggcacgaagtgctttctgtggtctttgtccggctcactggccatccctctccagttgtaacaacaaagcctctgaatgttaccttaggaaacactcgcccctgctttattcccaccagcatccttctctcaggcactgggggactctgagggttctgcatggttg

SEQ ID NO: 71467 - DNA, 1017 bp, Homo sapiens
acctytgggtgcatgtaatttgttgaacagcagataggcttaatatgtctttggctattatgtagtatatggagggtgtcataggacaggttttagagttagatttaggatgaaattcaatctccaccatcacgtcctaaatatatgctattaagaaattcgattaacttctctgagcctctattttctatttgtaaaataggaaaataatactttttctatctacctcacaaggatttttgtaggaatgaaattggacaatatatgtcaaaatgctttgtgaataatagaatgctatataaatacaaattgtttacattattatcacaattattactgtgagtaatggaattactataaataataattttattattcctgacacatgatttaggaaaaaaggaagaaattatctcatttaagaaaaaccaggctgggtgcctgtaatcccagcactttgggtggccaaggcaggtggatctctgaggtcaggagttctagaccagcttggccaacatggtgaaaccccatctctactaaaaatacaaaaattagctaggtgtggtggtgcacacctgtagtcccagctacttgggaggctgaggcaggagaattgcttgaacccgggaggtggagggtgcagtgagctaagatcacaccactgcactctagcccggttgacagagcgagactctgtctaaaaaaagaaaaaaagaaaaagaaaaaccagttgttgcatagccagctcttttttatatgaggaaaagttagtaagtaaatatttacgtaaagccagagaattaaaatacaacttctagtctgcacactactactgaaacttcttggagaaatctccctaatttatttagcctggctttcttatctctaaagtaatatctacctcattagatttctatgaggacaaacatgggaaaacaatgggagatatgtcaaatcctttagaaggaagtctcttgtattcagatgagttatatgttccttctttagatatatgat

SEQ ID NO: 71468 - DNA, 742 bp, Homo sapiens
atcctcaaacttcttttttgtcacccstttaggagggatatagattttcatttctctttcataatgggccttctctacctttgccatgtcttcacttttctctttagcagacatggtcttccacctctctgagcacttcttaaaaactctgagaagttgactgaagcatctggctgctgcttcttatgctcttcctgacaagtttgcacaaaaaatgcatatgatgacattttgcctctcagcttcttaggatctcctttgcccatttttagttatttttcctcagtgaggcagagtcgcccaatgcctgtctggttctcacttgcccagtgctgtctctatggagttcagtgtactgcaatggctgtgagagccattgcacagctctttaaaggaatttgtgaccaaggacggtggttctcacctgtaatcccaacagcatgggaggccgaggcaggaggatagcttgacattaggagttctagaacagcctaggtagaacagcgagaccttgtatctacaaaaaaagaaaaaaatttaattagttgggtgcacacctgtagtctcagctactcagaaggctgaggcaggaggattgcttgagcccaggagttcaaggctgcagtgagccatgatggtgctactgcactccagcctcaatgacagaaaaagacattgcctcaaaaataaataaataaaattttaaaaagacaaaggaatttgataagtgcaatcaaaaatt

SEQ ID NO: 71469 - DNA, 742 bp, Homo sapiens
atcctcaaacttcttttttgtcacccgtttaggagggatatagattttcatttctctttcataatgggycttctctacctttgccatgtcttcacttttctctttagcagacatggtcttccacctctctgagcacttcttaaaaactctgagaagttgactgaagcatctggctgctgcttcttatgctcttcctgacaagtttgcacaaaaaatgcatatgatgacattttgcctctcagcttcttaggatctcctttgcccatttttagttatttttcctcagtgaggcagagtcgcccaatgcctgtctggttctcacttgcccagtgctgtctctatggagttcagtgtactgcaatggctgtgagagccattgcacagctctttaaaggaatttgtgaccaaggacggtggttctcacctgtaatcccaacagcatgggaggccgaggcaggaggatagcttgacattaggagttctagaacagcctaggtagaacagcgagaccttgtatctacaaaaaaagaaaaaaatttaattagttgggtgcacacctgtagtctcagctactcagaaggctgaggcaggaggattgcttgagcccaggagttcaaggctgcagtgagccatgatggtgctactgcactccagcctcaatgacagaaaaagacattgcctcaaaaataaataaataaaattttaaaaagacaaaggaatttgataagtgcaatcaaaaatt

SEQ ID NO: 71470 - DNA, 786 bp, Homo sapiens
aaaccacggagaagaaaaagacacattgacaggggcaagtgtctgaggaggtaaggcagtcttataagatggtggaaggattcacaaaagatcagggtggcactagtcagttcattattattattattatttttgagatggggtctcactctgtcactcaggctggagtgcagtgacgcgatcttggctcactgcagtctccgcctcccgggttcaagcgattctcctgccttaccctcctgagtagctggaattacaggcatgcaccaccacgcctggttaatttttgtatttttagaagaaacagggtttcaccacgtttcccaggctggcctcaagtgatcttcccacctcagcctgccaaagtgctggaattacaggtgtgagccactgcaccyggccccagctcattacttctaacctatctcagaacagacactgacacatagcaaattctcagagaatctctgtccttgtccctgctgttgcttcctgctgagccctgaggtgcacctacccttgcctggtatgaggtgctctcataaaccctaaaagtgcagtccctgggaatttcagagccaagtctgtcacttcctcttgtcagtgtctaaattaattatctaaaagatttgaaaacaattctgcacatttaggcactgaagatatctttaaaaatgccatatatgtgaatgcatttaatactactgaactatacacttaaaaaatggttgtaggtcatggtggcatgtgcctgtaatcacagctactctggtggctgaggtggga

SEQ ID NO: 71471 - DNA, 746 bp, Homo sapiens
ctttcaggccccctctcacacagagggctacccacttcgggtcccctctctttatcgagagcttttctgtcagtcaataaaattcttctctgccttgttcactctccagtgtccgcgtacctcattcctcttggtcatgggacaagagcgaatggcaggtgcaaaaagagctgtaacatatgctcatgctcgccgagctataggagtgaaaaaaccattgtgtgccaacatgcccccatttgctgagctgcaggcagcaggacccaatgagttgtgacacgctcccattcactgaagctgcagacagcagaaatgaacgacagtgtaacactttctggaggctcaggcctcaggactccccaagcaaaagctgtaacacaccttggggctctgtggttgctggcatctccaagttattgggcactgccacatccccctcatccagacaccagcatccaaggtagaagttggtcacggcacccctggaccagctgcgggctgaccacagagccaaggcaagcgcaggatccagaccagtagcacarcctgagcgcagtctgctgggccaagtgggcagagtaagcccagtgggcccaagcaaagcctgggcagaggtgccactagccgtggagatttctggctggcaaagtggcactgaaagaattctgtgtcatcagtagtcaaataagctactcttattctaaaaaaactcagtcaaaaaaaaattctaagcacatgtataccaa

SEQ ID NO: 71472 - DNA, 746 bp, Homo sapiens
ctttcaggccccctctcacacagagggctacccacttcgggtcccctctctttatcgagagcttttctgtcagtcaataaaattcttctctgccttgttcactctccagtgtccgcgtacctcattcctcttggtcatgggacaagagcgaatggcaggtgcaaaaagagctgtaacatatgctcatgctcgccgagctataggagtgaaaaaaccattgtgtgccaacatgcccccatttgctgagctgcaggcagcaggacccaatgagttgtgacacgctcccattcactgaagctgcagacagcagaaatgaacgacagtgtaacactttctggaggctcaggcctcaggactccccaagcaaaagctgtaacacaccttggggctctgtggttgctggcatctccaagttattgggcactgccacatccccctcatccagacaccagcatccaaggtagaagttggtcacggcacccctggaccagctgcgggctgaccacagagccaaggcaagcgcaggatccagaccagtagcacagcctgagcgcagtctgctgggccaagtgggcagagtaagcccagtgggcccaagcaaagcctgggcagaggtgccactagccrtggagatttctggctggcaaagtggcactgaaagaattctgtgtcatcagtagtcaaataagctactcttattctaaaaaaactcagtcaaaaaaaaattctaagcacatgtataccaa

SEQ ID NO: 71473 - DNA, 776 bp, Homo sapiens
tgcattaggacttttcattttggtacaaagtaatttactatcagggaaaacaagaaagatataagttgtactacaattttcctccaagagaactactttaattaaagaaatgaaactgaagattataggccaaaatgtggctgtggagccagcttttcagctttcttaaaagctgtaacttgttgtctgtccaacatccatcttcagttctctactttgctgccagtctaatccacatttacttaactgtctcatatggatttagagcaagcagcaaggtcttgaggtccagcatcatgccatagtcatcttccaacaccaaggctcagaagcagggtgtggcacatgagggatgcttaacgactgacagctgactgatggagtggctgatatggttaggtttgtgtccccacccaaacctcatcttgaattataatccctataatccccatgtgtcaagggaaagaccagatgaagataactgaatcatgagrgtggtttcccccatgccgttctggtggtaatgagtgagttctcacaacatctgatagttttataaaggggcttttcctgctttgctcagcacttcttcctgctgccttgggaagaaagtgcctttcttcccctttgccttctgtcatgattgaaagtttcctgaggcctccccagccatgctgaactgtgagtcaattaaaactctttcaagtctcaggtagttctttacagcagtataaaaacagactaaaacagtaaattaatactgcagaaagtggggt

SEQ ID NO: 71474 - DNA, 692 bp, Homo sapiens
aaccagcaaattgtatccatgtcaatatcccggttggatattatactgtagttttgcaaaatgttaccattaggggaaactaggcaaagtgcaccagaaatygctctgtattatttcttacaactggatatgaatctataattatctcaataaaaatctaaattttgaaaaggaggatgaaaatgaatgcaatcagaacaaacttcacagaggaaaatgcttatacaaacaaaatgcagaaaacaaactaaatcatgatgtaaaaataaagatgaataagcagaatacaatttgaggggaaaaatccctatacatgatgtgacataatttgtataaagcatgcagcagaaaaatggctacatatatatttaatataatgtttacacttggatgacagatctgttggtgattatcacttctacctgccttttggtacttttcttggtttaacatgcattgttttcataattggaggtttctgtttgttcgtttaaagaaagaaacatacacaagaaccacaggaaattggcatgcctgtttaacagatgggtctgtatttggtgacttatccttcctttattaaaccataaaatcactttataaatgatcagttatggcaaaaagaaaacaaagatacaacaccacacaaaatgaaataaaaaatagggcttttcaaatctactgaccactaa

SEQ ID NO: 71475 - DNA, 692 bp, Homo sapiens
aaccagcaaattgtatccatgtcaatatcccggttggatattatactgtagttttgcaaaatgttaccattaggggaaactaggcaaagtgcaccagaaattgctctgtattatttcttacaactggatatgaatctataattatctcaataaaaatctaaattttgaaaaggaggatgaaaatgaatgcaatcagaacaaacttcacagaggaaaatgcttatacaaacaaaatgcagaaaacaaactaaatcatgatgtaaaaataaagatgaataagsagaatacaatttgaggggaaaaatccctatacatgatgtgacataatttgtataaagcatgcagcagaaaaatggctacatatatatttaatataatgtttacacttggatgacagatctgttggtgattatcacttctacctgccttttggtacttttcttggtttaacatgcattgttttcataattggaggtttctgtttgttcgtttaaagaaagaaacatacacaagaaccacaggaaattggcatgcctgtttaacagatgggtctgtatttggtgacttatccttcctttattaaaccataaaatcactttataaatgatcagttatggcaaaaagaaaacaaagatacaacaccacacaaaatgaaataaaaaatagggcttttcaaatctactgaccactaa

SEQ ID NO: 71476 - DNA, 665 bp, Homo sapiens
gaggatggcactgcctctccaacagccccagcccgcagcactgacttcatcaggtaatcaaaattattttcttaccccccagctaagcagcttgaaggttgagccaaaagaggtcataaaaagtgcagaggtgatgttggaggcaggggcacgagggtgtcctgggcttgcagcagcacaaagaagagattcaaggaagccaaagcttccaatagtgcactggagtgggcaaggggcagaggcactctgaaaatgggtacgggttggctcagcatttccacaatcgagtctcagcccacctctctgccctcaactctcaatgctcacatccctccctcagcagctctctctgctggggaccccaacacacacagtctgggccattctgccagcttccatggcttccccatgcagagtcatttgtctcttccacctgacgccatctctcttgagcgccaagcctccaaaacccagctgaagtcaccttgtctgtgaatctctccatcactmccttctcaccacctgcacctgggtcaggagacagagggcatacggggagggattctcctattgctaagcctaaaaagagggccagaacaaggggaaaaaaactttatttcaaggctaatatatgcaaattgtaatctaatctcatcatttcatag

SEQ ID NO: 71477 - DNA, 823 bp, Homo sapiens
tagttaattttatgacaatgtacctcaatctttttttaagttaatcgctcattttgaattttaaacatcatatgtatcttctgatttattamtttctgactatactgtgattgaaaatatgttataaagttagaatcttgaaaggtgaaaattacattagtggtatgacaagttaaatataaatctccaaaataaaagttgaaggtatgttggccacgtgtggtgactcacacctgtaatcacagcactttgggaggccgaggtgggcagaccacttgaggtcaggggttcgagaccagcctggccaacatgctgaaacttgtctctattaaaaatacaaaaattagccaggcatggtggcagatgcctatccagctccttgggaggctgatgcaggacaaacacttgaactcgggaggcagaggttgcaatgatctgagattacgccactgcactccagcctcaaaaaacacacaaaaaaagaaaatatgtcacattgatatcaggtatccaagaataaaactttggcatagcctgttagttattccctaaaccctggctactttgcactgaacaatattttggcttaaccaagtattgtttcacttagagaaaatttccagaagcatatgaattgtcttgtttcttaaaagcctttaagcctctcaaaacggtttagccatgtaaaactgtgagtgattgtatttggacagcattttcatattttatatatactgaatttagttatgggaagttcaaatatagatttaaattatgactctaagttgattccacttaattgcctggttaacaaattttagtt

SEQ ID NO: 71478 - DNA, 823 bp, Homo sapiens
tagttaattttatgacaatgtacctcaatctttttttaagttaatcgctcattttgaattttaaacatcatatgtatcttctgatttattaatttctgactatactgtgattgaaaatatgttataaagttagaatcttgaaaggtgaaaattacattagtggtatgacaagttaaatataaatctccaaaataaaagttgaaggtatgttggccacgtgtggtgactcacacctgtaatcacagcactttgggaggccgaggtgggcagaccacttgaggtcaggggttcgagaccagcctggccaacatgctgaaacttgtctctattaaaaatacaaaaattagccaggcatggtggcagatgcctatccagctccttgggaggctgatgcaggacaaacacttgaactcgggaggcagaggttgcaatgatctgagattacgccactgcactccagcctcaaaaaacacacaaaaaaagaaaatatgtcacattgatatcaggtayccaagaataaaactttggcatagcctgttagttattccctaaaccctggctactttgcactgaacaatattttggcttaaccaagtattgtttcacttagagaaaatttccagaagcatatgaattgtcttgtttcttaaaagcctttaagcctctcaaaacggtttagccatgtaaaactgtgagtgattgtatttggacagcattttcatattttatatatactgaatttagttatgggaagttcaaatatagatttaaattatgactctaagttgattccacttaattgcctggttaacaaattttagtt

SEQ ID NO: 71479 - DNA, 823 bp, Homo sapiens
tagttaattttatgacaatgtacctcaatctttttttaagttaatcgctcattttgaattttaaacatcatatgtatcttctgatttattaatttctgactatactgtgattgaaaatatgttataaagttagaatcttgaaaggtgaaaattacattagtggtatgacaagttaaatataaatctccaaaataaaagttgaaggtatgttggccacgtgtggtgactcacacctgtaatcacagcactttgggaggccgaggtgggcagaccacttgaggtcaggggttcgagaccagcctggccaacatgctgaaacttgtctctattaaaaatacaaaaattagccaggcatggtggcagatgcctatccagctccttgggaggctgatgcaggacaaacacttgaactcgggaggcagaggttgcaatgatctgagattacgccactgcactccagcctcaaaaaacacacaaaaaaagaaaatatgtcacattgatatcaggtatccaagaataaaactttggcatagcctgttagttattccctaaaccctggctactttgcactgaacaatattttggcttaaccaartattgtttcacttagagaaaatttccagaagcatatgaattgtcttgtttcttaaaagcctttaagcctctcaaaacggtttagccatgtaaaactgtgagtgattgtatttggacagcattttcatattttatatatactgaatttagttatgggaagttcaaatatagatttaaattatgactctaagttgattccacttaattgcctggttaacaaattttagtt

SEQ ID NO: 71480 - DNA, 818 bp, Homo sapiens
cccaaattgaatgtctctagctgaagcaaagackcaggggtggagaatgtgaagctccggagaattagcagaaacgtggggaggacattcatcatcccaccgttggagaatggggtttgaattaattttatatagatcctaacagggagttcccatatgacatctggaatataagtataggcgagaaaaataccaccactgcctgcaggcacttctgccttgtaggcaaactgtaatttttccctacgtttctctttgtttaggaagatgcccttgggggtgaaaggtgaagtgctattgatgtttaagtgggaagaatgtggagtttctagagttagggatagaagggctgggactgggataagatgggaggagtgtctccaggggtcctcagaggacaagcgggagtggaaggagagactcaagttacattttggagaaagctaaaagtcaaggcttccagtggtggaaatatttgagagatttcagaaagaggagctctaacagcattcactttcaatggtttgctcagtttttctgggatatactgtctccctcccctctcgcatccaccaccccttcatggtccctaaatatctattaaaactcagccattccaggggccctggctcatgcctgtcatcccagcactttgggaggctgaggcaggaggactgcttgggtccaggagttcgagaccagcttgggcaacaaagggagacctgtctctacaaaaactttaaaaattagccgggtttggtggtgcatgcctgtcatctcagctacttgggaggctgaggtgggaggatcgcttgagg

SEQ ID NO: 71481 - DNA, 622 bp, Homo sapiens
aacatgagactgagcttgcccagcctacattcaaggttcttggtaattggatgccggtccaccatttgtgtgcaccctctgctgccctttcccagacatctctgcctcctctccatgggactcaccaaggacccagtatcagcctaactaactgcagggaatggctttctcctcctcttccttctcttccttttggcaaactcctattcacctgttcaggccctgcccagatacctctcttctgagaagccttctccggcctccctccctgaccgtgattatatctactctcctgttctcttgccatgatcctggagttttgtatttagcatgtcctgcctttgtaggcttatttttggtcacaggctttttgggagtcaggactatgactttctccatctctgaagcactctcctttcccccaagcacaatgacatgttaggagcccagtatggtttgtcacatatgtagggcaggggttagggccaccrtcattcagatgaggctggtatgaaggtttcaggcttccagggcccagccagtttgtgaaaacaagtggtgagttctggcctcttggctactttgtcgagtcatccaatgtaatgctcctattggctgagtt

SEQ ID NO: 71482 - DNA, 622 bp, Homo sapiens
aacatgagactgagcttgcccagcctacattcaaggttcttggtaattggatgccggtccaccatttgtgtgcaccctctgctgccctttcccagacatctctgcctcctctccatgggactcaccaaggacccagtatcagcctaactaactgcagggaatggctttctcctcctcttccttctcttccttttggcaaactcctattcacctgttcaggccctgcccagatacctctcttctgagaagccttctccggcctccctccctgaccgtgattatatctactctcctgttctcttgccatgatcctggagttttgtatttagcatgtcctgcctttgtaggcttatttttggtcacaggctttttgggagtcaggactatgactttctccatctctgaagcactctcctttcccccaagcacaatgacatgttaggagcccagtatggtttgtcacatatgtagggcaggggttagggccaccgtcattcagatgaggctggtatgaargtttcaggcttccagggcccagccagtttgtgaaaacaagtggtgagttctggcctcttggctactttgtcgagtcatccaatgtaatgctcctattggctgagtt

SEQ ID NO: 71483 - DNA, 627 bp, Homo sapiens
tagcaggtgagaggctcgtgactgggtttggcaaagctccccaaatggtgagaagcactggggactcagagtcctgggcgagagggccccagattttgaagatgggtgggtggggtggtcagaatgggtgtggggtgggggtccctggctgtgggagcatgagccttgcctgrgtccctgtctctctggcagcacccagtgcttggcatgcagcaggcactcaggaaatgcaaattgtacaaattagctcagcctcggtggccatggtaactgcacctgccttgaccacagagtggcttccccttttttttttatagcgctttttgttaaaaggtatctatgtattacaccatatctatttagaacctccccccttgccccaccagagtcaggtaagattgttttcacattggctgctcttcagcccagcaggacttggttttgctctgggcacatccatctcttgcacgaggtgggaactcattctgcatttctgcacttccagagctgattccttcatgcaggccgattttgcttgtgaataggcctccaaaaataagttctctgtgatttagaagactaggttctccctgcattcaggagcaaacagaggcttcacgtggtctg

SEQ ID NO: 71484 - DNA, 727 bp, Homo sapiens
acgccagtctgcagggtcccaaaaaaactctaacaactaactggaaaaacctacacctgccctttgtttctggaatggaacggctggggtcaagccacccctgctaacacacccccagagatgggaggtgtgttagctggaacgagggaccagagagctgacagaggagagatgggaggtggccccaaggtggccaggcctatggatggacactctgataggcagaggttcctcctccccgtgagctggcatcggtctgcatagagcttccgtgaggcagcctgcgtcctgcccctgaggccacacagtctgcagtttcctcttccagccgagagcccttcagytccctgaagatgccgtgtcccttatcgctccataatcattgacagggtaggggccacgtgtcgggcggtgagtgaggagacagagggaagacagataagggccctgccccaactgtctggcggggaggacatgagtgaggaggtaacacaggttggcgagataagcactcccacatacagtgaccaacccctgcgggagcagaggagggagccaccgactcccaggggtcaaaggtggcttcacagaggcagccacattgggggtggacctgagtgagaggaacaagtcaccacgtggcaaagggaagagcaggtatgcagccaggcccagggctgtggggggactctgagaaccaagatcggggctgggcaggacaggcctg

SEQ ID NO: 71485 - DNA, 981 bp, Homo sapiens
atgaactgagaaaggggaacttatctgtgcacagtgaagcagcttgtattagttctgcccgctgttgtgaaaaaggaaggctttctcagccataaaatagccctggtgtggagaatagcagtatcttttatatttttattaccttagatttgtgaaaatgggtaattaactggatccaggcactttccctgagtactaagggtgttatttgtttgcctaattaacaacagaagaaaagggaaagtaagagccccaccatctatggagaaatagagctcaggcctattgtccagagtggcctttcttgattttgaacacaagtgcggcaggtgccagcagcgttcttgaagaaggagcttcttgattaatgctgatggctgcttgaggaaggccttggggatgaggacaccataccattctctgggataggggttggaatgcaagtaaacaggattctctgtccatgctggctggaaatgtcacattcagtgttgcctatcaagatgagctctggggctgggcacagtggctcacacctgtaatcctagcactttgggagatcgaggcaggtggatcacctgaggtcaggagtttgagtccagcctggccaacatggtgaaaccctgtctctactaaaaatacaaaaaaattagccaggcatggtggtaggtgcctgtaatcccagctactcgggaggctgaggcaggagaatagcttgaacccaggaggtggaggttgcagagatggcrccgctgcactccaacctgggcaacagaacaagactctgtctcaaaaaataaataaataaataaataaataaataagtgagctctggagggaggctatcctcatgggactgtggatttaccatacaggaaggaatactgtgggcattccactgacctcttccctaactatcccttaactctcatcatgttccaatttccctgtagaagctgggttacataaaatatgaggagt

SEQ ID NO: 71486 - DNA, 686 bp, Homo sapiens
gatccttttgttgctgaacacccattaaaatgaatgcatttgggaaacgcacatctagacatttgggaagctgatgttcacatcctccgcctcaaatacctctgaggtaatgaattccataaaattgacatctgctcttacagcacaacttcccattcatgcattttttccattaaaaaatattttagcgctgtactaaaccctgctaataaaaaataaaamtacaattccccgctcacaagtagctcatagcatggtggggaaggcagttaaagcaccagtctcggagttggagtatggctgatgctcaataatagtttgctggggaagctagagctagaagaagtctttctaataaataagaccagcatagtcagggagggcttcctagaggtggagagatgagcaatgaattttaaagaacgagattcagcctgtaatcccagcactttgaaaggcgcagaggggtggatacccttgaggtcgggagttcgagaccaggctgactaacatgatgaaaccccgtctctactaaaaatacaaaattagctgggtgtggtggcacatgcctataatcccagctacttgggaggttgaggcaggataatcgcttgaacccgggaggcgagggttgcagtgagccaagatcgcgtctttgcactccagcatgggcaacaagagtgaaa

SEQ ID NO: 71487 - DNA, 883 bp, Homo sapiens
ttccgcctcagcctcccaaagtgctggggttacaggtgtgagcaactgctcctgacccagaattttttaaaaatatgcctgtttgcrgttgacctgtcaccttttcgaaccctcttcttctgctcctccctgtcagtcctgaattttgttcaatatgaattgatgaaacattttgagagcactggggacctgaccgcaaacaagatccctgccatcatgaatcttaggttctggtagggggacagataatcaacaaattaacaaatatataaaatgagaccattggaaatattagagtaatcagtactgagaagagaattcagctagcggatgtgatagaggggactctgtgagggccacttagaccaaatggtctggcaaagccactctctggaggtgacatttgagttaattcctgaatgttcagatggagcagctggaggaagatctgagaagagagtttaagacagagggagcagctcgtgcaaaggccctgaggtgagaatggccttagcatgttcaagaaataagaagtgtcgttggagtgagcactcgggtggttggtgggtgggggagaatgtgacatgagtcggagaggtcagccttgtagcctgggcagatttccactcccccgcatggtgcttacatccatgcacacacttccctgccccttgactttgggctcgcccatgggacttgctttgatgcatgagatgtagcaagtacgacccaggcagagatgtgacatttgctttcacagtggaacttgctctctcgggcttctgccattaccatgggaggagctgccctgccaaccccaccagtccaaggaggatgaagacaccaggagcaggcctggacccagcccagccaacaccagcca

SEQ ID NO: 71488 - DNA, 1655 bp, Homo sapiens
attagcagatgttttagcattgtggaagcgtgcgagcttagaaaaagaaagccagagaaggaaaaaaagtgaagaagtaaaaagcaaaagctcagggaagcattgtggaatgagcctctcagctccacatttctgcctactactccagaaatggatttctctggccagtctgaaactgcgggaatccgctgcctatgaaatgaacagaaccaagtcttccatctccgccaaacaggcaactccgccgtaatctaatcacaccccttgaagccccagccagcaatctctttccctcaccctgtcacaaatgccatcacgttgcatcaccgcctccctcacatgcacagcccgggcaggacactgggacctgtcttggccacacatccacagttcggcagggtcagccctggttctgcgcagttcacaaaggccaaaacaagtgtgagccccagaggggcccctgccaggtggcaggctgagctgcccagggaggtcaaggtttggaggttttcttttaaccaagtccagggatcctcactgctgcacactgtggggtctgctcacggaaagttattagacacaaaaactaaagaaaaagaactaacccggggacgcttcctgaaatgcaattatgggggraaagaaatgagaaaaagtacgataaaaactcacctgatcatccagattcaagatttgacttgcagaatggtgtaccattaacctgcctgatgtttagaaagcaacaaaagagaccacctgatgcaaattgctctgggcacctgcaccctggggctgggagtcaacaagggccctccttcccacagggctcagatgccttgggaaatctagggtgtaggacctgggctttagcacctcacatttacactgggttccaggtttccatgtagcttatcccatttgctcctgcaataatccaggaggcaggtaagcccagtgttaacaatctaatttgacaaatgaagaaagaaaagcacatgtgacccaaagtttttttttttttttttttttgagacagaatctcgctctatcgcccaggctgcagtgcagtggtgccatcttggctcactgcaacctccgtttcctgggttcaagcagttctccctgcctcagcctcccgtgtagctgggattacaggcgcctgccaccacacctggctaatttttgtatttttagtagagacagggttttaccatgttggccaggctggtctcgaactcctgacctcaagtgacccgcccacctcggcctcccaaagtgctgggattacaggggtgagccaccgtgcccaacctcaacccaaggtcgtagaagtaattagttaccatgctgagactagaactaataaaatctggaagggtgaactcccattatcagtaatagcaaagtacgtaattcagactgccctccattccactgaggacaactgggaatgctgcagaataagtaaatcctaaatcagacaaatgggaaaaaaatcacgaaatgtcttggaatacataatgaagagggatattgtcaagccctctctgttactttgcccagcacatttagaattgagggttattaatcgattcaaagtaaataatgaaattaacctgcccttcatctcaataaatgtaaaataataagccagg

SEQ ID NO: 71489 - DNA, 1117 bp, Homo sapiens
ttttccctcttcctgactccgcaacaggcccccgtgtgtgttgttcccctccctgtgtccatatgttctcattgttcagctcccacttataagtaagaataggtaaaaatcctccaacttttattaccaagcaaaaggatagaagtgtcgtgtgttctaggtgtgtattgtcaaattatttcccaaaaaccttgtacaactggaccatggcttccattaggcatgagtggaccaggacctcagcgtccccagcattggccatcatttagtaaaagaaaaaaaaatcctttagggtcaatttaataaagtaaaatggtaatttgttgtcttagttgcatttcattgaatagcagtgctatgagttttcacacatttgttttcgagcagtgttgcatgttctatgtgccaagtgcatatgccatgacaatgtattttaaaatggtaaatcgtatagcctttgataatgcacttttaacaaaacactgtgtcagctgaccctcgatttgctggcttggctctgggaatcatgtcagctacagaarctaattagagagattcactttgataggtttgccaggaaaaaaaaaagtgtaatacagaagtggaaaatcgcttacagtactcccctcatacttatatcatcatcatatcaaggcttaataaagctaatttgcttctaggtaacttggctgatgaggctgagtaaaccctgttctcacccagggttcttccagtcagcaggacccgaggtgagaatgacagcattcttgatgggagcattgagattcttccatcacaagtacacactgtcacgttcagcctgcctcacgctgtgtttcctctcctgcgtggagcttccagagtgctcacatctgtgaatggaccagccttaatggctgtgagcagatgccctacctgcacctgtatctgcttctcagtgtcaaatctccctttcctcccgtcagcaggacctgggttgaactgatgattcatgactaagacaatcaggtgctgtgcctttcctgagctttcagaggctcaggacgatgaggctgaggcctagggtgggaggaaagctggagtggagggagcagaattcaggtgtgagtctaatgca

SEQ ID NO: 71490 - DNA, 718 bp, Homo sapiens
gtgggtgcccacatggatagcgaggtcaccttgataccagcagggctggggagaggaagggagaggcagaaggagaaccaggaagctgagtctttagtgagggaggggaatgatgggcagataagttgaggatcagcagtgaggagggataaggggctgtgtgaggccagaggagcaggagtttcatgtgaggttgaagagaaataatccagaagtggaaggtggttgagaaaatgcccagcaccatgcgttccccacatgtgaaatgagggtaaaggagcactagcagttccattcatggggcggctgggaaagtggtgccttcaggagacagccaaggctcgcctacagaggtagatgaggcagagattcagtgaagaggctgcaggtataaaactgttgatttctgaaaagagaatctcagaaggatttgtgaaacggaagaccaatgaaagtttggttctggaaagaaaaagcatagcacagaatagaatgctgaaaatagcaacaacaatactaacaaaacaccaacagcatctcatactcacttaccaatgttctctcagcaagtatttatcaaacctgtgtcttctaagcacagagcttatagtggtgccaaacacagacagtgttctcctcctcttggagcataccttccagaaaggaaggaagacaaaaaatagacaaacaartgtgtgtgtgtgtgtgtgtgtgtgtg

SEQ ID NO: 71491 - DNA, 782 bp, Homo sapiens
agattgagtctgacacctataatcaaatttaaacactccttggagtaaaaaataattttctcatgcaccatgactgacgtatttgcttattcattttctttattggttcttatatgcttttttgcttttactgattaacgtaaatacaagatattgatacttttttattatttgtggttttagttttccttacaaacagatatgaccagaaggcaattggaatatgaagcaaggcaaatcagagttgcgatggaagaacaactaggtacctgccaggatatggaaaaacgagcacaggtaagttacttgtttctaagtgataaaacagcgaagagctattaggaataaaatgaattacagctctgttaatattgattaaattttattaaagacataaggctgtgtttattttggctctatttcaaaataagatttatcatggctgctgagcaacataatcaatattcacrtagttgtgtctttaccatattcatttcccctggtactgttctgttctgccttggaattataagggagagacagagttagatggtggtcttccggtagctaatgactagcttcagttctcctttgaaatttttacttcttgtaatcttagactgtataaaggcattcagaacatgtcactgctcttcaaattgtgcacttaaaaaaccctcattcaaggataataggaaggaaacaaagagaattttaggagagatgaagtaagttgtatggagaacattcccatatttctaccctcaatgtcaagaaagagt

SEQ ID NO: 71492 - DNA, 770 bp, Homo sapiens
  misc_feature (1)...(770): n = A,T,C or G
ttnnnnnnnnnnnnnnnnnnnnnnnnnnnnnnnnnnnnnnnnnnnnnnnnnnnnnnnnnnnnnnnnnnnnnnnnnnnnnnnnnnnnnnnnnnnnnnnnnnnnactgccaggcgtttgtatcaggatgatgctggcctcctaaaatgagttagggaggattccttctttttctattgattggaatagtttcagaaggaatggtaccatctcctccttgtacctctggcagaattccgctgtgaatccatctggtccaggcctttttttggttggtaagctattgattattgccacaatttcagagcctgttattgttctattcagagattcarcttcttcctggtttagtcttgggagggtgtacgtaacaaggaatttatccatttcctctatattttgtagtttatttgcgtagaggtgtttatagtattctctgatggtagtttgtatttcttttgttgttgttgttgttgtttatactctttaattgaattgataagggacatagatctatttaaaaacaaaaccaaacagctatttctgtctagattaagaggtggccccaggtgagggattcgcattttgagtggccacttgtggtgcgacctcgatgatcctgggtttgtctatgattctggctgtgcagttgcccttctccacaatcccaataatccatgcttggtggccttcaccatatttgggggactttatctctgcacagaaccgagctgtttgctcacgtggcagtttgtatttctgtgggatccgtg

SEQ ID NO: 71493 - DNA, 770 bp, Homo sapiens
  misc_feature (1)...(770): n = A,T,C or G
ttnnnnnnnnnnnnnnnnnnnnnnnnnnnnnnnnnnnnnnnnnnnnnnnnnnnnnnnnnnnnnnnnnnnnnnnnnnnnnnnnnnnnnnnnnnnnnnnnnnnnactgccaggcgtttgtatcaggatgatgctggcctcctaaaatgagttagggaggattccttctttttctattgattggaatagtttcagaaggaatggtaccatctcctccttgtacctctggcagaattccgctgtgaatccatctggtccaggcctttttttggttggtaagctattgattattgccacaatttcagagcctgttattgttctattcagagattcaacttcttcctggtttagtcttgggaggktgtacgtaacaaggaatttatccatttcctctatattttgtagtttatttgcgtagaggtgtttatagtattctctgatggtagtttgtatttcttttgttgttgttgttgttgtttatactctttaattgaattgataagggacatagatctatttaaaaacaaaaccaaacagctatttctgtctagattaagaggtggccccaggtgagggattcgcattttgagtggccacttgtggtgcgacctcgatgatcctgggtttgtctatgattctggctgtgcagttgcccttctccacaatcccaataatccatgcttggtggccttcaccatatttgggggactttatctctgcacagaaccgagctgtttgctcacgtggcagtttgtatttctgtgggatccgtg

SEQ ID NO: 71494 - DNA, 814 bp, Homo sapiens
tagcctagatttgcaattttaacattgtctttgctacttagacacacaaaaatagctagtaaatgtgataaaatagttatatataaaatttaaggacaaaaccaaagaaatattacaatctcaatgcttttaaattatttgtaagaagctaatcatttgctgtggaaagcatccatgagtgatctgtgtccaatgcacgttcaagaattcttgaatctaggcatgaaaaccaagcaatatggcagcagagagccctgtttccctttccactcacatggttacagaatcatgaatgaactcagactaatcaaattcaaagaagaacaatgttagcaagggctagtgtaaccagagaatctgcaaactacaagtacattagagaagttccagtagttgcctatagrgatgctgtccctagcacctctgctatgtgaggatgtctgtcttgctgcaacactgtatagcctgttctgctaaggaaacagagacactggtgggttttttccactaatgcttatctaattcttcatataactatcacttattttagcagtatatttttcccctaatgagagaattgtttaacccaacagtcaaaataaataacaatttaatttctgcagtaaactgctctgacatttgctacaataaacaagaacaagattatgtgcttgctttatcattttgaaaagactgttattaaatattcaatccttagaaattgtaatttatatttatggaatattaggagaaattatatgtgattattcatagatatatatttgtatttcaagtaaatgaggaaaaaggaacc

SEQ ID NO: 71495 - DNA, 1447 bp, Homo sapiens
ctttaatgatgagaaaaaatgtgctccaaaaagagcttcttttcttcttctttttctttctttctttcttttttttttttttttcagggtcatgggctatgtgagttgaagacaactctgagtctagtgttttcactgggaagcctttctctctggagcatctcacagagaggttactgcaagcacaccacaccccagcagtctgggagcctgtattcttttaaaacagaacttaacaaaggacacagacacacaaacccacaaaaagattactgttagcaaacagatgactgaatcactgggtcttttccacttttgatttgaggggtatatgatgattaatgcaggatgatgtgagaggctgctttctgcacaaaaaaagtctggagcactagggaaaaagtggaaaaggaaaaaaagctgatgttcaaaaccacagaatcatatgtgacagaaggagccagaacctctccaactaaggctcacagagcacaccacatagaggctagcgtggctcaggctgcctgtgccagtctactaggctggtactctctgctctgaaggcgggggraggaagaggattggaaagcagcaaggtcaggtggctctggcactctacctgtaatgccttaaacacatcccaaggcttgcatggacgaaagatgggctttctgaggctacatggactttaaagattgaatacaattccaaatgaaggtacaatttgcatttagcacacatggatccctttgaaatgtttcactggagctggtggtaaaaatttttgtttatgaacaaaaattttccagttgtctctggatatattcctaagaccctctgactaaacatacactgcatatatttgtttaacatacaatcagattgattctgtacaaaatatgtaatgtgattatatttgcttatatggtaaaaaaaaaaaaaaacttcacatctgtctgcatgcatctgtcagaaatacctatggcaatatactgacagaggaaattctttcactatttattatgcataatgtggacttataattgcataagaacagaaacagaaaagttgatgtgaaaatgtaccccacacttggacaatgaatgattccccagtccaagcttttaaagtattttacatacaattcttaaacagattaaaatacaaatatagatcaagaaggattcacctgatctttgcctgatcccaagctggcttataaaaacctcacttaaattacagtttatcttctactgcccaccagaatcccataggcttcatgtatggaaaatctaattcagaaggatcaaactggggttaggaatgtatgttttaaaaagctctagatatctaagtaatttgtcatatttttaactttaagaacttctgactcacagcaccatcacttcccctaacgcaaatcccaaacataaagtttactgtctca

SEQ ID NO: 71496 - DNA, 682 bp, Homo sapiens
aaagagatgaaggaaatataacaaacgaaaacctttatgtattaaatattaaataaatcatgggtttctggtgaattattttaatttttattcaattcataattaaaaataaagaatacatagtaaaaattaaaaagcaatcattacaatcaattgtaatgacagttacaatacagaaaatacagactaataggaaaactaacagtagtcaagcctgaaataatctacacaattatgttactggtaccaaaacagacacctagaccagtggaacagaatgaggagcccagaaataattccrcacacacacaaccatctgctctttgacaaagctgacaaaatcaatcaatgaggaaaagactccctattcaataaataatgctgggattactggctagccatatgcagaagattgaagctgcacccgttccttacaccacatacaaaaatcacctcaagatggattaaagccttaaatgtaaaatctaaaactacaaactctggaagaaaacttaggaaataccattctggacataggagctggcaaagatttcatgataaagtcaccagaagcaactgcaaccaaaacaaaaattgacaaatggaacctaattaaagagattctgcacagcaaaataaactatcgttggagtgaacagacaatctacagaatgagagaaaa

SEQ ID NO: 71497 - DNA, 657 bp, Homo sapiens
aatagtaacctgtagaataagagagaaaataatgggactagaaaatagtttgatcaagagggaactttgcttagaccaataatgatagtgagccaagaacagaaaagtcgactagattaattcatcactcacctttcgaatgtaatcagggaggtagtgaggggacaaaataaaaatggatatgtaaattttatgacaggctttaaaaaaatagcctcatgatactatacatttggatacatacccttctctgtattttgtatatatgtaataatgtttaattataaccctggttttattatgctcaaaataagaaagttctttgtgctttttatgtgttttgtaattgaagagcttaacatcgctccctgtgaggtgaattcctatgctcatatggagtaactgaagtacaaaaaataatttgtttattttttgctcacaatttttatcatgcacaattgagtcacattacttcttaaatcagagcaatcttcawatgtattgttaaatacacaagccattcaggactctaagtatttatagaatccaacacaacttagtccttgatttttacatgtataacactcaatgctagttatttgtaaaggatattagattaagcaaaaatgctgtgagatcaaatgcacttatttaata

SEQ ID NO: 71498 - DNA, 1252 bp, Homo sapiens
tgcatactgacagattactttgctaaagcatgtggtgactttcagtgccaccaacaaatcccaacaggatgggtttactacatctgcttaggcactggatagtattatgtgctggtaaatagttttgttcacttatgggaaaaaaatttaacataaaaaaattccattttaggccaggcgaggtggctcacacctgttatccgagcattttagggggccgaggcaggcggatcagaggtcaggagatcgagaccatcctggctgacacggtgaaacccccgtctctactaaaaatacaaaaaattagccaggcatggtggcgggcgcctgtagtcccagctactcggaggctgacacaggcgaatggcatgaacctgggaggcggagcttgcagtgagctgagatcacgccagcactccagcctgggtgacagagtgagaccctgtctcaaaaaaaaaaaaaatccaatttgaatttggtttaaaatattatttcatatactttttgtacgtctgaaatattttgcaatttttttttgagacgaagtctcgctcttgtcacccaggctggaatgcaatggtgcgatctcggctcactgcaacctccatctcccgggttcaagcgattctcctaccccagcctcccgagtagatgggataacaggcgcctaccaccaggcccagctaattttttgtatttttggtagagacaaggtttcaccatgttggtcaggctggtctcgaactcctgacatcaggtgatccaccacctcagcctcccaaaatgctgggattacaggcatgagccactgcacccggcctattttgaaatttttttaaagagaaagtgtctcactatgttgcagaggcttgtctctaactcctggcctcaagccatcctcttgcctcagccttcagagtagctgggactacaggggcacaccaccatgcccagctatttttgcagtttttaaaaacatcaagtttttaaaacattaaagtatgctttttagtgatatcatgtgacactagttcaaaatgtcgccttttgggttgatcttaaggtaactatccatattcatcaaaaaaggagagaggagggaaggagaggagaagagaaaagaaaagaaaatgaaaaattaaacttcaatggggaagtatcttaccttaaagttatcactgctcaatgtggcagytgtcattgtagaacttgtcatcataactggacaaacacctctagtcctatggcatgt

SEQ ID NO: 71499 - DNA, 761 bp, Homo sapiens
tgaaatgttggctaaaaatcacaaaacaattttttaataataaattggtaagtcagaaatctccaagttctaaataaataaagatgaaatgccaagccagatctatgagggaggacttgtggatatcagaactagagctggggacttaacatctgtgatgtatctcgcttagtgttgagttgtaattgagatgtctgcacaaagctgggagccgcaaagggctgccttctgtgaaactgagttcagaataattcaagaaatagaaaggaaattggccaattactcaaggagttggagacaaaagattcacctatgagaaattagaagtctaatttctgtgctagatgtgggctattttcttcgtgataccagaatctcaagcccaaaagttaacatacagtattggttcgagacagtgaaatccatgggacaccagtagaagctcattcaaaatcatccccgtagaaatgtctatgcatctccaagcacagaagtctctcacaggaaatagcactcttctgaaattgaacttctaagagaaaactctaaatcacctgaggaaataagaggccgcagattgtttttgttttttgttttttgtttttaattagaaaacatactgcccaaacaatagaataacyagaaaatgtcttttcggccatgtgcttttgggtttaggtgtgggatgctctccgggaagagcccctgtgcaatttccgaggacatcgaggtcgactgctttgtgtggcatggtctccttt

SEQ ID NO: 71500 - DNA, 761 bp, Homo sapiens
tgaaatgttggctaaaaatcacaaaacaattttttaataataaattggtaagtcagaaatctccaagttctaaataaataaagatgaaatgccaagccagatctatgagggaggacttgtggatatcagaactagagctggggacttaacatctgtgatgtatctcgcttagtgttgagttgtaattgagatgtctgcacaaagctgggagccgcaaagggctgccttctgtgaaactgagttcagaataattcaagaaatagaaaggaaattggccaattactcaaggagttggagacaaaagattcacctatgagaaattagaagtctaatttctgtgctagatgtgggctattttcttcgtgataccagaatctcaagcccaaaagttaacatacagtattggttcgagacagtgaaatccatgggacaccagtagaagctcattcaaaatcatccccgtagaaatgtctatgcatctccaagcacagaagtctctcacaggaaatagcactcttctgaaattgaacttctaagagaaaactctaaatcacctgaggaaataagaggccgcagattgtttttgttttttgttttttgtttttaattagaaaacatactgcccaaacaatagaataaccagaaaatgtcttttcggccatgtgcttttgggtttaggtgtgggatgctctccgggaagagcccctgtgcaatttccgaggacatcraggtcgactgctttgtgtggcatggtctccttt

SEQ ID NO: 71501 - DNA, 689 bp, Homo sapiens
gcatttaacagtgccttctagtaaaagaaaaaaaaaaggtttatataaggctttaagatctgaaaccaagatacagaaaaaagcaagatgatgaagcattttaattaattgtcacatgggtccacctgaaatattggaacactgtgttttatgaagtgatatttgtgaaacagaaaaaaaaattattttgttatgatctgcaaaaaaaaaaaaaagtatttcttccagcaactttttctcctttgaccacctctggcttccccagagtagttgattccatcagcaacttgttctatcaccaaattattctgatgatgttttctaagcatttaagcagagttttccatgctgcaacacagacctggcataacttgtttctttcctctaatggaaataattkatccctctgctagctttctctaatgagggcaagccagggattcgtctcttttctcactctttcactaattgaatttgatttttcctgtaccataagatactttacagctgtgtccaaaacaatgcacacagtagtttttcatgctgtcaagatgaatttttatttttctaaacaactttcatatcccctgtctaaattaagtcctctgtcataatgatccccaacacttttggcaccaggaactggttttgtggaagacaatttttccacagatggaggggtgtggggg

SEQ ID NO: 71502 - DNA, 1828 bp, Homo sapiens
tgtataagaatcatggcaccagcatctgcttggcttctggggaggcgtcagcaagcttacaatcatgacaaaaggcaaagtgggacaggctctcacatggtgagagcagggtcaagagaaagagctgggagatggtacacacttttaaacaatcatatcctgtgagaacccactcactatcgcaaggacagcaccaagccataagggatccacccacatgatccaatcacctctcacaaggccccacatccaatgttgaggctgacatctcaacatggtatttcccagggacatagatccagattatatcactgaatcaatttgatcagtagtgacaacttaagaaagagaaaaagtaataaacaataagagaaacaatattaaagctttagaaactcaaaactgtcaacataaaataaataccataataatacctttttagcaattacattttaatgtccccattcgataccaaattataggcattttcatagataaaaatatttctttttaatgtcagttaaatagttatgagataactgtgcttaatatttaaagttttactaaatgctaatttctaatttctaagcattctgctctctatgccctacaactaacaattgctccttttgtcactagagcgttctatgttttattattcttttattcttctacctgtctaattctattaaaaatggacctcagtagtacatatccatatacattatatgtgtgtgtatatataaatgcatgtatatttagatggaattttatagaaataatgtcttttgattattatattagcactcatttgattaagatgatatcctaatctcttcaatatcctttaattctttcattcacttattcaacaaatatttattgaacatattctaggtgccaggcattttgctatatctgggatgcacatttgaattagatacagttcttacctcacttggataattatattgttattaggaaattatagtaccgtacgataagtgcaagatgagtgaggagtggatgctcttggagaatcccttctagcaaaactgagttaggggactgattaaaagaaaaaggcctgctgatgaaattgacattctagttaatgccaagaacagggaaatacgtttcaggcagagaaaattacatgtgtaaaaccagaggcctttttgttgtataatattagttaacacccatgtaacactatatgccaatcattattacaagtgattttcacactatgtaaacaacccttttgacataggtttgttattactcctatttttctcttgagaaaactgaggaatgaattagttaagtaactttcccaagttaacataaccagtaaaattcaaggctgggatccaagtagcttggttccatcatctgtaagtttcctacttcctctcaattccatactgccttttacaataaaaatgcacagaagatttaatttattatgctaggtattmattttgcagcccaatcaattgagtaaaataatttgagaaaccaacttacaaacgtttaaataatacaaaaaccctgtgtgtcatcaatcatgaatttcaactcagcaagaaggctaggaatttacttcactttaacaaagatttattgtcttcctctacatgcaagactctgtgctaggtaccagggatgtaaagatcagttagtttaatctcttccctgaaagagttcacaatttttcctgcaaaataatatgttaaccaataagaatttataaaacttatgccaaatacaaccaagcagacacctacgtgtgatataagggtacagagtttgcctgactcacctt

SEQ ID NO: 71503 - DNA, 1828 bp, Homo sapiens
tgtataagaatcatggcaccagcatctgcttggcttctggggaggcgtcagcaagcttacaatcatgacaaaaggcaaagtgggacaggctctcacatggtgagagcagggtcaagagaaagagctgggagatggtacacacttttaaacaatcatatcctgtgagaacccactcactatcgcaaggacagcaccaagccataagggatccacccacatgatccaatcacctctcacaaggccccacatccaatgttgaggctgacatctcaacatggtatttcccagggacatagatccagattatatcactgaatcaatttgatcagtagtgacaacttaagaaagagaaaaagtaataaacaataagagaaacaatattaaagctttagaaactcaaaactgtcaacataaaataaataccataataatacctttttagcaattacattttaatgtccccattcgataccaaattataggcattttcatagataaaaatatttctttttaatgtcagttaaatagttatgagataactgtgcttaatatttaaagttttactaaatgctaatttctaatttctaagcattctgctctctatgccctacaactaacaattgctccttttgtcactagagcgttctatgttttattattcttttattcttctacctgtctaattctattaaaaatggacctcagtagtacatatccatatacattatatgtgtgtgtatatataaatgcatgtatatttagatggaattttatagaaataatgtcttttgattattatattagcactcatttgattaagatgatatcctaatctcttcaatatcctttaattctttcattcacttattcaacaaatatttattgaacatattctaggtgccaggcattttgctatatctgggatgcacatttgaattagatacagttcttacctcacttggataattatattgttattaggaaattatagtaccgtacgataagtgcaagatgagtgaggagtggatgctcttggagaatcccttctagcaaaactgagttaggggactgattaaaagaaaaaggcctgctgatgaaattgacattctagttaatgccaagaacagggaaatacgtttcaggcagagaaaattacatgtgtaaaaccagaggcctttttgttgtataatattagttaacacccatgtaacactatatgccaatcattattacaagtgattttcacactatgtaaacaacccttttgacataggtttgttattactcctatttttctcttgagaaaactgaggaatgaattagttaagtaactttcccaagttaacataaccagtaaaattcaaggctgggatccaagtagcttggttccatcatctgtaagtttcctacttcctctcaattccatactgccttttacaataaaaatgcacagaagatttaatttattatgctaggtattcattttgcagcccaatcaattgagtaaaataatttgagaaaccaacttacaaacgtttaaataatacaaaaaccctgtgtgtcatcaatcatgaatttyaactcagcaagaaggctaggaatttacttcactttaacaaagatttattgtcttcctctacatgcaagactctgtgctaggtaccagggatgtaaagatcagttagtttaatctcttccctgaaagagttcacaatttttcctgcaaaataatatgttaaccaataagaatttataaaacttatgccaaatacaaccaagcagacacctacgtgtgatataagggtacagagtttgcctgactcacctt

SEQ ID NO: 71504 - DNA, 1175 bp, Homo sapiens
aaatcactcccatttacagtaatactgaaatgatattttatttgaatatatcataagaaaaacatgaggtattataatttatgccaagccatatgtcatgcctacactttgaactatataatgctttataatgagatatattaataaactataaccttatgagaaaatacttaagaaaataaagccaggctgggtgccatggctcacgcctgtggtcccagtactttgggaggctgaggcatgcggatcacctgaggtcaggagttcaagaccagcctggccaacatggagaaactccatctctactaaaaatatgtgggtggtagtgggtgcctgtgatcccaactactagggaggctgaggcaggagaatcacgagaacccaggaggcggaggttccagtgagccaagatcatgccattgcactccagcctgggtgacagagtgacactccatctcaaaaaaaaaagaaccttacatagaagttcagatcatgtactgcatcagacatttgtctaacatgtttttacaagcatatactgattctaaagcctttaagcaacttctcttaccactgtttacaaccgaaacacttctgcttcttcgagtgtctcgctaattctcggatgtactttatattgggacaatagacttatatcctaagatattcaatattcaagacattggctttccttgtcctatcaagaacattgtcatattttttcaattatatgagtttattttattttctggctatattttcccatttctttgctcaaaccagacatcttccamctgttgcctagactctccatcctatttgcccccactcataatgcctcctctataaggagcatccttgcacttgtcttatgcaaatcctgctgtctctcaggacctttctcagatcttaaatttataatgatctatcacctttcacatgtccatgagcacttaggacatttagttattatgatatgctatatatttttaaattactttaaatgacaaaaattacaaatacatacatcacaaatgcacatatttttggtgtgcaaaatgttttgatatatgtatacactgtgcaaagattaaatcaattaatgtgtctgttatctcacatacttatcagttttttgtgatgaccacatttaaaatctactctcttgacaattt

SEQ ID NO: 71505 - DNA, 283 bp, Homo sapiens
caaaaaggcaaaagttggttgggcgtgatggctcatgcctgtaatcccagcatttggggaggcaatattrggaggatcacttgagcccaggagtttggtcatagagagaccctgtctctttataaataaatgaataaataataaataagtaagtagacttattatttaccattatatatgagtagacagctcatcttcacaccatcttcactctccctccccactcatctgagcaccaactaaagtgagctactcttccccttcccttgttggtttgaaatgc

SEQ ID NO: 71506 - DNA, 631 bp, Homo sapiens
tcagaggctctatttcacaaggagcctgagtgtgcccagggagcattcttcccattggcctgggctgcctctgccatcatctggggtggccattggtaggtgggtgactttactgccagcatcaattctctcccatctcgcttctctttttttctttagagcctgaatatctttcaaaacctcaatcgtcgacagcatgagcatgccatccacatgatggacattgcaatcattgccacagacctcgccctgtatttcaagttggtatatcttctcattctaatagtaaaagcaacaatgattatatgtatgcatatatatatatacacacatatatatacatatatacacatatatatacacacatatatacatatatacacatatatacacacatatatatacatatatacacatatatacatatatacacatatatacatatatacacatatatacacatatatacatatatatacacatatatatacacatatatctacacatatatatgtgtgtgtgtatatatatatatatattwttttttttcttttttgagacaggatctcactctgttgcccaggctagagtgcggtggcaccatcacagctcactgcttcctgggctcaag

SEQ ID NO: 71507 - DNA, 675 bp, Homo sapiens
ctgctctgttgcccaggctagaatacaacatggcttgatcacgactcactgtagcctcaaccccttaagttcaagcaatccttcaacctcagcctcctaagtagctgagagtacaggtgtgcaccaccacacctggctaatttttcttttttaattttttgtacagacaggggtctctctatgttgcccaggcttgtctcatcccacctcagccccacaaagtgctgggattacaggtgtcagccactgtgcccagcccagaatctaaatcagatggaatgtcaggaaaaacttcttgaaggagaagccaggtagtggaagaggtgggaagagcattgcaggcagagggaccgtcagaggcaaagacccccgtggggactgagcccaaggcacaaggcgttgaggtcagtgaggctgcagcttggtgaccaggggtgggggatggaggaaatgggaaaagatgacactagaaaggctggtggaggctggatcaggaagggattggaaaggatttgggtttyaccccaagtgtgatgggggtaggaccagcatagaagcagggagatggtttaacagctgttgtagccatccaggaggggacaggtggtgggttggggaggtacctctcagacaccatctagggactgtgggacacaagggagggccaaaagcaga

SEQ ID NO: 71508 - DNA, 1135 bp, Homo sapiens
ccattccgttttgataattagttgacagacagtcaccggaaattaatacagccgtcgaagtcgtttctcagaaccggttctgccctacggatgggcatcaggaattcctggcttcccggctgggggaaggggacctcaagagaggaggctgtaaggtcctctgtgcctgctggcgccaggccctgatcccttataagacccctatttctcattttatgtgttcaacaccaccttattcgtagtgggtggtgttatccccacttaacaggtgtgttcacagaggtgagcataggaagtgccagaaccagaatttgaacttgaatctgtctgaaagatatgctcttaccaccgtgctatcygaccccaccccttctctttcctgagccccagacctcccctcttttttttttttttttttgagacggagtttcactcttgttgcccaggctggagtgcagtggcgcaatctcggctcactgcaacctcagcctcctgggttcgtgattttcagcctcccaagtagctgggatttcaggcatgcgccaccacgcccagctaattttgtatttttagtagagatgaggtttcaccatgttggtcaggctagtcttgaactcctgacctcaggtgacccacccaccttgacctcccaaagtgctgggataacaggcatgagcctctgcgcccagcccagccctcccgtcctgagaggtaaggctgcacttgaagagtgcagcctagacccgtgcctgagggcacaggaggtgcaggctctgcccaggtggagtctgggttatctaagttgtggtcaccaagtgaagtgatccccggctgtcccccgcagctgagatctttgccgccatctcaacaaaggttcctatacttgtctttcccctagtgtgaacgagctctatgtcgatgacccagacaaggacagcggtggcaagatcgacgtcagtctgaacatcagtttacccaatctgcactgcgagtgtgagtactccacgcagcccctccctccagcaggacacctccttagggcaaatgtgtgtgtgcagaaatggcaagatctccaggacaagccaagccaacatatggttctccccactcttttttggaggagaatataattgcg

SEQ ID NO: 71509 - DNA, 1135 bp, Homo sapiens
ccattccgttttgataattagttgacagacagtcaccggaaattaatacagccgtcgaagtcgtttctcagaaccggttctgccctacggatgggcatcaggaattcctggcttcccggctgggggaaggggacctcaagagaggaggctgtaaggtcctctgtgcctgctggcgccaggccctgatcccttataagacccctatttctcattttatgtgttcaacaccaccttattcgtagtgggtggtgttatccccacttaacaggtgtgttcacagaggtgagcataggaagtgccagaaccagaatttgaacttgaatctgtctgaaagatatgctcttaccaccgtgctatctsaccccaccccttctctttcctgagccccagacctcccctcttttttttttttttttttgagacggagtttcactcttgttgcccaggctggagtgcagtggcgcaatctcggctcactgcaacctcagcctcctgggttcgtgattttcagcctcccaagtagctgggatttcaggcatgcgccaccacgcccagctaattttgtatttttagtagagatgaggtttcaccatgttggtcaggctagtcttgaactcctgacctcaggtgacccacccaccttgacctcccaaagtgctgggataacaggcatgagcctctgcgcccagcccagccctcccgtcctgagaggtaaggctgcacttgaagagtgcagcctagacccgtgcctgagggcacaggaggtgcaggctctgcccaggtggagtctgggttatctaagttgtggtcaccaagtgaagtgatccccggctgtcccccgcagctgagatctttgccgccatctcaacaaaggttcctatacttgtctttcccctagtgtgaacgagctctatgtcgatgacccagacaaggacagcggtggcaagatcgacgtcagtctgaacatcagtttacccaatctgcactgcgagtgtgagtactccacgcagcccctccctccagcaggacacctccttagggcaaatgtgtgtgtgcagaaatggcaagatctccaggacaagccaagccaacatatggttctccccactcttttttggaggagaatataattgcg

SEQ ID NO: 71510 - DNA, 678 bp, Homo sapiens
cttgccacgcctttgtttctgctccactcctgacccagcaagtgtcccttctccactgtagcctgcagctcgctccactgcgagtttgctgaggccgaggctacaggctgtcagcttgatgcctcccctgtcagccacaagctcgggccctgctgaagtaggaatattcctgcaggaagtccccaactttgtgtttgaaacagacatgcttacaaaatcagactttgatgggctgctgcacgataagctatattccctcctcggacasagctcgcacagtcttcttcattgggctggaataaggtaacccccgagtttttcagtgtggcatctggggacctttgataaacagccccaactcctcccttgtgcctctttgtttcctgctgctgccagcaccgccacctccgtctcatttggagttcaataataccagactcttagttccttagacagcccacatgctgggaagtttctgtcctctgcacctgttcatgctgttccctctgcccagatgcctttcgctctcttcctgagtaatgcagactcatcttcagagccttaacacaggatgtccttccccctgggaagccctccctgaatacagcctgcaccctcaattgagccgggggccttccctgtaacccccatggtctgcaaattcctctgggccagggt

SEQ ID NO: 71511 - DNA, 620 bp, Homo sapiens
cagcaacaacctgagcactgacactcttcactgccgctgtgaaacataattgctgctctacacatctggcactttgggctgttctctgctaagccaactctcttctgttcttgcagattaattgcacgctcatcaagggtcatttgtgtttgttccccaatctgttttcttttcaagttgtgatkgttattctacttatgtaatctaattaaacacaattgataaaatgtgactggaaaagaaaaggtttttttctataaaaacatgaaaaagctttctgaaaaacctcaaaaaggcatagtactaaagagtctataatattgggataattaattgatatctaggattctatacttgaataacttcaccaatatgtttaaacaatgaaataaaaagaagtatcaattataaatttcttgacgtagtttatctaagaaacatagtatggaatttaaatgcttttttattttaatcaaggtttttagtaactaaccaaacactagttctgatgctccagataaaaggacctttaaactatcctccatgttctgaatgctggttagcctttgacatgtgttcaattaacttaattgtcctctttgaataaccatgggaaaaga

SEQ ID NO: 71512 - DNA, 982 bp, Homo sapiens
tatgcaaacatacaccacacacacacacacacacacacaccccataaacatgcacgctgaacaagcatgatatgatttctacaatttttaaatttcctcgattctcttttcaaacactccctggattccttctttttcccattccagcctaaataaaaggaaaaatgtaggagaatggagaagactttttctgcttggtgcctctagattctttttcatgctaatcgtatgctatatttccttgcaaattgattacaccagaggaaaaaaatcacaaataagtataattaaaactgctcatgatcaatatgaggcattgcactagatttctgttctagcataatgatttctctagtttagcaagtcttggtgaggcataactgctggaaaaaaaatgtatatttttgtatcaaattttgtttggacaaatttttttaaagactctaattcttttctttgctcttgcttataaatatgaagtgtttacacttaatattttttggtgacagaatttaattgaattgaattgtggtgtctgtatgttggtgcagtgcttggaaagctgtgggaaatgggtgctgtttgtatactagagtaacaaatagggccaaacaccctctgttctaaaatttcttgcttatctctgttcctgaaatcaaatttgggtacaaagaagaaaaattcacaacttacctttgtaaaataagtaaattggccttgattttatgtctgtctgaactctcttgttgattgttttattcattttgcctagcaccagctatactaggtaaamttatttttaataggtaaaatatataattacctatatataattttaataggtaaaatataaaataataggtaaaaatatttttaaattcactatttttatttacacaattttaaatctgcttttcatagttgtgtgaataggtttgtattgttatttcatatatcaagttccaacttgctttgggtcatt

SEQ ID NO: 71513 - DNA, 1253 bp, Homo sapiens
tgcatgtacatttcagtgcttctcaaccaggggtgactttgcaccccaagggatgtttggcaatgtctggagacgtgtgtctgtgtgtgtgtgcgtgcgcacatgtgtgggggtgtgtgtgtgtgtgtgtgtgtgttattacaactagaaggtgctactgacatctactgggtaaaaccagatatcctgcaaagcacagaacagcccacctccccccaaagaattacccagcacaaatgttaatagtacaagtttgagaaatgctgatctacagtgatacagaagcagtatttacagaagccaagaatggcgagacaagaatatgccagaaatttcagagcactctgctgataggacaaaagaatagtttgtaaagacaagcttaaaagaatgaaataatacctaaattcatttttggtccctggtttttctctcaatagcatttcagaagttttgctagaattcttcttaagaaatcatcatctctaagaaaatgagaaaaaataattcaaatttatatgggagatgtatgtgtattttatgcagaggaagtaaaaattatgctttattctattatgaataaaaagacttgtcataaattgagtctgggttcatttctttatgcttaataaagcctgcacacagcatctgaagagaaagtagatagaaaatgtacccattaaaatatttacccttccaagtaacctaaagtggtaagaaatataggcttaattatcttctaagattttcagctatcacctgaatttgtagtcctactatacttgaaaaatagagaacaagtttaatactaaatttaaatctactgctttaaaaatactttccttgagctgcaaactataatcatgtattctatatcaccatgagttttagtacattaatacgatataaattatgctttaaagatatattcatgatttataataattgcaactctcagaaactaatagccagaagcacttgacttttaccttcaaatattctcactcaaatccagttaaaatactgtttgaatcagcataagagcttctatagtgggattttagaaacaatcatcattttttaaagaactctgctattatgttaatacttaatagcttgatgtgttactcttcccaggtaacatatttttatttttrtaaaagtttattaagaatatgctttaatagaattctactgctgacattttcaagggcacaaagctagaaagtatatatgcatatggatgggtggga

SEQ ID NO: 71514 - DNA, 979 bp, Homo sapiens
taaccctacatctcttgtgcccactgttttaaatattgctctgggtactggatattcagaattgatggaacccaaaccccacctttggtgagtttgcacatccaaaggagagcatgactgagctaatggrcaacacaaaacacgtgctcgtccacttctaatatttgcatatagtgtaatgaatttccaggccacaagaggcatttgggacgtcttccatttcctaaactctcaatgggctaattgtagaggatgcaatgaccaaggtcagtcaaaaatgagcctttcatttggctctgtgttttgatgatgctagctcaaaagagaaacaggatcataagaactcaggaaacatttaaacagctctacctaagaaataattaataaacaacaaataaaatgtttcagcctggaaatgaaaaaaattaagaagcagtgttgcctagtgatgaggccaaggacacagtctctaaaagatctaggaagaaaggccagaaagatacacagacttcatgacacaatgatattatagataagaaaactgtaaggcagcctcctactatagctcaaaagcatgattactagaaaaagattttaaacatttaaaatgtctaagaatagctctaatcaggcacaggctaagtattaaagatgagagtaagcagtttcatccagtagcttttgagtttccacagacagcaccccatccatatctctgtagagggatgtcctgcctgcacccagacttgtaggcaaagttcagctgaattccatcatctgtggttggtgatccctggggggcatttatttacatgtgctgccatatatggggactttttaaaaaatattccatatttacttccttttacttcctttcttttacttcctcttactttctttccacagctcttgacatcttcatttatttttggcaggtgggtatgtttcactctggtggatctacatattcttatatgca

SEQ ID NO: 71515 - DNA, 755 bp, Homo sapiens
aaatagtacctagtatttagtcctggaagaaagttcttcgcaaagctggtgttattttcctaagacaatgtattgtgctagttttatatataggtcagcagggatgtctaaattacctggaagttagatgacagatgtcagaagagatatcagagcgaaatcctctcagtctcttctcagagtatattcactaaacctcggaaacaattcctctaccctaaaaacaaaactggcaagaagattcccatcaaatcgtgtgttgttatgtcaaggagctcgagttaaaagagtctttcagaataaaagttaagctcacagagaacagcttggctgaagaagggtaggtgcatcattgcataaaaggcctttgttttcatttttaagacatttaggggccaaccaaawaaactcccccaaagagaaaaaaacagccagcaacccagagtccttgccccttggaacttcaagctcctccccaaaccagtccacacagaggctctgactcccagctccacaggaggaagcaggtcatgcagttttgctacaaagaacgcattagggacaagtgcagtggccatgcctgtaattccagcactctgagaggccaagacggaaggatgactaaaggctggagtttgagaccagctggagcaacatagtgagatcctgtctctacaaaaaactaaaattttaaaaattaggcaggcatagtgctgcatgcctgtagtcctgtgtactcagaaggctgtggtgga

SEQ ID NO: 71516 - DNA, 1250 bp, Homo sapiens
gttaatcctctgaagagcttaagaaagttgctgggatttttccacctgcatattagttaatttgggacatcgtttttgatgtccatccaaacgctttcatcttagacactgagtaaaatctaatgccaggcaaaatgtctgctcatgaatttgaattctctctttccctgttctcccagaatctggacactcttttgtgtgtgtgtgtgtgtgtgtgcatgtgatatgatgtgtgtgtgtgtgtgtgtgtgcgtgcatgcaagtggatgtgagtgttgagaaggggagggcaaaaggagtagttaaggaaggtgatcctaccacatattaactattggtaaactgatcttcaatttccttgaaactctaagaaccactttcattaactagaaagtgatattcatcttagtaaaaagtagttatatcaaatttagtaagttctacagttgtaaagcaatgtttggtctgtctgtgaatattgataaattctcaaacataatagagttatcagttttttcagataacttttgaaacttcaggcttcgatcttgaaaattttttaaacattaagatagctggccttgatcataccccacctccaagttgaccaatgagtggcataagaaacatttttgtaaggtcttgaaatgtgaacacaaaaaaccttcatatatccattcctgctcctcctgctctctaattccatagaggtaccatgaatgtatataacagacctgtttccctcagcacatttcaaaagagaaaacatattcagatcaacaaagagtgtttttaatttaccctgatgagctgtatttcaaatcgccatgcagataggagacttgagtcatttgcttacacacacacacatccctactcatatgttgatcacaaagcaaactcctctaatcacaagattgcaggactgaacttcttgggagacataccaaccaagaacccacaacttcacagggaagtttaattactacattgccccacggagcttaccctcaactctgacaagcagatttcacattaacatgatacacaaaatgtctaaactcattctgttcagaattttttaaaaatggctgtacgttktcttaagtactcagccccaagatgaagaatcctcaaagaaaacaatagtacataagctgatgtggtaatgtcaaataccagataccatgcagaaaatccagtgtgagttttctccttcatgtaaaggtctggttcactcacctgaataa

SEQ ID NO: 71517 - DNA, 1250 bp, Homo sapiens
gttaatcctctgaagagcttaagaaagttgctgggatttttccacctgcatattagttaatttgggacatcgtttttgatgtccatccaaacgctttcatcttagacactgagtaaaatctaatgccaggcaaaatgtctgctcatgaatttgaattctctctttccctgttctcccagaatctggacactcttttgtgtgtgtgtgtgtgtgtgtgcatgtgatatgatgtgtgtgtgtgtgtgtgtgtgcgtgcatgcaagtggatgtgagtgttgagaaggggagggcaaaaggagtagttaaggaaggtgatcctaccacatattaactattggtaaactgatcttcaatttccttgaaactctaagaaccactttcattaactagaaagtgatattcatcttagtaaaaagtagttatatcaaatttagtaagttctacagttgtaaagcaatgtttggtctgtctgtgaatattgataaattctcaaacataatagagttatcagttttttcagataacttttgaaacttcaggcttcgatcttgaaaattttttaaacattaagatagctggccttgatcataccccacctccaagttgaccaatgagtggcataagaaacatttttgtaaggtcttgaaatgtgaacacaaaaaaccttcatatatccattcctgctcctcctgctctctaattccatagaggtaccatgaatgtatataacagacctgtttccctcagcacatttcaaaagagaaaacatattcagatcaacaaagagtgtttttaatttaccctgatgagctgtatttcaaatcgccatgcagataggagacttgagtcatttgcttacacacacacacatccctactcatatgttgatcacaaagcaaactcctctaatcacaagattgcaggactgaacttcttgggagacataccaaccaagaacccacaacttcacagggaagtttaattactacattgccccacggagcttaccctcaactctgacaagcagatttcacattaacatgatacacaaaatgtctaaactcattctgttcagaattttttaaaaatggctgtacgttgtcttragtactcagccccaagatgaagaatcctcaaagaaaacaatagtacataagctgatgtggtaatgtcaaataccagataccatgcagaaaatccagtgtgagttttctccttcatgtaaaggtctggttcactcacctgaataa

SEQ ID NO: 71518 - DNA, 1087 bp, Homo sapiens
gtgagacttagtcaaggagttggggagaatttcaaatattcagaaattttaagtgtctgagattaattttccatttctggtagacatgtagtaaatatatatatatatagaaaatgccaccccaatgatgggcaaatctcatgtcctcattagtaagactttccctaagaattttgagacaaaataaaagattattggaggggcaacaactatttgaagggaagtcaagaaaggctctttctgaggcaaaaaaaagagcaatatctaattaaaagcacagaggggtatacacttctcaagggcactgagattggtgtccaacatgagcaatgttttaagtacctaaagaggaggtaccatccttcggtttaactgagtccaaaagaaagctgggtccataaaagtgccaactcagatgggtcttttcaaaggcagttgaagtctaacacaatgataatggactgccaagtgggagacaaatgtcatgtgcattaaggcagaaaaaagttccaagtagatgcctgaaggctgttactataattggacgctgagtgggaaaagtaagattcacatttcaatggtaagatccttttcctttactctgtatgatgtgttctggaatttctgactggctaattttcctcgtgagtatttcccagcatcttgccgtgttgttagatgtctcatgctgtctccttttctctcttgggtccctaaactgctctttccccatctgccccacaaaatttgaaattgttctaactttaatatgtcagggaagttatttctaattttggatctacctagttcatcttagctatgtcatatgaatcccctgtttgatccccagaaaaaacatcaggacaatttcctaaataacaacagttatcttccaaagagtaacaagctttctatcaacacttctttgtccttgttgctatagttatattattctttgtttctttaatgtctcttttctcagctagactatataaactctgtgtgggcaaaggccatgtctgttttcttcttttctgaatcatttaaagtgatgagaagaaaataaaagccmaatatatatttcttt

SEQ ID NO: 71519 - DNA, 593 bp, Homo sapiens
cctcttccctatcacacacacttgccaatgtccaggtctcctgagtccacgctgtcaaagagacagggacttaagcccaggagtttgaggctgcagtgagctatgatggtgccactgcactccagcctgggtgacagrgtgagagatcctgtctctaaaacaaagtaccatcaatcccagccccagagcccttcctctaagaaaaataaaccagttttttttcctttttttgaaatggagtctcgctctgttgcccaggctggagtgcagtcgctcggtctcggcccactgaaacctcaacctccggagttcaagtgattctcctgtctcagcctcccgtgtagctaggactgcagacgcacacaccaccatgcctggctaatttttgtatttgtagtagagacggggtttcaccatgttggccaggctggtctcctgacctcaggtgatccgctcgcctcagcctcccaaagtgctgggattacaggcgtgagtcacggcgcccggctaataaaccagtcttattcctgctctcttcagcgcaaatatataccactccaattcactctggtaataaccaatggtgggccagg

SEQ ID NO: 71520 - DNA, 593 bp, Homo sapiens
cctcttccctatcacacacacttgccaatgtccaggtctcctgagtccacgctgtcaaagagacagggacttaagcccaggagtttgaggctgcagtgagctatgatggtgccactgcactccagcctgggtgacagggtgagagatcctgtctctaaaacaaagtaccatcaatcccagccccasagcccttcctctaagaaaaataaaccagttttttttcctttttttgaaatggagtctcgctctgttgcccaggctggagtgcagtcgctcggtctcggcccactgaaacctcaacctccggagttcaagtgattctcctgtctcagcctcccgtgtagctaggactgcagacgcacacaccaccatgcctggctaatttttgtatttgtagtagagacggggtttcaccatgttggccaggctggtctcctgacctcaggtgatccgctcgcctcagcctcccaaagtgctgggattacaggcgtgagtcacggcgcccggctaataaaccagtcttattcctgctctcttcagcgcaaatatataccactccaattcactctggtaataaccaatggtgggccagg

SEQ ID NO: 71521 - DNA, 1185 bp, Homo sapiens
gtggcacccaggggtggagcagggactttggatggtgtcgagaaaagccatttgagctgggacctgaaggatgaaaagaagtcagtcatgctcaaaacgaagcaacggctgttccgagcagaaggaggtgctgrcgcgagggtcctgtgtaggacgcagcacagagtgtttggagaaaagagaaaagctgagtgtggtgggagcaaggagagttggggttggggagagaggcggtaatggaactgcaggggcgggcaggggccaggtcatgcaggaccgtctgagagtcacgcatgagtcatggatcccagccgccttctctccagaccctggagtcctgccccaaccccagttcctgaccctgcttcctccctgcgccccagccccactgtggtgtttttttctgtttgtttgtttaccggttttggttttgttttgagtcggaatctcactctgtcatccaggctggagtgcaatggtgcaatctcagctcactgcagcctctgcctctcgggttcaagagactctcctgcctcagcctcttgagtagctgggactacaggctcttgccaccacgcctggctcatttttgtatttttagtagagatggggtttcaccgtgttggccaggctggtctcaaactcctgacctcaggtgatctatccacttcccaaagtgctgggattacaggcctgagccaccgtgcccagccattcactgtggttttgattcagggcctggagaatgcagccaggatgctgtgatttaaaagccccttctttgctccatgcagcccaacattacagaacgggaggtggaaaagcatttagacaaggactccccttcattcctttcctaattcaatcttttttttttttcttttctcttttttagtgacaaggtctcagccacccaggctggagtgcagtggcgcgatcatagctcactgcatgcaaccttgacctcccaggctcaagccctcctcctgcctcagcctcctgagtagctgggactacatcgcaagctgccatggctaattatttcattttattttgtagagacgggatctttctacattgccccgggctggtctcaaactcctggcctcaaacaatcctcctgcctcagcctcccaaaatgttgggattccaggtgtgagccaccacagcagacctgattcatgc

SEQ ID NO: 71522 - DNA, 608 bp, Homo sapiens
gcatgcctgtgttcccagctattccagaagctgaagtgggaggactgcttgagcccaggaggtggagattgctgtgggcccagatcgtgccactgcagggggctacaggagtctaaaagggaggggacacaatttccccaaatctccaatgttgaggagttctgcctacactccttgccccaggatgcccccagcaccaaggccaagagggtgtcttggccctcagcactggggtagaacatctgtacacagaaccaggccacaggagaaggcatacacagagcccatgagcaccagcccctctgagctgcgtccagcccccatctccatcctctgttctctgggactacaaatccaggcctgacctggttctatccctacctgcagagacagaagacagaaggagacaacccctgagaagcctttccccagggcctgattccccctcscactgtaagatctctcagcccgcactttgggaggccgaggtgggcggatcacgaggtcaggaaatcgagaccatcctggctaacagggtgaaaccccgtttctactaaaaatacaaaaaaaaaaaaattagccgggcgtggtggcgggcgcctgtagtc

SEQ ID NO: 71523 - DNA, 498 bp, Homo sapiens
ggaacaaaatataggcagcacgagagttcacataagtgttttaccaactggcctgcattgctccatcttgtcctcaaagacatgatgggaaacgtaaaaaaaaatgccttactgaaatccagattgaccttgtcaaaaaggagctatttcacataaaacatgcgtacaaacacacacgtaaaaatcggacaacatttatacattacaacttaaatatgcaaaataaaaaggtagtatcctttatttcttataagtgctctcattttgtcctcaatcccatattccattcagtagcaagaaaaaaatcaatcgaaaacttgtcagttcttggtatcttgataacttggcctctttrgtttttaaatagactctgttgggttagctcaagtgtctttcagataagtattcatttaaattcaaggttcaaacttcttacaagaaaaggatatttcttttttttttcccaaggatttgcccctccactttctgctccctaag

SEQ ID NO: 71524 - DNA, 525 bp, Homo sapiens
tgttggtgttcaagatgtttcagattttggagcattttgggtttcaaattttgggattagggatgctcaacctgtatgttaatttataagcaaatacaaatatatctgaaatatatattgtattatcaaaacttatcagtacacttagtagaaagaaaccaactttggtgtcaattccattgcatatctcaggctaaattgcttattagcaattactcttttctcattcagggaaatatattctaaatcatagaaggtggagaatgaatcaaagacagagaaagcatttgcaacaggagaagaacctaggtctcatgcctaaccctcttgaatggctgttaaaatcctctgcccctcctcmacactcacattttaaatattttgatatttatgtgagtatattgtctttacaattccaaagaaaaatttaaattaggatttgtttttggaattagaagatgctaatttgcaaagcatttcatcctaaacaaacttttttataataggttgaactttggatgtaaa

SEQ ID NO: 71525 - DNA, 752 bp, Homo sapiens
aaaagtagggagaaggagcagggtgcacattatgttaaggtgaaattataggtggggaaaagaaaggagagaatgttggatcccacaggcatcttttgttcttctccagcctagagattctcttcgatctcctgtttgttatgtttcaggtactaggattcagttagatttatataccacagcccttctcttccttggagtcctcatctactccccttccttccacacacacacccagtgaattgtagaatattctgcagcaaactctttaactcttctttcatgctgctcctgaaaacacaaatatttattacatgggccttcatttgaaagatttgttttgcttatctagagagggtaccaaacaaggacaaattatcacagttcaagaagtcttaaaaagtttttataaggtcgggcacggtggctcatacctgtaatcccagcactttgggaggccaagataagtagattgcttgggtgcaggaggtcaagaccagcctgggcaacatggggaaaccccatctctacaaaaaatacaaaaaatttgccaggtgtggtggcgcacacctgtggtcccagctactcaggaggmtgagatgggaggatcacctgagcccaggaggttgaggctgcagtgagccatgatcatgccactgcactccagcctgggcaacagagtgagaccttgtctcgaaaataaataaataaataataaaaattttaaaaagtttttgtagtcttggtgtgcc

SEQ ID NO: 71526 - DNA, 771 bp, Homo sapiens
tgcattaggtactcacttatcctattaaactcttttagcaaatgtaaaggtttaggatcattatgttcatttacagacagaaagagagagacctcaaaaattacatgatttacagagctagaaagtgtaggatttggtattctaactcagatttatctgactcctaaagttgagggtcagccttgctgcattctcttgcctccacacgaagctgtcagtgactgccaagagtttatatttttactcatcccttctagagggcatttgcattttaataaagttcttcaacactttagctcaacggttatcaaagtacagtctaggggtctcctgggccctaaaaacctttcaggaagtctgcaaagtcgaaactatgttcttagtaatacttagatgttatttgccatcttcactgtgttaacgtttgcactaatggtgaaaaagcaatagtggatctaactgccagcctaacaaatcagggtagtggcactcarctgttattgcattcatcaacatcatcctcataggggggaaaaagtccattttcctaagaatatttatggtgaagcagtaaatattattaattttattgtatctctacccttgcatatacttttaaatatattctgcaacaaaatgggacgcaaacataaagcacttctgctgcataacaaattttcaagggaaagcacttgtgtgattcagctgtgagttgagctagccactattgtcatggaacaccattttttttcatgaaaaaatgactgacag

SEQ ID NO: 71527 - DNA, 2838 bp, Homo sapiens
  misc_feature (1)...(2838): n = A,T,C or G
tctctccatgtaagaagtctcagaagttgcagctgtgttttaaaacctccacagctatatagttatgatcatcatttttctgtaccatataatctaatctcttaagtagacaaaaagttccttgaggacaggagctggcatttctctatagaagcttagtacaatgcttgtgaaaataagacaaaatcaacatattttcaaaaatcaaattgaattggataggcagcagatttggtggaaagaccaggagcttagcgccaaggagatctggattcaaaaatctgtattcaggcccaggtgcagtggctcacacctgtaatcccagcactttgggaggctgaggtgggaggatcagttgagcctatgagtttgacacctacntgagctacatagtgagaccccatctgtacaaaatataaagataacaaaattagcttggcatggtggtacacaactgtggtgctagctactcaggaggctgaggtgggaaggataacttgagcccaggaggtcaatctgcagtgagccatgattgcaccactgcactctatcctgggtgacagagtgtgaccctgtctccaagaaaaaaaaaatctgtgttcaaaatgtgccctttgaaaaattacttgtctttctcataaaaaaaagacataaagacaataatacttatctcaaggattgttgtaagaactaaggatagtaaatgcaaaatgcctaacacacattcaatgctctaactaaattacagatattgtgaggtagtgtagcattgtggcaagcacctggatactccactcagacaaacctggtttcaaattccatcacttctcattgtgtgaatgtagataagtcccttcatctctttgggtctcaggatcctcatctgtaaaatgggtactatagtaactgtcttgtagggttattgtgaagatgaggaatgcttctgtctcagaccctgacacatagtagggacttaaaatggtacctatattagccacagttaacaatttgtgttcttttgtttgtatattgatttgtccatgaatttatgcactgaacaatgactcatgcaatgctaataactcacaatggcttcatttttcaagtttctgcatggtagtgtctgctgatgcctagatctgggaagataccctcatgggatagagaactagccctttggaaaggagctcagggtcccaggtaagctgcccgggacagtacactattttgacacatccacagctgagttttaattgtccctgttggcttttgaccctagagatcccctggcttcctccagttataatcgttttgctcagaggttcacattttctttcctcaccggatagatcctgtcccttgctgctgtgcagccgtgggcaaacatgttagctcttaccttgtgtctgttttttgtcagtgccttttttttacagcattgttttattggctgaaattcagcaaactataccagccttgtctttgtggtgtcaagccaggtcacgggggttcactttcccgggtagttcctgggacctgaagctctcttaggaaccatgactacgagcttctccttttcttccctaagacctcccaggagccccaaccttaccttttctgttttttaagagtctaaataatcggataaaagacatttaccttgtctttagaaaaatgcacagacctcacaacatttcgcaaatgattttgaggccattcagtggccacttctccggtggcatatttcttctgaatgatcctgtctgtattagtgattttgattggatgaacctttggatttttgctgagtttgactttgggatcatcatgtggctgtgaaattgtcataagtccctcagtcccctccattgtagtagacatgcattgttttctggctgcctaagacccattcactctttcttcctagcagcagcctttctttcattattgggatgtcatcttctgcacccatgggatacagcctggtagatttttgatcagggctcttggcctctcctagtcaaaggctaagtttatgacccaagtcaggtcaattggatcctttctttctggaactggaatcttgaccagaggaacaaggagattggacataatggttttccatttcatctaagcactttcraaagcatagaccagactatgcctgcttccctcccaccccgccaagacctgttcttaagatgctcattgaatccaggagttcttgatagctttctagagaattccctttcactcaagttcataagattgcaaccaaatttccaaatgagtgagaaagccacaaacaacaaacttctggggagaaaatggcacaatgagaaagattatgcgtggcctttggagaaaggcagaccaggtttgaatcacagttttaccattcaccagctgggtgcccttaggcaagttcatttttcccttaggatgtcagcatcattgtaaaataaggataatgagtcctgaagccctggttctcaaacttgcctgcatattgcaatcatctggggagacttaaaaaattactgatgcccgggccaatccccagagagtgtgatttaatgatttgggggtgctttttggatgttgggattttgtaaaccttgcaggtgtttctgatgtacagcagtgtttgagaaaattgacctcaagaaattcttcaaattatagggaagaataaatgaggtaagatatgtaaaacattcagcataatgtaaggatgataaaagtcactctgttctcctttcctgtcctttcttaaggtgaaccagaatcgcttgctgttgcttctagcacagttttctttgtttggagtagtcatag

SEQ ID NO: 71528 - DNA, 2838 bp, Homo sapiens
  misc_feature (1)...(2838): n = A,T,C or G
tctctccatgtaagaagtctcagaagttgcagctgtgttttaaaacctccacagctatatagttatgatcatcatttttctgtaccatataatctaatctcttaagtagacaaaaagttccttgaggacaggagctggcatttctctatagaagcttagtacaatgcttgtgaaaataagacaaaatcaacatattttcaaaaatcaaattgaattggataggcagcagatttggtggaaagaccaggagcttagcgccaaggagatctggattcaaaaatctgtattcaggcccaggtgcagtggctcacacctgtaatcccagcactttgggaggctgaggtgggaggatcagttgagcctatgagtttgacacctacntgagctacatagtgagaccccatctgtacaaaatataaagataacaaaattagcttggcatggtggtacacaactgtggtgctagctactcaggaggctgaggtgggaaggataacttgagcccaggaggtcaatctgcagtgagccatgattgcaccactgcactctatcctgggtgacagagtgtgaccctgtctccaagaaaaaaaaaatctgtgttcaaaatgtgccctttgaaaaattacttgtctttctcataaaaaaaagacataaagacaataatacttatctcaaggattgttgtaagaactaaggatagtaaatgcaaaatgcctaacacacattcaatgctctaactaaattacagatattgtgaggtagtgtagcattgtggcaagcacctggatactccactcagacaaacctggtttcaaattccatcacttctcattgtgtgaatgtagataagtcccttcatctctttgggtctcaggatcctcatctgtaaaatgggtactatagtaactgtcttgtagggttattgtgaagatgaggaatgcttctgtctcagaccctgacacatagtagggacttaaaatggtacctatattagccacagttaacaatttgtgttcttttgtttgtatattgatttgtccatgaatttatgcactgaacaatgactcatgcaatgctaataactcacaatggcttcatttttcaagtttctgcatggtagtgtctgctgatgcctagatctgggaagataccctcatgggatagagaactagccctttggaaaggagctcagggtcccaggtaagctgcccgggacagtacactattttgacacatccacagctgagttttaattgtccctgttggcttttgaccctagagatcccctggcttcctccagttataatcgttttgctcagaggttcacattttctttcctcaccggatagatcctgtcccttgctgctgtgcagccgtgggcaaacatgttagctcttaccttgtgtctgttttttgtcagtgccttttttttacagcattgttttattggctgaaattcagcaaactataccagccttgtctttgtggtgtcaagccaggtcacgggggttcactttcccgggtagttcctgggacctgaagctctcttaggaaccatgactacgagcttctccttttcttccctaagacctcccaggagccccaaccttaccttttctgttttttaagagtctaaataatcggataaaagacatttaccttgtctttagaaaaatgcacagacctcacaacatttcgcaaatgattttgaggccattcagtggccacttctccggtggcatatttcttctgaatgatcctgtctgtattagtgattttgattggatgaacctttggatttttgctgagtttgactttgggatcatcatgtggctgtgaaattgtcataagtccctcagtcccctccattgtagtagacatgcattgttttctggctgcctaagacccattcactctttcttcctagcagcagcctttctttcattattgggatgtcatcttctgcacccatgggatacagcctggtagatttttgatcagggctcttggcctctcctagtcaaaggctaagtttatgacccaagtcaggtcaattggatcctttctttctggaactggaatcttgaccagaggaacaaggagattggacataatggttttccatttcatctaagcactttcaaaagcatagaccagactatgcctgcttccctcccaccccgccaagacctgttcttaagatgctcattgaatccaggagttcttgatagctttctagagaattccctttcactcaagttcataagattgcaaccaaatttccaaatgagtgagaaagccacaaacaacaaacttctggggagaaaatggcacaatgagaaagattatgcgtggcctttggagaaaggcagaccaggtttgaatcacagttttaccattcaccagctgggtgcccttaggcaagttcatttttcccttaggatgtcagcatcattgtaaaataaggataatgagtcctgaagccctgsttctcaaacttgcctgcatattgcaatcatctggggagacttaaaaaattactgatgcccgggccaatccccagagagtgtgatttaatgatttgggggtgctttttggatgttgggattttgtaaaccttgcaggtgtttctgatgtacagcagtgtttgagaaaattgacctcaagaaattcttcaaattatagggaagaataaatgaggtaagatatgtaaaacattcagcataatgtaaggatgataaaagtcactctgttctcctttcctgtcctttcttaaggtgaaccagaatcgcttgctgttgcttctagcacagttttctttgtttggagtagtcatag

SEQ ID NO: 71529 - DNA, 619 bp, Homo sapiens
atgaaagcaaggccttgagcctcatagaggagataattatagatgctggttctcccacctgccggcttctcccatatccaacaaaacctatccaagtctctatcttcaaaaagttctttctgtagagaggatgcaaggggaaacttccaygtagctcaggctttctcacttcagtactattgacatgttgggttggatatttttgttgtttggtgggctgtcctgttcattatatttagcaacatttctgacctcttcttcttagattccagctgtacccttgtttcataacaactcaaaaatgtttccagacattgccaaatgtcccctgggggggaaaattacctctggttaagaaacactggctagcccaatgtcaatgaagtatgcttaaattaataaagcaacataattgtgtgcacacagtgtttaatctctgtagtgccctcagaaatttttgcagatgtccatggagcagagatggttatcaggaatctttacatccattgtttcaggtgggggttctgagttacagagaagttaatagtaacagtaataacgactaatgctattggctcacataatttttttgtgtccatttccccccatcaattattta

SEQ ID NO: 71530 - DNA, 619 bp, Homo sapiens
atgaaagcaaggccttgagcctcatagaggagataattatagatgctggttctcccacctgccggcttctcccatatccaacaaaacctatccaagtctctatcttcaaaaagttctttctgtagagaggatgcaaggggaaacttccacgtagctcaggctttctcacttcagtactattgacatgttgggttggatatttttgttgtttggtgggctgtcctgttcattatatttagcaacatttctgacctcttcttcttagattccagctgtacccttgtttcataacaactcaaaaatgtttccagacattgccaaatgtcccctgggggggaaaattacctctggttaagaaacactggctagcccaatgtcaatgaagtatgcttaaattaataaagcaacataattgtgtgcacacagtgtttaatctctgtagtgccctcagaaatttttgcagatgtccatggagcagagatggttatcaggaatctttacatccattgtttcaggtgggggttctgagttacagagaagttaatagtaacagtaataacgactaatgctattggctcacataatttttttrtgtccatttccccccatcaattattta

SEQ ID NO: 71531 - DNA, 1607 bp, Homo sapiens
cccccccatttcagccattgatgcttatgaccattccaggttatgtgggtcaattttcttagatatttacaagaggatgccccataagcattgtacctaaaacgagctagtgtttctaaaggtagctgtccctttaaagagtgctcagattttgaagcttgatttcctataatttaggaacttttcaaaagtgatcaaggccagaaatatattttgggtcaaagtgtgctgcttatgagcataaattacccatatgcatgctttggtttggaatcaacagaaattggtcacaaatgaaaatacaagtccaaattataagtaacaaagcagctgcagttttaaaagcatgctatagaattctaggccagaagtggtgaaaccaccggtgctagagtaaccaaatgatctataacttgaactttttgtcatgaggtagaggcagagaaggcagaagtcctctgcataacttcttgcccaactgtgaactgaaccttctgctttgaggccgaagaactgtgaggaacaagaagaaggcagctctctgcagagctttttacttgaatctcctatccagggagagaaactaaagccctcattcttaaaggaaagagatggtttgcagaacagctcaaaatctagactgcaactgaaaagaaaggaaggttcagattcaaaagaagtcacccccagcatgtggtaggacctccaaaaatggagaatgcaatgggttcatgctggtaccaagcacttatttcagagagaaacaccaggtgatggtgggaagtcactctgaatcatgccgacctaaaggaaaaaactgaggcaaaattaatataagtagagagttgatttgggctgagtttgaggactgcaacccaggagcatagatccaaggtgccctgaatatatgctttgcttagcagcagttacaagtgggtttttaaaggaaaaaagaagaggcagttcctaagttgcttaccaagaatttacattaaaataacacaagatatcsattgtctgccacattgttctttgtatctcaaattccaggaaaatgaagataatggatgaggcagctagtcaggaacaaaatgcttttagccaattgcctgtgggaatgggggataacggaagtcccatactcattccctctgggcctgataaattttgcatacctcacatagctcagagtgctctgaactgtttcctcttctaaatagtaaataagaaatttagtctaatgcctgttgtacagtaagtgctcagtaaaatgttagagtcccttccctttgaaatgatagatacgacgtttccaatggaagaaaaacgagcaggaaaaaaacaaccaccaccagcataacaaatggataaaatttacaaataattacgtaacctttatctatagatatgaaactctttctctaccatgaaactgccattgcaaaattataacagaatataattacagtgaaaaaaatctgacctaactgacttcatcttccttctaacctccaagttgtccttgtccattcccgggcataggccaaactgactttgggagaaatttagtttatagttttaactttttttttcttttttctgagaca

SEQ ID NO: 71532 - DNA, 750 bp, Homo sapiens
acaagtttatttccaaaaatttactatacctttctctggtatcatcaatttttcatcaagatgggttatttctcctctccaacaataaaaacaaaaactggactccacttaacactctaattttaccctgtttttttctgctctagagaatgagttacattatccatattgaattattctccctctgtcttctcgagtccacaccaataatgctatgctttttatccccattattccacagaaactgttcctgtcaagggtccagaggagtccatatagcttcttactcaatctatcaaaaaataatgacacagataatcactccttcctcctcaaaacatttttttctcctctggattcccaagataccacattccattggatttcctcctatctcaatgattctttcttcctagatagactcatatattagttccttctcayccccaatctcatttttatatcatctatgtattatgaaaaatttcaaatacaaaaaaaattaaaagtataaaatttaaaaacaattcaacaagtgttaacattttgccacatttgtgtgtgtgtgtattttgaactgaaccacttagtaaccggtacacatcaaagttcatttctgtatccttcagtatatatctcctaagaataaagccattctcctttataacaccaacagcaattagaaaattaacagtaactcaaataccttttatagttcccccaccccaactggattataataaaggttca

SEQ ID NO: 71533 - DNA, 609 bp, Homo sapiens
aagtgggcaagtcaccatcagataaatgatgccagtcgtggtactttaagcagctatagtcttgtattgatggttttgcactatttacaaagtaagtataatggggttttacccaatttttaaaagtaaaagacagctttattatggtgtcttctctgttgaccctattttcaaatagtattgttttaaaagttctttctaaggtccatgaaacacatttcctgttttgttgctttggacaaatgtttcagaagtgttattccttggaaaatatagaagtttcactgtttttttttttwttttttggaagtttttctatagtcacttttgttttcaaagaactttcaccactgtattgtggacccattatcttgaagcagacgaatgttcaaaaggcctataaaagttagctcaagtactattcatcatatttttaattttgaatttgagacaggaattaaattattttcctgttggttaaagaagcttttaatctctgagttgccctccttaactagattttatcttcatagggctgttttatcagattggctcccaaattttaattttgtctggttagtcattgtttatgaggccattctggtaaaa

SEQ ID NO: 71534 - DNA, 943 bp, Homo sapiens
tttgaacttctcagatctaatgtgactctgtgggactagatgttaagaaaccatatctttaactgaacatcatctatgatattccatctcataacatgttccatgagttttatggacaatttctaagaaatccaaagtagcatgcagttttatcaacctctctgcatccccttggcacaaggaataatttttctgttattgaggggcaaaacagaggggtaaaggcactcatacagttaaatgccagattaagtcaggcatccaagtcactctgctttgggttgattctctgagactcagctggctgacttcaaaaggacgaaatagatttcaacattggaaaagaatacagtatagaatatatgatgggtcttgttagctatctcttattttctaatccaaagagcctcctagttggaggaaaaacttgaactacataagtatatcagcaaattttcattatattttataattctttattgcattatacgtgaatatatttagcagtggtagtacgtcttggaaagtttaagaatttagacaaatatgctttttttwaaaaaaaaaatagttgagttttaaatatgctgtttgggtccttatgagcatgtgggagatatataggagaaagagtttgttgctgatgttatagaatcaccaatgcagcattgcacttttgttcttttccattcattgttcttgcttacatggagcacttgcaaataggctggacgtctcagagttctgaacaatgcccttggctaaccgttagtcctaattgctgtgactaatgtgctgtgtgacctaaagacggtaacatacttaaccttggttttctcatctgtaaaatagaattgatgacctctaccaagccaaggatttcagtgaggcactcaaaaataaaaattaaaaaatacatttgggacaaacatgaaaaaaatta

SEQ ID NO: 71535 - DNA, 943 bp, Homo sapiens
tttgaacttctcagatctaatgtgactctgtgggactagatgttaagaaaccatatctttaactgaacatcatctatgatattccatctcataacatgttccatgagttttatggacaatttctaagaaatccaaagtagcatgcagttttatcaacctctctgcatccccttggcacaaggaataatttttctgttattgaggggcaaaacagaggggtaaaggcactcatacagttaaatgccagattaagtcaggcatccaagtcactctgctttgggttgattctctgagactcagctggctgacttcaaaaggacgaaatagatttcaacattggaaaagaatacagtatagaatatatgatgggtcttgttagctatctcttattttctaatccaaagagcctcctagttggaggaaaaacttgaactacataagtatatcagcaaattttcattatattttataattctttattgcattatacgtgaatatatttagcagtggtagtacgtcttggaaagtttaagaatttagacaaatatgctttttttawaaaaaaaaatagttgagttttaaatatgctgtttgggtccttatgagcatgtgggagatatataggagaaagagtttgttgctgatgttatagaatcaccaatgcagcattgcacttttgttcttttccattcattgttcttgcttacatggagcacttgcaaataggctggacgtctcagagttctgaacaatgcccttggctaaccgttagtcctaattgctgtgactaatgtgctgtgtgacctaaagacggtaacatacttaaccttggttttctcatctgtaaaatagaattgatgacctctaccaagccaaggatttcagtgaggcactcaaaaataaaaattaaaaaatacatttgggacaaacatgaaaaaaatta

SEQ ID NO: 71536 - DNA, 692 bp, Homo sapiens
ccataagggttcctaagattggaactcttcttcttgggtcatttctgaccattaattttaattgttttctgagcaaattcttcatgggtcatttgaaaagcaaatgagaaccaccatcctttgctcagggaaaaatatttagatgttgaagtggtgcactctatgaaatccagaggattctgcttgcraagctctatgccctggctttgagctctgtccatcttgagaaaagtgtacctttttgtaattcgtctaagttaccatgtgggctccaggcagttcattcccaaaattatgtccagaacagcccttgttgatcattccatttgtttaagattaaaacctctcacccttggtgagaggcagtatggtataatagaaaaaatttctagttaggggtccagtgacctatgaattaccagggttgccattattgatattattcttaataagatccagcccttttctgtcttattactcagtgctcctcaaaacatggcttctacttcctggtctaaagtggctgttcaggctcctgccatcatgtcagcattccactcaggagggagaagaaaagaaggaaaatgccattcatctctcttctgtttaaagatacttcccagaagttgcatgtcccacttctatttacagaccattggccagaacttaggtcacataactaactgcaaaag

SEQ ID NO: 71537 - DNA, 540 bp, Homo sapiens
agaaagggggtaggtcaaggagagtggaagaagaacctctgcctgtcttctccactgctggttactgattctgggtcaggaataaggaaaagctttaagttggacatgatatgatggttgtgatttagggaacgctgacgtttcaatacctgaaaatgagtagtactcaaggtgatcagaaaatatatgggctccacctaagatattatctgagagagggaagagatatctaacagattaagtttaaaaagcaatcagtaagaggaaaaaagaggctattttccaattataaccaaacaagttcaacccaattaatgaacttgttgcccagtgttgcaactagtgatttgattttcaaatcaaagtgatccttacataaggatcactattgcaaactgaacagatggtgagacagttttgattcattctaaggtcacagaataatttgctgaaaatgggtggaattgttccagagagtkacacaaaatcaaatgtcttcatatgcctggggactggatttttaaataagacttaattata

SEQ ID NO: 71538 - DNA, 740 bp, Homo sapiens
tcctgtgataccgaggctgcacacagcagcagggccctgggcccactccactaaaacatttttctctcctaggcctccaggcctgtgatggggctctcttcattaatgcaccygtttggccctgccaaacggagggactgctgccaagatctctgacatgtcctggagacattttacccatagtcttggcaattaacatttgagtcttttttacttaagcaaatttctgcagctagcttgaatccctccccagaaaataggtttttcctttctactccatggtaaggctgcaaattttccaaacttttacgctccgcttcatctctctcaagttcaaagcttcacaaatctctaggacaggggcaaaacactgccagtctctttgctaaagcatagcaagagtcaccttcactccagtttccgacaagttcctcatctccatctgagaccaccttggcctgcacttctttgtccataccactagcagaattttggtcaaaaccattcaacaagtctctaggaagttccaaactttcccacatcttcctgtcttcttctgagccctccaaactgttccaatctctgcctgttattcagttccaaagtcacttccacattgttgggtatctttacagcagtgcccactaccttggtaccaattctctgtgttagtcccttttcacagtgttataaagaaatacccaagagtggctaatttataaagaaaagagatttaattg

SEQ ID NO: 71539 - DNA, 1770 bp, Homo sapiens
gtgggggtttttcttttttgcctcttccttttgtcattttctaatttctccactttggtccagaaatccagaagcatacacatttctttcttttttcagcacacctctccgtaaagctccaacagtgttgctctgtaactgttgttctaccagaactttgcttcttcggtgtgttactttactttatgagctggtgctgaaaacctcttagaacaagcagcaaaagttaacatgctgatgttcacaattagggctctgtaggaggcaagacacaatcataatgcttcttggatatacagctagaagcttcttgtccctcttaagttctgtagaacttcatgtatactctttgcgtccataggaaaactagtagaattcaactaaggtctgtagcatccataaatgggttcttgcctactattagcaacacttgatggattaccagaaagagatattgctctaaaagtgaacattttttcacacccagaatggattctggcacctgattaaaaaccacagtgttagagctgaacagctaatcttatgtctgcattacaagcaggaaggaggaaggtagagacaagagcacacaagacatttgtttccccttaaaaagcttcccccagccccatccagtgacctccacttacacctttgtgagaaatgggtaatatgcatcccctagctccaaggaaggctggggaggtgattattttgttctgggaacattgccactctaaacaaaatcaaggatttgttagtaaggaagaagaggagacagatatcgggtagaaagttgttagtttctattaaccttgagtaagtccattcaactttcagagcttcagttttctcttctataaaatgactggtgttgactaaatggtctctaaccccttcctgttcttaaccctaaaatctctgatctgaggatccctttgccawctggccgcattagctgccattctcctccctgaaaagatcgctcttaaaaaagggctgtccacctgatcacttgctactagaaaatactccagacaaaatatccttatcagttgcctagattcctacccaagaccaagaaagtggtggaggcaagagttttagagaacataagttgggtcctgagcatttatttacaccaatgcctggtggtatttaccactctttattgtcgttgtgtgaagaacactctggagcattaaagacctttcaaagaagataggcatataaaaatgaagaccacattgaaatttcttctgaaattctatgcatgcactcacttcaaagacacagggtcaaactgtcaataggtaccaaataaaagttgctttattatgtccctttcttctgaaaaaaagattaaaatcatataaatttaaaacttcactccctaaaagaaccaaaattaagaaaaatgttaattcatatttctctaaaaataagaatgaaattaacatgacagatgctgcttcacaggggacttccccacctaagaggaagatatttaatagagggattatatgatgtgtgaatttttcacactgagaagaccagcaatattaaagggtcccttgctgtggaaaatctgctaattgccaactttcatcaaatggagaaaattcttcaactgctctattgctatgccaattattgaaataagtattacatagagatttacaacattctattttctccttctgatggcaaccagcataatacataatagcttgaacaaataacatcaacaaaatacacaatccaagtttt

SEQ ID NO: 71540 - DNA, 828 bp, Homo sapiens
agtagcacttgctgcccttggcagagtttcagaccccaagggaggtgaagagggcacttgtattggagaggcagcagcggcaaaagaagatgggttatatatagagacattaaccaaataaggaagtacgtgaaagatgatgggagaggggtttctcattgtcagggtagggagttacaggtatggaaaggatgaaaactagaatagactttgtggtgttggactggaattgagggtattggtatgaactgtgtatctgttaaagaaatggacatcacagtttataatcttcccaaaaagaaaactccaagcacagatggcttcagggtaaattctcccaaacatttaatgaataaataacaattttactcaaacatttccaaaaatagagcakaaaatacaaagatattacagcaaaggaaactacaaaccagtatcccttatgaacatagatgtaaaaattctaaacaaaattttagagtatcaaatacaatatattaaagggataaaaggatagtacgtcataaccaagtggggttcatctgaaaaatgtaggattggtttaacattagaaaatcaatcaatggaattcatcatgctaatacactaaaagagaaaaacatgattatctcaacagatgaagaaaaggcatttgacaaaatcctgctaagattctgttcttaaagattcatcaagcacaacctgtgttgagaaggatcatttgagagggaggaacattgataattgtctattcttccaagatattcaaagctgggactccacagccattatggttacatgttgctcaagcatatattctaactttca

SEQ ID NO: 71541 - DNA, 632 bp, Homo sapiens
tttagtagagttggggtttcaccatgttggtcaggctggtctcgaactcctgacctcgggtgatccacccacctcggcctcccaaagtgctgggattacaggcgtgtgccactgcgcccggctgctttcgattcttctgggtatgctcagaggtggaatttctggatcatatggtaattctgtgtttaatttttaaggaactgccacactgctttctccggtgactgtaccattttacattcccggacaaattcrcaagggttccagtccacatactgggcaacttttggcatttgcattggctgtttttgttttctgtaaggaccatcctcattactggagtgtcaaatggttccccattatagttctaattgatgtacttttatgttcttttttctctgctttttttttttccttcctttggatcaaacattttgtattgttatttcctcctattaacttgtttgtgatacattattttttactacttttatactgtacttatggtttagtactaaatataatatgtatttatagtatctttttttttttttttttttacaattccttttcactaagtaagtctctggtgtctctagagatcatagcattcattcatttatccagcccac

SEQ ID NO: 71542 - DNA, 681 bp, Homo sapiens
ttcacttttcagttttgtaaaaccctctaaactgtagaagcttagcatatttgcctacacatatcttgaagtaatatagtactttatacatttaaaaaattatttttttccagttaaaatttgcattttcctctgaatcatttctggtttggttcaggaaacagacttttctctttgcttttaatgaagatctatacatggtatattgctcaaatctgaatggccagtaaattaatcaattcattatatcaaaaaattgaaaccaaagtgtcaccatttccctgaaagcaaggaaattgctgtttgggagagtcgtggaattcttgtgatatttttgcattctcttaattcctcaaacaatagttgagtttctaccatatgccagtattgtgctgctgtttggaattgaaagaccctgccatagaagaattcatagccagacatataacagggaaatcacgataattttgtgctatttgcggagatatgaagcaactacaggagttcagaggctggagccgttcttagggtgtctcacacactacttttaaaagcatgttgctttaattcctacttaacccttggtattagcctagtctaaaatataatttctgttaagcccctattctttatgagtackcaccagtatagtaaagaagaacaaaatatatggtttgaaaa

SEQ ID NO: 71543 - DNA, 643 bp, Homo sapiens
tccagagaagctgaaccaataggatggagatctctttctctatttatctatctaattaagtatgtatgtattatgtatrtatgtatctatctatcaaatctactatctatgtaatctctatctatcatctatctaatctactatctatgtttatctatctatctatctatctatctatctatctatctatctaatctattcatccatctcgaggttgattttaaagaattagctcatgcaattggaacagctggcaagttgaaatttacagggcaagccggcagcctggagactcagggaggagttgatgttgcatttccagtccaaaggttggctggaggtggaattccctcttccttaattctgttaagatctccaacaactggatgaggcccatcatattatggagagcaatctgctttattcaaagtctagtgacttcagtgtttatcacttctaacaaataccttcaagacaacatgtagactgatgtttgaccaataactgctaccatggcctaccctagttgacacatgcgattatccattactgatcaaccccagcttctacttttgcttttactttggaggagaggactagaaagaagactgtcagaattcattggtgggattctcaggtcact

SEQ ID NO: 71544 - DNA, 643 bp, Homo sapiens
tccagagaagctgaaccaataggatggagatctctttctctatttatctatctaattaagtatgtatgtattatgtatgtatgtatctatctatcaaatctactatctatgtaatctcyatctatcatctatctaatctactatctatgtttatctatctatctatctatctatctatctatctatctatctaatctattcatccatctcgaggttgattttaaagaattagctcatgcaattggaacagctggcaagttgaaatttacagggcaagccggcagcctggagactcagggaggagttgatgttgcatttccagtccaaaggttggctggaggtggaattccctcttccttaattctgttaagatctccaacaactggatgaggcccatcatattatggagagcaatctgctttattcaaagtctagtgacttcagtgtttatcacttctaacaaataccttcaagacaacatgtagactgatgtttgaccaataactgctaccatggcctaccctagttgacacatgcgattatccattactgatcaaccccagcttctacttttgcttttactttggaggagaggactagaaagaagactgtcagaattcattggtgggattctcaggtcact

SEQ ID NO: 71545 - DNA, 650 bp, Homo sapiens
cccaggctacctttccatctccccacaacactgccttgtcaggaaccggcaactctctcctttccttcctctttcaccccagaggactgagttgaaaaattccacaaaaattataatttaatattaaaactttcstacaccagatgtaagcttgttttggttcagaaggcttgttaagatcttggagtgtggcgggataaacactcatcagcattattctataaatatgcaggagctctagttagggtaattgttgcttgattttaatttgagacaaaattttcaacatctttccccatagtgataaatgaaggatcttcccactccgtgtatagacatctccttctcttataaacagaagcacccagaacccttctgaaaatacaaatttccaattgccaaacttcactatttcccaccaggcattgcctccttgttaccttgtttagtcaagggtcatttaagctctagcaagggagattcgtgttcatttcaaatgttaaaattctagctgtttcacaagtcagtcatgtaactatcccccttagttgctaaccactcagcaataaataaggcacaatgaagaatgctcacttttactctccaataaaagttgtgcgagaattctaaacatgcagagtgcattcggt

SEQ ID NO: 71546 - DNA, 650 bp, Homo sapiens
cccaggctacctttccatctccccacaacactgccttgtcaggaaccggcaactctctcctttccttcctctttcaccccagaggactgagttgaaaaattccacaaaaattataatttaatattaaaactttcgtacaccagatgtaagcttgttttggttcagaaggcttgttaagatcttggagtgtggcgggataaacactcatcagcattattctataaatatgcaggagctctagttagggtaattgttgcttgattttaatttgagacaaaattttcaacatctttccccatagtgataaatgaaggatcttcccactccgtgtatagacatctccttctcttataaacagaagcacccagaacccttctgaaaatacaaatttccaattgccaaacttcactatttcccaccaggcattgcctccttgttaccttgtttagtcaagggtcayttaagctctagcaagggagattcgtgttcatttcaaatgttaaaattctagctgtttcacaagtcagtcatgtaactatcccccttagttgctaaccactcagcaataaataaggcacaatgaagaatgctcacttttactctccaataaaagttgtgcgagaattctaaacatgcagagtgcattcggt

SEQ ID NO: 71547 - DNA, 711 bp, Homo sapiens
cgatgaagctataaatttatcaagaggcagaggtcatttctactccccacagtgcctatacagtagcagagaggggctcaaaaatcacagttgattcacatttttgtttccattttctagctgtcagttagtctcatttaaacacagaataagatacagttttaatactttaagttttttttaagctggaatcaagaacacacttaataaatcagaagacttaagtttccatttggatggctgctaagtggccgggactccatgggaggtcaattaagcctgctgagcatctagtttcttatcatggcaataccatgcaccctacagggttactgtgagagtcaaattagataccaaatgttagagcaatttaggcaaaccrcaaaacaaatacaaaacattttctaaattaaaaaatctgacaaatcaataactaatttttaacttttacaaacagctctgctagatgtacaagagaaaaacaaataatttgacctgagccatgatcagattcttatttaataacacatctcaaatattgaaataaaggcaatcatgggtgaaaaaaaatcctttcctcacaacatttataaaacagccaaatgtgaactccatgaaggcaggggccaggcctgtttgagttgccacccatccccatccccatccccggagccttaacatagtagttgcttaacaagtatctgagataaa

SEQ ID NO: 71548 - DNA, 1266 bp, Homo sapiens
cctcgactaagacaaaaagaggttaggaaaaagaaaactttgaaaacatcccctaaatgtttcaaaataacatgaaacacttgatcaaattcctagatgactcggaaagtaaaggaactctaggggatcttattcccaattgttcccacacccatacgccctttacaacaagattgtgtatacttcttccagaaaagttcttcaacacctgcccacatatccacccaacaggtttgattggcatggtgagttcttgcttgggttcctagtccttaacaagcttgcaggcctgggtaatgcttgtcctagtctgccattagtgaaagatgagggtagccttccacttgggaaagccagcaaggacagaactcacagctcactgctggaattctttgttactgtacaataggcttccgagaacctgctacagaatcttctgacatcactctggcagtgagaggaagaggagtgtgtttggaggcataagggaaggagtgaggggattgaataataaagtacactaaggagttctatgatataagttgaaatttgtcccaaattctgcagtgataccacaaataatggatcatctgagaacaaaaggtccctttgaaaaaaactggcgtgtgctttaaaagaaatgctttatatatgatgccaaatagaaaagaaacaccagcagtgaattcagaaagacttctgaatagattgtttttgcttcaccaatgaggatcactaggtcaaactcgggcaaaactgtaaagtctttggtttctctgctttataatctcaatctcttttcttcatcttttaccctcctagtaccctcacatgtcagatgaccattagttcccccgatcaaatatgggaagaacttgataccatgcagacttgattgactgcctagttttatatatatatagtttgtttgtttgtttgttttttgagatggagtcttgccctgttgcccaggctggagtgcagtggcgcgatcttggctcactgcaacctcagcctcccgggttcacaccattctcctgtctcagcctcccgagtagctgggactacagacacccaccaccacgcctggctaactttttgcatttttagtagagacggggtttcaccgtgttagctaggatggtctccatctcctgacctcatgatccgcctgcctcggcctcccaaagtgctgggattacagrtgtgagccaccacgcccggccgacagcctagttatattttagtgtgaatgaaatagttggt

SEQ ID NO: 71549 - DNA, 658 bp, Homo sapiens
ttcgtgccactgcactccagtctggtcgacggagcaagactccatcccccccaaaaaaaaagaaaaagaaaaaaatctcattgatttatcacttaaaagtaattataaggacttctttcgacattaataacaaaaatcctttgtaccttcacacaatagtagttgtagttttagtgtttattgattgatagaaataatgacaaaaagctactctaacttctaaaccacttacacacagctttgaatgtattattacagtgtctatggacatttaaacaattacacacacatttcaggcttatttatttagtctatgttacaaaaccttttgaaaaaattctgtggcctgcaggtttggcaggaccaaactagagaataaagtctaaattctttagcttggtatccaggatcctttttattgcaattttcatacttgtccaacttcatgccagttcacacagaactacttattattcctggactggccctgttcctttattgcatctaccatttatataaggtatgycctgggccttgaatgttctttttcctccacatctttcaggacactgcttgaaaatctcccttcttaagtacttaactatcttatcccagatagttttaatgtttccttttctgtgctctccagaacttaatg

SEQ ID NO: 71550 - DNA, 981 bp, Homo sapiens
gccagcacagcttttctacactgttttctttcttactatgttttgaacaggacaatgacagtggtttgatgttaatcatcattgtagttcttgagtatcagaatttatcactgtgggcctcatcatagccttaatttctactatagtgaggatgataggcaatttgaaagcacttctacaaagacataagtgttggtgtcttccaaatttataattactttcttagacaaaactggctttagaaaatttcatgtgcatatctttctccttattcttgtttgcacaagcaaactaaaaaacaaaacatacacataaacaacaagaatgttaataaaatcatgtttaatctgaagtaaatatagtctgatttgaattggatgaaattgtattaggaacccaagggtttctggtgactttaaatggaaattttttgatgtttatagtagtattcagtgagtactgagattttttcttttatttttgcttttacttttagttgacacgatattttcttttgactctcaatggcatttttttcttctttttcttttttgctaaatgtatctttaggtgaattaaagaatagactaaacctttttatcaaaaatattgtgctgtgaaagctttttaaagtcagtgagctttgtcatctgacccttcttttagaaaataggcctttagctgactcatgttatgtatgtgtgtatatatatatatatatatatrtatatatatatagagagagagagagagagagacagagagacagagagataatcttatatagcatgagttgctccaagaattaatgatatatacacacatatataaaataacctatgcctgatggtaaaaatataaactgtcaatttcttcttttagggtcttagctgtctagaatgttaataaaatcatgtttaatctgaagtaaatatagtctgatttgaattggatgaaatttttaggcttattactttcaca

SEQ ID NO: 71551 - DNA, 981 bp, Homo sapiens
gccagcacagcttttctacactgttttctttcttactatgttttgaacaggacaatgacagtggtttgatgttaatcatcattgtagttcttgagtatcagaatttatcactgtgggcctcatcatagccttaatttctactatagtgaggatgataggcaatttgaaagcacttctacaaagacataagtgttggtgtcttccaaatttataattactttcttagacaaaactggctttagaaaatttcatgtgcatatctttctccttattcttgtttgcacaagcaaactaaaaaacaaaacatacacataaacaacaagaatgttaataaaatcatgtttaatctgaagtaaatatagtctgatttgaattggatgaaattgtattaggaacccaagggtttctggtgactttaaatggaaattttttgatgtttatagtagtattcagtgagtactgagattttttcttttatttttgcttttacttttagttgacacgatattttcttttgactctcaatggcatttttttcttctttttcttttttgctaaatgtatctttaggtgaattaaagaatagactaaacctttttatcaaaaatattgtgctgtgaaagctttttaaagtcagtgagctttgtcatctgacccttcttttagaaaataggcctttagctgactcatgttatgtatgtgtgtatatatatatatatatatatgtatatatatatagagagagagagagagagagacagagagacagagagataatcttatatagcatgagttgctccaagaattaatgatatatacacacatatataaaataacctatgcctgatggtaaaaatataaactgtcaatttcttcttttagggtcttagctgtctagaatgttaataaaatcatgtttaatctgaagtaaatatagtctgatttgaattggatgaaatttttaggyttattactttcaca

SEQ ID NO: 71552 - DNA, 1313 bp, Homo sapiens
tcctaaagaactaaatctaggaccttccagcattcttctgacttgtcacgccttgctcgactaacaagactgacctctcagcttcctagacctggccacccttctggctttcctcccacctctctacccacctcttaagcggaggatcctttctagcccagatcctttcactcaataccccaactgcctcccagttggtgccacccaaaactgcatctccagccagggcgcctgcatggctgctgggcccatggagtgggctctctgctgggaccgccacatggatatcccatgagggccatcaagtctacacactagcctccgcgttcacccgcattcatggatcttgaggaggcgcatgaccagacrcctcaggcaggcattgtgacgttttttttgagacagggtctcattctgctgtccaggttggaatgcagtggcgtgatctcggctcactgcagcctccatctcccaggctcagcgatcctgctgcctcagcctcctgagtaggtgggaccatagctgggtgccaccacacctggctaataggcaggcattttggattctcattggcagctccttccctgccaatcacatcagttctttccctctctgccagatattgccctttctccagctctatcattccaacctcctcatcactagaatccctgccttctgtgtggacccctggtctgagctaagggtgcaagctggtggaaagaatgggtgattgaggctgtgtttacacggccgtttctttgtttgtttgtttgttttttgtgagacaaggtctcactctgtcatccaggctggagtgcagtgacatgataacagctcactgcagcctcaacctcgtgggctccggatatcctcccacctaggcctcctgagtatatgggattacaggaacacaacactatgccaggctgatttttaaacttcttatagagatggggtcttgcttattgcccagagtgggcttgaattcctggcctcaagcaatcctcccaccttggcctcccaaaatgctgagattacaggtgtgaggcactgcaccccactcacagcactgtcactgactgcatcatcagtagtccgtaaaagagaaggaagggcaaagatgataggtattacaaggggctaaatcctcccaatgcctccctgcctggctccaccatagcttctttcccattcgccacccattcaccattcacgtgtcaaagcggtctttttcttacacaaatctcacaggtctggtcctgctttaaatactttgatggattccacagttcccaggtcaagcaagatgc

SEQ ID NO: 71553 - DNA, 1313 bp, Homo sapiens
tcctaaagaactaaatctaggaccttccagcattcttctgacttgtcacgccttgctcgactaacaagactgacctctcagcttcctagacctggccacccttctggctttcctcccacctctctacccacctcttaagcggaggatcctttctagcccagatcctttcactcaataccccaactgcctcccagttggtgccacccaaaactgcatctccagccagggcgcctgcatggctgctgggcccatggagtgggctctctgctgggaccgccacatggatatcccatgagggccatcaagtctacacactagcctccgcgttcacccgcattcatggatcttgaggaggcgcatgaccagacacctcaggcaggcattgtgaygttttttttgagacagggtctcattctgctgtccaggttggaatgcagtggcgtgatctcggctcactgcagcctccatctcccaggctcagcgatcctgctgcctcagcctcctgagtaggtgggaccatagctgggtgccaccacacctggctaataggcaggcattttggattctcattggcagctccttccctgccaatcacatcagttctttccctctctgccagatattgccctttctccagctctatcattccaacctcctcatcactagaatccctgccttctgtgtggacccctggtctgagctaagggtgcaagctggtggaaagaatgggtgattgaggctgtgtttacacggccgtttctttgtttgtttgtttgttttttgtgagacaaggtctcactctgtcatccaggctggagtgcagtgacatgataacagctcactgcagcctcaacctcgtgggctccggatatcctcccacctaggcctcctgagtatatgggattacaggaacacaacactatgccaggctgatttttaaacttcttatagagatggggtcttgcttattgcccagagtgggcttgaattcctggcctcaagcaatcctcccaccttggcctcccaaaatgctgagattacaggtgtgaggcactgcaccccactcacagcactgtcactgactgcatcatcagtagtccgtaaaagagaaggaagggcaaagatgataggtattacaaggggctaaatcctcccaatgcctccctgcctggctccaccatagcttctttcccattcgccacccattcaccattcacgtgtcaaagcggtctttttcttacacaaatctcacaggtctggtcctgctttaaatactttgatggattccacagttcccaggtcaagcaagatgc

SEQ ID NO: 71554 - DNA, 1313 bp, Homo sapiens
tcctaaagaactaaatctaggaccttccagcattcttctgacttgtcacgccttgctcgactaacaagactgacctctcagcttcctagacctggccacccttctggctttcctcccacctctctacccacctcttaagcggaggatcctttctagcccagatcctttcactcaataccccaactgcctcccagttggtgccacccaaaactgcatctccagccagggcgcctgcatggctgctgggcccatggagtgggctctctgctgggaccgccacatggatatcccatgagggccatcaagtctacacactagcctccgcgttcacccgcattcatggatcttgaggaggcgcatgaccagacacctcaggcaggcattgtgacgttttttttgagacagggtctcattctgctgtccaggttggaatgcagtggcgtgatctcggctcactgcagcctccatctcccaggctcagcgatcctgctgcctcagcctcctgagtaggtgggaccatagctgggtgccaccacacctggctaataggcaggcattttggattctcattggcagctccttccctgccaatcacatcagttctttccctctctgccagatattgccctttctccagctctatcattccaacctcctcatcactagaatccctgccttctgtgtggacccctggtctgagctaagggtgcaagctggtggaaagaatgggtgattgaggctgtgtttacacggccgtttctttgtttgtttgtttgttttttgtgagacaaggtctcactctgtcatccaggctggagtgcagtgacatgataasagctcactgcagcctcaacctcgtgggctccggatatcctcccacctaggcctcctgagtatatgggattacaggaacacaacactatgccaggctgatttttaaacttcttatagagatggggtcttgcttattgcccagagtgggcttgaattcctggcctcaagcaatcctcccaccttggcctcccaaaatgctgagattacaggtgtgaggcactgcaccccactcacagcactgtcactgactgcatcatcagtagtccgtaaaagagaaggaagggcaaagatgataggtattacaaggggctaaatcctcccaatgcctccctgcctggctccaccatagcttctttcccattcgccacccattcaccattcacgtgtcaaagcggtctttttcttacacaaatctcacaggtctggtcctgctttaaatactttgatggattccacagttcccaggtcaagcaagatgc

SEQ ID NO: 71555 - DNA, 1313 bp, Homo sapiens
tcctaaagaactaaatctaggaccttccagcattcttctgacttgtcacgccttgctcgactaacaagactgacctctcagcttcctagacctggccacccttctggctttcctcccacctctctacccacctcttaagcggaggatcctttctagcccagatcctttcactcaataccccaactgcctcccagttggtgccacccaaaactgcatctccagccagggcgcctgcatggctgctgggcccatggagtgggctctctgctgggaccgccacatggatatcccatgagggccatcaagtctacacactagcctccgcgttcacccgcattcatggatcttgaggaggcgcatgaccagacacctcaggcaggcattgtgacgttttttttgagacagggtctcattctgctgtccaggttggaatgcagtggcgtgatctcggctcactgcagcctccatctcccaggctcagcgatcctgctgcctcagcctcctgagtaggtgggaccatagctgggtgccaccacacctggctaataggcaggcattttggattctcattggcagctccttccctgccaatcacatcagttctttccctctctgccagatattgccctttctccagctctatcattccaacctcctcatcactagaatccctgccttctgtgtggacccctggtctgagctaagggtgcaagctggtggaaagaatgggtgattgaggctgtgtttacacggccgtttctttgtttgtttgtttgttttttgtgagacaaggtctcactctgtcatccaggctggagtgcagtgacatgataacagctcactgcagcctcaacctcgtgggctccggatatcctcccacctaggcctcckgagtatatgggattacaggaacacaacactatgccaggctgatttttaaacttcttatagagatggggtcttgcttattgcccagagtgggcttgaattcctggcctcaagcaatcctcccaccttggcctcccaaaatgctgagattacaggtgtgaggcactgcaccccactcacagcactgtcactgactgcatcatcagtagtccgtaaaagagaaggaagggcaaagatgataggtattacaaggggctaaatcctcccaatgcctccctgcctggctccaccatagcttctttcccattcgccacccattcaccattcacgtgtcaaagcggtctttttcttacacaaatctcacaggtctggtcctgctttaaatactttgatggattccacagttcccaggtcaagcaagatgc

SEQ ID NO: 71556 - DNA, 532 bp, Homo sapiens
tgtcttctagattacaaatttatttattcaatacgcttttattggctactctacatcagccactttgctgagcatttcaaatacaaagctcaggttccggtgttagaattcagactactacaaaggaaatttgagcacrttgttataagtgtatgataggaatagaaacaatactaaggaaccatggagaaaaaagggactaattttaattgagagtcaggaaagacttcatagaagtcataatgttctagctgtgtcttagaaagggtgttgctagagaatggagtgtggaagttgttcccagacggaagtgggaaaatgtgaagaaggtgaatggtaagaagttcaatgtggctggagcagatcataaaggggagaagaaagagatgatgaaacttcagggattagtctggcttagattttggagaacgttttatggcatggtagggagtttgtatttaggtcagataaaaactagagatctttaagaaaggaagtaacacggcttgcacatctttggttaaatttattt

SEQ ID NO: 71557 - DNA, 1096 bp, Homo sapiens
ttatgttctgtcctgggtgaatatccacatttagagggctaacaggattttctacaacggtaatgattaagcaatgaaaatgcagtcacattaaaacatcagtcttgttaaataatgaccaagagcttgattctcaactaaatggaaaaaaaatgaacaaacaaacaaaccagaaggaaaaaaatgggagctaaaggacctaaaggtaatttttttcaaaggtttgatagaagttatgaagtttaagagtatgcaataggaaagattcagagaaagagcaagcaatatcttaaaagagagataataagcagttgagattcaaccccaccccattccccttgacacaaaataatataatctgtgttcagacagatacttttaaaatcaaaagcattgacacaagaataggttgtaatctacattagttatgtggggttaatgattcctgcgcttgaagatgtttcctacatmcttcccttcccctaaatgtcttctttttttcttttaaataatctcttgacttttcctatttttccacatattctttcctatctctaagtgaaagaggcaaaataaaatgcttttattgttagattcatgtgagaatcccatttgaactaacgttcatcaaaataatgtgtctagaaactcacattcatgaaaaaagtggtcagatcgaacaaaatggtttgttgggatacagcttgaattggaaggaaatgcaaattagtgtttctttttacaggttagtaaaagcaaacttcacactgtagtatttgttttttttttattctatccaaatctgttcacttatttccaaagaaattttcaatgatagagcaatagttaggttgttatgtgaaatgcacagtctaatataagcatgagaaaaatgataggcaaaatttattgaaaagtaatagaacctttgtgatttcattttacgttaacataatttaactgtaatgtttcagacacaggattttaaaagcaattaaataaacataagacttacttaagaaagaaaaagaaaaaaagaaggtgttctcaaggaattattttgtgctttttgcaaatcagccaagaggggaaaatg

SEQ ID NO: 71558 - DNA, 907 bp, Homo sapiens
tgcatatgttgatcagaactctgcagaatacctgcgagggaccctctgagacctacgatctctacaattctctctctatgaaactttttcttcactgttacattgccctgtaaatttgatctgccttggccttcgcgaatctccacccgattaattcagggagacctctgagttctctgtgggttgcccttctctgttgtatgactggaattttcttcaggtagtaaattgatgcaatattagtttgktttttttttaatacaagattattttttaggtcgaagggtaaattcagcttacgtcatcttccaaaggttgtgaaacttgattcatatcaaaataagtcaaaaatgaggaatgcctgtctctcccttaagagtctcaatagagaagaaaattacattgacatatgtagtcttcactaagcaatctctaaataatattctcctaaggataatttgttatgtttttactaagactagacattataaacacacacacacacacacacacacacacacgacattgaaacactgaggcaaaactttatggacatctattatgaaaaaatagttctatttattcttttggagtaagaggctcctatgaagtggtggagagggtagtctttgaatggaacagaagtcaaataaattctgcatgtatcactctctaatcaggtgattcagagcatgttacttgagctatgtttttattttctcatctataatatttagatactaattcatagttcatagaaatttcctaagagttaattaatagaagtctaaaaagtttctaaccctgtgtgaggcaaagagtatctattcagtaaaatataatagctgttgtgattattatctctttatccttaatgaatggaagtcaatataggttatcatctttt

SEQ ID NO: 71559 - DNA, 788 bp, Homo sapiens
tcagatgactaaataacgtgttttattctcaataagcttttgatttggtgatcaactattttttgttgataatcaaatatcaactattttttcttgataattcttcttgcaatctaagttgtatagaacacattgttggcagtagttaatgaatagttgtttaaaagataatttcctccaggaaaaatatttccccaaaacttatagtctcttttttctctaattgaaggggagttccttgcaaattttactagtagaaaaccagacatttgtcatgaagtaaaactcactgaaatgaaattgctctttgtgaaaaactgctctgcaataaggtaattagttccattggctttgttttgatgaaagattcatgcattgaaatctgcttagttgtatgtgaaacagtttccacccataaaaaatcacagagttyacagcattttctctctctaaattgggattttaaatttactttccaccttggtcctttccgtcaaaaaaagtaacttttcttgcaagagcaaattgttttatgcttatcccataattcatgagttctttaaagaggaaatggaggtaaatgccaaagtttaattttaaaaaatgccacagtgaaatttgctcattctgtctgcacatacggatgtaaaaagctatgtggtttgagctcatggaaatggaaggtacctcaaatgttagacctaagaccataaaaaccctagaagaaaacataggcaatattattcaggacataggcatgggcaaagacatcatgtctaaaacaccaa

SEQ ID NO: 71560 - DNA, 788 bp, Homo sapiens
tcagatgactaaataacgtgttttattctcaataagcttttgatttggtgatcaactattttttgttgataatcaaatatcaactattttttcttgataattcttcttgcaatctaagttgtatagaacacattgttggcagtagttaatgaatagttgtttaaaagataatttcctccaggaaaaatatttccccaaaacttatagtctcttttttctctaattgaaggggagttccttgcaaattttactagtagaaaaccagacatttgtcatgaagtaaaactcactgaaatgaaattgctctttgtgaaaaactgctctgcaataaggtaattagttccattggctttgttttgatgaaagattcatgcattgaaatctgcttagttgtatgtgaaacagtttccacccataaaaaatcacagagttcacagcattttctctctctaaattgggwttttaaatttactttccaccttggtcctttccgtcaaaaaaagtaacttttcttgcaagagcaaattgttttatgcttatcccataattcatgagttctttaaagaggaaatggaggtaaatgccaaagtttaattttaaaaaatgccacagtgaaatttgctcattctgtctgcacatacggatgtaaaaagctatgtggtttgagctcatggaaatggaaggtacctcaaatgttagacctaagaccataaaaaccctagaagaaaacataggcaatattattcaggacataggcatgggcaaagacatcatgtctaaaacaccaa

SEQ ID NO: 71561 - DNA, 1625 bp, Homo sapiens
ttctgtttggttgttttatggatgagagtaacatataaattggtaggctctgagtaaagccaattgcccatcttaatgcagatgggcctcatctaatcagttggtcttaatagaacaaagactgaccttccctgagcaagaagggattgttccaaaagatggcctttggattttaactgcagctcttccctgggtgtctagcctgctagcttacctcatcagattttaaacttacgaagctgtcacaatccattgagccgattccttaaaaataaatttctctttatatatatatatatatatatakagagagagagagagagagagagagaataaaatggaatactgtcatgtttgcctcaagtaaatcttttgttcaagtttttttcattatttggtaaactgggattttatcaaatatttaaaataggtcatggccgatacataatatgcgttggtatagataatatgtgttggtaatttatatatatataaattattcatgtatataatctatgattatatatgtgtgtgtgtgtgcatgtgtgtgtgtgtgtatatatatatatatatatatatgcattttctttctttggagagtactgactaatagagttgccagcagaacttatatgatgggtatagtcaatatatagtcacaagtggaataatataacaaaattaaagggcctgtgtctttgtaaagctatagtcagatgaaatcacagtggcgtacatagcattctgtgcactgacttttggctgaagtagaagacccttgttaatttggtcttttatacctgattttgcctgatataccatgtgatttcaagttaggtatctcagcttggatcctcctcaaaagcaaatgctaagacaaaaaattaagtgcaattatttaatttaggagttgcagagaaaggagacaacctataaaagatcagatattaaattggctaatacagtgggaaagcctgggaactgtgtaaaatacatgcttcaaaacgttctgccaaaggaaccagaaagttgatgtacttatacagcaatgtctgagagtcactggtagggagatactctcagggagtatcaatttcttgccacttataagagttagacggaagcttgtaaaattccaagaaaagccctcaagcacacagatatcctaatactgcacacgggaggttggtggaatatactggaatgtaagtctgagagatatggcagggcattgaaagcatctactccattacaaaagttcagactgcctttacttttgatctatcaccatcatagagtaggcagttctattttattaattacaaattatttttccagcaagtgacaaggaacctcactaacaatggcagtccagagcttcgttagcagcctactaacattaacatcatcaacgatccaggcttttttcatccttctctactatccctaacatagtaaagcacaccaacactgctggaaccacagcaaactgaggtctttggttcttattcatccagtcatctcatggttgcaggatggctgttataactctaaaacttctaacaaagatcaaagggaggaaagaagaggagaaggaaggagcagggcagtttaagctactattt

SEQ ID NO: 71562 - DNA, 1625 bp, Homo sapiens
ttctgtttggttgttttatggatgagagtaacatataaattggtaggctctgagtaaagccaattgcccatcttaatgcagatgggcctcatctaatcagttggtcttaatagaacaaagactgaccttccctgagcaagaagggattgttccaaaagatggcctttggattttaactgcagctcttccctgggtgtctagcctgctagcttacctcatcagattttaaacttacgaagctgtcacaatccattgagccgattccttaaaaataaatttctctttatatatatatatatatatatagagagagagagagagagagagagagaataaaatggaatactgtcatgtttgcctcaagtaaatcttttgttcaagtttttttcattatttggtaaactgggattttatcaaatatttaaaataggtcatggccgatacataatatgcgttggtatagataatatgtgttggtaatttatatatatataaattattcatgtatataatctatgattatatatgtgtgtgtgtgtgcatgtgtgtgtgtgtgtatatatatatatatatatatatgcattttctttctttggagagtactgactaatagagttgccagcagaacttatatgatgggtatagtcaatatatagtcacaagtggaataatataacaaaattaaagggcctgtgtctttgtaaagctatagtcagatgaaatcacagwggcgtacatagcattctgtgcactgacttttggctgaagtagaagacccttgttaatttggtcttttatacctgattttgcctgatataccatgtgatttcaagttaggtatctcagcttggatcctcctcaaaagcaaatgctaagacaaaaaattaagtgcaattatttaatttaggagttgcagagaaaggagacaacctataaaagatcagatattaaattggctaatacagtgggaaagcctgggaactgtgtaaaatacatgcttcaaaacgttctgccaaaggaaccagaaagttgatgtacttatacagcaatgtctgagagtcactggtagggagatactctcagggagtatcaatttcttgccacttataagagttagacggaagcttgtaaaattccaagaaaagccctcaagcacacagatatcctaatactgcacacgggaggttggtggaatatactggaatgtaagtctgagagatatggcagggcattgaaagcatctactccattacaaaagttcagactgcctttacttttgatctatcaccatcatagagtaggcagttctattttattaattacaaattatttttccagcaagtgacaaggaacctcactaacaatggcagtccagagcttcgttagcagcctactaacattaacatcatcaacgatccaggcttttttcatccttctctactatccctaacatagtaaagcacaccaacactgctggaaccacagcaaactgaggtctttggttcttattcatccagtcatctcatggttgcaggatggctgttataactctaaaacttctaacaaagatcaaagggaggaaagaagaggagaaggaaggagcagggcagtttaagctactattt

SEQ ID NO: 71563 - DNA, 775 bp, Homo sapiens
tgcatggttccaagagttcctagcctgtgtttattttaaagaaatattgtcactttctggcaggctcaggaatcttaagactgtaagtaaaatctaaagtctgcctaggtttgctttctagcctcaataaatttttaaatctgagatttctatgtggtcaaagtggagagaaaaaaatatatttttaaagaaaactgtaatatatctgttattagactgtagctctgtgcattctcttgaagttattatctacctgtagactacagtagattctgaattctactaacttcctgcattatttggctacaattctctaactaaaaacaaaaactgtcctattcctgaaaccttgtaagctgaaacaagttttaagaaacaagtctcgtatctgatatgtgggccacacaaatagtttaccaagccaactgaggtagctgatggtttcactctgttaacagctttttctaagatgtcagaacaaaaattcatagcataaggaaatttgaacccctcttttttttttttttttttttgacggaatctccctctgttgcccaggctggagtccagtggcacgatctcggctcactgcaagccccgcctcccggttgaacccctcttaatgcctaccatttttatttggcaggataatagtgtaatagaaatttcactwtgagtatcttctaataatttgacagaacctaacctaaggaatcttttaatatccattgtttaaatgagaatatgtctgtgcaattgctaatactacagactg

SEQ ID NO: 71564 - DNA, 753 bp, Homo sapiens
tgcatagattgagtagacataattcactgcgagctcttcctcctgggaatgaaaaggagcactcacaagttgccttattaaagtctttggctaactaatcaattttttactgttaaacttttataagcaccctagggccaattatctctatatttgtaccctattaacagtggcatcagccacagaaagaaagtaattgcatctttattatctttgcgtatagcaattcgtattattgggcaagacagactgacaggatcttgaattttggcttaatagtggcctaaggagaagccatttagaaaatagctttgtgaccttgggcatacttttaatatctccagaccacagcatcatcatctgtaaaattagagtgttggaccagctttctgctaaagsctatgttcacacaaaagtcgatgaatcttaggcattctggaggtttataagaaaagcaaagagaaaatatcactctcattataagtttgcttgccatgaaagctgctttcctgactgatgtttctgaaaaggaaataaaacagagagggagccagtaacctgtgagtgatcagtttgatgctgcatcagactagaatttacccctgtcattgtctccacctgcccccatggcatcaggtcctgaatttcactaaaaatggcagggaaggacaaaccaggagacacagggaaattagaagagataattatggatgatgtgaatgaaggaagtaatatggaaaatgacactcgatt

SEQ ID NO: 71565 - DNA, 753 bp, Homo sapiens
tgcatagattgagtagacataattcactgcgagctcttcctcctgggaatgaaaaggagcactcacaagttgccttattaaagtctttggctaactaatcaattttttactgttaaacttttataagcaccctagggccaattatctctatatttgtaccctattaacagtggcatcagccacagaaagaaagtaattgcatctttattatctttgcgtatagcaattcgtattattgggcaagacagactgacaggatcttgaattttggcttaatagtggcctaaggagaagccatttagaaaatagctttgtgaccttgggcatacttttaatatctccagaccacagcatcatcatctgtaaaattagagtgttggaccagctttctgctaaaggctatgttcacacaaaagtygatgaatcttaggcattctggaggtttataagaaaagcaaagagaaaatatcactctcattataagtttgcttgccatgaaagctgctttcctgactgatgtttctgaaaaggaaataaaacagagagggagccagtaacctgtgagtgatcagtttgatgctgcatcagactagaatttacccctgtcattgtctccacctgcccccatggcatcaggtcctgaatttcactaaaaatggcagggaaggacaaaccaggagacacagggaaattagaagagataattatggatgatgtgaatgaaggaagtaatatggaaaatgacactcgatt

SEQ ID NO: 71566 - DNA, 622 bp, Homo sapiens
agccactattcatgaaaggtctgtgagtctatatgtaactggggagcttgcaggctggctgtrtgctgaatgtttttcatttgtcccattatggactgaattgtgcccctccaaattaaaatggtgaggtcctaacccccaatgtgactatatttggacatagggcctttaaagaggtaatgaaagttacatggggtcatcagggtgaggccttaatccaataaaactggtgtccttataaggaaaggaagagatgccagagatctctctctctcttcaagcacacagaggaaaggccatgtgaggacacagcaagaaggcggccatctgcaagccaagaagagagtcctcaccaggaaccaactctgctgacaccttgctgttggacttccagcctctataaatgtgagaaggaaatttctgttgtttaagccactcagtctatggtattttctttgttgttgtcatttttgagacaaagtcttgctctcttgcccagactggagtgcagtggcatgatctcggctcactacaacctccacgtcctgggttcaagcaattctcctgcctcagcctcccaggtagctgggattacaggtgcccaacaccatgcccggctaat

SEQ ID NO: 71567 - DNA, 413 bp, Homo sapiens
caagcctctgtaccgtcacaagtctccgtcggggtggtgatgatctcagaaaaagagctgaaccctggattgcagcgacaggcggtggcattgacacacgaggagttctgagggcaccaccgggcacagcctgcaagagcagggagcacggtcagaaggtgaggggtaagggaatacacaaaaagggggcactgggggagatggggcagggcgctgagtttctcgtgcgcgagccctctctttccctgggctgaagggggctgggcgggggtccaggaccctccccwggctctggctgtggactgtgctttctgcttcccagcagactcacccctggagtcctgggtttcagctcccggcagagtcagccagacacagaatgctgcaacagagaaaggaaagggggtcagagg

SEQ ID NO: 71568 - DNA, 1002 bp, Homo sapiens
tgcatataagaaacaaatacaaaatgcaagaggtcactaattaccaaatagactgtttcagacaatgagagttgttggagtccagagaagacagggaagatcagtaaagggtaggccttaaaaaataggtattagatgtaatagcagaagaaaagggaaatgaccttttagaagtgaatggtcaaataaacgagaactttgaattcaaaatgagcaaagtgtgttacaagagtagtaagaattgttcttcaataagatgataatcttctcaacaatataggatcactttatttaaaggaratgagtaaagcgagaaactgaggaccaacagcggtcttgaggaatgaaatgctcacagaggatactggaaggaggaagccaggagcaagccagcaaaggagtctaatacatgagagatgagaaagcaaagaatcaaggacatttgaactggtctttcgacaagcgtttaacttctctggtcctcaattttctcaactttaaaatgggggcaatcacggtaccaccttaaagggtgttgtgaggacaaggttagttattaaagtacttacaatatttgggctagattaataagtaatacaaatctgcattttcaaggagagtatgacctctgttgctcaagcctccaagaagttcaagtacaagtcaagaagtgctcctgaatttagttacttgttcattattgactatcacgaaagtaattttgagacagaatgtgacaattgtataaagagagagtgagtgctgaaaaaatggaaggtgttggatttttattcaaaagtttcatagtgaaatgagagaaatcacttgataaagagcaagcaagtacgacaacattccaaaggcaaggaggaagggaataaggatgagaatatattgagtttcaacctaagattttcatggaagtcaaagaaaaatccaggacacagagtagtttatcttagggaattgattgcttcttgtgtgtgtgaagtaaaagtatgt

SEQ ID NO: 71569 - DNA, 1002 bp, Homo sapiens
tgcatataagaaacaaatacaaaatgcaagaggtcactaattaccaaatagactgtttcagacaatgagagttgttggagtccagagaagacagggaagatcagtaaagggtaggccttaaaaaataggtattagatgtaatagcagaagaaaagggaaatgaccttttagaagtgaatggtcaaataaacgagaactttgaattcaaaatgagcaaagtgtgttacaagagtagtaagaattgttcttcaataagatgataatcttctcaacaatataggatcactttatttaaaggaaatgagtaaagcragaaactgaggaccaacagcggtcttgaggaatgaaatgctcacagaggatactggaaggaggaagccaggagcaagccagcaaaggagtctaatacatgagagatgagaaagcaaagaatcaaggacatttgaactggtctttcgacaagcgtttaacttctctggtcctcaattttctcaactttaaaatgggggcaatcacggtaccaccttaaagggtgttgtgaggacaaggttagttattaaagtacttacaatatttgggctagattaataagtaatacaaatctgcattttcaaggagagtatgacctctgttgctcaagcctccaagaagttcaagtacaagtcaagaagtgctcctgaatttagttacttgttcattattgactatcacgaaagtaattttgagacagaatgtgacaattgtataaagagagagtgagtgctgaaaaaatggaaggtgttggatttttattcaaaagtttcatagtgaaatgagagaaatcacttgataaagagcaagcaagtacgacaacattccaaaggcaaggaggaagggaataaggatgagaatatattgagtttcaacctaagattttcatggaagtcaaagaaaaatccaggacacagagtagtttatcttagggaattgattgcttcttgtgtgtgtgaagtaaaagtatgt

SEQ ID NO: 71570 - DNA, 1499 bp, Homo sapiens
tatgtagtgcataacatattgtaatgttagtgcattagaacagtctagggctcaggcctatacccaatgctgagagacgaaggttttggsttctgagttcaggaagcagagactgtaaatggggaattccccaagcatagaatagtgttcacaaagtgttgggagtcaaaagtaggacaatcctccccttggctgcccagcttcgcaacacactgggaagttttcacacttaaacttctagtagcaaaaacagcagcagctataataaaatactgtccttcacagagggaaaaacatcttgctctgtgttttcctaaaaggagaaacaattctctattagttaagaatattttctcagccagtgcaatgtggtgaaaccccatctctactaaaaatacaaaaaattagctgggcgtggtgacgtgcacccatagtcccagttactagggaggctaaagcagaagaatcgggaggcggaggttgcagtgaactgaggtagagccactgcactccagcctgggcaaaagagtgagactccatctcagaaaaaaaaaaaaaagaatattttcaagaccaagtaacaacttagtaaccttgattttcacaagtaggaattaatttttctcgtacatcaagaaatctaaaagtagtttttcacaatgttgcaattactcaatggtcctgagaaagacacaggctttttttcccctacttcctctgtttcatttttacaacaagactttttttccttatgtgtgtcattttacagtctcaagctggctaccacagctctagacatcagacctcagaaaacctaaatcaggaaataaaagaggcatgggaaagatacctctggccactatctaaacacaaaatcaggattctgttagaaagaaagggaaagcagagctcgctgttacattggcagtagactctgtcttctagttcataaggcccaatactccttttacaccattcactgtctatagagatagttttcatgcatgttatacatgggatggtttaaactaaagacattttgatgtatactttatcaatggcaaaatattttggtgtgaaataaaacaagttggtacaaatactccaacttgttctggcttgggaacctggttcagcatctctaagtagctgtaagagttgaatgatgcttctagaattggaagtaatatggctcatagaaaaaaggtgacatattggatgaaaatggaaaccatcattctcagtaaactatcgtaagaacaaaaaaccaaacaccgcatattctcactcataggtgggaattgaacaatgagatcacatggacacaggaaggggaacatcacactctggggactgtggtggggtcgggggaggggggagggatagcattgggagatatacctaatgctagatgacacattagtgggtgcagcgcaccagcatggcacatgtatacatatgtaactaacctgcacaatgtgcacatgtaccctaaaact

SEQ ID NO: 71571 - DNA, 1499 bp, Homo sapiens
tatgtagtgcataacatattgtaatgttagtgcattagaacagtctagggctcaggcctatacccaatgctgagagacgaaggttttgggttctgagttcaggaagcagagactgtaaatggggaattccccaagcatagaatagtgttcacaaagtgttgggagtcaaaagtaggacaatcctccccttggctgcccagcttcgcaacacactgggaagttttcacacttaaacttctagtagcaawaacagcagcagctataataaaatactgtccttcacagagggaaaaacatcttgctctgtgttttcctaaaaggagaaacaattctctattagttaagaatattttctcagccagtgcaatgtggtgaaaccccatctctactaaaaatacaaaaaattagctgggcgtggtgacgtgcacccatagtcccagttactagggaggctaaagcagaagaatcgggaggcggaggttgcagtgaactgaggtagagccactgcactccagcctgggcaaaagagtgagactccatctcagaaaaaaaaaaaaaagaatattttcaagaccaagtaacaacttagtaaccttgattttcacaagtaggaattaatttttctcgtacatcaagaaatctaaaagtagtttttcacaatgttgcaattactcaatggtcctgagaaagacacaggctttttttcccctacttcctctgtttcatttttacaacaagactttttttccttatgtgtgtcattttacagtctcaagctggctaccacagctctagacatcagacctcagaaaacctaaatcaggaaataaaagaggcatgggaaagatacctctggccactatctaaacacaaaatcaggattctgttagaaagaaagggaaagcagagctcgctgttacattggcagtagactctgtcttctagttcataaggcccaatactccttttacaccattcactgtctatagagatagttttcatgcatgttatacatgggatggtttaaactaaagacattttgatgtatactttatcaatggcaaaatattttggtgtgaaataaaacaagttggtacaaatactccaacttgttctggcttgggaacctggttcagcatctctaagtagctgtaagagttgaatgatgcttctagaattggaagtaatatggctcatagaaaaaaggtgacatattggatgaaaatggaaaccatcattctcagtaaactatcgtaagaacaaaaaaccaaacaccgcatattctcactcataggtgggaattgaacaatgagatcacatggacacaggaaggggaacatcacactctggggactgtggtggggtcgggggaggggggagggatagcattgggagatatacctaatgctagatgacacattagtgggtgcagcgcaccagcatggcacatgtatacatatgtaactaacctgcacaatgtgcacatgtaccctaaaact

SEQ ID NO: 71572 - DNA, 556 bp, Homo sapiens
gcattggctcactcatgtagacacttttaagtagccatttccttatttgacatctagtctccctaatgatatgtcttgttcttgacacgcacaagattgcttctcttattgctttgctatgaaggatattactggctttggggtcttatacatatattatcatatcatgttaaggaattatccatctctatctacgaagattttaaattttaaattaggaaataatgttgaatctgttccatgtcttctgagtattactggatataatttgagcaattaataggggatattattttaataaatttcctaatgtcgaactattttgccaccgtggagatgaatctcaatgtgttctggtgtattattttttattgtaccaataatttctcatttgcaaatttatgtatttattaataccagtgggctattamaatgtaaatatcaatttgtagcttgctttttttggctcaacaatgttttagtaaacatttttatataaaaatatcaaaccatccctttctttttgactgctacatagaattttgtaaataaatcc

SEQ ID NO: 71573 - DNA, 915 bp, Homo sapiens
aaagataggcttttacatttaggtaaaggaaaaaaaagctcaatgaaaaacactttatatcaagagtatatctcatgagtactcactaaacagaaatacatctagaagaaaagccatgttgctttaatttaaaatatttgcacactgaattaatatcttaaatatttattcagtgttatctaaaagcaaccaaagagaaatataaaattacttaactataggtcttaaatattaggcctacaaaaatttsttcaccataatttttgacaaagtaatttacgttgtaaagtggtttgctcttgaatgacctaattaatggcataaaagcttcactaacaaaagaaaagatccactgtttcatacataatttattaagatttcgtataggatttatgttaaatcaaagaatttgagcatcactttcgtgatgtagaatcaaagtgtccaatacattccaatgacaaaacattcatagcctgacattattcctactttaaaaaacagtaattttttttctgctgttcaggctgcatttataaactatggcttcttgtaaatgggcttctaccccagcatttgctgcaaggtttcttattcctctgcagttgtcttttcggcctaacagagggagaaaaagcactgctgcagtcgtccgcaaaaagccactaccactgcattttgtaactaacaaagacactggtatctgtttgccaccctgttcacagggagtttacttagatgttttacaaaagcaggcacactactggtgaccagtatttcaccaaccaacaccaccactcacgctctgcagtacctgcctcctcctctttctctcatccccagtagctctttccactagattcacatcagccatctgcagcggttttgtctcctctctcttttggccaccaatgc

SEQ ID NO: 71574 - DNA, 1303 bp, Homo sapiens
tgtgtgtttgaatgtattcattatattttaatatgattatgttcaatccaatagactgaaactgatttgtccagatgtataattattttctaaatgcttataattcttggcggcagagttggcagaggttttgagaaagaagaggagtccattagctcttcatgttcattagtcatggttgtgggagcctcatcagtgggtttgaggtaatcggtgccatgctaccctgggacaccctggccttaaacatgatcacagagaccttgtgttttgagccccatgcagggaatcactgggtctctaagtttcatctggagctcctccctctgctgagctgtttttccctgttcctctttttgtttgtttgttttaagggttttaaaatgtccaactttaatttagattcagaaggtacatgtgccggttggttaaatggatatatcgtgtgatgctgaggtttagggtaaaaacattcccatcatccaggtagcaagcatagtacccaataggtagtgtttcaacctttgcccccctccccctcttccctctctagtagcccccagtgtctgttcttcccatcttgatgtccacatgtacccaatgtttctttcccacttacaagtgagaacatgcagtatttggttttctgttcctgcattaatctgcttaggataatggcctccagctgcatctatgttgttgtaaaggacatgatctcattctttttcatgactgtgtagtattccatggtgtatatggaccacattttctttatccaatccacgaatgatgggcacctacgtcgattccatgtctttgctcttgtgaataatgctgcaatgaacatacaagtgcaggtgtctttttggtagaacaaattattttcctttgggtttgggaaggggctctgcccagggtgactgtcgcactgcaccctccagggctctggaagacagtagtccccagatttaccacagtatccccagtacctcagccatatattcaccacttctggacaatcgccctctgtagcttccccsccccggctcacatagggctcctggagtttaccagagctttccacagagattcttagtcttttgctcagccccatctggatgggtctccctgtagttcaagctcttatgtcactgggtgatgtggcttgcacctataaccccagcccttcagagggcaaggtgggaggattgcttgaggccaggagtttgaggccagcctgagcaacatggcgagaccccgtctctaccaaaaaatctttttaaaaattagccaggcatggtga

SEQ ID NO: 71575 - DNA, 876 bp, Homo sapiens
cagaagttctggccaccttgggttcacaactggtcagaaatcccagcaccccatctgtcaaaacctggtctgcttcattcatttatgtcatatgcctagcccggggaacactggagtttatgcctcccaatctaggccctttagctctcattcctcctaaacaggtccaatgagcatctccagtgaaataaagatcaaagaagcagcagggccaagttctcattcctgccaataatcgctgtgttacaacagaaaggctgtttaacgtctctgaatctacttttgtatctcttaaagggggtaatgaaccctgcatcactactgcccaggaaacaggaaactaaagcacttgtgccaggtaaaggaaacaaatgatagtgaaagtaaaacccaaactattgcctaggaycagttttcattgttgttgttttctttttcttttttcttttctttttttttttttgtttttgagatggagtcttgctctgtctcccaggctggagtgcagtggcgtgatcttggctcactgcaacctctgcctcctgggttccagtaattatccctgcctcagcctcccaagtagctgggattacaggcgcctgccactacgcccagctaatttttgtatttttagtagagacagggttttaccatgttaaccaggctagtcttgaactcctgacctcaggtgacctacctgcctcggcctcccaaagtggtgggattacaggcgtgaggcactgtgcccagcctaggaccaatttttgaatcgtctgtgaatagcaattcttcaagcttttcctcctcctttttctgagaaaaaaagtaaggtctgaagactgcttacagtggctacaaaaaactgcccctcatgag

SEQ ID NO: 71576 - DNA, 432 bp, Homo sapiens
tcttaggacaaatgtacttgggctacttcatccccagtcctgactcctgccaatgcagtgagagatggaagccggagaaggtcagtttcagggaggaggctggcaatggccccactaaacgagaacccactgtggatcagacacttgaataggtgttttacgggtgctatctcaatccttataaagattcttccagtgggcatgatggaggcattatcatttgcattttagggataagaaaaatgaggatcagagatgttaagtaccttgcccaaggtcatccagctatacagcaagtggtaaaggtgggatgtgaatgcctatgtgtttgctttcattactctgtgctttttttttttttttttttgacacagggttctgctgttgcccaggccagaatgctgcggcatgatcagctcaytgcagctcaag

SEQ ID NO: 71577 - DNA, 546 bp, Homo sapiens
agtggaggagggaaaattgaagatagaggaaagagcggaatggctgctggagtaatgtccttgcragaaaatgggggtggtggcctcagacaggagtgcagaaggcccaccctcagaagccagggtaaatggcagaacctacaagaacagccagatatggtgtgggggccctcttctgagtctgtcctctcttctctccctgagagaagtatgaattagtcattgtgatgagtgggtgagtaaatggtccagggagatacagtataatttctgggcagcattgagggctcatgggaagtgagtgatcaccatttccaaatgataccatacagcgtggttgtgtgcatttttttttccagttgctcagttggagaggagggggtggagagttcactttgacagggctgggttttgccaagttagtatgccaaagtgagaggaggcaagggaacggttgtaatggtgaaccatgggacgtcagtggggcctgagaagcaggctagctcgagagagcccgggctgggtggcattgagctcagcagtaga

SEQ ID NO: 71578 - DNA, 1031 bp, Homo sapiens
aatccgatgctgtcccagaataagtgtattgtaatatgaatgttaaaattgaacaagagaaagcaggaaaataagtggtatttgggaaattaaaggaaaattgaaccagagtctttatattcctgaatttaattggattaatgggaaatttatcattgttctttctatattggactggtttttaagtgaatcagctattttataattttatgacagatcaaagctgagttcatttagcctgttgcactttatactttaaaaatttacataaattttaaataacttgaccaaaaaagttataatttcattcagtttggtcaacaaactctcccttaattaaatgcaaaatgtgccgtgttcagttagtagagcaattaaaagtggaaattcatttagaatactttgtttcaaaggaatatgagagagataaattacttgtgttgattagggagatttgtcacttaaacctcttcaattatttcaacctcttgtacagcaataaatccatgtaaatttagagctatagaataaaataacagattgcacctttgcattcctcaaaaggaaaaaaaaaacargttaaaggaagggtaaaatctgagaaaattattcaagtagaaggccctatcagttgatcacaagctctgttaaattcacagcactttgcacatgttctcacactgaagatctgcctgatatgtagcaccagctgtgtacacttttctcctaattgctgattttatcagacctcattctcatgttcttcacatagctggtctgtgttgtgctgtgttatgagccatgtcaagttcccttttgctactgatgcctgtgacagatgttataggcacttggggactttttataatccctaaaatcatacctatccaggaccctagtattatcaattcatgaaaaatatccagtgtcagaatttacatttctaatgtatggctctatttgaaattttactttgccattttgtaaagtagctgaataccttgcgagaattagcttcccatttcatagct

SEQ ID NO: 71579 - DNA, 1031 bp, Homo sapiens
aatccgatgctgtcccagaataagtgtattgtaatatgaatgttaaaattgaacaagagaaagcaggaaaataagtggtatttgggaaattaaaggaaaattgaaccagagtctttatattcctgaatttaattggattaatgggaaatttatcattgttctttctatattggactggtttttaagtgaatcagctattttataattttatgacagatcaaagctgagttcatttagcctgttgcactttatactttaaaaatttacataaattttaaataacttgaccaaaaaagttataatttcattcagtttggtcaacaaactctcccttaattaaatgcaaaatgtgccgtgttcagttagtagagcaattaaaagtggaaattcatttagaatactttgtttcaaaggaatatgagagagataaattacttgtgttgattagggagatttgtcacttaaacctcttcaattatttcaacctcttgtacagcaataaatccatgtaaatttagagctatagaataaaataacagattgcacctttgcattcctcaaaaggaaaaaaaaaacaagttaaaggaagggtaaaatctgagaaaattattcaagtagaaggccctatcagttgatcacaagctctgttaaattcacagcactttgcacatgttctcacactgaagatctgcctgatatgtagcaccagctgtgtacacttttctcctaattgctgattttatcagacctcattctcatgttcttcacatagctggtctgtgttgtgctgtgttatgagccatgtcaagttcccttttgctactgatgcctgtgacagatgttataggyacttggggactttttataatccctaaaatcatacctatccaggaccctagtattatcaattcatgaaaaatatccagtgtcagaatttacatttctaatgtatggctctatttgaaattttactttgccattttgtaaagtagctgaataccttgcgagaattagcttcccatttcatagct

SEQ ID NO: 71580 - DNA, 641 bp, Homo sapiens
ctgcaaagacccagtactcaagttctgacgtgggaggagatgcagygagacgtctcttgttgcctaaagcctgttcctgttggttttcttagagtgatttctcctagacatgtgcagtaggcccactggggctgctgtgcagtggtgagtaaaagggcagggaaggcatggacagcctggtccttctgcatggacagctcagtccatggcccatcccaggtatagagttcagttaatcccatttgagcctgcagcttaagagatggctcatcctaactgtgaagcaaaatcagccccagaggatgtattgatctgactcactgatgtcaaaattgcagtatttttttagcatttgagatttagcagctgccttcagtttggggttacccacatcccagcatcagatatgattaaggaaagaaattggatgtacaacagcaaagaaagtgaatgtcatggtttccctggccaaagaagagggaccctgtcatccttaccaatggggaagaagaaaactagtgcatgtgcaatatgtcaaagttagtcccctagtccctgaggggtttttacacacagatgggctccaggtctgctcgtcaagtttggaggtaccgggtaaatggaggggagctgcagagttg

SEQ ID NO: 71581 - DNA, 641 bp, Homo sapiens
ctgcaaagacccagtactcaagttctgacgtgggaggagatgcagtgagacgtctcttgttgcctaaagcctgttcctgttggttttcttagagtgatttctcctagacatgtgcagtaggcccactggggctgctgtgcagtggtgagtaaaagggcagggaaggcatggacagcctggtccttctgcatggacagctcagtccatggcccatcccaggtatagagttcagttaatcccatttgagcctgcrgcttaagagatggctcatcctaactgtgaagcaaaatcagccccagaggatgtattgatctgactcactgatgtcaaaattgcagtatttttttagcatttgagatttagcagctgccttcagtttggggttacccacatcccagcatcagatatgattaaggaaagaaattggatgtacaacagcaaagaaagtgaatgtcatggtttccctggccaaagaagagggaccctgtcatccttaccaatggggaagaagaaaactagtgcatgtgcaatatgtcaaagttagtcccctagtccctgaggggtttttacacacagatgggctccaggtctgctcgtcaagtttggaggtaccgggtaaatggaggggagctgcagagttg

SEQ ID NO: 71582 - DNA, 482 bp, Homo sapiens
cagggaccacagggcacgaacagaggtagaggtgactgaccccgatcatcagcagagaatgggctgctgtttcaccgtgggagcaggagaaatatgtgagaaacccactgggtgcttttttactcccttgcccaattgtaactgtcagtggacagggtcagcaatcctggtctgagaaggacatggtgaccagaggccctgcccccctggagaggatgatctgggcccagccacaaaggtgcacagaggtgggacctgagagtgagtggaatctaaactgaatagtggaggaggagtcaatgatggtcacctgtgggtcccaaaacacctgccctgcccacacaatcacatgggtgctataattattcatgaattttccttttcttttctttttttttgagacaaggtctccctctgtcacctgggccaagtgcagtggtgasatagtagctccctgcaaccttgacttcccggggttccag

SEQ ID NO: 71583 - DNA, 674 bp, Homo sapiens
ggatcccaaagcagcatcttgtctgacacccatttctacttcttccctggtctgagaccatacagctcccatgggccagcagtcgctctcagaccttcccagtcccagcccaccccgtaagctgcaaatgggttgaggcctgcagaagttctttgcaaacyggaaagcagtggctctcaaagtttgattctggacttggcagtgccagtagcacctgttagaaatgaaaattattggctcccaccccgtacctactgagtcagaaactcgggctgtggtcccagcactctgtttcaataagctctccaggggattctggtggctgctatagttttaggaccactgccacccagttacagcattattcctttcctgaagggttttccagcatttctccttccctaccttgggatgtgtgacactttcctctgggctcctagttaaggggacaaacaatctcagtattaccactaagaggctgtgatcccagaaactccttagtctgaggcaaatttagatagttgatcactcgagacaggatttcattcattaagagagagcacatcaaccgatgcccatgggtccagctgagcccatatttgcaatctgcaatttttaaaaaggtaattaagggataagcatttaaaaatcagtagattttacctaaaaatcag

SEQ ID NO: 71584 - DNA, 674 bp, Homo sapiens
ggatcccaaagcagcatcttgtctgacacccatttctacttcttccctggtctgagaccatacagctcccatgggccagcagtcgctctcagaccttcccagtcccagcccaccccgtaagctgcaaatgggttgaggcctgcagaagttctttgcaaactggaaagcagtggctctcaaagtttgattctggacttggcagtgccagtagcacctgttagaaatgaaaattattggctcccaccccrtacctactgagtcagaaactcgggctgtggtcccagcactctgtttcaataagctctccaggggattctggtggctgctatagttttaggaccactgccacccagttacagcattattcctttcctgaagggttttccagcatttctccttccctaccttgggatgtgtgacactttcctctgggctcctagttaaggggacaaacaatctcagtattaccactaagaggctgtgatcccagaaactccttagtctgaggcaaatttagatagttgatcactcgagacaggatttcattcattaagagagagcacatcaaccgatgcccatgggtccagctgagcccatatttgcaatctgcaatttttaaaaaggtaattaagggataagcatttaaaaatcagtagattttacctaaaaatcag

SEQ ID NO: 71585 - DNA, 674 bp, Homo sapiens
ggatcccaaagcagcatcttgtctgacacccatttctacttcttccctggtctgagaccatacagctcccatgggccagcagtcgctctcagaccttcccagtcccagcccaccccgtaagctgcaaatgggttgaggcctgcagaagttctttgcaaactggaaagcagtggctctcaaagtttgattctggacttggcagtgccagtagcacctgttagaaatgaaaattattggctcccaccccgtacctactgagtcagaaactcgggctgtggtcccagcactctgtttcaataagctctccaggggattctggtggctgctatagttttaggaccactgccacccagttacagcattattcctttcctgaagggttttccagcatttctccttccctaccttgggatgtgtgacactttcctctgggctcctagttaaggggacaaacaatctcagtattaccactaagaggctgtgatcccagaaactccttagtctgaggcaaatttagatagttgatcactcgagacaggatttcattcattaagagagagcwcatcaaccgatgcccatgggtccagctgagcccatatttgcaatctgcaatttttaaaaaggtaattaagggataagcatttaaaaatcagtagattttacctaaaaatcag

SEQ ID NO: 71586 - DNA, 1237 bp, Homo sapiens
tgtgacatgacaagcacaatgataaagaatcatatagggccctaggggtatgaggacaccagacttgtcttcagaggggcagggaagccttctgggagatgaggacacctaaggctgggtagagtttttccagctgaaggacattgrggtacatcctagtttctatcatcaggtagttcgttaggctatttcatatattcatgcccaaattagtggtttgggctgtgcactttctgaggatggagacaattcaaatgtctaccattgtcaggaaggtaacacaagtgagtgagacaggaaagatgtgagggacgtacactatagactgaagactgctcctctctaaaggggcagggctcctctgttgcagcctagcatttctgggcaagaatgcatgccctgtgtgatcaggttgtccaattttgtaagaggagccagaacttctgatttttaggtaaatatctactgatttttaaatgctgatcccttattcatctttttaaataatccagatcccaaatatgggctccgttgatgagctgtctcttaacttcccattggtcttttcaggccagtgcttaatgggatccttcactaccagcactcaggctcccattgctccagcacccactccactgaggctctttctaggaattgatgtggttatttactgagcctcgagagggcttactctgataccacaaggatttgggaaagtacaacagattttagagccaagagactatgagtggtctaattctccttaccactgatgataatgatatatttttttcttgattgtgactaattatatgattttttgtgcatacctgataaatgtgtaagtaataggtaacttaattttgataacatacattttaagaagaaagctatgttagaatcatgttgtagcaagaaacactgtatgaaaaggtagtgctattactgaacttaaaggtagagatattactaagataaaattactcaaattttcacctttaatcacattttgttttcaaagtgacattatgagacaattaaaacttgctctgaaatgtaccctgctctcaccagatatctgtgcacaatatacatacactcataaacttgcacttgtgcatgaagagatcgtgggttctgtttgcctgagattattttctgctctgtgctactctgattggctttccttgagatcaagaaagcactcatacctcatgtatcttaagtgattaaaatt

SEQ ID NO: 71587 - DNA, 1237 bp, Homo sapiens
tgtgacatgacaagcacaatgataaagaatcatatagggccctaggggtatgaggacaccagacttgtcttcagaggggcagggaagccttctgggagatgaggacacctaaggctgggtagagtttttccagctgaaggacattgaggtacatcctagtttctatcatcaggtagttcgttaggctatttcatmtattcatgcccaaattagtggtttgggctgtgcactttctgaggatggagacaattcaaatgtctaccattgtcaggaaggtaacacaagtgagtgagacaggaaagatgtgagggacgtacactatagactgaagactgctcctctctaaaggggcagggctcctctgttgcagcctagcatttctgggcaagaatgcatgccctgtgtgatcaggttgtccaattttgtaagaggagccagaacttctgatttttaggtaaatatctactgatttttaaatgctgatcccttattcatctttttaaataatccagatcccaaatatgggctccgttgatgagctgtctcttaacttcccattggtcttttcaggccagtgcttaatgggatccttcactaccagcactcaggctcccattgctccagcacccactccactgaggctctttctaggaattgatgtggttatttactgagcctcgagagggcttactctgataccacaaggatttgggaaagtacaacagattttagagccaagagactatgagtggtctaattctccttaccactgatgataatgatatatttttttcttgattgtgactaattatatgattttttgtgcatacctgataaatgtgtaagtaataggtaacttaattttgataacatacattttaagaagaaagctatgttagaatcatgttgtagcaagaaacactgtatgaaaaggtagtgctattactgaacttaaaggtagagatattactaagataaaattactcaaattttcacctttaatcacattttgttttcaaagtgacattatgagacaattaaaacttgctctgaaatgtaccctgctctcaccagatatctgtgcacaatatacatacactcataaacttgcacttgtgcatgaagagatcgtgggttctgtttgcctgagattattttctgctctgtgctactctgattggctttccttgagatcaagaaagcactcatacctcatgtatcttaagtgattaaaatt

SEQ ID NO: 71588 - DNA, 1237 bp, Homo sapiens
tgtgacatgacaagcacaatgataaagaatcatatagggccctaggggtatgaggacaccagacttgtcttcagaggggcagggaagccttctgggagatgaggacacctaaggctgggtagagtttttccagctgaaggacattgaggtacatcctagtttctatcatcaggtagttcgttaggctatttcatatattcatgcccaaattagtggtttgggcygtgcactttctgaggatggagacaattcaaatgtctaccattgtcaggaaggtaacacaagtgagtgagacaggaaagatgtgagggacgtacactatagactgaagactgctcctctctaaaggggcagggctcctctgttgcagcctagcatttctgggcaagaatgcatgccctgtgtgatcaggttgtccaattttgtaagaggagccagaacttctgatttttaggtaaatatctactgatttttaaatgctgatcccttattcatctttttaaataatccagatcccaaatatgggctccgttgatgagctgtctcttaacttcccattggtcttttcaggccagtgcttaatgggatccttcactaccagcactcaggctcccattgctccagcacccactccactgaggctctttctaggaattgatgtggttatttactgagcctcgagagggcttactctgataccacaaggatttgggaaagtacaacagattttagagccaagagactatgagtggtctaattctccttaccactgatgataatgatatatttttttcttgattgtgactaattatatgattttttgtgcatacctgataaatgtgtaagtaataggtaacttaattttgataacatacattttaagaagaaagctatgttagaatcatgttgtagcaagaaacactgtatgaaaaggtagtgctattactgaacttaaaggtagagatattactaagataaaattactcaaattttcacctttaatcacattttgttttcaaagtgacattatgagacaattaaaacttgctctgaaatgtaccctgctctcaccagatatctgtgcacaatatacatacactcataaacttgcacttgtgcatgaagagatcgtgggttctgtttgcctgagattattttctgctctgtgctactctgattggctttccttgagatcaagaaagcactcatacctcatgtatcttaagtgattaaaatt

SEQ ID NO: 71589 - DNA, 571 bp, Homo sapiens
ctgaaggctgttactataattggacgctgagtgggaaaagtaagattcacatttcaatggtaagatccttttcctttactctgtatgatgtgttctggaatttctgactggctaattttcctcgtgagtatttcccagcatcttgccgtgttgttagatgtctcatgctgtctccttttctctcttgggtccctaaactgctctttccccatctgccccacaaaatttgaaattgttctaactttaatatgtcagggaagttatttctaattttggatctacctagttcatcttagctatgtcatatgaatcccctgtttgatccccagaaaaaacatcaggacaatttcctaaataacaacagttatcttccaaagagtaacaagmtttctatcaacacttctttgtccttgttgctatagttatattattctttgtttctttaatgtctcttttctcagctagactatataaactctgtgtgggcaaaggccatgtctgttttcttcttttctgaatcatttaaagtgatgagaagaaaataaaagcccaatatatatttctttgaata

SEQ ID NO: 71590 - DNA, 649 bp, Homo sapiens
aggaccagctggaggcctcagacgagaaagcaagtcctgacccaggccagggattcttctgctctctgggcctggtcttcttctcacaacacaacatctgaggaacccagagccctttggtgaaactaaataaaatgacataaacaaaaacaaagaactgtgtgctgactgaaaagtgaatgagattgagtagcaaaatactaaatataggctgggcatggtggctcacacctgtaatcccagcacttcgggagcctgacgcgggtggatcacctgaagtcaggagttcaagaccagcctggccaacatagtgaaatcccatctctactaaaaatacaaaaaattagccagacatggtggtgcacacctgtaatcccgggtacgtgggagggtgaggcaggagaatcgcttgaacccgggaggcagaggttgcagtgagccgagatagcaccattgcactccagcctgggcaacaagagtgaaactccgtctcaaaacaacaacaacaaaaactaaatataggcacaatgcccaagttttctgggaaagctcttaatgttcataacactcacagaagagagaagaggacagagaaggatcattggccattctaargaaaagaaagagatgatcatgtacatgaaaggta

SEQ ID NO: 71591 - DNA, 715 bp, Homo sapiens
cgtttagcagcttccttcttgccactcccagttcctgtgacctcctgggaatagaggaggcctcattccctgaatgccttttttacagaataaaagtggtggtgttttcagtttgggccagcatcatcctrataccaaagctgggcagagacacaaccaaaaaagagaattttagaccaatatccttgatgaacattgatgcaaaaatcctcaataaaatactggcaaaacgaatccagcagcacatcaaaaagcttatccaccatgatcaagtgggcttcatccctgggatgcaaggctggttcaatatatgcaaatcaataaatgtaatccagcatataaacagaaccaaagacaaaaaccacatgattatctcaatagatgcagaaacggcctttgacaaaattcaacaactcttcatgctaaaaactctcaataaattaggtattgatgggacgtatctcaaaatagtaagagctatctatgacaaacccacagccaatatcatagtgaatgggcaaaaactggaagcattccctttgaaaactggcccaagacagggatgccctctctcaccactcctattcaacatagtgttggaagttctggccagggcaattaggcaggagaaggaaataaagggtattcaattaggaaaagaggaagtcaaattgtccctgtttgcagatgacatgattgtatatctagaaaaccc

SEQ ID NO: 71592 - DNA, 715 bp, Homo sapiens
cgtttagcagcttccttcttgccactcccagttcctgtgacctcctgggaatagaggaggcctcattccctgaatgccttttttacagaataaaagtggtggtgttttcagtttgggccagcatcatcctgataccaaagctgggcagagacacaaccaaaaaagagaattttagaccaatatccttgatgaacattgatgcaaaaatcctcaataaaatactggcaaaacgaatccagcagcacatcaaaaagcttatccaccatgatcaagtgggcttcatccctgggatgcaaggctggttcaatatatgcaaatcaataaatgtaatccagcatataaacagaaccaaagacaaaaaccacatgattatctcaatagatgcagaaacggcctttgacaaaattcaacaactcttcatgctaaaaactctcaataaattaggtattgatgggacgtatctcaaaatagtaagagctatctatgacaaacccacagccaatatcatagtgaatgggcaaaaactggaagcattccctttgaaaactggcccaagacagggatgccctctctcaccactcctattcaacatagtgttggaagttctggccagggcaattaggcaggagaaggaaataaagggtattcaattaggaaaagaggaagtcaaattgtccctgtttgcagatgacatgattgtatwtctagaaaaccc

SEQ ID NO: 71593 - DNA, 740 bp, Homo sapiens
gagggagattgaattctttggtgaaaacagttcaatataatgcccatagactaatattaattactaattttaggcaaaatggcacaccaaattaattactgatgagctattttagtggaaatatgccaggaatcagattgtttgggggcaaagtggctctgtaataaatatttaacacactgtgggatattctggttgccctggtcagcctttcatttcctttgatccctggaaactattttttgttgcagtcaactgtaactgattgcagatggctatgttttttttttttttttgcaagccagccacttaatgtacagtttcccatttcttcacttgcttttcatctgactgtacctctaacacagaaagcaataagacatagtacctgagtttgttgccaggtgcaatctgctaatcatttaatgctttagatttgaatctaatctgcctgatgtttctaactatttatttaaaatcagacatttctgtagtgaaaaatcacttagaatctagtttataagcggtgagatactgtaagaacatttttccccattaacaagtatgttgttccatttaactacagtattttataaaccagtatcatgattgtttccttgaagtcttatctgaagtcttttcctaagttttctctttctactgaaaaayctgggatttcagaatagtggtatgagcttgataaataatgaattttagtctgaatcagagtttatcagcat

SEQ ID NO: 71594 - DNA, 740 bp, Homo sapiens
gagggagattgaattctttggtgaaaacagttcaatataatgcccatagactaatattaattactaattttaggcaaaatggcacaccaaattaattactgatgagctattttagtggaaatatgccaggaatcagattgtttgggggcaaagtggctctgtaataaatatttaacacactgtgggatattctggttgccctggtcagcctttcatttcctttgatccctggaaactattttttgttgcagtcaactgtaactgattgcagatggctatgttttttttttttttttgcaagccagccacttaatgtacagtttcccatttcttcacttgcttttcatctgactgtacctctaacacagaaagcaataagacatagtacctgagtttgttgccaggtgcaatctgctaatcatttaatgctttagatttgaatctaatctgcctgatgtttctaactatttatttaaaatcagacatttctgtagtgaaaaatcacttagaatctagtttataagcggtgagatactgtaagaacatttttccccattaacaagtatgttgttccatttaactacagtattttataaaccagtatcatgattgtttccttgaagtcttatctgaagtcttttcctaagttttctctttctactgaaaaacctgggatttcagaatagtrgtatgagcttgataaataatgaattttagtctgaatcagagtttatcagcat

SEQ ID NO: 71595 - DNA, 1314 bp, Homo sapiens
tttctatgaatgaatatatagatgtgttatacttcttaacaatatgattttgtctaagaactcttcaatgatgcttcagatttcagattatcttytgtgcttaacactactttcagcacatcttggattctttttccatacccatttgtccctcttatagttacagagtttctataaaaccatcatattagacacctattccttgatcttccaaactttctctttctaggacattttctccatttcccgaaatgcttaattatcacatagttgatatgcactttctggagcccttaattatcacacagttaatatgcaataggagataatttcatcaattccccattcctctagcagcctcatcctgttggtgtcctggagcaagcgctctacccaacgacttttcctggtttcctcaaggcttcaaagggcagcatttccaggcagtggcagagccagaatctaaacacagctacacatgaatttagagtgtaaacgctcaactatttacaatcctaccatctcttattctcatgtcttctggttttttttattttatttatttttatttttttttatttatggccgggcgcggtggctcacgcctgtaatcccagaactttgggaggccaaggagggcggatcacgaagtcaggagatcgagaccgtcccggctaacatggtgaaaccccgtctctactgaaaatacaaaaaaaaaaaaaaaaaaaaaaaaaaaattacctgtgcgttttggcgggcgcctgtagtcccagctactcgggaggctgaggcaggagaatggcgtgaacccgggaggcggagcttgcagtgagccgagatcgcgccaccgcactccagcctgggcgacagagcgagactccgtctcaaaacaacaaaacaaaacaaaaacaaaccaaaacaaaacaaaacatttatatctctcttatgttaaggataaaaattatttacattgattttttaaagcttaaataactaacaaaatttgttctaaacccatcacacacaggtgaaaatggaggcttagagcatttcaagggctcacaaacgacaaggttcgaaaataatttccataagaatatagatcagtacaaacgttgctaacaggtatgagaaggtgacgatcatgaagaaaaattatttttttcatagactattttaaacatatatgatatagaaaatatattccgaaaggaaaagtatgtgaataattacgctcattcacaaaacattttctacgcactttataaaaatcacaaaagtttgccacatacgtatttcatcatgtatgctttc

SEQ ID NO: 71596 - DNA, 1314 bp, Homo sapiens
tttctatgaatgaatatatagatgtgttatacttcttaacaatatgattttgtctaagaactcttcaatgatgcttcagatttcagattatcttttgtgcttaacactactttcagcacatcttggattctttttccatacccatttgtccctcttatagttacagagtttctataaaaccatcatattagacacctattccttgatcttccaaactttctctttctaggacattttctccatttcccgaaatgcttaattatcacatagttgatatgcactttctggagcccttaattatcacacagttaatatgcaataggagataatttcatcaattccccattcctctagcagcctcatcctgttggtgtcctggagcaagcgctctacccaacgacttttcctggtttcctcaaggcttcaaagggcagcatttccaggcagtggcagagccagaatctaaacacagctacacatgaatttagagtgtaaacgctcaactatttacaatcctaccatctcttattctcatgtcttctggttttttttattttatttatttttatttttttttatttatggccgggcgcggtggctcacgcctgtaatcccagaactttgggaggccaaggagggcggatcacgaagtcaggagatcgagaccgtcccggctaacatggtgaaaccccgtctctactgaaaatacaaaaaaaaaaaaaaaaaaaaaaaaaaaattacctgtgcgttttggcgggcgcctgtagtcccagctactcgggaggctgaggcaggagaatggcgtgaacccgggaggcggagcttgcagtgagccgagatcgcgccaccgcactccagcctgggcgacagagcgagactccgtctcaaaacaacaaaacaaaacaaaaacaaaccaaamcaaaacaaaacatttatatctctcttatgttaaggataaaaattatttacattgattttttaaagcttaaataactaacaaaatttgttctaaacccatcacacacaggtgaaaatggaggcttagagcatttcaagggctcacaaacgacaaggttcgaaaataatttccataagaatatagatcagtacaaacgttgctaacaggtatgagaaggtgacgatcatgaagaaaaattatttttttcatagactattttaaacatatatgatatagaaaatatattccgaaaggaaaagtatgtgaataattacgctcattcacaaaacattttctacgcactttataaaaatcacaaaagtttgccacatacgtatttcatcatgtatgctttc

SEQ ID NO: 71597 - DNA, 713 bp, Homo sapiens
ggatcccttgagcccaggattttcaaactagcctaggcaatakactgagagccccatctttaaaaaaaaaaaaaaaaaaaaggtaaaaaagaaggttcgagcaagccccaaggactccattgctatactaaacaccatcgatagaaaaacaaactcaagtatagtaaggatttgccaaaagacaaaatataaattgtcttactgtcctacattaaaattttcaaatatatgaatgcttggaatggacttgttctgttcatttcaaaatgactcctgtgtgtttcagttgacttgacacttcagattacagtaagtagaaaacaagagttccaagctaccttgagaagtcattgtatcctttccctgccctattattagtgtcctgctgtgctgaaaaagaacaaattggaaacaaacattacatactagtctatctttgtgcatatttaaacacaaattccatctctacgctatagaatacatcatatactgtttatgaaaaaatattcactgcagcaattatgccataaagaatatcccagggactgagggaaacaaagacaacattttgagcaaacatcttacttttatatatgagcttattcacatagtagaagaaggctcttggaagtcttacacaatttgctttaaaaatgttaaataacagttggcagatgaggcattatttacttgtttcttgttaatgttccatc

SEQ ID NO: 71598 - DNA, 1072 bp, Homo sapiens
tttttttctgtaagtaaaaaaaaaaaaaatctaaagacagataatcttttctccaactcaagtgctaccaaagcccaaatcaatattctgtaaattgataattattcattgtttctatgatttagactttgttagcaggcatattcaatgttcagtctcggagacgactttgtacaaagagagagaagatgatgggggaatggtagcaggcactgtgacccttccaggctggacaaggtttctcacggtgcaaataggagcctgaaggctgtggagacaactgcatatgaactttctgagggcaggaaattgcggcttacaaatatacttggcacctagaatgggttcagtgtgtgtttattgaaataaatggagacaataatgactcagcgaataaacctgtctaatctagggggtggggggataacaaacgcactactcccctcagccacagccaggtatggcagccttcgttgctgagaacgctaaaactctgccccagatctctaatcctgaccaaaacatcctatcttctcgacacacaaaaagatattattcaagtgtttgtttaggacatggtttagagacaatgtggctatgatttatgcagacaaaacctctgctcagcattttttgcattgatgtttcttgtaaatagcaataaataacaccagcaataattattaagtaagtgacagggaaatcttttctttatttacgaattcttggagtagagctctcccttagctccccaaagcaaacgtgatagactccaaatctgccacttacccttgcatgattgtttggtcactccctccccatttgtttttattttcccagctagtcagtcatgtgtaatgatgcttctctgcaacgatactgaccacttctctctggtgtgtaaaaaacaagccctgtcagtgacgggctgcaattgtgtctccttaaatcattctgaagggatcactgcatttggcaacaatcaaataaatactcagttgcttttattgtttgctagagcaaagtaatayctttaaatgagtgcatactgtagttaaggcattaaatgatg

SEQ ID NO: 71599 - DNA, 952 bp, Homo sapiens
gtataaacatttacacatatatagaattaagcagatttsatttcaaatccttgcttaattcctatataattgagcaagtgattttcccttattgagccccagtttcctcaactaaaaaatgggaatagtaacacgtctataaggttactgtgagacttagatgagataaaaacatgctaagtacttagttcagtgtctggttcagatactaagccatatacttgtcacaaagcagcaacaatatcagaagcagaggtggtcgtattattaacatttctctaccttctagccagcttttctttgcctggatacaatttcagaacagagaaatgcagggagagggcaagcaaatggatactagaaatagccagtgattgcaggaaggtgactgggacccggggcaaccttttagaatgagtaaagggatgtgacaactatgtggggactgaccttcggttggtgcttaatctcatgtctttagggtaaaaaacaaaaactaaaataatactaaacaatttaaaaagaaaaaagaattcccgcaaattaggtttgggggaaagtgaagacaaactagagaaataaatttggttgaaatcaacctttgctaaaagtaggctccagagatgaattggagaggaaatgtcacaagatgtgaatggacaatttgttgagcttgctttctagaaaaacagtaatttaacttcagataacttcactaaataaaatattgtattccttgaaactgaagtctttgaaagatatatatatatatatatatatatatatatatagcacttatgtagtgattttgctaaaacacaggaaagatgggacaaggtgaggtgtttctcacattgggtgattaggatcacctaatgcagcagttttctttttgctgataatattgttctcatttagaaaaaagattaatttcaaaagatcaggaaaatgg

SEQ ID NO: 71600 - DNA, 952 bp, Homo sapiens
gtataaacatttacacatatatagaattaagcagatttcatttcaaatccttgcttaattcctatataattgagcaagtgattttcccttattgagccccagtttcctcaactaaaaaatgggaatagtaacaygtctataaggttactgtgagacttagatgagataaaaacatgctaagtacttagttcagtgtctggttcagatactaagccatatacttgtcacaaagcagcaacaatatcagaagcagaggtggtcgtattattaacatttctctaccttctagccagcttttctttgcctggatacaatttcagaacagagaaatgcagggagagggcaagcaaatggatactagaaatagccagtgattgcaggaaggtgactgggacccggggcaaccttttagaatgagtaaagggatgtgacaactatgtggggactgaccttcggttggtgcttaatctcatgtctttagggtaaaaaacaaaaactaaaataatactaaacaatttaaaaagaaaaaagaattcccgcaaattaggtttgggggaaagtgaagacaaactagagaaataaatttggttgaaatcaacctttgctaaaagtaggctccagagatgaattggagaggaaatgtcacaagatgtgaatggacaatttgttgagcttgctttctagaaaaacagtaatttaacttcagataacttcactaaataaaatattgtattccttgaaactgaagtctttgaaagatatatatatatatatatatatatatatatatagcacttatgtagtgattttgctaaaacacaggaaagatgggacaaggtgaggtgtttctcacattgggtgattaggatcacctaatgcagcagttttctttttgctgataatattgttctcatttagaaaaaagattaatttcaaaagatcaggaaaatgg

SEQ ID NO: 71601 - DNA, 952 bp, Homo sapiens
gtataaacatttacacatatatagaattaagcagatttcatttcaaatccttgcttaattcctatataattgagcaagtgattttcccttattgagccccagtttcctcaactaaaaaatgggaatagtaacacgtctataaggttactgtgagacttagatgagataaaaacatgctaagtacttagttcagtgtctggttcagatactaagccatatacttgtcacaaagcagcaacaatatcagaagcagaggtggtcgtattattaacatttctctaccttctagccagcttttctttgcctggatacratttcagaacagagaaatgcagggagagggcaagcaaatggatactagaaatagccagtgattgcaggaaggtgactgggacccggggcaaccttttagaatgagtaaagggatgtgacaactatgtggggactgaccttcggttggtgcttaatctcatgtctttagggtaaaaaacaaaaactaaaataatactaaacaatttaaaaagaaaaaagaattcccgcaaattaggtttgggggaaagtgaagacaaactagagaaataaatttggttgaaatcaacctttgctaaaagtaggctccagagatgaattggagaggaaatgtcacaagatgtgaatggacaatttgttgagcttgctttctagaaaaacagtaatttaacttcagataacttcactaaataaaatattgtattccttgaaactgaagtctttgaaagatatatatatatatatatatatatatatatatagcacttatgtagtgattttgctaaaacacaggaaagatgggacaaggtgaggtgtttctcacattgggtgattaggatcacctaatgcagcagttttctttttgctgataatattgttctcatttagaaaaaagattaatttcaaaagatcaggaaaatgg

SEQ ID NO: 71602 - DNA, 952 bp, Homo sapiens
gtataaacatttacacatatatagaattaagcagatttcatttcaaatccttgcttaattcctatataattgagcaagtgattttcccttattgagccccagtttcctcaactaaaaaatgggaatagtaacacgtctataaggttactgtgagacttagatgagataaaaacatgctaagtacttagttcagtgtctggttcagatactaagccatatacttgtcacaaagcagcaacaatatcagaagcagaggtggtcgtattattaacatttctctaccttctagccagcttttctttgcctggatacaatttcagaacagagaaatgcagggagagggcaagcaaatggatactagaaatagccagtgattgcaggaaggtgactgggaccyggggcaaccttttagaatgagtaaagggatgtgacaactatgtggggactgaccttcggttggtgcttaatctcatgtctttagggtaaaaaacaaaaactaaaataatactaaacaatttaaaaagaaaaaagaattcccgcaaattaggtttgggggaaagtgaagacaaactagagaaataaatttggttgaaatcaacctttgctaaaagtaggctccagagatgaattggagaggaaatgtcacaagatgtgaatggacaatttgttgagcttgctttctagaaaaacagtaatttaacttcagataacttcactaaataaaatattgtattccttgaaactgaagtctttgaaagatatatatatatatatatatatatatatatatagcacttatgtagtgattttgctaaaacacaggaaagatgggacaaggtgaggtgtttctcacattgggtgattaggatcacctaatgcagcagttttctttttgctgataatattgttctcatttagaaaaaagattaatttcaaaagatcaggaaaatgg

SEQ ID NO: 71603 - DNA, 952 bp, Homo sapiens
gtataaacatttacacatatatagaattaagcagatttcatttcaaatccttgcttaattcctatataattgagcaagtgattttcccttattgagccccagtttcctcaactaaaaaatgggaatagtaacacgtctataaggttactgtgagacttagatgagataaaaacatgctaagtacttagttcagtgtctggttcagatactaagccatatacttgtcacaaagcagcaacaatatcagaagcagaggtggtcgtattattaacatttctctaccttctagccagcttttctttgcctggatacaatttcagaacagagaaatgcagggagagggcaagcaaatggatactagaaatagccagtgattgcaggaaggtgactgggacccggggcaacctyttagaatgagtaaagggatgtgacaactatgtggggactgaccttcggttggtgcttaatctcatgtctttagggtaaaaaacaaaaactaaaataatactaaacaatttaaaaagaaaaaagaattcccgcaaattaggtttgggggaaagtgaagacaaactagagaaataaatttggttgaaatcaacctttgctaaaagtaggctccagagatgaattggagaggaaatgtcacaagatgtgaatggacaatttgttgagcttgctttctagaaaaacagtaatttaacttcagataacttcactaaataaaatattgtattccttgaaactgaagtctttgaaagatatatatatatatatatatatatatatatatagcacttatgtagtgattttgctaaaacacaggaaagatgggacaaggtgaggtgtttctcacattgggtgattaggatcacctaatgcagcagttttctttttgctgataatattgttctcatttagaaaaaagattaatttcaaaagatcaggaaaatgg

SEQ ID NO: 71604 - DNA, 952 bp, Homo sapiens
gtataaacatttacacatatatagaattaagcagatttcatttcaaatccttgcttaattcctatataattgagcaagtgattttcccttattgagccccagtttcctcaactaaaaaatgggaatagtaacacgtctataaggttactgtgagacttagatgagataaaaacatgctaagtacttagttcagtgtctggttcagatactaagccatatacttgtcacaaagcagcaacaatatcagaagcagaggtggtcgtattattaacatttctctaccttctagccagcttttctttgcctggatacaatttcagaacagagaaatgcagggagagggcaagcaaatggatactagaaatagccagtgattgcaggaaggtgactgggacccggggcaaccttttagaatgagtaaagggatgtgacaactatgtggggactgaccttcggttggtgcttaatctyatgtctttagggtaaaaaacaaaaactaaaataatactaaacaatttaaaaagaaaaaagaattcccgcaaattaggtttgggggaaagtgaagacaaactagagaaataaatttggttgaaatcaacctttgctaaaagtaggctccagagatgaattggagaggaaatgtcacaagatgtgaatggacaatttgttgagcttgctttctagaaaaacagtaatttaacttcagataacttcactaaataaaatattgtattccttgaaactgaagtctttgaaagatatatatatatatatatatatatatatatatagcacttatgtagtgattttgctaaaacacaggaaagatgggacaaggtgaggtgtttctcacattgggtgattaggatcacctaatgcagcagttttctttttgctgataatattgttctcatttagaaaaaagattaatttcaaaagatcaggaaaatgg

SEQ ID NO: 71605 - DNA, 1871 bp, Homo sapiens
tgttattggaatagtcacttcctagacttccctgagtattgtttttcaactgtacaataaggagggtaaacgaaaatctagttattttcctcctagtattaaccatctgtgattctaaatcatttgttggcttttggtttttcccctatagctatcataggttgtatgggtaaatgtaattaacataataatgatcattgttaacactgtctgaggacttctaaatgcgagacaacttgttaagtgcctttacatggattttctaatttaatacacccaactaaccaaaagaaagtagtattacctccatttaaaagaaaaaaacaaaaacgaaaaccctgaaactgagaaatgtattcacttgctcaaggtcatataactaaaaagcagaattagggcatctgacccttaactacaatatactttacatgcagtatattctacagacattctacaacagtgaaacaaataatattcagcctggccccacacaaagttaattgattttaaactcctttcactgattggtcattagtgaaatraagtcatcattttaaattggccaactgtatatcaattgataaacagatttttttttaaaatctctaaatatcccataaaagaaagcctcgaatgacaagttgcctttgcaaggcataacattctgctaaggaaatattattccaactgctctcctattgcttcacgttctatcaacttaatggaagacaactctaagctgacagtctcaaaaatgtaattcacaaaatttaaaaaactttcctttttaaataagtctcacatgcacagattccacttgtgggctctgagtctcaaagctgttgggaacaccaggaggggcatgagatattgcaaatggcagggaacctatatttctaactggccactgaagctgtgtgttgggaaataaggcataggatcctgaataaaacctccaaacattatttctaaatggaaaccattctttttgactcagctgccattggaaggcagtaaggccctattttgatagtgtatcagtgaaggccttaaagttaattacagccttgtatttactctaactctattatatgatatttatagatgaaaagaagatgctttaatcactgagatagttataatgtgcacttatctcgttttattcacaccgtgggggaaaacatgtaattgtgtaaaaaaaaaaaaaatgaacaacttcatctattcttaaattccataacatgcattaagtgaatccaagttattgtagtaaccttgtatgtctagtgcactgtgctcctcatttttctaacatgaatcatatttaaaagacttccctattctgaaatggttaatttcaaattttctcaaggtattctcctctgagccccattaccaacacgattgtcactgcaacatggctttactgacacattggtgttaaaaggcagtgacagagccaacaggagtgaactgaagccatttatatacactgtagaactacactgacaatccaaaggaacacaccatctgcattctgtgttgctgcaacctactgaactgtgggtttgcaatttcaaaattcagagtgtcatgcccgattccactttagggagctcccacagctgctacttttgcttctctgccttcagaattctgatgctgaagttaatctatgaggacatccttgtgtagtgatggagacatggcggtagggcatgctagagtaccacatattttcatgcatttatttattcaagctgtgtggctttttatcccctcttccctttgcaacttatcaacctgaaccctcagacactcacacccacacaatgatctcagcaggcaaggaggaaaagcaaaagcaaatg

SEQ ID NO: 71606 - DNA, 570 bp, Homo sapiens
tagaagctgtttggagtattattgttctcataaccaaagggcttaggatttaaaggtcctgagattacagaagagaatatagaaactaaaagtataaaactcctagaagaaaatacagaaaatatcttcataaccttgagatatgcaaagatttcttataaagaacacagaacactccataaaaataattgataaattggacttcaccaaaataaaatcaaaccaacacacaagtttttagatgaaggcaggamacttgagtgattattaaatcagtaaaaggctattaaatgagtaaacatataacaactggtacaagcagatgagaagaaaacttaaggttggactatgattgaaaaaaaaagtcgttgctatgaatttatagacctgggattcaggtttaaactacttgctcaatgtggacacttctgaattttaaaaaataacattaaaagggcagtgataatcattataggatttgacagtagcaagtgcaaacctcctttgaatataaattatcacagataaaggacttctaaagaaaagcccacaaaacacaaagctgcagaa

SEQ ID NO: 71607 - DNA, 1403 bp, Homo sapiens
tgctcatcattatataatgcacaaggcacaacccacaacaaaaaattatttgcccctatatatcaatagtgctgagaaacagcatagatagcttgaagagtctggacttatttctttgggtagtgagtccttgactataggactgaaaaggcccaagtggccttccaggcttgacatctcacgtgaaccatcacctagttcctcaaagcagactcatcattccctccaaactgacccatttccagtgtttccttaaaaatctttcatcttcctgcccatctccagatctaacttcagcagtccacggagctgcctttgtcttctacctggagtattacaatgatctctcattaggcctgtcttcttccacgttgagtccccattaggaagctctagagaacttctggagaacagctggagaagttctcacaaaaaaagtaaatctgaccaaatcacttgatgcataaagctccccaaagtctttccactgtccgaactagaggacctggcatgatcttttgtgcctcaaatcttttccctctgtcttcctctctgtctttcatttcctttaaagtgctcctcttcttttcctctaggttatagagcacctatttctttgcctgtaaacttagctttggccccatcctacatttctcattcttttcatcctaataatgcctcttgatccttcagattccagcttaaacatcacttcctcagagaggactaagtcttaacatactactctgtattttctccttcctaatgcttctcatacttgtaattattagattaatatctatcttccttgatgaactgtcaactttatgtagatggtgactgtttctgtctaggtcagtgccatcctcaggaattagtaggagctcaataaatatttgttgaattaaccaaaaaataaacacagtcctggactatgtaggacacagagtagaacaagaaatattcaataaatgtttgttgaattaaccaaaaaataaacacagtcctggactgtgtaggacacagagcagaacaagaaatatgcttaattccccacccatggcatggtcccacatctcaaaatgtgtgtggcatgggtaggaatgagagtaacaacagaagtttctcatccaaggacaaggaatactaggtaaatgaagaattcaggcagatgaaagatttggataattaatggtgaacatctctgaaggaccatactataagctataatatcctgaacaaagcttttcctctcccttcagcttggcttgttaaaataagcactatttgctgattatgaactttccagccatgtagaatatagacagtatcatacaattmtttatacttgaacaggagaagatacagacaaggtacagaacattctcctgcaaagcagcaaa

SEQ ID NO: 71608 - DNA, 1577 bp, Homo sapiens
agttaccttgcatcagaagcaaagaagaattccacggccttgtcgcccacagcatgcaggcaggcggagctgtccagcctcttcatccgtgtcttacagatattcttcacattctccagagtgcctagcaaatggaggaatgggttgcaaatcccactgggatgttttgtttgcataatatgcagcaaggaaccaatttcccctctgartatgtgtgggagaaatttgcaatttttagctttggctgtgtcagccaaatcgtgtaaaagatcccccaatagcacagtaccactgcaaaagcatttaaatggctacagtgtgagaggaatgcaaacaaaaacaaaccaaagaagcactcacatcaaagcccagttgccgttatacaatggcacttttgtgtatgtttgacaatatacaaaatcatgataaattcatgtccatgataaaaagcttaaaaaaaatggagccaagtctcagttgcacaaaaaccttttagacctggagctgtgcgcctgttgggtctggctcagagtggggtttccttgcctcagaggggagctgactgtgccagagcagctgccgagtcctgcgacaccagcagctgtgctgttccggtacttcttgagaaacttacacgtcctgtataagatagggatctgttctgtggagagcttgtatttgctccggactccgatgagcagggggctgcctctcctgtagggagaaagaggcatcccattacccattgcctttgacgcccagtgctgggtgtctgcccagcatctgaggtaggatccccaaatctagccctttcccagtggtggaggatcctgtttaggtcccacaggacggacgcctggagcacaggatggaaaggccagctcctgagtcccaggtccctgacttggcatcacccacctgcccagaaagcttggtaacctgtctcactcccaccctcctaggccgggcctcctccagtccagtcaagtccccacatgtgaccaacccacaaggttagatggcggaggctgagcgtttggcagcagaggaggcgctggtggggcacaggggcactctaggtctccacccagcctcgacggcagcgcatccctataacaatagggctctgcacccaccatctgcccaaagaccccctgttgttccttcccttcccctagcccagttctctagcattagtgggcactagtctgactgacttttgtatattctctactttgtaggtgacataaggtgatttcttgggtggttttttgtctctgccaaagtgacaccccgtggatggaagtttagaatcttcaccccgcaccaggtagacttcatcataaagaggacaataactgtcacaggcaaaatctcagggagtctgcagctggccaaggtgaggggccctcactcaggcctcctgtcccagcgtcactgtctcagccactgcagcccggctctctgagcacctcagcaggggatctttaggaaagagctttaggatatttcctctgattcacaacttctagtggtggacgtgatgaagatctcatgatttggctgggcgcacagtg

SEQ ID NO: 71609 - DNA, 737 bp, Homo sapiens
ggttgtggcttggtcaagatttaattcatctgtaagcagttctcaggcccacaaggccgcgttgctgtactaggtgctgcaagctactgggatggacccatcggggggcctcactgagcgctccagggaaggacagggatgcacagggacctcccaagcccacaggggaggtgggaaagggcttcccgctggggtgggagtaggcagctctttgcaaggctggctcttgctagctcttcgcaaaggcgcctctgacccattctgcaggttttagcagatctttcccaccaccttctccagccacatagccctggttattccacgctgcacttgcttccttgtctttttcttcggctccccgctggattgtaacsttctggaggatgggaccacatctgtctcatccattgctgagtccccagcacctggcccagggcctggcacatcttaggtgctcaataaatccatgttgagtgaatgaatgaacagatggaggaatgccagagaaggtagcctttgagctgggtctgagacagccacgttcagccaagcataagcagctccgctcactgggacccacagcaaggacaagagggacacagaggcaggaggtccctgagtgccagacccttacaatgggagcacggtgccaccagaactctcggttaaccccaagataatcaaacacagaggcttacatccccccgcacaacacccccggccccatgcaccatgag

SEQ ID NO: 71610 - DNA, 750 bp, Homo sapiens
tgtttctgatgagtagacaactaagagtgggaacgtatccattgtatttcagtagataatgtcaaactctttgccaragcgtttctacaaatttgtacagctgccagcagtgcacgaggggtcacatctgagagctgcctctgcgtggttccagtacacgaggggtcacatctgagagctgcctctgggtggttccacatcctcaccagcacttggtatcaccaacagcttagtttctaaccattctgctgagtgtggaatggtatttcgtcgcagttttaaattgcactatcttgatgaataacggcattgagcacttttcctgtttataggttatttgggtatcctcctgtgacaacctattgactatttgtttgtctatctttataatcttcttgactgttgttctttacatattctgaacaagagattttttttcagtcatatatcttctcacatctatgcttatcttttcagtttcttgatcttggttttttaaaataaacaacatttcttaattttaatacaaaattgatcaatcttctatgataatttttttttttcttaaagtggagatggggggagtctcattatgttggccaggctggtcttgaactcctggcctcaagcgatcctcccaccttggcctcccaaagtgctggaattataggcatgagccaccacatccagcagataaatgtttttttatgttgtgtttaaaggagtccttccctaccccaaagatcatga

SEQ ID NO: 71611 - DNA, 854 bp, Homo sapiens
atttactgggcacccactgtgtaattagtatcccaaaaaataatgaatgaaatgacatgatatttaggatttgcttgaaaataattatgggtggtaagggtgcaagtggataccattagagatgaaacaagattggtcaggagttmataactgttaaagcaggacactattctgtttattttgtatatgtttgaaagttcccataataaaagttaaaataaaaagaatgatgttgaaactggttcatacaatcaagtacaaagtatcaggaattaattattctgaaggaaaattatgtaaaaatggcaccttcctaaccaagtgtgaggtgtaactactgtatgtatgtagaccaaaaatagttgccctattggcaaatcaatagtctcaagaagaaaaaaaatctggtctctgttttatcttatgcctcatgaaaacaactggtttactcgctattaactggtttgtctggtccttttctttatccagaaaattaagaatattttatcttagacacattcaagtatcccctctgttgtttatttacgggaccaaataaacagattttaatctgtgaacaaattaaagtcctggcaccctgaaaattaaattgccaggaaaatcaaagctgtcaaaagagaagtctatgcaaaaatagtattgtttttaactctgcaggatccttttgaagaaaaaaaaaagttaaatggaggaaaacattaaatagattggtggtcattcttccagaacaagttaaaagccaaaagagaatactcagagctgagggacccaggaaagaatccttatctgggaagtgatctgggttcgaactccactcaccagctgcttgctaa

SEQ ID NO: 71612 - DNA, 854 bp, Homo sapiens
atttactgggcacccactgtgtaattagtatcccaaaaaataatgaatgaaatgacatgatatttaggatttgcttgaaaataattatgggtggtaagggtgcaagtggataccattagagatgaaacaagattggtcaggagttaataactgttaaagcaggacactattctgtttattttgtatatgtttgaaagttcccataataaaagttaaaataaaaagaatgatgttgaaactggttcatacaatcaagtacaaagtatcaggaattaattattctgaaggaaaattatgtaaaaatggcaccttcctaaccaagtgtgaggtgtaactactgtatgtatgtagaccaaaaatagttgccctattggcaaatcaatagtctcaagaagaaaaaaaatctggtctctgttttatcttatgcctcatgaaaacaactggtttactcgctattaactggtttgtctggtccttttctttatccagaaaattaagaatattttatcttagacacattcaagtatcccctctgttgtttatttacgggaccaaataaacagattttaatctgtgaacaaattaaagtcctggcaccctgaaaattaaattrccaggaaaatcaaagctgtcaaaagagaagtctatgcaaaaatagtattgtttttaactctgcaggatccttttgaagaaaaaaaaaagttaaatggaggaaaacattaaatagattggtggtcattcttccagaacaagttaaaagccaaaagagaatactcagagctgagggacccaggaaagaatccttatctgggaagtgatctgggttcgaactccactcaccagctgcttgctaa

SEQ ID NO: 71613 - DNA, 1498 bp, Homo sapiens
tccagcatggtgtcccccttggccaccagagggagttttctaaatttgagcatggctcatcgctgcttgaaattctacgtcacagtgtggcctgcattgaggagggcccacacctgtcgctacctcagactcacctgccacctgcctcaagtgcatgagagagaacaggaaaccagaaattgtcaggatcraggattatgggaaaagagtaaaagcctagctgtcagatctgaggttccaccaaggagcactgatgggtgcttctcattaggaaggcggtgcggtggctcacacctgtaatcccagtactttgggacgccgaggtgagtggatcacctgaggccaggagttcgagaccagcctggccaacatggtgaaacgtcatctctattagaaatacaaacattagctgggcgtggtgatgggtgcttgtaattccagctattcaggaaaccaaggcaggagaataacttgaatccacgaggcagaggttgcagtgagccgagattgctccactgcactccagcctgggcaacagagcaaaaactgcatctcaaaaaaataaaaacaaaaaaacagaggggacaccagttcccagcactccaggcctaacttcatagcactcacatcatgtcaagtgagtaaccaaaaatcagtgtacatatgtacacagctatacatatctcacactaagttttctgtaagagttctttttattgcagagacactgctttttttctggtttatgaaatacagtgaacatttatggacacaaagctgaggtgacagggtggggaggggggccttggaacagcaccaagaatcctggttgaaccctccaagtgaaaagatcctgccacgacatacgtgaaccaggtgtgacacgtgagcacgtctcacctgatccggcctatggtggggagaagcaattgaggaaggccttctgggcaggaggaagttgttgctgaggctgccgagcaggatgtgttgggcctgtgacttaggcagaaagggcgctcaggcccacatgctcagatgtgaggacctgcttgctgtgttcagggagccacaagtcacctggtcttagggaaaggtgaggggactggagagttctgaggaccttgaggtagattggcactgccaggcatgtaggctggctttagctcactgatacgccttgttcagcccagagaggttttctttttttaattgattagttgatttaagaaacatttagatttgggatgagctgttttggatgtttatcctcaatgaaactcatgttcaaacttaatctccaatgtggcagtactgagaggtggggcctctaagcgtggttgggattaacctgtcgatggattcatggattaaagggttatcaccggagtgggactggtgacttcattagaagaggaaggaagacctgagctggcctgtgaatatgctccgccccctggccatgtgacacctgcgccaccctcaggactctgcagagtcc

SEQ ID NO: 71614 - DNA, 325 bp, Homo sapiens
ccaccaattagtctcctttctttgtttcattgtatattacagtgtaataaaaatwaaaaaaaaaagtgcacattaaatgtaacatgcttgaaccatcccaaaaccatccaccaccccacctccagtccatgaaaaaaattgtcttccacagaacctgtccctggtgccaaaaagactggggactgctggtttaagccactcagtctttggtattttgttgtaacaccctgaaaaaacaaaaagcccaagccaactaagacatatctacatacattaatttcaaggaatgctcccatgaaaaggaaaactggggtatcatatatat

SEQ ID NO: 71615 - DNA, 325 bp, Homo sapiens
ccaccaattagtctcctttctttgtttcattgtatattacagtgtaataaaaataaaaaaaaaaagtgcacattaaatgtaacatgcttgaaccatcccaaaaccatccaccaccccacctccagtccatgaaaaaaattgtcttccacagaacctgtccctggtgccaaaaagactggggactgctggtttaagccactcagtctttggtattttgttgtaacaccctgaaaaaacaaaaagcccaagccaactaagacatatctacatacattaatttcaaggaatgctyccatgaaaaggaaaactggggtatcatatatat

SEQ ID NO: 71616 - DNA, 937 bp, Homo sapiens
gcagctcctgtgtctagattgatcccaggttgcaatgaacactawtctgccacaacaactatccactctgaattttcttagccctcagctataaccttggctgagggctagttcttagctggtaggataaaaatcttcatactaaggggcctgaaccactagtaagctctagcttttcaaggtaggttgttgaattagttacagtgggtcaagggagtaccaggagatgcccaagtagatgacccaggtttcattcatacatgttaatgtacaaaccacctcctgttaccccacaaggataactcagtgaacccagtggctcacagggaatgatggaaagtatgactaaccttcttagtttctgcatccatgtagtcttcctataggggatacagtattacacagatgcctctaacacactgcctcataaaggatggtgtcccaaaatgtcagcatgtttacttggagtccatgcttctgtttcctgaaggctgtgtcaccattctgagactccctgcctctaaatggttttgtgatatggccggtagaccttgtgatctggggcctgtctatcttttgtgacctcaatccagtggtaacacactttgctgtatggggctccatacctgtggatgaagcacaggagtccccggagtgggaggtagctgagacttcataagcaggagagacaaacccatatcaacatgagatatctattcctgtgaacatgaacttctggctttcccagaacgggaaggggcttaatgtagtcaacttgctaccatgtagtgagttggtctccttatactgatacattgagattcaatgtctgacaagtgggtctttcagaagaaatggtaaccagaatttctctaggaaatggcagtccatgttgggcacacatgttatcttccatgtctgctaccgtggctacaat

SEQ ID NO: 71617 - DNA, 1563 bp, Homo sapiens
catggggttgaaggaaattggctcctgaaattactcctgatcccagttgcaccgagcactgggaaacttggactacttaaatgcctgaattgcgtgagttgtaggtttcaactcagcaagtctttggtaaggctggtcaagtggtcttctgtctggctaaaaaacttgttggaaattcagtggagtcacttattcctggacatattgtaggataagttaatagggttgcttctttggtatgagtgtcgaaaaagataatctcaggtacttgaggatacctgtttccttagctgcctgagaggctgttgcttatgtgatatacccctttcatgagttgctcagatcagaaagtggatctttgttttttgactaggcatcccaaggctgtgtagctagatacattttgtagtcccccaaatttttcttatcagggagtccacgttgtgaggtctcaagggacaataacaagccaaagcaggacctgaatgttaagagggaactccttagcgagtaggttgaccaaaactcagatagcctagttgatcgtacactgtcagcaccttacctaggacacttgtcaggtacttcaatattgatgcccacrttggcagctacacacactctgacatccttagggagaaatcgaccattccccatagatctgactccagcttaaggtatgccatgtcccgacccttctctcctgactacagtgactagttcagggatgggcatgccgctgaaaccctagaagatattgctagaactgatgtttccagaagagcatttggaagggaaaaaaacttgaatgattagtgcaaagcatttgtcatgaagggagtgcctagaacttcccatccagagggtggtggggttgagagtttaatctgataccatggagggtagaagagacaaaggaagtcttactcctggtgcacctgagcctgttgaatcagtctcacttggagccaacagtgtttagactttgcagttcgtgagctaatgaatttccttgttactaggccaatgcagttggtgggattctggatcacttgtgatcaaaagaatcctaatacttgcagcccaatggagtgtaaccaaggatgtggatattagaataaactgggttttctctcacttgcaaagttaaaaccaacctgctagttaacaagcttggagttaggagtactgaatagtgtctaaggcttatcagattaaatacttcagaatagggaagggagaagtaagccttcaggagaactagaaaggctgtgccagagcccatgtaacatggacatcatgctgaattatggctgacctgcttctaattcagcagccttatgtgccgctcgtataaagataaggtgatatgttaagcttctgttgctcaagacattcttttaaagtcaggtagcccccaccacttctggaacttctgtgcaggaatgactaaagttgaaacaacaaagctttaaatggaaacactgtaaagggatgaactagctgatgggtgtcatgtctataacacgagccctcatgctagcatgggtgatacaattgcca

SEQ ID NO: 71618 - DNA, 1246 bp, Homo sapiens
acacaagttctatgcaagtgagccttcctaggcctctcaggctcacttagtgtttctcttaatgtgaagaatattggttatacagcatagtaaacaatgaatatgagatgtggggacacagcagagcacacggcagctcactgattttcttccctgcacttgtgtgcagctgaatctgctggtaaacacccaaagggtcatctcggtgtattttctatttgtgtagtgtcagatctaaaaaatcttgccgaagataatgaatgagcagatggtaacttcagatagcaaaggaagtctatggcacttgggttcattacackggacattacatcaactggaaaatgctgtctggagcatttaaacagtgtattatactagtcaaggcagttctcagagttttgtctaagacttccttggggttatggtccctgttaccatatgttgaacttacaggcaaacaactacataaggtaattaagctcaagttttggtctaggtttaaaagtgagttctgacttggcaaagtgtgttttttttttttatcttacaggtacatattctgcttacgtaaatttaacattgttttttaaggtctcatggattatgcagcatcactttctagcactcttctttgaggactccactggtgtagagatgaatatctcatcctccacttcccactactagttgagtggctcagtgtggatcctccttggcatcactgcatgtacaaagccagttcttggactctatataggccattgagcccatagtgaatggtactttataattcaaggaggtaaaacaaactctggtttctcagatgtgtatgtattaggttggataaatgaaccaggcaggaaatgttcttggaaaagagccatacactaggcaagaaaccatctagaggtaagatcactggaatctagtgctataataggcgggagagttagggtgtaactacagaaacaagaggaattcataaccatgacgtgtcaggggtgccagcatagggcagaacatgccacttgaatgttccagagttgaagaagactacatgtttaggcatcccaggcataggagagaagactcatactcttcaaagccattttgcctgtgttgcaggttgggctgtttagaaacaggttgaagtggaatttggcatgaagtatggtatttagagatcaaattgtgtctaagagatgggaaagcaggatagggctaactgtagtgtggggcccagaag

SEQ ID NO: 71619 - DNA, 663 bp, Homo sapiens
aggtgttagaccaggtctagttatctctgtgggtacataggtttatggggtacatgagatactttgatacaggcatgcaatagataatgatatagtggtaaatgggatatccattccctcatttatcctttgtgtttaaaaacaatccagttacactcctagtataacacgtacaactactgactatagtcaccctgttgtgttatcaaataccaggtctcattctaactttttayaccaattaaccatccccactacctttcccagcctctaaccatctaactttctccatgagttcaattgttttaattcttggctctcacaaataagaacatgtgaaatttgtctttctgtgcctggcttacttgactaagggttatattcatgttgcaagtgacaggatctcatttcatggctgaatagtgctctattgtatatgtactccattttcttaatttggactaggtttagaatgtagttctgactttgtctagtgtctaaaaataccactaaattcacaaaagcagaaagtgaatcaaactcaagtactgaggaagatgtagcagtactgagttccaatcatttctctctgagcaccttcgagaagggtaggtgggaagatggatatcttgtatccattattttggaagctcagcattagga

SEQ ID NO: 71620 - DNA, 663 bp, Homo sapiens
aggtgttagaccaggtctagttatctctgtgggtacataggtttatggggtacatgagatactttgatacaggcatgcaatagataatgatatagtggtaaatgggatatccattccctcatttatcctttgtgtttaaaaacaatccagttacactcctagtataacacgtacaactactgactatagtcaccctgttgtgttatcaaataccaggtctcattctaactttttacaccaattaaccatccccactacctttcccagcctctaaccatctaactttctccatgagttcaattgttttaattcttggctctcacaaataagaacatgtgaaatttgtctttctgtgcctggcttacttgactaagggttatattcatgttgcaagtgacaggatctcatttcatggctgaatagtgctctattgtatatgtactccattttcttaatttggactaggtttagaatgtagttctgactttgtctagtgtctaaarataccactaaattcacaaaagcagaaagtgaatcaaactcaagtactgaggaagatgtagcagtactgagttccaatcatttctctctgagcaccttcgagaagggtaggtgggaagatggatatcttgtatccattattttggaagctcagcattagga

SEQ ID NO: 71621 - DNA, 697 bp, Homo sapiens
gctctgcctcttaggagctatgtaaatgtgggcaacgttttaccctacctaggcctgagtttcctcctctatcaaatgaggatgctaccacaatttcacaggactgccatgagggtcagctgtggtcagagagatgaagcccttggcacaggcttgacacatcgtgagtgctcaatgaatggctgtcacatttggagactgtagggtgagggtctcaggttccttcctaccctcccacctgcccaggctatctgcagttgagactccagtggctgagagggtggccagtgtggcttgggctctcccagaagggcaggactagactcagaggggagcgcttgtgacctttgatgactatttgtcctaggagaccctgtgtccccggatagattgtgagctctgagagggcagagactgtgtcctacccagccctgtgtgcctccagagcacatttctcaaccttggcatttggggctggataattctttgttgcgcaagcttatcctttgcactgaggttgtttaacagcatccctgttctstccccaccagatgctggtagcaacaatctccaagttgtgatgaccaaaaatgtgtctggatattgccaaatatcctccggggcgggggaaggcgggggaaatcacccccaactgggaaataccatcctagagccagacaagggcagatgctaataa

SEQ ID NO: 71622 - DNA, 1127 bp, Homo sapiens
cggacatatgaatgaatcaggccactccttctcactcctcggcttttctataggtgatttcctccacccaaacactgtccccagaccctcttcacctggctcttccccttcctccttgggtctcaccgtgtatctccaaagagtctccccttggtctgggctagggcatctctgtgtgcttttatatatgctttctatgtggcacagccwgttctccccagcacaggactgctcccttctggaaactggtctatacccttctgcgctgtggccttcatcaggggcttcctcacagggtctgcacccagaaggcacttaacacaaatatgctgcataaatgagtaggcagagcaggaatgtgtccttttcccatttaacaggtgatgaaaccgagaaatggctatgaaatagcagggattggatgctcatattctggttcctagtccacaaccccagactgactttccaagttcacaagagcagacatctccatatacaggagaccacgctcacgttcagacccccacactctcagacacacagacccacaagcacagcagctaccagcaaaagccgcctttcacttgtgcgacgctcctggctcaggggaatccccagctcatccaatccacccatcaggatgcgagccaggagagtccccgcctggcaccccaaggccatgccctccagccaggggccaagaagccacttactcatcatctcccccagacagcttcagcagagtcttcttgtactcgccagaggtgtcattctgaagagaaagaaagaaaggttacctctcacccagccctgggctcctctcagacaaggaggtgaaggttctgcacagcctgaaagaggggaaggctgaatgaacacttattcatagcagccctggccctcctgtgctggttaatattgaataactggttctcagcgggcaggttggaggaagccctaatttatagcatttgcctatttctgtggtgtaaatacttctagcaatggacaatttcaagttaccaatatgactttgctaccaatatgcggagttgagaagagatgctcgctgccctttcaagccagtgccccagcacagcactgccaccagacagtccccagcccag

SEQ ID NO: 71623 - DNA, 863 bp, Homo sapiens
ctcatctgcattttacaagggagaaactgaggctcagggcggttaagtaactcagccacgatgacccggccgcaataagagccaagatgcaaagtcagccctgcctgctgtgactctgacccccaccatactcacacagccaggacacagagscagaggggcagacagggagttcaaatctctttgtagggcagcaccatgctatcaggtcacctctgggcagtttcccttgccctgcagcataagaaccaataaggacttgtccaagagcgtccataggatggaatgggccagaaagaaaaacaaagttctgatgagaaggaccccttctcccaaagactgacagatacaagatgaatacaccgtgtgggaggcacccacgccctgctgagcctgcgaggcaaaggacagctacccacactcccatcacaagtcatcacccggcttaggggtgacttgtttttaacctgaaaggtcagtgttctacagcatagcacaaagtgcagatgtttccaccgaactaagaaacagtgtgggggctgcacttagcactggaactggcacatagtaaagtactcaaaaatgttggcagacattgggggtccttcccctctgcttgcctctgtcctcacgaggcttgccacctggtacagcatgtgtctgactggtgcgggcattgcccatctggctgggaacttcctgaggcaggagcgtactttgcacatctttgtattcctgtcgggagcacaggagggtgggccttccttgagagctgcttggagttcaagaacagtgaaacagagggctacaaggggcctggagccaccttgcatgacaaaggcagcagtgtcctggttcttgtc

SEQ ID NO: 71624 - DNA, 863 bp, Homo sapiens
ctcatctgcattttacaagggagaaactgaggctcagggcggttaagtaactcagccacgatgacccggccgcaataagagccaagatgcaaagtcagccctgcctgctgtgactctgacccccaccatactcacacagccaggacacagagccagaggggcagacagggagttcaaatctctttgtagggcagcaccatgctatcaggtcacctctgggcagtttcccttgccctgcagcataagaaccaataaggacttgtccaagagcgtccataggatggaatgggccagaaagaaaaacaaagttctgatgagaaggaccccttctcccaaagactgacagatacaagatgaatacaccgtgtgggaggcacccacgccctgctgagcctgcgaggcaaaggacagctacccacactcccatcacaagtcatcacccggcttaggggtgacttgtttttaacctgaaaggtcagtgttctacagcatagcacaaagygcagatgtttccaccgaactaagaaacagtgtgggggctgcacttagcactggaactggcacatagtaaagtactcaaaaatgttggcagacattgggggtccttcccctctgcttgcctctgtcctcacgaggcttgccacctggtacagcatgtgtctgactggtgcgggcattgcccatctggctgggaacttcctgaggcaggagcgtactttgcacatctttgtattcctgtcgggagcacaggagggtgggccttccttgagagctgcttggagttcaagaacagtgaaacagagggctacaaggggcctggagccaccttgcatgacaaaggcagcagtgtcctggttcttgtc

SEQ ID NO: 71625 - DNA, 537 bp, Homo sapiens
atattgggtccttctacctaactccatgatctcatatgatctcaatttaaagttgatctgcattaaaagctcatgaaatactgtaatctgaagttaagaaagaactactcacatatccacacatccatccatccatccatcctccatccttcttggctcttctgctcatggaagtccccttatcacacagccttgtcttaaggcatttctctggcaagcatgtaaaacwtcatcatagatttgaacatgacattaaaaagcaatgcatttctgaacaatttcccaagtgatttccccaaaggagctatacattataagtcttgcaagagtgacatgttataatgaaagcagttattttagaaagatatctttgccagtgggaatggactagattgaaacagagagactctgaaatccgaaatctgctgaagtccagacatgaagtattttagggactggaagtgctggacatagaggaaaaagaatgaaacctagaggtatttttgaaggaagtaataacagtacatgttgataaat

SEQ ID NO: 71626 - DNA, 1376 bp, Homo sapiens
ataaacagcactttagtaaaacctcggccgggcgcggtggctcacgccggcaatcccagcactttgggaggccgaggcgggcggatcgtgaggtcaggagatctagaccatcctggctaacacagtgaaacccctgtctctactgaaaatacaaaaaaaattagccagcatgctggtgggcgcctgtagtcccagctactcgggaggctgaggcaggagaatggagtgaacccgggaggcggagcttgcagtgagccaagatcgtgccactgcactccagcctgggcagcagagcgagaccccgtctcaaaaaaaaaaaaaaaaagaaaaaacaaaaacaaaaaaagaaaaacttctgaagaaatggccccaaagtcttcggttactgcgcgtgttcttagtaactacgctatattatggaaaaaatcccccagaaaacattcaagggaaatgaaactgaggacaattagcaccaaaaagacatcccaagtatttttctacaaagtaattcttcatattgtcagcttgttaaatgacctgaagttccagggtatacaccaaaccacagactttcttctgaagccaaaactcaaagggcagttattatcatgcatatcaacgttacaatttttatgatctgattctcatattaaatagatggtgctacctaaatacagtcctgatttataattaccagtctagagaatattaattacaatataagtttttgaataatcacatttttctattttctgaaaatagtagtccaatcatgaaagattaatcctttcattcatgtacattaattttagttatttaaacattatactgagtcttctttttctcataatagaaaagtaaaacttcataatactgtttctaagatttttatcagacttggtgccatagcttgcacctgtaatcttagcactttgggagactgaggcagaaggcttgcttgagccagtttaggaccagccagggcaatatggtgagaccccatatctacaaaaaaaagtgggcctggtggctcacacctgtactcccaattactgggaaggtccaggtggtgggaggaacactagagcgcaggagtttgaggctgcaatgagctatgatcacaccattgcactccagcctgggcaacagagcgagactctgtcaaaaaaataaaaaayaaaaagatttttatcatgaaatactgaaatacttagttgaaataatatctaaatgactatttcaattacatttcaggaaataaataataaatatgagactataaaatgttagaaataccttttatttaaaatttatttatttgattttaatttcccaagggcttgattttattttattatttttcatcaacaataaaa

SEQ ID NO: 71627 - DNA, 1123 bp, Homo sapiens
gttaataaattcttactgagcactgcagcagatgctattgctggctccccagacctcctggggtccttttattttttttaccatttctgggctctttctacttgagtgcacttttgcctccaactcctgtacctgtaactgttctgtagagaagtttccatgagctactgaagttgctttgcatgcaatagcagaaagcagagactctgaagtaccaggagtttgtccctatgttagttttctattgctacattgacaaattatcacaaacttagtggcttaaaacaatgaaaatttattaccttacaggtctctataggtcagaagtcagacatggttctcactggatattgccagattatgttcctttctggaggttataggggagagagttcatttccttgccttttccagcttctaaagacttcccacatttcttgatttatggctctcatcctccagtttcaaagtcagcagtgtcacttatatctatctgatgccagctaggaaagattctccacttttgagaactcatgtaactagattgagcccatttggataatctggaataatttccctatctagaagtctgtacccttaattacatctgcaaagtttcctttgccatgtaaggtaatatattcacagattccagggataatggcatggataactttgggggccactattctgcccaccacagtccccaatggtggcccatagtcaatgactgacaggtacagaggtgtgaaaactacctctcctgtcagactgctctgagaggtaatttaccctccagaaacccctgaagggtcacactgcctcccctggagtttgtctgaatctcacccttgcttgatttcttctgctttctcattctgctttccctgattmtttacaagtttctcctgggaaaactcttaattcattatttgcacacacattcttttctcagaatttgtttctagagaaccctacctaagacaagagctttacatatgccaggcagtatgctaggcactggagcaaacaaatggtggctccaagactcttatgtaccattaaacaggacacttacgtgtactactactgctaaaatgcttaccacttactgagctctttc

SEQ ID NO: 71628 - DNA, 749 bp, Homo sapiens
gtagcacaactacacttgtgcccatatattcataaaaataaaacatttaatttctttaagagttcctgtcatacaagacaaacaagttgttctaaattaaagaagagtaaagagactaaagaaaactaaatggatatcacaagcaaatgcaatacatgaaacttgttggttttttttttttwaaaaagctttcatttgagggacaatttattataatttgaaaaatatttgggggacaattgaaaactcaatatgcactttatattagatattatagaatattgtgacacttttaaattcttagaagttaaaatggtattgtggtaatgtaggaaaatgtctttattcttaggcaataaatactgaaatattaagaggcagagtgacatcatgttgcaatttgctttcaaatggctcaataaaagggaaattggagagaagctttattacatggatagatagataatagatagatagcatataaatgttataaaatattagcaattggtgaatctagatgaagggtatgtgggtgtttattgtgctattctttcaacatatctgcaggcttgggatttttcaaaacaaacggttagggaagacaaaagagagagactagtgtcactaaccaaaatagtctgaataattctgacctcagagtcacttcccacatcagggggacatttgccacactattcaccctggaagtctattagcagtgttagaagcaggaatcataagtcagactg

SEQ ID NO: 71629 - DNA, 737 bp, Homo sapiens
tcctaaaaaattcaagatgttacttttgtacttatttctagaaagaagtatctcatttaagaacaagagaatggacatgagaatactagcagagataaaggatgtccatgtgacttgagtttaagatcaatacagcaggcaaagtctggaagaaaaggtcttaggaaaggtgcatgtggcccaagctgaaggcatttgctgatgaaatcttagccagagctctgtgtggcattccaaggagtagtatctggctctccagcaaagaggatagggaggagtgaggacactatccttcctatctacaaagccaccatggaaacagtcttcagataatcagagcacagaaatcaaggacattttgtctttctttggytgagacttaaaggtgagtctttagattcatctaaaacagatgaatctaaaacacctgccagaagttcaactatttggacgtacatggttaaaacttatgactgtaactgtcacccgtggccttaccaaaataatttggcacttacttttacttcaacttgaggtaaaaggaaatggtttctaaatctgtagtgctgggtttttgctttgttttattttgttttcaaataaactccaggagagagaataaatgctgaagacttccatataaatcatttcccttatgtttacatttaactgcctggctacattcatctaatgagtttagtctgttttctctttgcaagctcagcatggttataaat

SEQ ID NO: 71630 - DNA, 637 bp, Homo sapiens
ggtaactgaaatagccatcacctcaaacaattattatttgtttgtgcttggattattccagagcttcttttccaactattttgaaatatacaactgtagtcaccctactgtgygatcaaacattagaacttactctttctatctaactgtatgtttgtacccattaaccaacttctcttcatacccccccagcctaccccccacacacttttcccagcctctggtagccagcattttaccctccacctccatgaaattacctactttagctcccacataggtgtgagaatgtgcaatattagtctttctgtgcctggcttatttcacttaacataatgacctctagttccttccatgtcactgcaaataacaggacagtaaaagtcaattgtgagatatttgctggaagtatgacaacagtattctactttatggtcagttttatgtaatcaacaagtcttaaattcgatatagtaacattgtttctctcatcagttgtttagatctcctttgtataagtttaaggaaatacatttttaaatgttttgtgatagaaacaaaaagagtttttcacatttgtgtctcagtgaaaatcatgctaattcagtatatacacttgcatctgttctatttgaca

SEQ ID NO: 71631 - DNA, 637 bp, Homo sapiens
ggtaactgaaatagccatcacctcaaacaattattatttgtttgtgcttggattattccagagcttcttttccaactattttgaaatatacaactgtagtcaccctactgtgcgatcaaacattagaacttactctttctatctaactgtatgtttgtacccattaaccaacttctcttcatacccccccagcctaccccccacacacttttcccagcctctggtagccagcattttaccctccacctccatgaaattacctactttwgctcccacataggtgtgagaatgtgcaatattagtctttctgtgcctggcttatttcacttaacataatgacctctagttccttccatgtcactgcaaataacaggacagtaaaagtcaattgtgagatatttgctggaagtatgacaacagtattctactttatggtcagttttatgtaatcaacaagtcttaaattcgatatagtaacattgtttctctcatcagttgtttagatctcctttgtataagtttaaggaaatacatttttaaatgttttgtgatagaaacaaaaagagtttttcacatttgtgtctcagtgaaaatcatgctaattcagtatatacacttgcatctgttctatttgaca

SEQ ID NO: 71632 - DNA, 521 bp, Homo sapiens
cttytttctcagctttccagatctctaaaccaggctgtcacccctaagggctccactctgacatctcttaagaccagatttcttttttttgagatggagtctcactctgttgcccaggctggagtgcaatggcatgatctcagctcactgaaacctctgcctcctgggttcaagcgattctcctgcctcagcttcccaagtagctgggattacaggctcgcgccaccatgctcagctaatttttgtatttttagtagagacggggtttcaccatgttggccaggctggtctggaacccctgacctcgtgatccgctcacctcggcctcccaaagtgctgggattacaggcgtgagccaccgcgcctggctgaccagagcccttttattattattattattattattattatttattattattattattatttgagacagagtcttgctctgttacccaggctggagtgcagtggggcgatctcagctcactgcaacctctgcctcccgggttcaagtgatt

SEQ ID NO: 71633 - DNA, 588 bp, Homo sapiens
cctagaaagccaaagagcttgaatagggtttctcagacatctttgtggctccatgatcagtgaaaattttttattgtattttattgtatttatttatttatttatttatttatttatttatttatttattttgagacagagtctcacactgtcgcccggactggagtgcagtcgcgagatctcggctcactgcaacttcctcctcccgggttcacgcaattctcctgcctcatcctcctgagtagctgggattacaggtgcccgctaccacacctgggtaattttttgtatttttagtagagatggggtttcactaagttggccaggctggtcttgaactcctgatctcatgatccgccygccttggcctcccaaagtgctgggattacaggtgtgagccactgcgcccagccgatcagtgaatttgtttaaaaatgcagattcttgggtctcatcctaggcctcccaaactagaatagctgagggtggtgcccaggaatctgcattttaactagatttcttatgcttgttaaaaattgagaagcttaatctgggagaagagggactggcgaacagagagacagtgca

SEQ ID NO: 71634 - DNA, 681 bp, Homo sapiens
attactctggccacttcagttaaagaggtctggctgggcacagtggctgccgcctataaccccagcactttgggaggccaaggtgggagtatcatttgagcctagaaatttgagaccagcctgggcaacagagcaagaccatttcctcaaaaccaaaaaacttaggtgtggtggtgcatgcctgtagacccagctacttgggaggctgaggtgggaggactgtctgagcccaggagtctgggaggctgcagtgagccatgattgtgccatggtgctccagcctggggggacagagtaagaccccatctctgggggaagaaaaggagttctgcaaaggactttttgaggaggtgacacagaacctggagggtgaaaagggccaggcaggcagaagaaacagcaagtgcacaggccctgagcttccctgggggagggggtggaggatgagcttggcttgttcaagggacagcaaggagcacagtgaggctgatcccagtggccaaggggagagggctgctggagtccagggagaaagatcaggacggattttcggccatggtgaggaggcgggactttatcttaaacrtgaagggaagccacctgaaggtatgtgatccatcatgcattcattcaacagccgtctgtggaatcttctttagaaatgcagagacacatcctaaa

SEQ ID NO: 71635 - DNA, 681 bp, Homo sapiens
attactctggccacttcagttaaagaggtctggctgggcacagtggctgccgcctataaccccagcactttgggaggccaaggtgggagtatcatttgagcctagaaatttgagaccagcctgggcaacagagcaagaccatttcctcaaaaccaaaaaacttaggtgtggtggtgcatgcctgtagacccagctacttgggaggctgaggtgggaggactgtctgagcccaggagtctgggaggctgcagtgagccatgattgtgccatggtgctccagcctggggggacagagtaagaccccatctctgggggaagaaaaggagttctgcaaaggactttttgaggaggtgacacagaacctggagggtgaaaagggccaggcaggcagaagaaacagcaagtgcacaggccctgagcttccctgggggagggggtggaggatgagcttggcttgttcaagggacagcaaggagcacagtgaggctgatcccagtggccaaggggagagggctgctggagtccagggagaaagatcaggacggattttcggccatggtgaggaggcgggactttatcttaaacgtgaagggaagccacctgaaggtatgtgatccatcaygcattcattcaacagccgtctgtggaatcttctttagaaatgcagagacacatcctaaa

SEQ ID NO: 71636 - DNA, 1059 bp, Homo sapiens
aatggtattacttggatgtatctgcgtatgttaagcaacagtgctatttttgaaaactacatagtataggaaaataagagttgtagcatagacggttttcaagcagtttcttgtcagtttgtatggcaagctacagatgaactgcagagtatttacagatgttaagctctctgagaggagacttgtttgtttaccattgcatttcaacatttagtacagtgccaaacatgcagtaggtgttcagtaaacatttgtggaatgaattcatgaataaattgagaattgaagtcgattttggaagacgaggcctaatcaaaatattttgcaaactacccaagtccagcaatcaatattaaatataaactaccttttgcctcactgtatacattaaggttctttttgcaaagaattgctcaaaatgtttcctcatcaatttcctccttttttagggtgacatgaaggaagaaaaagaacctattatcatgtaaaaaccatactatggaaagcgatttcataaaaagtggaattctgtaatataatgctacttattcaccacattctattgataaaggcttggtccctacctcacggtatctcttcctccctgccaatatggcatccagagcaatgataggacagaaacatgttcatttcaacattcacccacacacactttaccatttctgacaacatgccttgattctttgaatgcttactatattccaagcacacactacattctgtacacatataatctcattgaagtacatgctgttattatccctgttatacaaataagaaacttaggctcagataggtaagtaaattacccaaggttatataaaagaaagtggtgggacatttattaaacagtcagagaaaaataattctatctagcttcttagctacatagcattaagaagccttataaaggagtaaaccaaaggcaagagaaggactaaattgagaaagagactaagaaagatacagactaaagaatgtgtactggatttctagattargaatgcaaaacagtttcaaaggagtatttggaagaag

SEQ ID NO: 71637 - DNA, 1337 bp, Homo sapiens
  misc_feature (1)...(1337): n = A,T,C or G
tgcatgataatttcctgggtatcatttatttctaaatgtttaataaacctgtacactcttttccccgattatatgacagttcaaacggtttcagactggattctagcacaccgctttgcagcacatgagtgtcttgcaattgggtgaaaagctgacacaatctgatgtacmgaaagtggtcatgtgatagcggtccactctcatctttctaatccactcattcacgtcggggcagtcactcattcaactgacttcaatctttttttctttgctacaggagactccctttaagtctctaattcttactttccactcaacttttttatttaaaacttaatacacagcatttaacttgttggtattgctttgaactcaaacnnnnnnnnnnnnnnnnnnnnnnnnnnnnnnnnnnnnnnnnnnnnnnnnnnnnnnnnnnnnnnnnnnnnnnnnnnnnnnnnnnnnnnnnnnnnnnnnnnnnttcccttcccaccaaccttcacacccagaaactgatgcttcctcattatactggtgatgtctagaaatgttgagttacctgtgtctgtgatccttttttttttttaattaaaaaaataaggggggtgctgggtgcggtggctcacgcctgtaatcccagcactttgggaggccgaggtgggtgaatcatgaggtcaggaaatcgagaccatcttggctaacacggtgaaaccccgtctctactaaaaatacaaaaaaaattagccgggcttggtggcgggcgcctgtagtcccagctactcgggaggctgagacaggagaatggcgtgaacccgggaggcggagcttgcagtgagcacagatcacgccactgcactccagtctgggctacagagcgagactctgtctcaaaaaaaaaaaaaaaaaaaaagtgtagagacatagtctttctaagttgcctaggctggactgcagtggcatgatcatagctcactgcagcctcaacctcctgttctcaagtgattctccagcctcaacctgccaaagtgctgggattacaggcaggagccactgcactcagcaaagactctgctcttttatcacctaagtccagagcaccaagtattgtgagtccttcctttgcagattccatttgatttgcttctttcctttccattttaacaatgagattttatatactagctcataatctaaacaactgatcagaacaaaagccttggagctgctttcctggcctccgtccctctcactctgtccaccctgcttggtgttatgccactagttttatcctgactgccctgttcaagaatctaacctagttgaaatctgtccatgcatag

SEQ ID NO: 71638 - DNA, 783 bp, Homo sapiens
tttctatatatattatactttaacaaaatgttcaccaacaaatgtttataactccaaaataaatgaattaattaaaattttaaataaaaaatactgaattagagatagaaaagttaatcattcactcattcaccaactcactgtgtgactagggcaaatcttttaaactgtctgagcccacaactcctcaactatgaggctgaaaacacagcaaacttatccttgcctaaacatcatttttacatccatttgttcattttccagtctcacaactgctrtgagtatgggtaattgagttttggtatcctcattttttcagtggtggagcaacgtctgtaaaggttaggcaatttgctgaaagtcacaaagtcagtgagctgcagagtcaggtctagaatgcaagttttctggagctggtgtcttcaacatcgaagcaagtcaatgtgttcaagagaaacacgcagataatatgctaatgacaataccatctaagaagatgtagcacagagaaagatgtttagaagttaggaaagagactgattctaaataataggtaagagataattcagaccgcttggtacaaaagcaaaactaaaatcacccaatgtaagcagcccagcggaataaaacaaaagccaatggttaagagaaaaacagccaaaatgcctacactagtcatgggacctatagtatctacgataggaattttatgattcagtggtctagcctctttcaaatcgttttaattacaagatattatcccaccagagagagagagagaga

SEQ ID NO: 71639 - DNA, 783 bp, Homo sapiens
tttctatatatattatactttaacaaaatgttcaccaacaaatgtttataactccaaaataaatgaattaattaaaattttaaataaaaaatactgaattagagatagaaaagttaatcattcactcattcaccaactcactgtgtgactagggcaaatcttttaaactgtctgagcccacaactcctcaactatgaggctgaaaacacagcaaacttatccttgcctaaacatcatttttacatccatttgttcattttccagtctcacaactgctatgagtatgggtaaytgagttttggtatcctcattttttcagtggtggagcaacgtctgtaaaggttaggcaatttgctgaaagtcacaaagtcagtgagctgcagagtcaggtctagaatgcaagttttctggagctggtgtcttcaacatcgaagcaagtcaatgtgttcaagagaaacacgcagataatatgctaatgacaataccatctaagaagatgtagcacagagaaagatgtttagaagttaggaaagagactgattctaaataataggtaagagataattcagaccgcttggtacaaaagcaaaactaaaatcacccaatgtaagcagcccagcggaataaaacaaaagccaatggttaagagaaaaacagccaaaatgcctacactagtcatgggacctatagtatctacgataggaattttatgattcagtggtctagcctctttcaaatcgttttaattacaagatattatcccaccagagagagagagagaga

SEQ ID NO: 71640 - DNA, 1220 bp, Homo sapiens
gagctaattttattttcacaatcgctctgaataagcattattattttctctgatttctagataaggaatctgaggctcagagaggtttagttccttgcttaagggcgcaaagaaagtaactagcaaataataagagccgcataaataatattattataaggatactatctatctgtatgtgctcagaagctacagtgaaatccccggggaagtsgcttacctgtactcatcccccagaacgcaagcctgtgcttctaaccctgccagaataaggccaggcatttgagttcagagcgaaagggtctaccaggtgcggattccggagctgtggaattggagccgggagggaaagccagagagagctcctccccatatctgtttttctttaattattttattttgttttattttattttattttattttactttacgttacgttacgttatgttattttattttagagatggagtctctctatgttgcccaggctgaactcaagctcctgggctcaaaggatcctcctgcctccatctcctgagtagctgggattgcaggtgcacgccaccatgcccagctccgtatctgttttttgatttagtgttttagttcagagggtgcctcacacctctcacgtcacatatgtgagtgctaactgtgtgcctgatgctgagttggcctggacatacactatcttatttagtttttacgacagcccagaacgtcaggaagtatcactcccattttgcaaatgaggaaactgaggctcagaaaagcaaagctcgttgacaaaagtgaaatatatcatttgaccccaaattggcacagagctggaaattgggttttcaatccatttcatcaaacactatgcagttccagaaaagttgctcaggctggggtgcctcccagactctgcctctgctcacagccaagtcagctcagctcagcaggaaggatcttttttttttttttttgagttggagtcttgctcttattatccaggctggagtgcagtggtgcaatctcggctcactgcaaccacctcctccagggttcaagcaattcttctgcctcagcctcctgagtagctgggattgcaggcgcacaccaccacgctcagctaattttctctatttttagtagagacagggttccaccatgttggccaggctggtcttgaactccggacctcaggtgatccgcccgtctctgcctcccaaa

SEQ ID NO: 71641 - DNA, 752 bp, Homo sapiens
tccatttgactgggtttcattgaaggacatttgaaaaaggaaactggggaaggcaaattagcctccctggcttcctgcagagagcaccttttatgagactgtcatttcgagtttcctcttcctcttgtttggttcacacattcccacagcctccctcagagaacagattgaacccctattttcctcattaaagatcacatcagtgcaaggacatcctgtctggatgggtaggaagtgccccaggagatgtctatcgtgcgtctgggccccacaggagcaagcttctggctgccatctcttaggatctcacagcctttggaccttgcaacagcacctctccccagtgttaagcagacccagggctgattgccagtcacttccagaaggatggagttcaaagggacatctggagcaaacagacttcgggtggcaggtgagccgctgggtgcagcatgagcagggtctcccagcagaacaggacaggcatccattggaggggttaagactttgaacactggggtataaaagttcaggggcccaaacttrgctccaccacaaaccagttgtaagactttgggcaagttatttaatcttttacaacctcagttcccaaactacaaaatgagcctagcaataatgtctcatcatgatacatttttagattaaatgagccaaagcctgtaagtatctggtgcttgggaaatgcaaagtcacacagctgctggtgggcacgcatcgcttgggcatcatat

SEQ ID NO: 71642 - DNA, 432 bp, Homo sapiens
acttggctctattcttggtgtctcttaagtgtttattcatgcctcgcctgcttaacgaattcagtatcttcataataaatggaacttgagggccaaatcctgctccagtgtgactccggcagtacagtgtcaggcctgtgggaagtggtatctctgtaaaaccccagaggcccggctgtgtctgcttctgcttctggtaggaattttccaaggtacagtggacttgtcctccaagcctgatcctgacttctgtacccagcggatctcttcatgaagggcacactgctcactgtgacctctgagggaggcagctccacccaggcaggcctgmtaagtcttccccagccctccatccttaaaacagaactgaggtccaggaaagatgacttgactgagcagggcagagccaggccaaggcccctggagcagaga

SEQ ID NO: 71643 - DNA, 537 bp, Homo sapiens
tacctcagtaaaaagtaaaacagagataaaaatactcatttcatgccttttttgagaggtttaaataagatataagtaaaaatggctaacatagcttgactataatagaaaaatctataaacattgatagtctataaaattaaaatctagtttaatggtctaatagaaatatttcaattttttatctttgctgatataatcccattaacaacaaaatagccaaaccatggcatctgtatttgaagatctcaaagttccagagagtattaaacttttggcaatcgtctattaccaaaaacaccatcaagactggccttttatagataattagttcatagtcattggaaatagggcctcctgtattaagtgtttgataatagttgaccaccgagaaatggagaaccttcactaatttactctcctagaatcaccctgccagtctawaaaggtgacaactcccaaactgaatcagagctgtaacttcaagaagaaagagtgtattcttcattacgaagccctcaagttagtgagattctg

SEQ ID NO: 71644 - DNA, 625 bp, Homo sapiens
agcactaaaatatttttttccaatccacatgcctttttcaaattaaaattttcccttcctcttatcaagaagaaaaatctatgctccttcccttccaaactgaacagagcctgtgacatgctttgaacgatagaatgacacagaagtgattttgagggacttccaaggttatgccttaagaggtcttgaagcttctgtttttgtcatcttggacccttgagaacaaatccctgttgtcttatggcactgtgttctaggatgatttgttaggcaggaaaagaaagctggctgggcgcggtggctcacgcctgtaatgccagcactttgggaggccgaggcggatggatcacgaggtcaggagatcgagaccatcttggctaacacggtgaaaccccgtctctactaaaaagtacaacaaaaaattatgtaggtgtagtggcgggcgcctgtagtcccagctactcgggaggctgaggcaggagaatggcatgaacccgggaggcggggcttgcagygagctgagatcacatcactgcactccagcctgagcgactgagcaagactccgtctcaaaaaataaaaaataaataaaaagcaactgttccactgtaacacatgatcacat

SEQ ID NO: 71645 - DNA, 625 bp, Homo sapiens
agcactaaaatatttttttccaatccacatgcctttttcaaattaaaattttcccttcctcttatcaagaagaaaaatctatgctccttcccttccaaactgaacagagcctgtgacatgctttgaacgatagaatgacacagaagtgattttgagggacttccaaggttatgccttaagaggtcttgaagcttctgtttttgtcatcttggacccttgagaacaaatccctgttgtcttatggcactgtgttctaggatgatttgttaggcaggaaaagaaagctggctgggcgcggtggctcacgcctgtaatgccagcactttgggaggccgaggcggatggatcacgaggtcaggagatcgagaccatcttggctaacacggtgaaaccccgtctctactaaaaagtacaacaaaaaattatgtaggtgtagtggcgggcgcctgtagtcccagctactcgggaggctgaggcaggagaatggcatgaacccgggaggcggggcttgcagtgagctgagatcacatcactgcastccagcctgagcgactgagcaagactccgtctcaaaaaataaaaaataaataaaaagcaactgttccactgtaacacatgatcacat

SEQ ID NO: 71646 - DNA, 863 bp, Homo sapiens
atatacattctagtcatattattttttgataaactacattaaccaggaaaataaatgctttaaggataaaaagttagacataaaatttattcatgaaataagaaaactcccattgattgactgggcgcaatggctcacacctgtaatcccagtattttaggaagcygaggtgggtggatcacgagatcaggagttccagactagcctggccaagatggtgaaaccccgtctctactataaatacaaaaattagccagacgtggtggtggctacctgtaatcccagctacttgggaggctgaggcagggaattgcttgaacccgggaggcagaggttgcagtgagccgagatcgcaccattgcactccagcctgggcaacagagtgagactccgtctcaaaaaaaacaaaacaaaacaaacattgatgatttctaatagttctacaattattagccttattgttctataacttcattgtatttatttatttaatacaaactactttttttagtaaggtgatgtgtgagtcaaaattcaaccccaaagttcatcgcatttcagttcttctttatattggaggcgtctctcagatgctttgcattcataatttcattaaaagttttcaaaaggaatgcacttagttccagagtttgtggagttccatctcaaaggatctggacaaggaaatcttcatcatgcagggaagagagtcctaatgctatcatttgtctacccaccatcttttgtgactgcctgtccagtgaagatctccaaaaggtcagcaggcatttcgaaacatatttttccaaataggtacatacatatttttataaaccattgatatcttcattgctacattcata

SEQ ID NO: 71647 - DNA, 747 bp, Homo sapiens
agaagccagactcgaaggttacacacagtgtgattccacttatatgacattcttgagaaggcaaagctatagagatgcaaaacagattagtggctgctggcaggggggagggttaatacaaaggtagttatttgtggatgacgggatagttctgtattttgatggcggtggtgatggttacacatctctatgcacttgtcaaaastaataaaacaccaaaaaagtgaattttactgtatattaaaataagataaaatggagtgtgagccttggactaatacaagggggcaggaacctagaacaaaggtactctccctgtcacaaggacgcttcatatctcccccacctcaccaatcccagaatcgttctgcctcaagcagcactgcccagcagaaatataatgcaagctccatatttaattttaagctttatattggttaaattagaaggtataaagaaacaagcaaaaataattttatatttttgtttaactcaatattccagaatattataattttagcatgtactcaatatgaagaaattagtgagatagtcctggtttttgggcaaattccttgcaagcagtctgaggccatcaccagaagcagatgctggcgccacgcttcttgtacagcctacagaaccccaaataagccccttttctttataaatttcccagcctccggtattacatgatagcaacacaaaactgactactacactgagggatgaagagagttacagaaa

SEQ ID NO: 71648 - DNA, 747 bp, Homo sapiens
agaagccagactcgaaggttacacacagtgtgattccacttatatgacattcttgagaaggcaaagctatagagatgcaaaacagattagtggctgctggcaggggggagggttaatacaaaggtagttatttgtggatgacgggatagttctgtattttgatggcggtggtgatggttacacatctctatgcacttgtcaaaagtaataaaacaccaaaaaagtgaattttactgtatattaaaataagataaaatggagtgtgagccttggactaatacaagggggcaggaacctagaacaaaggtactctccctgtcacaaggacgcttcatatctcccccacctcaccaatcccagaatcgttctgcctcaagcagcactgcccagcagaaatataatgcaagctccatrtttaattttaagctttatattggttaaattagaaggtataaagaaacaagcaaaaataattttatatttttgtttaactcaatattccagaatattataattttagcatgtactcaatatgaagaaattagtgagatagtcctggtttttgggcaaattccttgcaagcagtctgaggccatcaccagaagcagatgctggcgccacgcttcttgtacagcctacagaaccccaaataagccccttttctttataaatttcccagcctccggtattacatgatagcaacacaaaactgactactacactgagggatgaagagagttacagaaa

SEQ ID NO: 71649 - DNA, 731 bp, Homo sapiens
tttgtgatttcccacagatgtgccatatgagaggaacctcctttctgtgtttagtagatgtaacttgggatggtataaaatagtgagcaaataagagcactggaaagagattcttttctttgstagtaactagctgtggaacttcaggcaacgtcactttactctctgtgcctttcttaagctttaaaataaaggagttggaccaagatggctttctaaggctcttttgggctgcaaaattaaattcttaactcgccctaccatcacagagaggtctttaacactgtttccagcatgtggagtaataatttcacctgttattctttaataacatgatgatcccacagttaggtggatttactgcttactgcagccacctcctggcgtattgcagtgcaacgcagggcacatgagcatatcaaggcctctggggtgtcctgcagagaaacaatgaatttaattgtattagctctctcttcccaggttttgaccacagaaaacttgtggtcaaagttttgaccacagaatcatatgtttcactgaacacttaataaatatctcatgatccagggaacactgatgttgcaggttgtcttctagagagcaagaattaatgtggggagggtgctcttggagggctgctggtatgccagccatttgggaccaggaaagggagaagttgaaaaggacgtgcatgagagtgaccaaggatgtggaaagggacagctgaa

SEQ ID NO: 71650 - DNA, 685 bp, Homo sapiens
ctgtaccaccacctttgaagaggctgtcagaatagcttattgaattaggtcaagcttatagatctaactaccagtttacaagaactaaagggggacagacagaggaacagtttaaaggataccacagagatgcaagcagcaaaatgcagactgcagggactcctataagataaatagcccagtttcttcaacaaacaaatcgaaggggaaaaaaaaaaaggagggcagaagcttatgtataaaagagacttaggagacgcatgagctgtatgcagtacgtggaccttgttttgatcctgtattaaacaaaccaactatagaaagacgtaacatcagggaaatttgcaaaccaactagatrtttgatgatattaaggaacaatgttaattcttctgggtgttataatggtatgaaagacgcacaaggggcagggccttccacccctaagcttaccgtggggctggtggagactagagcccagggagagagaggaggggctgagccattgaagcccagtttattcttccaaactcatggataaatcatttctcctccattggagaggaatgtgtaatatgaaaaaacaaactcactgttttttcctctctgttcacacatgcaacacagaatacttctgtgaccaaatgtgtggggcagggaggggggctccccgacaagcaattct

SEQ ID NO: 71651 - DNA, 792 bp, Homo sapiens
gatccctttcttttcaacacaccttaacatttcaagcaatacaaaacaggaaaaaactcacccacccaccatctcactcctcaccagccaaataaatcatccttttttatttttccatgttttcctcctgtttgtatcatcataggcagatacacacacacacacacatactcacacatttatatatcttgaaatgagcagatcactggctctgaagtcagacagactcggattcaaatcttgtccctctaccttaacaaatgcatggcctaggttatacaaatgtctctgaacttcagttttcatttgtacaagggctgtaataatagtatctacttcataggattatttcagaataaaataatgtgrcataatatatggaaaatgccaaagacagtgcccgctgcatagtaggtgcttaataaacagtagccaaaattatttccattgatcctgtaattcaacaaacgtttagcaagtctttatcatgtgtcagagagcagaggataagacagagtgcctgtcctccaaaaatgcatcatctagggccagaggtggggacataagcggacagtgagtgtgtggtatacgaaggactcccatcacatgtgtgctggcagcgatggggcctgaactgagttgggccaggaagatagaaaggaaagagcaaacgggtcaggatttggttaacacaggctgtgagcggttgggagaacttgcagagacacaattggtattctgctttttcacactgaacatcaaattacaagcacttctgatgttgctacataa

SEQ ID NO: 71652 - DNA, 1154 bp, Homo sapiens
gaaaaaggggagaatggacaatctgtaggagactaagagtgtgtactacaatcaccatctccactatggttgtcttctttttgccatgctagcaaacaatgcttttgccatgtgctggccgcgataataattgttttgtaggtgtttcctcatctaattctcagaacaatcgtagagattgttcttagagataaaggagggagattaagaaaggccacgtgatctgcccaatatcactcagctactaagtggaaaaactgggatttggatccaggctgtatgttgccagagcccacattttattattattgtttttttgaaatggagtcttgctctgttgccaggctggagtgcactggtgcaatttcggctcactgcaaactccgcctcccgggttcaagagattctcctgcctcagcctctcgagtagctgggactacaggcgcatgccaccacacccggctaatttttgtatttttagtagagaaggggtttcaccttgttgcccaggatggtctygatctcctgaccttgtaatccacccaccttggcttcccaaagtgctgggattacaggcgtgagccaccgtgcccagcccagagcccacattacttactgcttcaagagactgtccccagagagatgggcatctctgggctggagcaacccagggttacaggcttgaaagccacagcccctttccatccttttttgtgatttctccagggccatgtcctcaaggtccccagtgtctccggcttttccatgctgatctgatgcctattttagatccatgtgggctggaaactgaggcttcattattagtttttacaagttatcaactgacaacaagcagttggttggctgagtagcttttactgaacatttggagggaccaagaaaggaggatcacctcagagtacacagccttccgccatcttgctgactcatattgtcttttcccttccaatctctgttacttcctccctcctttccagaattcctcaggaattacaaattcttttccttctgtgatgccgagtatttgggcatcttctcccaaatgtgcgtagcaggaagtagcggttggcgtcagcatggatgggagcttataagaccaggagtcctctgtattattcctggtgtccattctg

SEQ ID NO: 71653 - DNA, 905 bp, Homo sapiens
cttctgagacttattcactatcaagagaacagcaggggaaagactggcccccataattcaattacttcccactgggtccctcccacaacatgggggaattctaggagatacaattcaagttgagatttgggtggggacacagccaaaccatatcaatggccattaccttggaaacccctttctctgcaaggttaatcatcctctcttggaacacactttgaaaaacatttgcctaagggtatgcaaattcatggtaagatttttttttaattcccacaggaggaggaccactgacatgcaggaaattatgatatgagggcacaattagagaagcaagggcctgacaaattattgaaagatttcaaatgggaagaggaagcattttgacagtgggatagaataccataactgggggtacaagtgtgccagggctgtcataacaaatactacaaaccaagtggtttaagcaacagaaattctttctctcacagttctaggagctggacatcgatgatcaaggtgtcagcagagttggtttctttccccagggtctctcttcttggtttgtgggtgacttatctttctccctgtgttttcacatggtcttcaactcatgtgtcttaacctttttttgtgttgtgtgtgtgttttttgagacagagtctcactctgtcgcccaggctggagtgcagcggtgggatcttggctcactacaacctccaccttctgcctccaccaggcagagaagcaattctctgcctcagcctcccaagtagctgggattacaggtgcccaccaccacacccagctaatttttgtgtttttagtagagacagggtttcaccatcttggctgggctrgtcttgaactcctgacctcgtgatccacccaccttggcctcccaa

SEQ ID NO: 71654 - DNA, 2072 bp, Homo sapiens
ctttgccagggctaacattcagcaaattagatcaaccaaggctcctagaaggataaacaactggtggtgcttggaagagggcagctaaaggaattagggttgagggcggggacagcccctggaaccacattctcagacattcccccagcaacaaagctgcagtccactgacagtgctggggcttgtgccagcctctcctccatccccaggccgtctgagaggattgcagtcgtgacatgggcaaataaccaggaacagcagttggaggaagggagggaagtggccacagaatcctattgctggaacgaccttcagggtccttctgagcctctgtttctctcaaattgtaatctgcccactccctgaatcagaattactatgggcctggtgaaaagcaggtgcctgctacagagggtggtctgtaggccaaagttcctgagtgtggctaggcagggaattactcaggcctgcagctctgcgttttttaggttgggccctgtattagtccatttgtgttgctataaaggaatacgtaaggctgggtaatttataaagaaaagaggtttattttggcttacagttctgcgagccatacaagaagcatgacaccagcatctgcttctggtgagggcctcaggctgcttccactcatggcagaaggtgaaggggagcctgtgtgtgcagagatcaagtggtgagagagaaagtgagagagaaagggaggaggtgccaggctctttttaataaccagctcttgaggaaactctcatgggaatttgctgagtaaaaactctctcattaccaccaggatgcaccaagccattcatgagggatccaccccatgaccctaacacctcctaccaggcccacctccaacaatgggaccacattctaccgtgagacttggtggggacaaataaaccatatccacagcagacctggatacctatgttttcaatacactgtagaatattctaatagatatccctgagacctctgctcctagagatctctgacacttaggcttggaactcactgatggaggcagaaagcacagaggctaaggggatggggtccagagtctgtggaccttaaatctttgacttcagattacctagtccccatgcctggagcccacactgcccttaaccatgagagcttgttatttaatgtctctgagccacagtttcttcatctataaagtgggactcatgagggtgcctccttataatgatgatgtgggaatgaaataagaataacatttgtaaacacagtgcctggcatccagttagctcaatcaatggcatctgaaggtgaaaagtaggctgcatacytccttcatcttttctcttaggaaactgaggtgaggccaatcacccctaagaagagagctgctggcaccatcactggagccatctgtagactggtggtatctttctaattcactctacagggtatttttttttcttttggagatggagtcttgctctgtcgcccaggctggagtgcagtggtgcgatctcagctcactgcaacctccgcctcccaggttcaagcaattctcctgcctcagcctcctgagtagctgggattacaggcacccgccagtacgcctggctaatttttgtatttttagtagagacaggattttaccatattgcccaggctggtctccaactcctaagctcaggaaatccacccgccttggcctcccaaagtgctgggattacaggtgtgagccacagcgcccagcctctacaggactatcatgattgaggcagtggaaggtcagggtaaggttgtgggacttggaactagaatgcttccattcaaatcccgactcctttaatacctaggtgataggctgatctgtgcagcaaatcaccatggcacatgtttacctgtgtaacaaacctgcccatcctgcacatgtaccctggaacttaaaagttgatgaaacaaaaacaaaaaacaaatccctactcttactcttactgtttgtgtgactttgggttaattaaccttgctgagcctttgttttcccatttgtacgttggggacaatatttgtaa

SEQ ID NO: 71655 - DNA, 1449 bp, Homo sapiens
ggatcacttgaggtcaggaatttgagaccagcctggccaacatagtgaaaccctgtctctactaaaagtataaaaattagctgggcatggtggcacacacctgtaatcccagctactctggaggctgaggtgagagaattgcttgagcctgggtgttggaggttgcagtgagctgagatcacgccactgcactctagcctgggtgatagagtgagaccctgtctccaaaaaaagaaaaaagaaagaaagcaaagagagagataaaagtgctgggttgggattccagtgactttgagtcaagtactgattctgccacaaattagctgagtggtgttggacataaccttgcccctctctgtatctcagtttccccacaacttcaaacaaagggggttggattaggtgagcctcttcaactctgactctggctaagggccgacgagaaggttatatagttgccccatgttgtgtctggctggccccagtcttcccatacagaggagggtcaggaaggggactaatcttcaaaccagtggcctcatcaaaccagtgccttagttaaaggaactgctgtgggaatgcacaatcccagtttgaaattctctgtcactgtgtgtgaccttatgaaagtcacttcacgtctctgagcctcagtttcttcatctgtaggatgggatttaaagtggtaccagagtaaggaattgtaagagcacatgaggtaatatctgctaagtgcttagcacacagaactcggtagagtggtgggttagtaatcattatcgatgccagtggatcccatcgttaggcatggtgctcttcttagaaccagagcaaaaatacacttgtccattccaagccttatttctgacgtcagcaaagctatttatgaggacagcagccatcccagggacacacctgaaaaggggtgggccagcctctgcatgctgaccatccagattccatgactccctgtcagcctgaaggaggtgacaaccatctgtctttccccaccctacccagaagaccagctcagcagggctgggaaggacttcagactatatcttgcgcggtcctcttatccaggttggatgtaaggagaagaggtgagacctatccaggtctcactagacctaggactgcacgacagtatgtgtagtattaaaagaagtatttgggtttgattcttagtttctcaacttgcaggctaagagtcctcacaggacttcagtttcctcatctggaaaacaggcttaacaacaaagtctcttactagggttgttgcaaagattaaatgaagattaaacataatgtgagccrcagacgtaatgtctctcctctctattcctgctgtagtgctctttgaccatagcacactggaaagacgcaatgcactgatttctggatttcctttccattgtgaagctgtatggagcagcagagttgttctgg

SEQ ID NO: 71656 - DNA, 640 bp, Homo sapiens
gctgctaaacattctacgagcacaggacagcctccagcaacaaagaacgatctagtccaaaatgctaactgagcctgttttctacttayagcacatcacgattcagattagcggctcatcaagttctcaaaagccacatgcagctggtagctgccatattggacggcacagctctgtaacctaaaacatctggacatgcacttggaaaagtcaagtttttaaaaacttgggttttggtgaatttgttttcctactcatcccagaataactgaccgaaagagctgcggctgggtcaccagtcgctggctggctaagggcagaacccatctgtccctggcttgttagacccttcgtaagccacccaccctcctcagggagactgagcctggaacagacagtgaaccctgttgttcttttctggggagacaaagctgcaggccctgctacctgcctgacagggccattgtggctagaggagaaaagggctttgtcaggaagcagccgagaagactgcagttcaatggggccctttatgtctacactggcaagatgctctgatgccagccctgttgaggcccagcccccttttagaacagatggggagcctgaggcccagtgaggttgtgaaagtccctgcagt

SEQ ID NO: 71657 - DNA, 739 bp, Homo sapiens
ggctccctgactcttcagcctcaaatccccagtttttgatgaatgtggatttctgtctgtaattaaaagcaatgcaacaagttggctcttgagaatggcagtaaactgagggccctaagagtgtggtctgcagggtcaagaataaagattacagattatatttacttgatacttgtgtcttgaccttccttgagcatggagtgattaaactggtttttctagggctggaaggacagtctccaatctctgaatgaatgcgactgccaataaagcccctaccgtgtctgtggtagttaacacccttggtagagtgggaaagatagtttcagaaatagagtcagttgaagacaactcatccctagttaacacytgagcccttaccaggcaccaggcatagtaggtgcttcctgtgaattctctttaactcctcacaaatcctcaagttagatacgtttttattcccatttatataattgcccaaggtcacccagccaggaagagcaaagctgatatctggtttaaccaccaggcgtaatgtgtctctccaagactaaccttgcccccagttgcataatctgttttggttttttgtgttttgagacagggtctggctctgtcccccaggctggagggcagtggtgtgatcctagctcactacagcttcaaactcccaggctcagatttggtaaaaatgaggccttgctatgttacccaggctggtctcaaaactcctttccta

SEQ ID NO: 71658 - DNA, 757 bp, Homo sapiens
catggctgtgttcccataaaatggaatttttacttcctacagttttcatatagcatggaatgttatctttattttgatatttttcagcagtttaaaaatgtaaaaactagtcttagttcatgggccatacaaaaacatgcaacaagccagatttgatctgtgaaccacagtttgctatcttctgctatacacagttgtgttgtcttcataaacttgtagccagktgatctaaaatacactttttttttttttttcgatttaggtttaagcttctgacatacaaacaggcaacttcacattaacagtgtggtaaagtatctgatgggaggccaagagtaggtggtggtgccagaaagcaaataagattgaacttgaggagcactgaagtttttttttccccattcaacttgtgacacaacctataataggaatctcttccttaaataatgttaaacaaacaaattcagcatattaaaagagttgaaaaactgctttcagttgaaggagatgaagtttagaaattttgactgagggttaattaacttcttaatggggtggcttttagtgcagaaatctttaaacttcatatggttaggagatggcttttatgtttctgaaatatgggcttttcattacagttaacaatcctatggcatcataaaaattttttggcaagagagatcaatagtcaaacataaaaatctgactaaaaccacttaaagaatttacaataatcttggtcacacaattttattaa

SEQ ID NO: 71659 - DNA, 2329 bp, Homo sapiens
tgcattttgaaatatttggaaaaatttacatggatagacagttttgttgctgaaaatgtgtcacatttaaaaagaaaacaaaacacatgtttaagcacttaaaattttttattattattattattcataatagagccagagtctcactgtgttgcccagggtggtttcaaactcctgagctcaagtgatcctcctcccttggcctcccaaagtgctgggattaccagcgtgagccaccacacccagcctaaatttttttttaatggtatttccaaattccttttaaaatcttccaaataatattttaaagtaaggttttgaactaatcttttacaaatacaaaaatataacagtttatgaatagtttataagaatagctgaatgacattaaagaagttgacatttatgagccacatttaagaaaaaaattacataattaatggatgagattgaaaaataaatatggcttaataagttctattatttttatcaatgacaatgattaagaatacctgtttgaacataaaaatcaaacagaacttggacccagacctgtgaatcattgtaacaaaaagtgaatattcaattagtttgcctttactaaagttgtatcaatgatgatgatgatgatgatgatgatgatattcttctacttctagactctaaaatacaagaagaaacaacagactatctattggacgagtaagtccacaataaaagccttatgtttttcttgcatccaaatataccattttcccattcttaaacttctaatcaaacaaaaaagcaataaaatgcttatttgccaaatgatactatctgcaaaataaataatgataataactgttattaatatattttagaaacaggtgatgtagaaccactaatgtcttaaataaaagaacatgacattttgtgtttatcttttttttttttttgagatggagtctcactctgtcacccaggaaggagtgcagtggcgtgatctcaggccattgcaacctctgcctccttggttcaagcgattcttctgcctcagcctcccgagtagctctgactccaggtgcacgccaccacgcctaacytttttttttttttttttttttttaatagaggcagggttttgccatgttggccaggctggtctcgaattcctgacctcaagtgaacctcctacctcacccttccaaagtgctgggattacagatgtgagccaccacactatcctttcaaatttccattttcatgtgtttcaaaaattcattcaaataaattaattagtatatgttatatgtttataaaatgcatttaaatagaatttactgggctcatgctcaaacatttctctttggaagggtgctcaaattaaaaagatgggaggccaatggagtgagttttctgtcctagtggtttgtatcactggggtcagacagctctgtatttgaagatcaagcctgctctatgcttactggttagcattctctgaaccccagtttccatttccgtacaatggagataaaattatgtaattcacacataataagaagtatattatataaaacataaatcacaggggtaatgcctaataaaagtgtgatatattttaattttttaaaaaatcaataacctcataggttgtcatagagtatgtggaaaggtgacaacatatatggaggacagatttgtctcaagcagatgagggttcatctagatacgtgaacaggaatgataaccagcattgcttataattgtactgaaaatggaaacttagacttagttgaaaagagtttttatgaataaattgtgtaatatttctttaagtagacagtttatgagtaaaaataaatgtactaacatggactgataatgtactaataatgtactaacctctcaaaaactcaattttgatgccaggtacaatgtctcagtgcctgtaatcccagcagtttgggaggccaaggtaggaggatcacttgaagctaggaatttgagaccagcctggacaacataatgagagcctatctttataaaaaataaaataaaaattagcagggcatggtggcacgtgcctgtagtcccagctacataggaggctaaggcaggaagatcacttgaggtcatgtgttccaggctgcagtgagctatgatggagctgctgcactccagtctacgtggcaaagcgaagcactgtctcaaaaacaaagtaaaacaaaacagttaacataattttcagtttaaaaagatcaaattatttttaaacaggaagttgtacaatataacaacccttgtaaaatgtttggaaacatgaaaagcaatatagtatattgtt

SEQ ID NO: 71660 - DNA, 1082 bp, Homo sapiens
gtgtatgtacacaccaatacgtatgtacacacatatacacatgtacatatgtacacgatttaaacccaacttctaagcatggctgtcaaagactttgaaatggaccttagaagttatgatgcttgagagcacctagaggaaaacactcagtcaagtaggggagtaggtgtctttgtacctggacctccacctacctcaatacctacctcagacttggacatggattagtgtctgagcaacctggagttggcagaagctagaagtggttttaaacagtgcatgaagctgatttagagatcaggcaaaaataggcagtgtagcaggggaatagaacatttgagacaggaaatacagccccattcaggtatggagaggatgtgcagctttccgcatctcaagagaaaacctcttcagggatatgtttgtttaatgtgtgcctcccctcactggaatgtccataaggctaggaaccctggtgcattgactgaaacataacagattcataatgaactcttacgaaggtcactgccaataatgacgaaagatggacatcactgaggagcgtgaagacaaaagggaaaaatgggaggggattatttgtaggcacaacaggcagctcttcatacacccatgaacacatgggggcaaattatgcaagttaggagggggccaagaggtagcaaggaagaagtaggttattgccattaactggttccccttgtaccacatgataaagaagtctgtagatgcaaacactatccaggctaatatgacattttaggtccttggaagaccatctagattccgtggtcaaattatgagatcatttgaaactgtaaggaaatactctgaacacaatcccaagtaggcattgtattcaacaccaaacccgggcaaaaaaccggttccacttgtctaccctaatttcctaaatagttgctgttaggctcaccaccctattaggaaattcaggtgatgtggacatccatgttttctcaacaactctgatgtattgagctatagctctgtgatctctgcagagaaggcaatgcaagttatcttgccaaaraaaattcactgtc

SEQ ID NO: 71661 - DNA, 1411 bp, Homo sapiens
accctctcccctcactgatccccgggctccacccatcccccctcgccgtcctccgggttccacccctcgctactcgccgccctccgggctccatctctcgcccccgcacaccttcttgagcttttgctgctgcacgacgcgcgccttcytgggagcgataacacgacctggggaaagatgtgctcacgtgaggccgggaagccgggggtccacctcgcccccaagtccccgggccgctccttaccgccttttcttgggccccgattcttttcagaggctgccgctgccgtcttactctttgcgggtttgtgcgcctgaaacttgcgctgcccctgcgccatggtccggcacgcagcggaagaggcgggactgtgagcagtcgtagccggaaggcacagggaaccatgggatacagcggggcggaaaaacgcaagaactcacgggatacaacgtggcacagagttaaagagacagcatcccacaagggtagtgtagtggatcacagttggagttttcaaacattacgaacaaaacggtgacaatgataagctaacgtttattgagagcttatgtgttttagaaaacttacaacgttttatgatctttacacataaaaactcagactaggttagggtgtggcactcacctctggtacagaatttaagaaggttcaaaaactttggtaatagtaaacaatattttcaagacttaaaaaatattttaatatccaaaataatcaaattgttaaactacatcctgcagaccggcagcataattttgtaaataaagttttagtggaaccagggtgttgaggtcagtaagctcaaggcacaagtgcggggttctagcctcttcaaaattttatttaggccgggcacggtggctcacgcttgtaatcccagcactttcggaggccgcggggcgcggatcacccgaggtcaggagttggagaccagccacgactaacatggtgtctccaataaaaatacaaaaattagccaggcatagtgccaggctcctgtaatcccagctactcgggaggctgaggcaggagagtcgcttgaacccagaaggcggaggttgcagtgagctgagatggcaccactgtactccagcctgggcgacagagcgagaccccgtctcaaacaaatacttgttttgttcatcatggatttttttttttttttaaagagatggggtctcactctgttgcttagggtgaagtgcagtagtgcaatcaaagcacactgcatccttgaactcctgggctcaagccatcctcccacttcagcctgagtagctggggctagaggtgtgagttccatgcccagctcattgtttttaaatttttgtttgtagagacaagctcttcctatgttacccaaactggtctcaaacacctgggctcaag

SEQ ID NO: 71662 - DNA, 1411 bp, Homo sapiens
accctctcccctcactgatccccgggctccacccatcccccctcgccgtcctccgggttccacccctcgctactcgccgccctccgggctccatctctcgcccccgcacaccttcttgagcttttgctgctgcacgacgcgcgccttcttgggagcgataacacgacctggggaaagatgtgctcacgtgaggcckggaagccgggggtccacctcgcccccaagtccccgggccgctccttaccgccttttcttgggccccgattcttttcagaggctgccgctgccgtcttactctttgcgggtttgtgcgcctgaaacttgcgctgcccctgcgccatggtccggcacgcagcggaagaggcgggactgtgagcagtcgtagccggaaggcacagggaaccatgggatacagcggggcggaaaaacgcaagaactcacgggatacaacgtggcacagagttaaagagacagcatcccacaagggtagtgtagtggatcacagttggagttttcaaacattacgaacaaaacggtgacaatgataagctaacgtttattgagagcttatgtgttttagaaaacttacaacgttttatgatctttacacataaaaactcagactaggttagggtgtggcactcacctctggtacagaatttaagaaggttcaaaaactttggtaatagtaaacaatattttcaagacttaaaaaatattttaatatccaaaataatcaaattgttaaactacatcctgcagaccggcagcataattttgtaaataaagttttagtggaaccagggtgttgaggtcagtaagctcaaggcacaagtgcggggttctagcctcttcaaaattttatttaggccgggcacggtggctcacgcttgtaatcccagcactttcggaggccgcggggcgcggatcacccgaggtcaggagttggagaccagccacgactaacatggtgtctccaataaaaatacaaaaattagccaggcatagtgccaggctcctgtaatcccagctactcgggaggctgaggcaggagagtcgcttgaacccagaaggcggaggttgcagtgagctgagatggcaccactgtactccagcctgggcgacagagcgagaccccgtctcaaacaaatacttgttttgttcatcatggatttttttttttttttaaagagatggggtctcactctgttgcttagggtgaagtgcagtagtgcaatcaaagcacactgcatccttgaactcctgggctcaagccatcctcccacttcagcctgagtagctggggctagaggtgtgagttccatgcccagctcattgtttttaaatttttgtttgtagagacaagctcttcctatgttacccaaactggtctcaaacacctgggctcaag

SEQ ID NO: 71663 - DNA, 1411 bp, Homo sapiens
accctctcccctcactgatccccgggctccacccatcccccctcgccgtcctccgggttccacccctcgctactcgccgccctccgggctccatctctcgcccccgcacaccttcttgagcttttgctgctgcacgacgcgcgccttcttgggagcgataacacgacctggggaaagatgtgctcacgtgaggccgggaagccgggggtccacctcgcccccaagtccccgggccgctccttaccgccttttcttgggccccgattcttttcagaggctgccgctgccgtcttactctttgcgggtttgtgcgcctgaaacttrcgctgcccctgcgccatggtccggcacgcagcggaagaggcgggactgtgagcagtcgtagccggaaggcacagggaaccatgggatacagcggggcggaaaaacgcaagaactcacgggatacaacgtggcacagagttaaagagacagcatcccacaagggtagtgtagtggatcacagttggagttttcaaacattacgaacaaaacggtgacaatgataagctaacgtttattgagagcttatgtgttttagaaaacttacaacgttttatgatctttacacataaaaactcagactaggttagggtgtggcactcacctctggtacagaatttaagaaggttcaaaaactttggtaatagtaaacaatattttcaagacttaaaaaatattttaatatccaaaataatcaaattgttaaactacatcctgcagaccggcagcataattttgtaaataaagttttagtggaaccagggtgttgaggtcagtaagctcaaggcacaagtgcggggttctagcctcttcaaaattttatttaggccgggcacggtggctcacgcttgtaatcccagcactttcggaggccgcggggcgcggatcacccgaggtcaggagttggagaccagccacgactaacatggtgtctccaataaaaatacaaaaattagccaggcatagtgccaggctcctgtaatcccagctactcgggaggctgaggcaggagagtcgcttgaacccagaaggcggaggttgcagtgagctgagatggcaccactgtactccagcctgggcgacagagcgagaccccgtctcaaacaaatacttgttttgttcatcatggatttttttttttttttaaagagatggggtctcactctgttgcttagggtgaagtgcagtagtgcaatcaaagcacactgcatccttgaactcctgggctcaagccatcctcccacttcagcctgagtagctggggctagaggtgtgagttccatgcccagctcattgtttttaaatttttgtttgtagagacaagctcttcctatgttacccaaactggtctcaaacacctgggctcaag

SEQ ID NO: 71664 - DNA, 1411 bp, Homo sapiens
accctctcccctcactgatccccgggctccacccatcccccctcgccgtcctccgggttccacccctcgctactcgccgccctccgggctccatctctcgcccccgcacaccttcttgagcttttgctgctgcacgacgcgcgccttcttgggagcgataacacgacctggggaaagatgtgctcacgtgaggccgggaagccgggggtccacctcgcccccaagtccccgggccgctccttaccgccttttcttgggccccgattcttttcagaggctgccgctgccgtcttactctttgcgggtttgtgcgcctgaaacttgcgctgcccctgcgccatggtccggcacgcagcggaagaggcgggactgtgagcagtcgtagccggaaggcacagggaaccatgggatacagcggggcggaaaaacgcaagaactcacgggatacaacgtggcacagagttaaagagacagcatcccacaagggtagtgtagtggatcacagytggagttttcaaacattacgaacaaaacggtgacaatgataagctaacgtttattgagagcttatgtgttttagaaaacttacaacgttttatgatctttacacataaaaactcagactaggttagggtgtggcactcacctctggtacagaatttaagaaggttcaaaaactttggtaatagtaaacaatattttcaagacttaaaaaatattttaatatccaaaataatcaaattgttaaactacatcctgcagaccggcagcataattttgtaaataaagttttagtggaaccagggtgttgaggtcagtaagctcaaggcacaagtgcggggttctagcctcttcaaaattttatttaggccgggcacggtggctcacgcttgtaatcccagcactttcggaggccgcggggcgcggatcacccgaggtcaggagttggagaccagccacgactaacatggtgtctccaataaaaatacaaaaattagccaggcatagtgccaggctcctgtaatcccagctactcgggaggctgaggcaggagagtcgcttgaacccagaaggcggaggttgcagtgagctgagatggcaccactgtactccagcctgggcgacagagcgagaccccgtctcaaacaaatacttgttttgttcatcatggatttttttttttttttaaagagatggggtctcactctgttgcttagggtgaagtgcagtagtgcaatcaaagcacactgcatccttgaactcctgggctcaagccatcctcccacttcagcctgagtagctggggctagaggtgtgagttccatgcccagctcattgtttttaaatttttgtttgtagagacaagctcttcctatgttacccaaactggtctcaaacacctgggctcaag

SEQ ID NO: 71665 - DNA, 1411 bp, Homo sapiens
accctctcccctcactgatccccgggctccacccatcccccctcgccgtcctccgggttccacccctcgctactcgccgccctccgggctccatctctcgcccccgcacaccttcttgagcttttgctgctgcacgacgcgcgccttcttgggagcgataacacgacctggggaaagatgtgctcacgtgaggccgggaagccgggggtccacctcgcccccaagtccccgggccgctccttaccgccttttcttgggccccgattcttttcagaggctgccgctgccgtcttactctttgcgggtttgtgcgcctgaaacttgcgctgcccctgcgccatggtccggcacgcagcggaagaggcgggactgtgagcagtcgtagccggaaggcacagggaaccatgggatacagcggggcggaaaaacgcaagaactcacgggatacaacgtggcacagagttaaagagacagcatcccacaagggtagtgtagtggatcacagttggagttttcaaacattacgaacaaaacggtgacaatgataagctaacgtttattgagagcttatgtgttttagaaaacttacaacgttttatgatctttacacataaaaactcagactaggttagggtgtggcactcacctctggtacagaatttaagaaggttcaaaaactttggtaatagtaaacaatattttcaagacttaaaaaatattttaatatccaaaataatcaaattgttaaactacatcctgcagaccggcagcataattttgtaaataaagttttagtggaaccagggtgttgaggtcagtaagctcaaggcacaagtgcggggttctagcctcttcaaaattttatttaggccgggcacggtggctcacgcttgtaatcccagcactttcggaggccgcggggcgcggatcacccgaggtcaggagttggagaccagccacgactaacatggtgtctcyaataaaaatacaaaaattagccaggcatagtgccaggctcctgtaatcccagctactcgggaggctgaggcaggagagtcgcttgaacccagaaggcggaggttgcagtgagctgagatggcaccactgtactccagcctgggcgacagagcgagaccccgtctcaaacaaatacttgttttgttcatcatggatttttttttttttttaaagagatggggtctcactctgttgcttagggtgaagtgcagtagtgcaatcaaagcacactgcatccttgaactcctgggctcaagccatcctcccacttcagcctgagtagctggggctagaggtgtgagttccatgcccagctcattgtttttaaatttttgtttgtagagacaagctcttcctatgttacccaaactggtctcaaacacctgggctcaag

SEQ ID NO: 71666 - DNA, 1411 bp, Homo sapiens
accctctcccctcactgatccccgggctccacccatcccccctcgccgtcctccgggttccacccctcgctactcgccgccctccgggctccatctctcgcccccgcacaccttcttgagcttttgctgctgcacgacgcgcgccttcttgggagcgataacacgacctggggaaagatgtgctcacgtgaggccgggaagccgggggtccacctcgcccccaagtccccgggccgctccttaccgccttttcttgggccccgattcttttcagaggctgccgctgccgtcttactctttgcgggtttgtgcgcctgaaacttgcgctgcccctgcgccatggtccggcacgcagcggaagaggcgggactgtgagcagtcgtagccggaaggcacagggaaccatgggatacagcggggcggaaaaacgcaagaactcacgggatacaacgtggcacagagttaaagagacagcatcccacaagggtagtgtagtggatcacagttggagttttcaaacattacgaacaaaacggtgacaatgataagctaacgtttattgagagcttatgtgttttagaaaacttacaacgttttatgatctttacacataaaaactcagactaggttagggtgtggcactcacctctggtacagaatttaagaaggttcaaaaactttggtaatagtaaacaatattttcaagacttaaaaaatattttaatatccaaaataatcaaattgttaaactacatcctgcagaccggcagcataattttgtaaataaagttttagtggaaccagggtgttgaggtcagtaagctcaaggcacaagtgcggggttctagcctcttcaaaattttatttaggccgggcacggtggctcacgcttgtaatcccagcactttcggaggccgcggggcgcggatcacccgaggtcaggagttggagaccagccacgactaacatggtgtctccaataaaaatacaaaaattagccaggcatagtgccaggctcctgtaatcccagctactcgggaggctgaggcaggagagtcgcttgaacccagaaggcggaggttgcagtgagctgagatggcaccactgtactccagcctgggcgacagagcgagaccccgtctcaaacaaatacttgttttgttcatcatggatttttttttttttttwaagagatggggtctcactctgttgcttagggtgaagtgcagtagtgcaatcaaagcacactgcatccttgaactcctgggctcaagccatcctcccacttcagcctgagtagctggggctagaggtgtgagttccatgcccagctcattgtttttaaatttttgtttgtagagacaagctcttcctatgttacccaaactggtctcaaacacctgggctcaag

SEQ ID NO: 71667 - DNA, 1411 bp, Homo sapiens
accctctcccctcactgatccccgggctccacccatcccccctcgccgtcctccgggttccacccctcgctactcgccgccctccgggctccatctctcgcccccgcacaccttcttgagcttttgctgctgcacgacgcgcgccttcttgggagcgataacacgacctggggaaagatgtgctcacgtgaggccgggaagccgggggtccacctcgcccccaagtccccgggccgctccttaccgccttttcttgggccccgattcttttcagaggctgccgctgccgtcttactctttgcgggtttgtgcgcctgaaacttgcgctgcccctgcgccatggtccggcacgcagcggaagaggcgggactgtgagcagtcgtagccggaaggcacagggaaccatgggatacagcggggcggaaaaacgcaagaactcacgggatacaacgtggcacagagttaaagagacagcatcccacaagggtagtgtagtggatcacagttggagttttcaaacattacgaacaaaacggtgacaatgataagctaacgtttattgagagcttatgtgttttagaaaacttacaacgttttatgatctttacacataaaaactcagactaggttagggtgtggcactcacctctggtacagaatttaagaaggttcaaaaactttggtaatagtaaacaatattttcaagacttaaaaaatattttaatatccaaaataatcaaattgttaaactacatcctgcagaccggcagcataattttgtaaataaagttttagtggaaccagggtgttgaggtcagtaagctcaaggcacaagtgcggggttctagcctcttcaaaattttatttaggccgggcacggtggctcacgcttgtaatcccagcactttcggaggccgcggggcgcggatcacccgaggtcaggagttggagaccagccacgactaacatggtgtctccaataaaaatacaaaaattagccaggcatagtgccaggctcctgtaatcccagctactcgggaggctgaggcaggagagtcgcttgaacccagaaggcggaggttgcagtgagctgagatggcaccactgtactccagcctgggcgacagagcgagaccccgtctcaaacaaatacttgttttgttcatcatggatttttttttttttttaaagagatggggtctcactctgttgcttagggtgaagtgcagtagtgcaatcaaagcacactgcatccttgaactcctgggctcaagccatcctcccacttcagcctgagtagctggggctagargtgtgagttccatgcccagctcattgtttttaaatttttgtttgtagagacaagctcttcctatgttacccaaactggtctcaaacacctgggctcaag

SEQ ID NO: 71668 - DNA, 1411 bp, Homo sapiens
accctctcccctcactgatccccgggctccacccatcccccctcgccgtcctccgggttccacccctcgctactcgccgccctccgggctccatctctcgcccccgcacaccttcttgagcttttgctgctgcacgacgcgcgccttcttgggagcgataacacgacctggggaaagatgtgctcacgtgaggccgggaagccgggggtccacctcgcccccaagtccccgggccgctccttaccgccttttcttgggccccgattcttttcagaggctgccgctgccgtcttactctttgcgggtttgtgcgcctgaaacttgcgctgcccctgcgccatggtccggcacgcagcggaagaggcgggactgtgagcagtcgtagccggaaggcacagggaaccatgggatacagcggggcggaaaaacgcaagaactcacgggatacaacgtggcacagagttaaagagacagcatcccacaagggtagtgtagtggatcacagttggagttttcaaacattacgaacaaaacggtgacaatgataagctaacgtttattgagagcttatgtgttttagaaaacttacaacgttttatgatctttacacataaaaactcagactaggttagggtgtggcactcacctctggtacagaatttaagaaggttcaaaaactttggtaatagtaaacaatattttcaagacttaaaaaatattttaatatccaaaataatcaaattgttaaactacatcctgcagaccggcagcataattttgtaaataaagttttagtggaaccagggtgttgaggtcagtaagctcaaggcacaagtgcggggttctagcctcttcaaaattttatttaggccgggcacggtggctcacgcttgtaatcccagcactttcggaggccgcggggcgcggatcacccgaggtcaggagttggagaccagccacgactaacatggtgtctccaataaaaatacaaaaattagccaggcatagtgccaggctcctgtaatcccagctactcgggaggctgaggcaggagagtcgcttgaacccagaaggcggaggttgcagtgagctgagatggcaccactgtactccagcctgggcgacagagcgagaccccgtctcaaacaaatacttgttttgttcatcatggatttttttttttttttaaagagatggggtctcactctgttgcttagggtgaagtgcagtagtgcaatcaaagcacactgcatccttgaactcctgggctcaagccatcctcccacttcagcctgagtagctggggctagaggtgtgagtyccatgcccagctcattgtttttaaatttttgtttgtagagacaagctcttcctatgttacccaaactggtctcaaacacctgggctcaag

SEQ ID NO: 71669 - DNA, 671 bp, Homo sapiens
gatccaaggagttaaaagagccaaacacagagccaggcccagcggcccagcatcctctgtagggtgcccgcttcttcccttttgtgatgcccatcccaaccgcccagtttcagctgggcccaaggctgcagggctggagctgacagtacccagccttctttgccaccaggtacagcactgagcccaagcagtgccgggcaatggaatgggggtgcaaggttggggtgcagcctgtggatcacagcctatgggggctgcctgccctccacayccccctgcttcctgcgggccaaaatgtggcgaggtggagaagacagccagcgggcatggtggcaggtgcccgtaatcccagctacacagggtgctggcaacacctgggagacgaggttcccaggcttcagcacagcacagtaccctctgtgtcacaggaatctgtccccggcatcctcaggccaaacacaacattaagagttccccgtgcacagggtgctggcaacacctgggagatgaggttcccaggcttcagcagagcacggtaccctctgtgtcatgggaatctgtccctggcatccttaggccaaacacaacgctaagagttctgttaatggagttgctgggtcgaagtgactgaacaatcgtagtttatgttatgtctaacagatgtcactgtg

SEQ ID NO: 71670 - DNA, 1357 bp, Homo sapiens
gaacaacacgcgggtgaggggtgttgagggcggggcctaagtgggggcggggcctcgtggtgttgaagtggggggcggggcctctcagtgttgcagcgtgacctatttttttcccccatctcgcctttctgtcttctcctcttccctgctcccacttcctggctggtctcccactctggtgccactccttcctccctgtctccataacttttctcttttctgtaccaccggttccttgaccccgacctcctctcttttcctgacctgtctcggtgctcctttatatggctccatcttttcctccatgtgtccgccctacctgtcaccctttttctcacatctgccccttttcccttgcctcttttccttgaccccatgccgtgtgcttgcagctgctcctggaacacctggagtgcctggtgtccaggcacgagaggtcactgcgcatgaccgtggtgaagcgccaggcccagtccccgggtggggtctcctcggaggtagaagtgctcaaagctctaaagtctctcttcgagcaccacaaggccctggatgagaaggtatgagaattagaagagcaggggtggagaatggaaacctatagttgactggggctgttctgagtgggagagattctggccgtgattggttggggatgttctgagttggaagaatgttgactgtgattgattgggacaggatacatagactgggacctgactggttgatagcagaaaaataaaccaggatgggggctaacagtggatggggcagattggatagctggttgcggctgcatacccgttatggagacaggagccccaacgctgccctatcggatccgtcccaggggtgttctggaccaggggcaactgtcctaaactggatcttgtctccagctgactgttgccctgccccgatccccaggtccgggagcggctgcggatggcgctggagcgcgtggcagtgctcgaggaggagctggaactgagcaatcaggaggtgtgggtgtggccaagacagggaatttgaatccaaggggaggggctaaggggctgcccayggggcggagccggttgggtgggttccagagagaatctattggggcaggactagggcagacaagctatggggttggactatggagagaaaccagtggggttcctaagtgggcacgcattgcgcagggctacggggagaatctcccagtgagagtgagattaagggtagaaccaggggctggggctcaggctgggactaaggaggaagtgattgaatggggaaaagcggggctaaagcggaaactttgtccaggaggctaaggggaagagtaagggtagacgccctccgtggtggcagc

SEQ ID NO: 71671 - DNA, 861 bp, Homo sapiens
caccagtcaccgtcataggctctggaatatgccaagggacacgacagacacttttcgtcctagtgggggagaaacaatgaacatattttaagtatgttggggaaatttgaatacagagtgaatagtaaatgaaattaacaactgtggccaggcgtggtggctcacacctgtagtgccagcactttgggaggctgaggcgggcacatcacttttggagattgaagactagcctggccaacctggagaaaccccatctctactaaaaatacaaaaattaggctgagagtggtctagcacttcgggaggcagaggcgggtggatcacctgaggtcaggagttcaagaccagcctggccaacgttggtgaaaccctatctctactaaaaatacaaaaattagctgggcatggtggcgtgtgcctttaatcccagctactcaggaggctgaggcaggagaatcacttgaaccagggagacggaggttgcagtgagccagatcgcaccactgcactccagcctgggcgacagagtgaaactccatctcaaaaaaaaaaaaaaaagaaagaaaagaaaagaaaaagaaattaacaacaatgtgaatgcccttaggtgtgataaaggatgtggtgtttacaaggaagaaaaagacccactaaagtaattttgggggctaagatgttatgacyttctccaattacattcaagtacaggtctctgagcatccccaacctgaaaatccaaaatccaaaatgctccaaaattctaaacttttttttttttggatgcactctttctctgtcacccaggctgcagtacagtgggacaatcacagctcactgcagcctcgacctcctgggctcaaa

SEQ ID NO: 71672 - DNA, 2104 bp, Homo sapiens
accagttaatgctatggaatttgggaaaaaaatttacttagtctctcagagacagtatgttcatctgtattatgagattagtaaagcccagcaaagatctgtgctgtcaaagaaatacaaaatgtttgtgaatatgatctataaaccataagtttctaagcccatagaaggcattaatatgattattttttacaaaatataaaccacagatgttgagagataattacgaatgaattccttatatttcattatgtattggagcatgccttttttctttattttcccttcaaaggaatttgtatagaaaacagccttgaaatatagaaacaatgttttcttctggagcaaaacgcaggattccttaacattttggaagacagagataggagctccctttagggcaaagaatagctatgcttgcttttcattatgaaagatttgggccccctaagaccggggttcctctcttgaaacacaaaccctgattatagagatggccaccctcagtgagactgcagctctagtaactgggcaaaagaaatgctaatagtaggccgggagtggtggctcacacctgtaatcccagcactttgggggtccgaggcaggctgatcacgaggtcaagagatagataccatcctggtcaacatggtgaaactccgtctctactaaaaatacaaaaattagccaggcgtggtggcaggccccagctactcaggaggctgaggcaggagaatcgcttgaacctgggaggtggagtttgctgtgagctgagatcacgccaccgcactctagcctggtgagagagcaagactccgtctcaaaaaaaaaaaaaaaaaaaaaagaaaagaaaraaaattatttttctcggatctaggagtcttacgacttctaccagaacacataaaggctaaattgacatttcttgacagtaggcaagtaactttctggactaatttgggtttaatctagcatacagaaagctagagttcacatggccttgggtatttcattgctattattaaattatcttattttaatgcatttgagtcttgtgattaaaagaaataaacattcaagattctgattttggtatgttttgtgttgatttcctagccaacaatagatttaacgagatgcagtgaagtggacgctgtatttaaactcgaactctttaaaaaaatattccaagaaaattttgtctttatgaagtaaaagaaaattttaaccttcttgctactacataagttatgtaaattaaaatcagtacacccttcaaattagtacttatttttaaataaataaacaaatatgaagtgaaaataaagcagtcaatgaccttcaaattaattcacatttctctagagactccaacatatctccacttacatatttttcattctggctggaaacaaaagagaaaaaaaaaagtactcatctaccctatctagttttacaaactaccagctcatatgattcttgttcgagtttccaaatcaagaatgttgagatgtacttaattaattagtgagctcctttaaacacttcccttacagacaatttttcctcattttttactttacctaaaaggtctcaagacatttaaccaatacttggtgtagtcattctttacagtaaaagataagaaggcagtttcaatcctaggaatgtgaacacattacagatatatgcacatttcttcagcttagagtccatctaatttaattgcaagtaaaaaacaaatacaaggacatcaactctcaaattatttttctcgatggttgttgagctatcaatcccttacctctgggattatcagtctcccacagcacaaggactttactccaattaagtgagatccaaaggaactccatttttatttcaagattaaatttaagatcagcttctcaaatagggaaactgaagtaagaaaataagttttttcttaataaattttaatttagaagaactcacatttttcctaacttctttacacaactggagtggggagatttgttcgtagcttatatagctaccatctttaggattaggcccctttgggaacttctcaggtaccccaaaatcattctgtaagccttgttgt

SEQ ID NO: 71673 - DNA, 854 bp, Homo sapiens
atatgtattgagtcagcttcatcacgcccaggggaaacttaaattttaaaatgccacccaaaatatatgcattcaacatgcataatggctcatctgttgaatagttgggaagtgatatcaatcagaaggattaagaagatggctgtttaaggcaatgatgataataaattagtgccagtttgcttcaatatgttttatggcgtcagtaagatggtaggtgagctctttgaagtctcgttgaatatggttgtttctgcagcacatttgttaaacccatatatggattgaaatcatactaatgacaataactgctcctatgactcaaaagggaaacaaatggatactgtcaagttagtcagtgcttggaaatggcttctggatgaatttcctttgcaaaaagtctctttcactttccccagctcaccttcacatttaaccgtaataagcactctttactctagacatttaacagatgtttttaaataactcagttattgggtatataaaaagaagaagatgrcctccccaaaagtcccaaggtcagagctatttgccatctgagcaattgtccccaggaagaatgttgtgaatgatcacttctctctaaccgtgactcagcacagcacaccaacctgcacccattttcagaggctcaccttgggttgagggtgactttgagtatatgggcctcagcagtcaccgcccaagggctgtgcctgcttgtcatgcttctctatcaccccacccacctgcagccatcagagaggaccagtttctcactgatcctcctcccctgatgcatttacatgagagatgggggaggagctttcccccttgagacttgttcaccttgt

SEQ ID NO: 71674 - DNA, 748 bp, Homo sapiens
atagtatgtgactaagctcgcagtctctgcatccagactgtcggcgtcaattctcagctttgccacttgctagatttatgatcttgggtcagttatttataacttctctgggcctcaatttccccactgaaaagtaaagattctactaacaccatattggaccattataaggattagatgagttcatactcacctaaaaagtgcttaaaacatgtatgtcccaaacaaatatttactgttattattctattattacataacctttttaaagaatccagtcttgcrttaattggtggtactgttttcattttctaatatattaatttatacttttttaaaattattttatactgtctaattaccttaagtttgtcttttgaacttcctgggacaaatatctaatttattgaattgccttcttcctatttaatcatgaaagaagttaatgccattactttatctctgctgattgttgtttttccattataatttttcacatttaactgaagatttacttctcttttcgactcacaacttgttcagtaagatggctttggtttgttttaatttccaaatgcttggttctcattgttgctatgatgtgtatcttttgagactagtttctggtttattatgtgtatccaaactgggtcttttctgctttgggaatgtattacatttccacaatggcctaccatatgaactatttctgttaaaattctctggacataaaggaagaagccatatt

SEQ ID NO: 71675 - DNA, 581 bp, Homo sapiens
tgaggactcagtttgcgggggcacactaagtgtgcctcactggagccctcagcgcccctttagaatttgaggtgggcttgccagagttttgggaagatggcagcagcagcagggcagcacctctgggaagtcccgggaagaggcctggctaggccaagtcagggccacacctgagctggctgcaggamtgtttacaaagcaaatgcatactggagggattagcaacctgagttcttggccagctgaggtgggtcacacctgtaatctctgcactttgggagtccgaagtggaagggtctgtgcaaatcaagcctctccgccaaatcacctgccggcttcccacccacccccaatccccacctgaagccaggtgtctctaatctctactcctgagcatgaggaaatccagcacaaccccaccaccaccagcaggtagagcaccagctgtaaccagggcacagctcctgagccagcgggctcacttttcaatctggttgtggagcaggacactgagaagcagcccacagagctgcaagagttcaggctgggaggggactcgaacctgccgtcagcctcactgg

SEQ ID NO: 71676 - DNA, 581 bp, Homo sapiens
tgaggactcagtttgcgggggcacactaagtgtgcctcactggagccctcagcgcccctttagaatttgaggtgggcttgccagagttttgggaagatggcagcagcagcagggcagcacctctgggaagtcccgggaagaggcctggctaggccaagtcagggccacacctgagctggctgcaggactgtttacaaagcaaatgcatactggagggattagcaacctgagttcttggccagctgaggtgggtcacacctgtaatctctgcactttgggagtccgaagtggaagggtctgtgcaaatcaagcctctccgccaaatcacctgccggcttccyacccacccccaatccccacctgaagccaggtgtctctaatctctactcctgagcatgaggaaatccagcacaaccccaccaccaccagcaggtagagcaccagctgtaaccagggcacagctcctgagccagcgggctcacttttcaatctggttgtggagcaggacactgagaagcagcccacagagctgcaagagttcaggctgggaggggactcgaacctgccgtcagcctcactgg

SEQ ID NO: 71677 - DNA, 581 bp, Homo sapiens
tgaggactcagtttgcgggggcacactaagtgtgcctcactggagccctcagcgcccctttagaatttgaggtgggcttgccagagttttgggaagatggcagcagcagcagggcagcacctctgggaagtcccgggaagaggcctggctaggccaagtcagggccacacctgagctggctgcaggactgtttacaaagcaaatgcatactggagggattagcaacctgagttcttggccagctgaggtgggtcacacctgtaatctctgcactttgggagtccgaagtggaagggtctgtgcaaatcaagcctctccgccaaatcacctgccggcttcccacccacccccaatccccacctgaagccaggtgtctctaatctctactcctgagcaygaggaaatccagcacaaccccaccaccaccagcaggtagagcaccagctgtaaccagggcacagctcctgagccagcgggctcacttttcaatctggttgtggagcaggacactgagaagcagcccacagagctgcaagagttcaggctgggaggggactcgaacctgccgtcagcctcactgg

SEQ ID NO: 71678 - DNA, 581 bp, Homo sapiens
tgaggactcagtttgcgggggcacactaagtgtgcctcactggagccctcagcgcccctttagaatttgaggtgggcttgccagagttttgggaagatggcagcagcagcagggcagcacctctgggaagtcccgggaagaggcctggctaggccaagtcagggccacacctgagctggctgcaggactgtttacaaagcaaatgcatactggagggattagcaacctgagttcttggccagctgaggtgggtcacacctgtaatctctgcactttgggagtccgaagtggaagggtctgtgcaaatcaagcctctccgccaaatcacctgccggcttcccacccacccccaatccccacctgaagccaggtgtctctaatctctactcctgagcatgaggaaatccagcacaaccccaccaccaccagcaggtagagcaccagctgtaaccagggcrcagctcctgagccagcgggctcacttttcaatctggttgtggagcaggacactgagaagcagcccacagagctgcaagagttcaggctgggaggggactcgaacctgccgtcagcctcactgg

SEQ ID NO: 71679 - DNA, 996 bp, Homo sapiens
aatacattaaaaactttttagttttacttagaagtatataaagtgtaaactaatcagttatgattgtcatacgcaatagttagaaaactactttgacttttttttctttttaataagctataaagcgttaacagccagtgagatagaagatcttaagctggagaactcatcattacaggaaaaagtggccaaggctgggaaaaatgcagaggatgttcagcatcagattttggcaactgagagctcaaatcaagaatatgtaaggtatatagagcaaataatggccttagaaccattaagacaatttaatgttgaaagccagctagtaactgtcccttggcttgcttttggccatcttatactgcaaattaagaatttactcagttaaaaaatgacacttcttgaagagttccttgaggtttaaaaaaaaaaaaggaaaaattaatgaaagtggctataaaatgtttagtgacctcttctctctcaaaccaaaggatgcttctagatctgcagaccaagtcagcactaaaggaaacagaaattaaagaaatcacagtttcttttcttcaaaaaataactgatttgcagaaccaactcaagcaacaggaggaagactttagaaaacagctggaagatgaagaaggaaggtaatctatgattagaacctcagtgccttgttaactcagttacgatgtgattttttaaataactatgtttttctcaatttaattcttccatgcagaaaagctgaaaaagaaaatacaacagcagaattaactgaagaaattaacaagtggcgtctcctctatgaagaactatataataaaacaaaaccttttcaggtttgtcagttaggagtaaacttacttgtgtttattttagggactcactttgttccctattatartgaggacagtgactcgggttttctgcaagatcattttgctctgcacttacagtgccaatttagctcactattaaaggtttatacatttt

SEQ ID NO: 71680 - DNA, 615 bp, Homo sapiens
gtattccattctttacttttctagaacatttttagtagacattaatgcaggtgtgctaaagtagaaatcactgtcccagagtactgtgttggaccatttggaaggagccatgtatctcccattacctatacaatttggtatcattcgattagataggataataagaatatttatttatatgtacttaatttttcaagaaatgtttttttggtgtccataaatctggtcccttggagtgattgaattccgtacttcagagtttagacaataagaggcagatacgtttagagtaacttaaactgwtattagatctactttcccccatataataaaaattgagaaaaagtagacttcaggcaaagtattatcaactctttattgtgccttgagtgaactagatagcattttattctttcattctgactttcttaaagtgtttagacatttcttccttgtgcacaactaaaataatttatggagtgcaggtccaaagtagtttttagagggatatttctttttctaaagaacgaaccaaaaagcctcaacaaaacagtgtaaaaggcagagtattgcttatatagaagctcaaaaacagagatatttgtttggcatatt

SEQ ID NO: 71681 - DNA, 2828 bp, Homo sapiens
atttttattgggcaggactattatagacactcttttcttagaaattgatgtaagtggtttgacttaaatttcttgaagaaactgttctgtaattttgtaatttataaagccccttagaaaactaaattacatacaagtttgtatggagccccaaaataatagtccttccccataaaaaatttcatggagtgtgaaattaataaacatgacactgatgtcacccccacctcctgccccacttagaaacatctgaaacagatttcattcaagatgttgatgcctttcttccatttttagatggaaaagatattctttttctagccattgtgtcagaaagtctgttggatataaaaagatatagtgtgaaaattatatgtcttatttagaataaagccaatgagaaaattagaatcagagcttatgctgtttcagtttttatttctttgcatctgtatattttcctcttcgggtatcaaagtttaagtcgatttctctttgtaagattctttctgagatagcataattaaatattcaagatgtgttgctatttaacattagagggaggcagtcagtagctttattcataaagttccacctgttcttttcactgggctgattaggaaaatcctgatttattgggttgaaaatttctaaacctaaaatgtcttgagatttttagaatattttatttatcagatgagtggcctacacaatgtttaacagtgtaatgtttaaaatagaaactaactgattggatcccttcatcttttctgataactgaaaaacaaatttggctgtcatatctgtgacatctaaatttgcttataagtttttttggcttttaaacagaaggaatctcaaaagaatgataaagatttgaagatattagagaaagaggtaagcagtgctttaaacttagtgaaaagtacacatgatagaaagagagttacacagatttaagagataaggattctgttgcagtgtgaggagtcctgcagtgaggcaaacatgccatccagaacagtgcctacaggaaaacagttcttacagtatttcacagatctatccgggctatgttaatgtggtatgctggcaacgccgagattaaagatagcccacttaatgaaaaactgataactgaaaaatcattatgtcagttgattacaattatatatgtggatcaaatatttatatctatccatcgttcacagtcttcctgtatgctaacttatgttaacacaacatagctagaggatttcgtagtgagcatgcaatcctagctggttagactgtgatgaagttaggctaactcgatgcattgctctgcacaataggtataggccttcctcatgggtgaaataacatagagctgtgctgtttgatatggtagctactcaccacatgtgatgatctaaattaaataagaactcaattcctcagttgcaataatcacatttcaagtgctcagtagccacatgtgattggcagctaccatactggacagggcatttccaccatgacagaaatttctattgaacagtactaacctaaagaacccatttactttcctagcaatgctaagcagctcactgtgaactttgcttctctgcagtcttttttttctgtttccattgctgaccaactcttttcctcatggatatattctttcaatatattaaaatctttcatttgattacagtcgaatgttggctttcgaccaagagtatgtcagagtaactgtaaatgtctgctcagttgctctgattcttttttatgtattctaataatgttagctatcattttactgagggtacatgtaggggttgatacttacaggaataatcactgagtctcagtgagatagctggtaagtgagtggtagagccaggattagaactaataatttacaccagtgacttcattgggtatagaattttagggtggcaggttcccccccattatattaaaaatatcatttcattgtcttttggcttccacattttctgttgacaaatattggtttgggtttttttttgttttttgtttttttaatctggtaatagcagcaagaatgatggcttgccaatgcctagtacattctcctcagaagcccagctctgccttcttgaaataaaaaacatttagcattttaagctaatttgaatttgtgtaattgaagctagagaaaataactattataggtggaaataccttaaaagtgaataaatagcggccgggtgtggtggcttacacctgtaatcctagcactttgggaggctgaggcgggtggatcacraggtcaggagatcgagaccatcctggctaatatggtgaaaccccgtctctattaaaaatacaaaaaattagccgggtgtggtggcccgtgctggtagtcccagctattcgggaggctgaggcaggagaatcgcttgaacccaggaggcggagcttgcagtgagccgagatcgtgccactgcactccagcctgggcaacagagcacagagcaagactccatctcaaaaaaaaaaaaaaaaagtgaatagatagcttaattgtacttggaacttatggcaactaaagttcttatgttcttaaaatgcattaagacttttaagatgtatcataggtaaatatgattattcaaatagctagtaacattagaatatctacaagcataatgtcaaaatcagagatttttccagaaactttaggggtgattattggtagcatctccttatgttggcattctatcagtgaatcatttattatcaccttgtttttgtccagatttgtgttcttctacaggaacgtggtgcccaggacaggc

SEQ ID NO: 71682 - DNA, 2828 bp, Homo sapiens
atttttattgggcaggactattatagacactcttttcttagaaattgatgtaagtggtttgacttaaatttcttgaagaaactgttctgtaattttgtaatttataaagccccttagaaaactaaattacatacaagtttgtatggagccccaaaataatagtccttccccataaaaaatttcatggagtgtgaaattaataaacatgacactgatgtcacccccacctcctgccccacttagaaacatctgaaacagatttcattcaagatgttgatgcctttcttccatttttagatggaaaagatattctttttctagccattgtgtcagaaagtctgttggatataaaaagatatagtgtgaaaattatatgtcttatttagaataaagccaatgagaaaattagaatcagagcttatgctgtttcagtttttatttctttgcatctgtatattttcctcttcgggtatcaaagtttaagtcgatttctctttgtaagattctttctgagatagcataattaaatattcaagatgtgttgctatttaacattagagggaggcagtcagtagctttattcataaagttccacctgttcttttcactgggctgattaggaaaatcctgatttattgggttgaaaatttctaaacctaaaatgtcttgagatttttagaatattttatttatcagatgagtggcctacacaatgtttaacagtgtaatgtttaaaatagaaactaactgattggatcccttcatcttttctgataactgaaaaacaaatttggctgtcatatctgtgacatctaaatttgcttataagtttttttggcttttaaacagaaggaatctcaaaagaatgataaagatttgaagatattagagaaagaggtaagcagtgctttaaacttagtgaaaagtacacatgatagaaagagagttacacagatttaagagataaggattctgttgcagtgtgaggagtcctgcagtgaggcaaacatgccatccagaacagtgcctacaggaaaacagttcttacagtatttcacagatctatccgggctatgttaatgtggtatgctggcaacgccgagattaaagatagcccacttaatgaaaaactgataactgaaaaatcattatgtcagttgattacaattatatatgtggatcaaatatttatatctatccatcgttcacagtcttcctgtatgctaacttatgttaacacaacatagctagaggatttcgtagtgagcatgcaatcctagctggttagactgtgatgaagttaggctaactcgatgcattgctctgcacaataggtataggccttcctcatgggtgaaataacatagagctgtgctgtttgatatggtagctactcaccacatgtgatgatctaaattaaataagaactcaattcctcagttgcaataatcacatttcaagtgctcagtagccacatgtgattggcagctaccatactggacagggcatttccaccatgacagaaatttctattgaacagtactaacctaaagaacccatttactttcctagcaatgctaagcagctcactgtgaactttgcttctctgcagtcttttttttctgtttccattgctgaccaactcttttcctcatggatatattctttcaatatattaaaatctttcatttgattacagtcgaatgttggctttcgaccaagagtatgtcagagtaactgtaaatgtctgctcagttgctctgattcttttttatgtattctaataatgttagctatcattttactgagggtacatgtaggggttgatacttacaggaataatcactgagtctcagtgagatagctggtaagtgagtggtagagccaggattagaactaataatttacaccagtgacttcattgggtatagaattttagggtggcaggttcccccccattatattaaaaatatcatttcattgtcttttggcttccacattttctgttgacaaatattggtttgggtttttttttgttttttgtttttttaatctggtaatagcagcaagaatgatggcttgccaatgcctagtacattctcctcagaagcccagctctgccttcttgaaataaaaaacatttagcattttaagctaatttgaatttgtgtaattgaagctagagaaaataactattataggtggaaataccttaaaagtgaataaatagcggccgggtgtggtggcttacacctgtaatcctagcactttgggaggctgaggcgggtggatcacgaggtcaggagatcgagaccatcctggctaatatggtgaaaccccgtctctattaaaaatacaaaaaattagccgggtgtggtggcccgtgctggtagtcccagctattcgggaggctgaggcaggagaatcgcttgaacccaggaggcggagcttgcagtgagccgagatcgtgccactgcactccagcctgggcaacagagcacagagcaagactccatctcaaaaaaaaaaaaaaaaagtgaatagatagcttaattgtacttggaacttatggcaactaaagttcttatgttcttaaaatgcattaagacttttaagatgtatcataggtaaatatgattattcaaatagctagtaacattagaatatctacaagcataatgtcaaaatcagagatttttccagaaactttaggggtgattattggtagcatctccttatgttggcattctatcagtgaatcatttattatcaccttgtttttgtccagattygtgttcttctacaggaacgtggtgcccaggacaggc

SEQ ID NO: 71683 - DNA, 1771 bp, Homo sapiens
agttgcctttgaaaagcaggaaagtcttcaggaaaaaaaggcatgtggcatttaatgtggattttaaaggatctggacacatggatattttaggcagaaggaattcatgaattaatacccccataatatcaacaacctaaatcataatacaggccccatcatatgccacaacctagcagtgtgtgaagccctggaattatgtcacaggtctgccacatactagtcacttggactaagaaggtaatctctcccattttcttgattacttgtaaaatgtgaaaattaatgtgagatgagtaagcaatggtaatacttacaatttatttagcccttgcaaaattacaagtaccattttaagccttttatatggattagctcatttaatcttgacaacaaacacatttctcaggcaaagtagtttgaccaaggtcaaagagcaatgaggattgaaacctagacttttcctcaattccttcttacgatagaccctgaccaaatcttactaattggtattatctccattgttccagcgaagaagctaaagcccaacaagattaagaaacttgctggcccaagattacacagctagtaagtttcaggtctggggttcaaactcagaactgttggatttgcttgcctgtgctcttaaagacctcacatgttcttaggatgacagcagcaatagcatcaacaatagcaacagcagtaaatgtctataaaatcacttaatatgtgccagacactgtttttgcattgcatatagattaactcatttagtcctcatgatgatcccatgaagtaagtacaagtgagaaaagtgaagtatgyggagctggtaggtaaattgcccagagccatacagcgaggcattggcacacctgagacttgtactcaggtaatctggcttcagactctgagttattaactatgactccataatccttctttacaggaaggggtagtggttaacgggatgcattttggaactttaaaaccacctatcttactcaggagaagctctaaataatctaaatttcaagggcgacatatctataatacaaagtgttccatgaggattactccttttctcagttgggttgttcatattgtcattagatagactgagtaggagttaggaaaagatttcatcaaatgaatgaatgatgtggaactttccatatgtttaaattgactttgtctataagcaccctcatagatgacatctcaaaacttttaaaataggagcataggccgggtgcgatggctcactcctgtaatcccagcactttgggaggccaaggcaggcggattatgaggtcaggagatcgagaccatcctggctaacatggtgaaaccccgtctctactaaaaatacagaaaaaaaaaattagccgggcgtggtggcaggtgcctgtagtccaagtactcaggagctgagccaggagaatggcatgaacctgggaggcggagcttgcagtgagccaagatcatgccactgcactccagcctgggcaacagagcgagactctgtctcaaaaaaaaaaaaaaaaaaaaggagcatatatccagtgtgttattgcatttgtgtgcttacacagtatatataaaaagaagtggaggtagctattaaaagtatgatagccaagttaaaaaatacaccttaaaattagaaaagattagagtttccaaagcataaatgaaaggaatcctatggagtctttttatttttaccatttcatgttctgtaaccttcattttaatggtagctatc

SEQ ID NO: 71684 - DNA, 908 bp, Homo sapiens
gttgaaaacaaaaggaagatgtattttggctaactgctttgtgcaagagttgtttaggaaataagagctactgttaaacggcaagataagtgtgcaattagtgacaactgtggaggaattaaagagcaggaaaatattacagtgagtctaagctaatggcatgaaaataaaaactcttcactctcaaggcaatctcctctgcctccttgctttatatttagagcccttttcaattgactgcaggtcatgaaaaacaaaaaagaaattatcatccatcttttgcttgcatttgaaactgcaatatgaagtcattattagtagaagtaagtcattttaaaagtttattacatctataatacatataaaatattaataatggtatttattgaaatataatgataactaacaattcctgagaatcactatgtgccaggctctatccttgtttcacaagcattagctcatttagtcctcacaatgtataaggatgagtcatgttaaccactgagaaaatgacagctcaatgagctcaagtaatttatcaaagaccatacagattatcaggggtgaagcaggattccagcctatggccatctgaccaaaaacctgctctcttaatggccattctgtatgccagtttttcctgttgttatttcctctaggcttaagcaattcacttgaaacagcagagaaatctaataatggctacattattatttgatagttgcatawatttgagcttctcaaaaaggaagttctgaaacacaggaaagtgcctgggatactgaagccacagggtttataataatgtcccttcttggaatcttaaacctagtcaatgacttaggagtaatcggtaattaaaaacattatttttacattaaaactaatcagatggagttgatgaa

SEQ ID NO: 71685 - DNA, 238 bp, Homo sapiens
tcagaataatatgtgtgtctgctgggggcttataaatcaatagcttattgtgcaatatattgtccaatkttttgccatagacatatttgaggaaactaaaacttgtcaactggttgcacattaataatgagtttgggacttcgacaggaaagcagaataaatctgagttgccatccattgaccaagaagacctcgacactttctcatctgtctgctgcaaccaaggcttgagcaaagc

SEQ ID NO: 71686 - DNA, 1184 bp, Homo sapiens
gggctcttcgtggggccaatcaaagggacaacaaatttcccatctcagagctgctaatgaaggttaaataattaatgcctggaacaaagtagaggaggctggacagcttcccggctgcaatctcctgcccatgcctgtggacatcccgctctgatctcaagcccaccgtgctcaaacggctggcttcatgccgctgcctccatcccagccccactggcctttctcctcatggcaagcacagagtatagaatgggcagaagttgtttctaggagcaaaaactcaaaccagaagagcccttgaagagatactcagaggcactcctcatcagggaaatgcatgttgaggcaatgagatgtcgttttatgctttatactgattagataggcaaacagtagaaagctggagaatgcccagtgttggtcaggatatgggaactttaagcagtgcaaattcaacgtaatctacgctgtgactccatcagcctgcacctggatgcacactccaagtggatccttggtccttaggaggacacaggtccttaggatgcacacaggtccttaggaggacaggcctgaggatgttctctgcagcttcctttgtggtgacaaggatttggaaacaagctcgttgtctatcactaagagaacagacaggcacaggaggagcgcagtgtggagaatcaggcgggtgttgggttaggtatagacacagccacatggataatctcaaacagagtgcatgaaaactgaagaaacagaatgagatctatagcacaaactgagatcaactgcattactgttcagcagacattcacagccgtccttcttggggaacagtcttccccactgtttcagtccattctcgtactgctataaagaaatacctgagactgggtaatttatgaagaaagagtcttgttctgtcacccaggctggagtgcagtggcatgatctcggctcactgcagcctctgtctcctgggttcaagtaattctcatacctcggcctcccaagtagctgggattacaggcatgcaccaccacacctggctaatttttgtatttttagtagagayggggtttcaccatgttggccaggctggtcttgaactcctgacctcaagtgattcacctgcctcagcctccctaagtgttgggattataggtgtgagccacttagcctgg

SEQ ID NO: 71687 - DNA, 1744 bp, Homo sapiens
tgcaagggccactccccgccaacactactaccctccagctcatttaattcaaaataaatgtacagggcaggaaagtcattgaggtgcaagaaaggagggaaggctttaaaagcgagctatgggccaggcgtggtgrctcacgcctgtaatcccagcacttcaggaggccaaggtgggaggatcacctgaggtcaggagttcgagaccagcctggccaacatggcaaaaccccatctctacaaaaattagccaggcatgatggcaggtgcctgtaatctcagctatttgggaggttaaggtaggagaatcgcttgaacctgggaggcggaggttgcagtgagtctagattgcgccattgcactccagcctgggtgacagagtgagactctgtctcaaaaaataaataaataaaataaaataaaaacaaaagtgagctatgaatttcatttccaaggaaaggagaatacggaagagagagtggagaagttgaagagacccagaggagcatggcaccatgggagagctgtggctccagcgtgcagcggccctgggttcaaattctggctctgtcatttcgcggttgtgcgagggtgtcacatgcttagcctctctgaacctcagtttacccatctgaaaaatgaggaccaaagtggcacctatttcctggggctgttgggaggatccaatgagaccatgagctgatctatgcataacacctggctcagagcaggctctggaatgtagctcacatattttctgggcacctactggatgccaagcaccatgtggggatttggcattgaacaagacaggcaaggcagtgcccttgtggagttcaaggtcttgtgaagagaacaagacagaaaacatgtgaacgcataaaacgagatcatttcggggatttgcaggagggacaaagcaaggtgacttgagaaggtgtttattttagacagcacggtccagggaggtttctccaaggcgaggacattgaggtgagactcggatggagcccattatggggagcagcgtcaaaaacagtgagcaggggagcccctaatcccatcagcaaacagctcccacctgccctggaatggctgctgagagaggtccctgtgggtccccaggcctctgagagctgccacagcccggccagccttcctgagctagtcccatcctgatgggggaatggggggcttcagagtcaacaatgagggctctgcttgcgtttttatttctgatgccaagtggtgtctatgatgcagggtctgacttggggctcttgacaccttgcattttggggatattaagtcaaaatcttaaatgaccacttagcgttaggctctcggctatacgctagagacagacgtgaagaagtcctgcctctcaggccatgctgaggctctccccaagatctgggcagggctgcttcacagccatgccacccctctgcctcaaggcagctgtgaatcagtttttggagttcaaatcagatcgtgccacctgtgattccattgtcttgcaagtggcttccaagaggtagcccaagttcctcaaggtgacatttcaggtgtgttgcaacccagccctgctaagccctcccgcctggcccctcctgctccctggtcctcagtgtgccagcaacagccattagctgctgtagacagaaccggacacaagcatccatcctcctccttgaaattgcatgtgctgttcctcccatctagaatgccttttcctaccttca

SEQ ID NO: 71688 - DNA, 2429 bp, Homo sapiens
gtgccaggcagcctgggcaaaggctgagaggggtgttgtggcagagcctgctccaggcggagggaaggggccagcgtgccaggcgccccgagagcagggacttttccaagggccttgaatggcaacccaggctgctggatttcactggggagtgtggggcacccctccagggtttgagacttagtaactctggtccctctgttccctgtcatgacagccttacgtcccaaaacctgcatcagcgagaaggagacgagacgacggcgctgctgactggtgaaggagggagagctggtcctcccactatggtgggctccgtcagcagccccactcagtgcctgcgtycctcaccctcagtcccaggagctggaagcgaaccacagtgttgaggggagcccgctgggaagaggggactcgggaggacagccctggatactaccagagtgacagatggctgtggctgcagggcaaagagatcccctgcagttctgggttggccacagggagcccaggacacccgccttcatgcctctgctgtgagacccagcaaagcagggcccatgaccactagggcctgggctgaccctgactcagaacaggacaatgacggggtggggaggcatcccatccagcctcagagggcccagagaatggctgagcaggacagtgggagaccagaccctaccccgcaactccagtaagcagggcactgcccagggagactgccttcagaaacctgagcttcagcggccaacaccccccatcccctgcgcatccttgtctcatttggggactggtggagctggctgagaggttggggtagtttcctggttacaggggtccacaagaccctctctcatcccggtataggggcctctctcctctcatcgggcctgataagggattggccaaggctgtgtgcatcctgcagagggaaggaagtcagctgggccacccgccatccaccttggcaagagctgggcccactctggcaggccagggtatcatctgcgtgctgctgccgggccaggaagggtgggtgggtggccagcaggctggcagctccagaccccagagggccagaagaactcaccccagtgccctctggatgcaggtgttggggaacactgaggacaatcccccatctcccctcacccttgagcaggccctccctgcactctctgccacatgtccctcctggtctgatcacggctgtgctcactgatgtggctgctttctgtctctgcccctgtgcccttggaggcaggcagtgaggtgctcctttcccaggcccccaccccttctcccccttcagccacttcccagcgagttggaaatgtgccttgcacccccagccgagtgaagcccagaacgcatctatatgcatcgatgtaacaagctcggatcagggacctaattggtttcccagtagtgggtaatttctcgttgcaaatattaatccgttgtttttctggcgcccagcccggcccgccgcagtactgtactcgaggtacgttcctatgcaaccgagagccccggcaaatacttcatgagcttagcagcctgggctcgagcagctatgcaaacgcgcttttcatttggagcacggggctgatgtgaagataagaattgtttctcctggagaaagatccatcatttctccagcttccaagcccccggcacctctgctcagctcccagatgtgacgagcacctcccgccagggggagtcaggggttgatcaaaccagctcttgtgacccaaaccagtgccgctgcattaaagggaggcccagctactccttcccagctgagatgtgggtacaggtcagatttgtcagggagatggcactaacacgacacaagctcactcccagaaccgcagctgatgtttataataatcgtatgtactgtgcaatttaggaggggaaaaaaaggctgtacaagctttaactctaaaataaatttctatttttttcctcttgcaaaattaataaaagatgttattaagaatatagtccgagtcaccggatttggggtcagatggggagtccatgctgcctccaggagctgagtgacacagagaagccctcactgagctgcagatggggtcatgatctcgccctgactactcaatgagattgtcctgccgtatgagcagacaacagtagctcatccatagagagtggtgattacatgcctggctctaacttgtttaatccacgtaacacaaccctttggggtgggcactattattatcctcactttacagataagggagctgagacacagagaggttgtgcagctttcctgggacacacagctttggaagctattagccaatgcacaaatcctgagagggcccctggagagttgaggtgggggtgacaacacttgggtctttggccctggggtttcccttcaccatgtg

SEQ ID NO: 71689 - DNA, 649 bp, Homo sapiens
ctttccacctgctgccctgggggattttgaccacaaccttgtgagatgggcatcattattcccattctactaatgaagaaactgaggcttttggaggtgatgtgaccaacccagtgtcatgcaactaatcagttagaggcagaataggaaggcaaacccatcattctgtcaaaaagaggaaaataaattatttgcgaatggtatatatcaaaagatgtttacagtttcatttgttttcagaattatacattgaaakgcacagaaattattttggcagaatacacaccaaaaagttaacggtgattatccctacataatgaatatagggaattaactccggaggcttctttttgctaactttattttctgatggggggcaacaggctcttcttcgctaagcagcatttccctcccctccgcccaccccagagacaaggtctcactctgtcgcccaggctggagtgtagtagcacaatcggagcttgctgcagcctccaacatcctaggcttaagcaatcctcctgccttagctttccaagtaggtaggactacaagtgtgtgttaccacatccagctaatttttaaatttttctatagagatagggtcttgtcgtgttggccaggctgatctcaaactcctggcttcaag

SEQ ID NO: 71690 - DNA, 797 bp, Homo sapiens
atgcatgagtctgcacttctaacgagtcttttacgaatagatccccagaggtggtctgtttggacaattaagggggaatcacgattagcaactctctcctaacaccttgtatatttgtatatttccctttacttccttttctttcttttctatttggttatttatttattatttgagacgaaatatccactgtgctcggcatacttcccttttctaggagtasaaacaaattatggaatgatgggtaacaatccccgaaagagtccctataaaagtcaattcaatttttcttgctatggaagcatttataagacacattaaaaaagaatcatttcagccaatggataaggaggctatagcagaaagtgagaatcactcttatgccatgactactggaatgggtaggaatggggcagggctctcctcgcccaccaggaagcaccaagactggccactcaaatggtcaacaaacagccttctttttttttttttttaattttttgatatagaatttagcttttgttgcccaggctggagtgcaatggcgcgatctcggctcaccgcaacctctgcctcctaggttcaagtgattctcctgcctcagcctcccgagtagctgggattaaaggcatgtgcctctatgacaggctgatttgtatttttagtagagtcgggatttctccatgttggtcagggtgatctccacctcccgactacaggtgattgacccgcctcggcatgccattgtgctgggattacaggcgtgagacaccattcccaaccacaactctattctt

SEQ ID NO: 71691 - DNA, 797 bp, Homo sapiens
atgcatgagtctgcacttctaacgagtcttttacgaatagatccccagaggtggtctgtttggacaattaagggggaatcacgattagcaactctctcctaacaccttgtatatttgtatatttccctttacttccttttctttcttttctatttggttatttatttattatttgagacgaaatatccactgtgctcggcatacttcccttttctaggagtagaaacaaattatggaatgatgggtaacaatccccgaaagagtccctataaaagtcaattcaatttttyttgctatggaagcatttataagacacattaaaaaagaatcatttcagccaatggataaggaggctatagcagaaagtgagaatcactcttatgccatgactactggaatgggtaggaatggggcagggctctcctcgcccaccaggaagcaccaagactggccactcaaatggtcaacaaacagccttctttttttttttttttaattttttgatatagaatttagcttttgttgcccaggctggagtgcaatggcgcgatctcggctcaccgcaacctctgcctcctaggttcaagtgattctcctgcctcagcctcccgagtagctgggattaaaggcatgtgcctctatgacaggctgatttgtatttttagtagagtcgggatttctccatgttggtcagggtgatctccacctcccgactacaggtgattgacccgcctcggcatgccattgtgctgggattacaggcgtgagacaccattcccaaccacaactctattctt

SEQ ID NO: 71692 - DNA, 379 bp, Homo sapiens
accccttctactggtcccttgaataagtaccagccaatggcacctctgttagagcatggctgatgagtgtaaacatctcttccattattcagtcaaataaagatggaaattctttataaatctagtgatgatgagccaaccaacaaactttattgagcattgtgacaagccctggggctctgccaaatcctggggatatggcatggatcatgaaacaattaataatctctcctctcagagagctatttttatgatgatactgatggtggcaatgatgatgatgwtgatggtgattatgaccatgatgacaatggtgatggtggtggtgatgatggtaatgatgatgatggtgatgttggtaatgatggtggtgattatg

SEQ ID NO: 71693 - DNA, 499 bp, Homo sapiens
aaaacaaaacaaaacaaaacaaaaacccayatgtggtataatagagaaagcccataagaagtcacattcctataaaagagaagcagacaacagaatataaacaaatgagttcaaaaaagtgggagaagtattgtgaaggattaacagaaaaaaaaaaccccaggatctcatttggaagtaggagtgagacaaattcgtataagaaattgacttttccttcacagtcagtagagtaaacagacaacccacagagtgggagaaaatcttcacaatctatatatccaacaaaggactaatatctagaatctacaacgaactcaaacaaattggcaagaaaaaaacaatcccatcaaaaagtgggctaaggacataaatagacagttgttgaaagaatatatacaaatggctaatgaacatatgaaaaaaatgttcaacatcactaatgaccagggaaatcaaaaccataaggtgataccaccttacttctgcaagaattgcc

SEQ ID NO: 71694 - DNA, 1206 bp, Homo sapiens
ggtccccatattggtttctgctgtgttctctgaaaagtgaattgtctctgtatttgtggaggcttcagaagtgagtatctcacctgagaagctacttgcacttggtaaggagctggtcacaagttctgagtgtgtgtccaacatgtctatggtcttcctcctgccagaggtgagaagggaagtcacagggagagcagaagtggggctacttcctgatactgcggaataaagagatgaatgtgaggttattgcaggtaaaggcactggggaagaaggagaactggtttcttccacagagggagggctttgccatgacacgcccttagtacttctgctcatagtagtggtctcctctgagtgtggaaatctctgagtcacaggtgagtgagtcccttcccaggaagctgtgcttgatgtgtccagggtaagggtagcctgtgagatagtccctataggacctgtttggttggtgatggccatttctgtggatcctgttacaaaaggaaaagtggagagcctggtgatggtttctgtggagatgtagggtgacattttggaatgatcaggccctgagatggttgttctgctggaagtgataacttctgtcctggagacctcagtagtagtagtagtgggcacttctgaaaggacagtgctggtctctgtcacagtgttgatctcctcagasgtcctggtgtcccttaatccaggaatcaaagaggatgttgattcagtctgaattctagtctcaaagaaggcaggagttgatgtagaaacacttgtatcccccatggcgaaggtgatacccattggagatgtggctttggatgtgtgtgaatcagctgggacagaagattgtgattcatgtccagaaatggaggtccccacgttggccactgcagtgtttgtatgcatggaagcatgcatggcttctgtgtgcgcagtgtctttgtaagtggtcagtctctcctgtgtggggctgcttaaatttggaggtgaactcgttacgggctctgggcttgttgtgcccaatacatttgtggttgtcaccagaacagaagtaagaagtgcagtcacagggagaggagaggaggggatgctctctggtgatgtggaggaaacaggagaaggggatgtcatggaaggtgacatcagggaaaacccagagctggtttcttccacagggggagttgtcatccatgacac

SEQ ID NO: 71695 - DNA, 1206 bp, Homo sapiens
ggtccccatattggtttctgctgtgttctctgaaaagtgaattgtctctgtatttgtggaggcttcagaagtgagtatctcacctgagaagctacttgcacttggtaaggagctggtcacaagttctgagtgtgtgtccaacatgtctatggtcttcctcctgccagaggtgagaagggaagtcacagggagagcagaagtggggctacttcctgatactgcggaataaagagatgaatgtgaggttattgcaggtaaaggcactggggaagaaggagaactggtttcttccacagagggagggctttgccatgacacgcccttagtacttctgctcatagtagtggtctcctctgagtgtggaaatctctgagtcacaggtgagtgagtcccttcccaggaagctgtgcttgatgtgtccagggtaagggtagcctgtgagatagtccctataggacctgtttggttggtgatggccatttctgtggatcctgttacaaaaggaaaagtggagagcctggtgatggtttctgtggagatgtagggtgacattttggaatgatcaggccctgagatggttgttctgctggaagtgataacttctgtcctggagacctcagtagtagtagtagtgggcacttctgaaaggacagtgctggtctctgtcacagtgttgatctcctcagacgtcctggtgtcccttaatccaggaatcaaagaggatgttgattcagtctgaattctagtctcaaagaaggcaggagttgatgtagaaacacttgtatcccccatggygaaggtgatacccattggagatgtggctttggatgtgtgtgaatcagctgggacagaagattgtgattcatgtccagaaatggaggtccccacgttggccactgcagtgtttgtatgcatggaagcatgcatggcttctgtgtgcgcagtgtctttgtaagtggtcagtctctcctgtgtggggctgcttaaatttggaggtgaactcgttacgggctctgggcttgttgtgcccaatacatttgtggttgtcaccagaacagaagtaagaagtgcagtcacagggagaggagaggaggggatgctctctggtgatgtggaggaaacaggagaaggggatgtcatggaaggtgacatcagggaaaacccagagctggtttcttccacagggggagttgtcatccatgacac

SEQ ID NO: 71696 - DNA, 1206 bp, Homo sapiens
ggtccccatattggtttctgctgtgttctctgaaaagtgaattgtctctgtatttgtggaggcttcagaagtgagtatctcacctgagaagctacttgcacttggtaaggagctggtcacaagttctgagtgtgtgtccaacatgtctatggtcttcctcctgccagaggtgagaagggaagtcacagggagagcagaagtggggctacttcctgatactgcggaataaagagatgaatgtgaggttattgcaggtaaaggcactggggaagaaggagaactggtttcttccacagagggagggctttgccatgacacgcccttagtacttctgctcatagtagtggtctcctctgagtgtggaaatctctgagtcacaggtgagtgagtcccttcccaggaagctgtgcttgatgtgtccagggtaagggtagcctgtgagatagtccctataggacctgtttggttggtgatggccatttctgtggatcctgttacaaaaggaaaagtggagagcctggtgatggtttctgtggagatgtagggtgacattttggaatgatcaggccctgagatggttgttctgctggaagtgataacttctgtcctggagacctcagtagtagtagtagtgggcacttctgaaaggacagtgctggtctctgtcacagtgttgatctcctcagacgtcctggtgtcccttaatccaggaatcaaagaggatgttgattcagtctgaattctagtctcaaagaaggcaggagttgatgtagaaacacttgtatcccccatggcgaaggtgatacccattggagatgtggctttggatgtgtstgaatcagctgggacagaagattgtgattcatgtccagaaatggaggtccccacgttggccactgcagtgtttgtatgcatggaagcatgcatggcttctgtgtgcgcagtgtctttgtaagtggtcagtctctcctgtgtggggctgcttaaatttggaggtgaactcgttacgggctctgggcttgttgtgcccaatacatttgtggttgtcaccagaacagaagtaagaagtgcagtcacagggagaggagaggaggggatgctctctggtgatgtggaggaaacaggagaaggggatgtcatggaaggtgacatcagggaaaacccagagctggtttcttccacagggggagttgtcatccatgacac

SEQ ID NO: 71697 - DNA, 1912 bp, Homo sapiens
tagagagccggatttccaagtctcagcaccactggcattgggcatcctcctttatcgtggcaactgtcctgcactgcatcctctacccaccacatgccagtggcaacccctccccctagctgcgacaaccaaaaacgtctccagacattgcctgatgtcctttggggaggaaggggatgagaaagccctcactcccttgccagctgagagccactagtctagatattaacctctcgctggccttaggatacatagggtacatttcatttttttatttttggggggaggggatctcactatgtcacccaggctggagtgcaatggtgcaatcttggctcactgcagtctcgacctcctggacccaaggaatcctccccgcctcagcctctcccaagtagctgggactacaggcatgcgccaccatgccctgctattttttttttattttatattttgtagggaaagggtctcactatgttgcccagactggtcttgaactcctggcctcaagaaatcctcccaaagcacgtgggctacaggtgttagcctgtaaccatgcctggctcttcgggtacatttctgttggggtaagagttgactcatcattggaggactctggagtccctctctctgtcccccaacgaggcaggtgcagaattgcccccaatcactgttctagagaagagcacagaactagggaggagtctaacacacctgtctgcttttcctcatctgcagacaggggaggggagcgtctccctcccggggttgccatgagaattaaatcagatgctggcgaagctcccagcttcaccgggcgccttagttcatttgtttcctttcttggcaccttcaccctctcctctccagagcctcaacttccctccaatgaactctgctccgaaggtcccacttcttcccccacagcttgtacactaggcacacgaaggcaccacccccaccccatacaagccttctctgctgctcactcccactctgacctccgtgtccccaccacgtccctatggccgactgtgcagtgggacaggcatggagcgtgggtctatacagacccagaggggtcagcggctggggctggagcttgctaggcacctgggtcttgggccatttacgtcacctctctgagcctcggccccacatctgtgaagagagggatgaggatccaccccgtccgggctgcgggaggctcagagcggccccaggtaacgtgcacagcgcagggcccagcatacagcagagactagggtcagcctctttctctcttctctcccccctggatacccactgatgtcagcatttcctacccrtcctgggcaggcacccagctttgcctgcagcccgtgtactgtccccaccccaacgctgatgaaatgccaggtgggtgccctctgcctgccggcctcctacagtcaatggatcgggcagtccagcagggtggggcctgccgtggtggtgtgtaaagatttgtggaaggaaagaaaggaaagagaaagggaaagagggaggaaggaaggaaggagagaaggagggagggagcccctgagctctcacctaacaccccccaaccgctgtttgctgggttctatcccaggtccaaggggtacaggagaggggagggaccccctgggagacatgaggggaggagaccccgcgctgagggggcgtgaatgaggggagatggaggctcacccgtgggtgtccccaccctgcctcagtctccctccatgcccccaagtcaccgccctccctccctccttcccaccagctcccttgaggatggggaaggagcagaggttggccacagagacaagaggtctccgagacggtcccctgccatggccagcccggtggcagagggcaggcagggcttcttgcgttccaggacttggct

SEQ ID NO: 71698 - DNA, 1156 bp, Homo sapiens
tgcattttaggttgaaggcggaggggacgggcaaagggagtcaccggttgccggccatcccccggaacaggggacccagggggcaggcccttgcctcccacagactcaggatgcttccttcttttttttggaaacagagtcccattctattgcccaggctggagtacaatggcacaatcttggctcactgcaacctcggcctcccgggttcaaatgattctcctgcctcagcctcctgagtagctgagattacaggcatttgccactatgcccagctaatttggctggtcttgaactcctgacctcagatgatccacccgcctcggyctcccaaagtgttcagattacaggcgggatccaccgcacctggccaggatgctcccttctgacatctcttaaggcccccgtggcagccccagccggccccaagctaacgggcctctccactcagaaggggtgtgatccccatttcacagtggggtaaggcaaggccctctgaagtctcatggccaagccacagaaccaggaagtgatgtagtgtcctgtaaccaggaaggaattcctacagcccagaagtggttggaccaggaatgtgcccaaccccagagtccacccacttccaaggcctatcgagcaggtctcacatgcacggtcaggcactcatggaggctgcccaggacatgggagccaggggagactcctcgtgcagcctgggggaaaccagggcagactccctggaggaagcaacaatatacagggttccatctgtacaggtaaaaccttcctcacgcagcctgggggaaaccagggcagactccctggaggaagcaacaatatacagggttccatctgtacaggtaaaaccttcctgacgcagcctgggggaaaccagggcagactccctggaggaagcaacaatatacagggttccatctgtacaggtaaaaccttcctgacgcagcctgggggaaaccagggcagactccctggaggaagcaacaatatacagggttccatctgtacaggtaaaaccttcctcacgcagcctgggggaaaccagggcagactccctggaggaagcaacaatatacagggttccatctgtacaggtaaaaccttcctccattttaagtgcaaaaacggacagggacagatg

SEQ ID NO: 71699 - DNA, 1156 bp, Homo sapiens
tgcattttaggttgaaggcggaggggacgggcaaagggagtcaccggttgccggccatcccccggaacaggggacccagggggcaggcccttgcctcccacagactcaggatgcttccttcttttttttggaaacagagtcccattctattgcccaggctggagtacaatggcacaatcttggctcactgcaacctcggcctcccgggttcaaatgattctcctgcctcagcctcctgagtagctgagattacaggcatttgccactatgcccagctaatttggctggtcttgaactcctgacctcagatgatccacccgcctcggtctcccaaagtgttcagattacaggcgggatccaccgcacctggccaggatgctcccttctgacatctcttaaggcccccgtggcagccccagccggccccaagctaacgggcctctccactcagaaggggtgtgatccccatttcacagtggggtaaggcaaggccctctgaagtctcatggccaagccacagaaccaggaagtgatgtagtgtcctgtaaccaggaaggaattcctacagcccagaagtggttggaccaggaatgtgcccaaccccagagtccacccacttccaaggcctatcgagcaggtctcacatgcacggtcaggcactcatggaggctgcccaggacatgggagccaggggagactcctcgtgcagcctgggggaaaccagggcagactccctggaggaagcaacaatatacagggttccatctgtacaggtaaaaccttcctcacgcagcctgggggaaaccagggcagactccctggaggaagcaacaatatacagggttccatctgtacaggtaaaaccttcctgacgcagcctgggggaaaccagggcagactccctggaggaagcaacaatatacagggttccatctgtacaggtaaaaccttcctsacgcagcctgggggaaaccagggcagactccctggaggaagcaacaatatacagggttccatctgtacaggtaaaaccttcctcacgcagcctgggggaaaccagggcagactccctggaggaagcaacaatatacagggttccatctgtacaggtaaaaccttcctccattttaagtgcaaaaacggacagggacagatg

SEQ ID NO: 71700 - DNA, 822 bp, Homo sapiens
tttttgttttgttttgttttttgagacagagtctcactctgtcgcccaggctggggtgcagtggcctgatctcagctcactgaaacctctgcctcccgggttcaagcgattctcctgtctcagcctcccaagtagctgggattagaggcgctccccaccatgccaggctaatttttctatttttagtagagacggggtttcaccatgtcgaggatgctagtctccaactcctaaccttatcaggtgatccgcacccctcgcctcccaaagcgctgggattacaggcctgagccacctcgctctgctggccaaataaactttctaaatgaactgagacctrtctcacattttcaggattcacaggctcttatcaattttgtttcagagtcaaaccatggactgaattccttcccaaggttagttgggcttccgcccaggaataaacaaggacagcttaaaggttagaggcaagatggagttgattaggtctgatttctttcaccatcacaatttcctcagttacaattttgcaaaggtggtttccaacggactcagccgcacgcggcccctctgtccctccgggggacaggcgagtgtccctggggcctgcagggcagtcctgctggctgcaaaagagagaatcacgcgacccctagccgggcctcccagggcctccgcgcgtcagtcctcctggccaccgcgtggcgctgtgccttacgttgttgggccgttgggtggaccacgtggtctccgacgcctcaaggcctgctcagcgtgcgcgggcatccggtgggtgcgggaggcccgaggccaggcaggcag

SEQ ID NO: 71701 - DNA, 822 bp, Homo sapiens
tttttgttttgttttgttttttgagacagagtctcactctgtcgcccaggctggggtgcagtggcctgatctcagctcactgaaacctctgcctcccgggttcaagcgattctcctgtctcagcctcccaagtagctgggattagaggcgctccccaccatgccaggctaatttttctatttttagtagagacggggtttcaccatgtcgaggatgctagtctccaactcctaaccttatcaggtgatccgcacccctcgcctcccaaagcgctgggattacaggcctgagccacctcgctctgctggccaaataaactttctaaatgaactgagacctatctcacattttcaggattcacaggctcttatcaattttgtttcagagtcaaaccatggactgaattccttcccaaggttagttgggcttccgcccaggaataaacaaggacagcttaaaggttagaggcaagatggagttgrttaggtctgatttctttcaccatcacaatttcctcagttacaattttgcaaaggtggtttccaacggactcagccgcacgcggcccctctgtccctccgggggacaggcgagtgtccctggggcctgcagggcagtcctgctggctgcaaaagagagaatcacgcgacccctagccgggcctcccagggcctccgcgcgtcagtcctcctggccaccgcgtggcgctgtgccttacgttgttgggccgttgggtggaccacgtggtctccgacgcctcaaggcctgctcagcgtgcgcgggcatccggtgggtgcgggaggcccgaggccaggcaggcag

SEQ ID NO: 71702 - DNA, 822 bp, Homo sapiens
tttttgttttgttttgttttttgagacagagtctcactctgtcgcccaggctggggtgcagtggcctgatctcagctcactgaaacctctgcctcccgggttcaagcgattctcctgtctcagcctcccaagtagctgggattagaggcgctccccaccatgccaggctaatttttctatttttagtagagacggggtttcaccatgtcgaggatgctagtctccaactcctaaccttatcaggtgatccgcacccctcgcctcccaaagcgctgggattacaggcctgagccacctcgctctgctggccaaataaactttctaaatgaactgagacctatctcacattttcaggattcacaggctcttatcaattttgtttcagagtcaaaccatggactgaattccttcccaaggttagttgggcttccgcccaggaataaacaaggacagcttaaaggttagaggcaagatggagttgattaggtctgatttctttcaccatcacaatttcctcagttacaattttgcaaaggtggtttccaacggactcagccgcacgcggcccctctgtccctccgggggacaggcgagtgtccctggggcctgcagggcagtcctgctggctgcaaaagagagaatcacgcgacccctagccgggcctcccagggcctccgcgcgtcagtcctcctggccaccgcgtggcgctgtgccttacgttgttgggccgttgggtggrccacgtggtctccgacgcctcaaggcctgctcagcgtgcgcgggcatccggtgggtgcgggaggcccgaggccaggcaggcag

SEQ ID NO: 71703 - DNA, 1197 bp, Homo sapiens
agagctgcggctgggcggctgcagctgcgcctgggagtgcagggctcccgccctgccagctcagtaggagatgggggctcctgcctrttcctggctcctgttggccctgcagagtgcacaaacctggccgcgcttcctccactgcagcttacgtctttgcagcagccactcccgatgggctgccactgccatctgtgagaccattaatgtgtgcaatttgaggactcagtggccttgccattgtttccttggtttttattgagcattggctggggtcggcgaggggatgtgattatatttctatgtgaatcgtgagaatcttgaaccatggttgtcctgctggcctgttttactacataccaatgagtaaaatgtgatcatacagaaatcacaaagttgaaatctataaaatgaaaagatctctgtattataaggtgagagtgccaaggattgaacattcatctttgtcagactttgatgtagaatctcccaaaataatgatgagctaaagcgtctgggagacagcatcagcctgtccaggtgctctcaggtgcaggcatttccaccccattcattcgttattgacacgttcatgcattttcagtctttttcctacccatgtatattttacataattgaaattatattgtgtgctgggccgggcacggtggctcacgcctgtaatcccagcactttgggaagccaaggcaggtggatcatctgaggtcaggagttcgagaccagcctggccaacatggtgaaaccctgtctctactaaaaatacaagaattagctgggtgtggtggcaggtgcctgtaatcccagctacttgggaggctgaggcaggagaattgcattaatccgggaggcagaggttgcagtgagctgaggttacaccactgcactctagtctgagcaacacagcaagactctgtctcaaatatgtgtatatatatataaaaaatatatatatatatatagagagagagagagaactgtttttttcccaaaagaatagcttaattttttcctaattagaagactaatatttgcttacaaataatatttgcagtctataaaatggcagtgaagacaacaaaaacttcccataaacttactagccaggggtgacacttattaatattttagcatttgtctttttttctgtgcatacacaattgtatctttttttttttt

SEQ ID NO: 71704 - DNA, 1197 bp, Homo sapiens
agagctgcggctgggcggctgcagctgcgcctgggagtgcagggctcccgccctgccagctcagtaggagatgggggctcctgcctgttcctggctcctgttggccctgcagagtgcacaamcctggccgcgcttcctccactgcagcttacgtctttgcagcagccactcccgatgggctgccactgccatctgtgagaccattaatgtgtgcaatttgaggactcagtggccttgccattgtttccttggtttttattgagcattggctggggtcggcgaggggatgtgattatatttctatgtgaatcgtgagaatcttgaaccatggttgtcctgctggcctgttttactacataccaatgagtaaaatgtgatcatacagaaatcacaaagttgaaatctataaaatgaaaagatctctgtattataaggtgagagtgccaaggattgaacattcatctttgtcagactttgatgtagaatctcccaaaataatgatgagctaaagcgtctgggagacagcatcagcctgtccaggtgctctcaggtgcaggcatttccaccccattcattcgttattgacacgttcatgcattttcagtctttttcctacccatgtatattttacataattgaaattatattgtgtgctgggccgggcacggtggctcacgcctgtaatcccagcactttgggaagccaaggcaggtggatcatctgaggtcaggagttcgagaccagcctggccaacatggtgaaaccctgtctctactaaaaatacaagaattagctgggtgtggtggcaggtgcctgtaatcccagctacttgggaggctgaggcaggagaattgcattaatccgggaggcagaggttgcagtgagctgaggttacaccactgcactctagtctgagcaacacagcaagactctgtctcaaatatgtgtatatatatataaaaaatatatatatatatatagagagagagagagaactgtttttttcccaaaagaatagcttaattttttcctaattagaagactaatatttgcttacaaataatatttgcagtctataaaatggcagtgaagacaacaaaaacttcccataaacttactagccaggggtgacacttattaatattttagcatttgtctttttttctgtgcatacacaattgtatctttttttttttt

SEQ ID NO: 71705 - DNA, 1197 bp, Homo sapiens
agagctgcggctgggcggctgcagctgcgcctgggagtgcagggctcccgccctgccagctcagtaggagatgggggctcctgcctgttcctggctcctgttggccctgcagagtgcacaaacctggccgcgcttcctccactgcagcttacgtctttgcagcagccactcccratgggctgccactgccatctgtgagaccattaatgtgtgcaatttgaggactcagtggccttgccattgtttccttggtttttattgagcattggctggggtcggcgaggggatgtgattatatttctatgtgaatcgtgagaatcttgaaccatggttgtcctgctggcctgttttactacataccaatgagtaaaatgtgatcatacagaaatcacaaagttgaaatctataaaatgaaaagatctctgtattataaggtgagagtgccaaggattgaacattcatctttgtcagactttgatgtagaatctcccaaaataatgatgagctaaagcgtctgggagacagcatcagcctgtccaggtgctctcaggtgcaggcatttccaccccattcattcgttattgacacgttcatgcattttcagtctttttcctacccatgtatattttacataattgaaattatattgtgtgctgggccgggcacggtggctcacgcctgtaatcccagcactttgggaagccaaggcaggtggatcatctgaggtcaggagttcgagaccagcctggccaacatggtgaaaccctgtctctactaaaaatacaagaattagctgggtgtggtggcaggtgcctgtaatcccagctacttgggaggctgaggcaggagaattgcattaatccgggaggcagaggttgcagtgagctgaggttacaccactgcactctagtctgagcaacacagcaagactctgtctcaaatatgtgtatatatatataaaaaatatatatatatatatagagagagagagagaactgtttttttcccaaaagaatagcttaattttttcctaattagaagactaatatttgcttacaaataatatttgcagtctataaaatggcagtgaagacaacaaaaacttcccataaacttactagccaggggtgacacttattaatattttagcatttgtctttttttctgtgcatacacaattgtatctttttttttttt

SEQ ID NO: 71706 - DNA, 1197 bp, Homo sapiens
agagctgcggctgggcggctgcagctgcgcctgggagtgcagggctcccgccctgccagctcagtaggagatgggggctcctgcctgttcctggctcctgttggccctgcagagtgcacaaacctggccgcgcttcctccactgcagcttacgtctttgcagcagccactcccgatgggctgccactgccatctgtgagaccattaatgtgtgcaatttgaggactcagtggccttgccattgtttccttggtttttattgagcattggctggggtcggcgaggggatgtgattatatttctatgtgaatcgtgagaatcttgaaccatggttgtcctgctggcctgttttactacataccaatgagtaaaatgtgatcatacagaaatcacaaagttgaaatctataaaatgaaaagatctctgtattataaggtgagagtgccaaggattgaacattcatctttgtcagactttgatgtagaatctcccaaaataatgatgagctaaagcgtctgggagacagcatcagcctgtccaggtgctctcaggtgcaggcatttccaccccattcattcgttattgacacgttcatgcattttcagtctttttcctacccatgtatattttacataattgaaattatattgtgtgctgggccgggcacggtggctcacgcctgtaatcccagcactttgggaagccaaggcaggtggatcatctgaggtcaggagttcgagaccagcctggccaacatggtgaaaccctgtcwctactaaaaatacaagaattagctgggtgtggtggcaggtgcctgtaatcccagctacttgggaggctgaggcaggagaattgcattaatccgggaggcagaggttgcagtgagctgaggttacaccactgcactctagtctgagcaacacagcaagactctgtctcaaatatgtgtatatatatataaaaaatatatatatatatatagagagagagagagaactgtttttttcccaaaagaatagcttaattttttcctaattagaagactaatatttgcttacaaataatatttgcagtctataaaatggcagtgaagacaacaaaaacttcccataaacttactagccaggggtgacacttattaatattttagcatttgtctttttttctgtgcatacacaattgtatctttttttttttt

SEQ ID NO: 71707 - DNA, 1197 bp, Homo sapiens
agagctgcggctgggcggctgcagctgcgcctgggagtgcagggctcccgccctgccagctcagtaggagatgggggctcctgcctgttcctggctcctgttggccctgcagagtgcacaaacctggccgcgcttcctccactgcagcttacgtctttgcagcagccactcccgatgggctgccactgccatctgtgagaccattaatgtgtgcaatttgaggactcagtggccttgccattgtttccttggtttttattgagcattggctggggtcggcgaggggatgtgattatatttctatgtgaatcgtgagaatcttgaaccatggttgtcctgctggcctgttttactacataccaatgagtaaaatgtgatcatacagaaatcacaaagttgaaatctataaaatgaaaagatctctgtattataaggtgagagtgccaaggattgaacattcatctttgtcagactttgatgtagaatctcccaaaataatgatgagctaaagcgtctgggagacagcatcagcctgtccaggtgctctcaggtgcaggcatttccaccccattcattcgttattgacacgttcatgcattttcagtctttttcctacccatgtatattttacataattgaaattatattgtgtgctgggccgggcacggtggctcacgcctgtaatcccagcactttgggaagccaaggcaggtggatcatctgaggtcaggagttcgagaccagcctggccaacatggtgaaaccctgtctctactaaaaatacaagaattagctgggtgtggtggcaggtgcctgtaatcccagctacttgggaggctgaggcaggagaattgcattaatccgggaggcagaggttgcagtgagctgaggttacaccactgcactctagtctgagcaacacagcaagactctgtctcaaatatgtgtatatatatataaaawatatatatatatatatagagagagagagagaactgtttttttcccaaaagaatagcttaattttttcctaattagaagactaatatttgcttacaaataatatttgcagtctataaaatggcagtgaagacaacaaaaacttcccataaacttactagccaggggtgacacttattaatattttagcatttgtctttttttctgtgcatacacaattgtatctttttttttttt

SEQ ID NO: 71708 - DNA, 1197 bp, Homo sapiens
agagctgcggctgggcggctgcagctgcgcctgggagtgcagggctcccgccctgccagctcagtaggagatgggggctcctgcctgttcctggctcctgttggccctgcagagtgcacaaacctggccgcgcttcctccactgcagcttacgtctttgcagcagccactcccgatgggctgccactgccatctgtgagaccattaatgtgtgcaatttgaggactcagtggccttgccattgtttccttggtttttattgagcattggctggggtcggcgaggggatgtgattatatttctatgtgaatcgtgagaatcttgaaccatggttgtcctgctggcctgttttactacataccaatgagtaaaatgtgatcatacagaaatcacaaagttgaaatctataaaatgaaaagatctctgtattataaggtgagagtgccaaggattgaacattcatctttgtcagactttgatgtagaatctcccaaaataatgatgagctaaagcgtctgggagacagcatcagcctgtccaggtgctctcaggtgcaggcatttccaccccattcattcgttattgacacgttcatgcattttcagtctttttcctacccatgtatattttacataattgaaattatattgtgtgctgggccgggcacggtggctcacgcctgtaatcccagcactttgggaagccaaggcaggtggatcatctgaggtcaggagttcgagaccagcctggccaacatggtgaaaccctgtctctactaaaaatacaagaattagctgggtgtggtggcaggtgcctgtaatcccagctacttgggaggctgaggcaggagaattgcattaatccgggaggcagaggttgcagtgagctgaggttacaccactgcactctagtctgagcaacacagcaagactctgtctcaaatatgtgtatatatatataaaaaatatatatatatatakagagagagagagagaactgtttttttcccaaaagaatagcttaattttttcctaattagaagactaatatttgcttacaaataatatttgcagtctataaaatggcagtgaagacaacaaaaacttcccataaacttactagccaggggtgacacttattaatattttagcatttgtctttttttctgtgcatacacaattgtatctttttttttttt

SEQ ID NO: 71709 - DNA, 1197 bp, Homo sapiens
agagctgcggctgggcggctgcagctgcgcctgggagtgcagggctcccgccctgccagctcagtaggagatgggggctcctgcctgttcctggctcctgttggccctgcagagtgcacaaacctggccgcgcttcctccactgcagcttacgtctttgcagcagccactcccgatgggctgccactgccatctgtgagaccattaatgtgtgcaatttgaggactcagtggccttgccattgtttccttggtttttattgagcattggctggggtcggcgaggggatgtgattatatttctatgtgaatcgtgagaatcttgaaccatggttgtcctgctggcctgttttactacataccaatgagtaaaatgtgatcatacagaaatcacaaagttgaaatctataaaatgaaaagatctctgtattataaggtgagagtgccaaggattgaacattcatctttgtcagactttgatgtagaatctcccaaaataatgatgagctaaagcgtctgggagacagcatcagcctgtccaggtgctctcaggtgcaggcatttccaccccattcattcgttattgacacgttcatgcattttcagtctttttcctacccatgtatattttacataattgaaattatattgtgtgctgggccgggcacggtggctcacgcctgtaatcccagcactttgggaagccaaggcaggtggatcatctgaggtcaggagttcgagaccagcctggccaacatggtgaaaccctgtctctactaaaaatacaagaattagctgggtgtggtggcaggtgcctgtaatcccagctacttgggaggctgaggcaggagaattgcattaatccgggaggcagaggttgcagtgagctgaggttacaccactgcactctagtctgagcaacacagcaagactctgtctcaaatatgtgtatatatatataaaaaatatatatatatatatagagagagagagagaactgtttttttcccaaaagaatagcttaattttttcctaattagaagactaatatttgcttacaaataatatttgcagtctataaaatggcagtgaagacaacaaaaacttcccataaacttactagccaggggtgacacttattaatattttagcatttgtctttttttctrtgcatacacaattgtatctttttttttttt

SEQ ID NO: 71710 - DNA, 1078 bp, Homo sapiens
cctcccacctcagcttcccaaagttctgggattacgggcatgagccactcagtctggtctatttgttaatttacttatttagagaccaggtctccctccatcaccaggctgcagtttaatggcacaattacagttcactgcagcctcgaacttcttggctcaagtgatcctcctacctcagcytctcaagtagccaggataggcacgagccactacactcagccctaagacaggtatttttttatacttaatttattattgtggctttttgcaacatggcaaaacattacagcttaaagcagacatcatctccttatagaggaggaaaaagttttgcagtcaaatcaaattgtaattaagaggtcattgctataccattctattcagtttaataaaaatgatattataacttcatgaactccagagataataggttacttaataacataggcaaaaaaccagaggatacactggttgaataataaaggacatggtaaggaatataggtccatctatgcctatgataataaacataaaagactgcagaacaatttaagaacttagaataatcacagatctattcataaaagttcaaaatgtgcctgattaccgaaaaggaattattaaggtatgcagtgaagggaatggagcagggctgggcgcggtggctcatgcctgaaatcccagcactttgggaggcagaggtgggtggatcacctgaggtcaggagttcgagaacagcctgaccaacacggtgaaaccctgtctctactaaaactacaaaaattagccgggtgtattggcatgcacctgtaatctcagctactcaggaggctgaggcacgagaatcgcttgagcctgggaggcagaggtttcagtgagtcgagatcacaccactgcactccagcctgggtgacagaccgagactccagcttaaaaaaaaaaaaaaaaaaaggaaatgaaaatgaagcggaataaaatataaaatgtctttttatttctctctgatttcaacttcctttttatctgtatgttgtatagggagaagatgtgcctcagtattgaagatccaatgctc

SEQ ID NO: 71711 - DNA, 1493 bp, Homo sapiens
ggccgtgaatgcagtggcttcaggggaggacatgggataataggaagatacaagaaacctggcctccctgacaggtcaccccctcctccatgccccttttaggaccccaggacctggggagcaagaaaggcgagttcaggcaaactgcccgtccaacagctgtgggcagcgagggatcacatgctgcccttttcctctccacctcacagggaaaaactgagacgctccatgtccagtctgtaagtcaatggcagagccgggaccagaacctgcatctcgcagctcgtgaggcagacacttggaacctccatggagaacctgtgatgtgctgggggcaaggccaggtctctgcctttgagcctggggaggtggcaatgtggacacagaatgggcacgtcttccattctggggaccaggaggcttcctggccaaggtgatgcctggcctgactcatgagggacaagcatgaaggtgtgacaaggtacggccaaggaggcagcaggagcaggcaaggtgtgacaagttacggccaaggaggcagcaggagcaggcaaggtgtgaccaatgcctgctgtatttgggcacacagagtcggagttattggcttgaaagagagtgaccatccatccagtttgctgggacgtcctggtttatatctgtcagttgtactctgctgtgattataaatagtgcctcctttcacttgcaaacctgtctcagtttggaccatgaattaaatgatctccctcctgacacctgcctgtggggtcattcacagcctgtggctgcgctgaaagaagaggatccgagacagggagggttccatttgtacctcggagcagcagccctgggttggggaggactgtttcagcccccaggacaggttgggggtgcagtgcacgggggagtggggaggtggtgaaaggcccaggtggggtggtcggagctctgggcgtggcaactgggatcccgaccccactcacaggagggatgggttggggctgggtgggatgtcacagcctgaaaattacagggaacaacaccctgtggtcattctagaagccscaccagctatgcaggccaggccaaccttagacctgggcaagggggtctctgctgtggaccccgtgccctggagagccaggacgtcaccagcagcaaatgcaaagaattttttttttaatttcagtctcgtaagagtgttttaaaggttgataactgaacaacagtgagttgtcggagaggacagatgcgaaaaaaagaccccacaggcccaaagatgtggggctgagtgttgagtgcgtgtgtggatgagtgtgtgagtggttgtgtgtgattgcaaatgtgtggtggtgtgagaggttctgtatggttgtgtgtagttgtgaatgtgcggttgtgtgtgtggttgtgtgtatgagtgtgtgagagtgtgtgagtatgcagttgtgtgtgtggttgtgagtgtgtagttgtgtgtggttgtgtgtatgt

SEQ ID NO: 71712 - DNA, 838 bp, Homo sapiens
tccaatatctgttcagaaaaacacctcttactgccttatgaaaacatgttcttcctttatctcatttgaatctcatgcccaccttgcaaggtaggaatttttatacccattttacagagtggaaactaaggttggaagtgaaatgatactgctccaaggggtaggctcaggatttggaaccagatttgggctctgttcccagtccagtgcctattttattttattttattttattttattttatttattttattttattttatttattttattttattttattttatattttattttatattttattttattaaaacaaactcttgctccatagcacaaactatagtgcagtggcatgatcatagctcactgcagcctcgacctcccaggctcaagcaatcctcccacctcagccttccaaacacctggaaccacaggtgcccgccaccacacctggctaatttttgtattttttgtagagactgggttttgccatgttgcccaggctgatctcaaattcctaggctcaagtgatcctcccacctcagcctcccagagkgttagggttacaggcgggagccatcatgcccggtcccagtgccctttatactgttctgatgctgggcaaattggggccagagtcagagccctgacgggggagggttggggaccaagctgggagcttgtccaactaggcttcactgagctcctgctccactatgggtggacaaacagacagacggccagggaagtctgcctccccatcggcggctggactcacagggcctctcatactgacccaggaacctcggccagctcccttgccggatccacaacc

SEQ ID NO: 71713 - DNA, 2406 bp, Homo sapiens
ccagggaaaagggtctcgttgtaatgaatgagtgggtgagagtgaacaggattccacagtggtgaatgtgtggttgacactgaaaagggtcttactgtgatgtatgtgttggtgaccataaacaggttcccactgtgatgagtgagtgggggagagttaacaggttcccactgtggtgaatgagtggctgacagtgaataggtttccactgtgatgaatgagtggctgacagtgaacaggttcccactctggtgaataagtgggtgacaaagaacaggctyccactgtgatgagtgattgcatgagagggaacagttgccttttgttatgaatgtgtgagtgactgtgaacagggttcccactctgatgaatgagtgtgtgacagtgaagtgtttcccacagtggtgaatgagtgggtgacagtgaacaggttcccactgtgaggaatgagtagctcacagtaaagaggttcccactgtgatgagtgagtgggtgacagtgaacaggtacccactgtgatgagtgaatgggtgacagttaaaactttccaactgtgataagttagtgggtgacagttaacaagttaccattgtcatgtatgagtgggtgagagtgaacaggttcccactgtggtgaaagagtgattgaccatgaaaagtatctcactgtgatgagtgtgtgggtgagagtgaataggttcccactgtgataaatgtgtaggtaaccattaacaggatcccactgagatgaatgggtgggtgacagtcaacaggttcccaatgtgttgaatgtgtgggtgagagtgaataggttcccactgtggtgaatgagtggctgacattaaacccattcccactgtggttagtgagtgggtgagagtgaataggttcccactgtggttattgggtggctgacagtgaacaggttcccacgctggtgagtgagtgggtgacaatgaatattttcccactgtgatgagtgagtaggtgacagtgaacaggttcccactgtggtgagtgggtggctgactgagaacagcttcccaatgtggtgaacaagtgggcgagtgaacaggttctcactgtgatgaataagtgggtgacagtgaacaggtttccatggtgatgaatgagtgggtgacagtgaaaagtttcctcttgtaattaatgagtgggagactgtgaacaagtttgcactgtgatgaatgagtgggtaacagagaacagcgtcccaccgtggtgaatgagtggctgaaagtaaacaggttccccttgtggtgaacgagtggctgatagtgaacagtttcccactgtgatgaatgagtttgtgaccattaactggttcccattgtgatgagtgaggggctgacagtgaacaggtacccactgtgatgaatgtgtggctgacattgaacaggttttcattgtggtgaatgagatggtgacagtgaaaaggtttttactgtggtgagtgagtgggtgacagtgaacaggttttcactgtgaggaatgagtgggtgaaagtgaacatgttctaacagagatgaaagagtgggtgacagtcagaagtttcccactgtgctgaatgagtgggtgagagtgaagaggttcccactgtggttattgggtggctgacagtgagcaggttcccaagctgatgagtgagtgggcaacaatgaatattttcccactgtgatgagtgagtaggtgacagtgaacaggttcccactgtggtgagtgggtggctgactgagaacagcttcccaatgtggtgaacaagtgggcgagtgaacaggttctcactgtgatgaataagtgggtgacagtgaacgggtttccatggtgatgaatgagtgggtgacagtgaaaagcttcctcttgtaattaatgagtgggaaacagtgaaaaagtttgcactgtgatgaatgaatgggtaacagtgaacaggatcccacagtggtgaatgagtggctgaaaccgaacaggttccccttgtggtgaatgagtggctgatagtgaacagtttcccactgtgatgaatgagtttgtgacagttagctggttcccattgtgatgagtgaggggctgacagtgaacaggtacccactgtagtgaatgtgtggctgacattgaacaggttttcattgtggtgaatgagatggtgacagtgaacaggtttttactgtggtgagtgcgtgggtgacagtgaacaggttttcactgtgaggtatgagtggttgacagtgaacatgttctaacagagatgaaagagtgggtgacagtgaactgcttcccactgtggtggatgagtggctcacagcaaacaggttcccagtatggtgcctgagtggctgacagtaaacagggttttactgcggttaacgagtgggttacagtgaactggttc

SEQ ID NO: 71714 - DNA, 831 bp, Homo sapiens
cattgaggtgctccatctgcagggcatagtgggcttccacctccctcaggctgtcctccaagctggcagaaggcctttattctaagcaaattaacaaagaacatgaatctaagattcatgggtacctactttaattctgtctttttttatggtgaatagtgctgcagtaaacatgtgagtgccagtgtctttttggtaaaataattttttctttgggtatatacccagtaattcgattaatgggccaaatagctattctatttttagctatttgagaaatcttcaaactgtgttctacaggggctgaattaatttgcatttccaccaacagtgtatatagattcccttttctccacaacctcaacatgtttttatttttgttgcattaacttctaaggtgttagttataattttttttctagagccctgtgtctagaagagtactttctgcatgttcttctagagttttaatagcttgaagtctmacagttaagtctttaaactatattgagatatattgtttatatggtgggaggaagagttttttttcttcttctgcatatgactaacgagttttcccagtatcatttattagatagggagttattttctttttatttctgttgactttgtcaaaagtaggttgtaggagtgtagctttatttcagggctctctcttctgttccacatggtttggctctgtgtccccacccaaatctcaccttgaattgtaataatccccacatgtcattggagggtctgggtgggaggtgattaaatcatgggggtgggtttttcccatgctgttctctgggtcgtgaataagtcttt

SEQ ID NO: 71715 - DNA, 641 bp, Homo sapiens
gttctagctggcctttgtctctggagttctgggaacacctcttactgacctcattgcctactttgtgatgaggcttctagttattggaaaagtctaatgtccatgtatgccctcctgtgaccaatccggttcaccccttgtagttgattgtgccaagtcattttagcctgggacacagaaaatatgctgcaggcctttccctattttcagagtaaagccttgggagagcttgctgcaacactgtcaaacagaagaaaaatccctcttaatcagaagagcaaatgcagctgttttcaatggcaaagtcatggaaccaacctaagtgtttgccagtggttgacaggcagaaaatgtggtgggctggacayggtggcctatgcctgcaatcccaacactttgagaggctgagtcaggaggattgcttgaggccaataccatcctgggcaacataatgataaaaataaaaataaaaaattagccaggtgtggtggcatgcacctgtagtcccacctactagggaggctgaggtgggaggagcacttgaacccaggaagtggaggctgcagtgagctgtgatggtgctatgatggctggtggagtgggaccctgtctcaaaaaagaaaaaaaaatgtggcagatct

SEQ ID NO: 71716 - DNA, 641 bp, Homo sapiens
gttctagctggcctttgtctctggagttctgggaacacctcttactgacctcattgcctactttgtgatgaggcttctagttattggaaaagtctaatgtccatgtatgccctcctgtgaccaatccggttcaccccttgtagttgattgtgccaagtcattttagcctgggacacagaaaatatgctgcaggcctttccctattttcagagtaaagccttgggagagcttgctgcaacactgtcaaacagaagaaaaatccctcttaatcagaagagcaaatgcagctgttttcaatggcaaagtcatggaaccaacctaagtgtttgccagtggttgacaggcagaaaatgtggtgggctggacatggtggccyatgcctgcaatcccaacactttgagaggctgagtcaggaggattgcttgaggccaataccatcctgggcaacataatgataaaaataaaaataaaaaattagccaggtgtggtggcatgcacctgtagtcccacctactagggaggctgaggtgggaggagcacttgaacccaggaagtggaggctgcagtgagctgtgatggtgctatgatggctggtggagtgggaccctgtctcaaaaaagaaaaaaaaatgtggcagatct

SEQ ID NO: 71717 - DNA, 307 bp, Homo sapiens
ggattgcgccactgcactccagcctgggtgacagagtgagactctgyctcaaaaaaaaaaaaaaaagacaatcggtaatgccagtatgatttaatattttgtaatgtaaattttcatattagtaggccaaaaaagaaaaaactatatcatttaaataaatgcaaaaacagatattcaatacattttaaagtcccatgctgattttaaacatttagttacataataataggtggacacatacttaacatgacaaaagatattaaaatatataatatataaatatacatttatgtacttcatattaaaa

SEQ ID NO: 71718 - DNA, 1910 bp, Homo sapiens
atggagtagggaagtggatggggggtgctggggcacttgtagttctggccaggggagatcagggaaggtttgttttttgttttttttttttgaggtaaggtctcactgtcgcccagactggagtgtagtcgcatgatctcagctcaccgcaacctccgccccccaggctcaagcgattctcctgcctcagcctcccgagtagctgggattacaggcacgcaccaccacacccggctaatttttgtatttttagtagagacgggggtttcaccatgttagccaggctggtctcgaactcccgacctcaaatgatccacccacctcagcctcccaaagtgctgggattacagacatgagccactgcgccaggccagcagggagggtcttttgagacaatgacatttcagtaagggtctgaaggaggtggaaggacatttcaggcagaggggatagccagtgcaaagaggtgatatagaagaaatatgtttggggttttgcaggaacagtgtggctggaacagagtgagtgagagggagagtggaaggaagtgagggcagggaggtgatgggacagattgtgaaggagttacgtgccttggggagaactctactttgagacaaggagagatcatggctcaccacagcctcgacctcccaggctcaagcgatcctcccacttcagcctcctgtgtagaagggactacagacacatgccaccacttccggcttattttttaattttttgtagagatggggtctcactatgttgcctaggctggtctcaaactcctgggctcaagtgatcctctggcctcaaaatactgggattacaggtgtaatcacgcttggctgaggatttgggcttttaactcaggggagatgggagccatggagggttctcagcacgggagagactcagtgtgattcatgtgttcacaggtgctctctggctgctgtgggggaagcagactgtgggggcaagtagggggaactgggagaccatggaagggatgaactctgctggttcaggtgagcaatgccaggggcttgaccatggagatggccatcaagagggtagagcaatgggtagattctaaaggtaaggctgatgcattggtataagagaaagagagggtgggcggtgcggtggttcatgcctgtaatcccaacactttgggaggccgaggcaagtggatcacttgaggttaggagtttgagaccagcctggccaacatggagaaacctcrtctctactaaaaatacaaaaattagctgggggtggtggtgtgtgcctgtaatcccagctactcgggaggctgaggcaggagaatcgctttaacccgggaggtggaggttgctgtaagccaagatcacaccactgcactccagcctgggcaacaagagcgagactccatctaaaaaaaaaatgaaagaaaaagaaaaattgggtggattctgtttgcaagtgaatgtacttaaacgatttattcttgaatgccagagatgtttattgaacacctgctgcgtgccaggcactgttctgttttgaggacacagcaatgaacaaagtgataaaaattcctgccctttggggagtgtacatatgagagcgacagacaagaaataatatgaggccaggcacggtggctcacacctgtaatcccaacactgggaggccgaggcaggcagatcacctgaggtcaggagtttgagaccagcctggccaacatggtgaaaccttgtctccactaaaaatacaaaattagccaggcgtggtggcacatgcctgtaatcccagctacttgggaggctgaggcaggagagtcgcttggacccaggaggcagaggttgcagtgagctgagatttaaaaaaaagaaagaaagaaaaagaaacgagatgaatgtaaggtg

SEQ ID NO: 71719 - DNA, 1910 bp, Homo sapiens
atggagtagggaagtggatggggggtgctggggcacttgtagttctggccaggggagatcagggaaggtttgttttttgttttttttttttgaggtaaggtctcactgtcgcccagactggagtgtagtcgcatgatctcagctcaccgcaacctccgccccccaggctcaagcgattctcctgcctcagcctcccgagtagctgggattacaggcacgcaccaccacacccggctaatttttgtatttttagtagagacgggggtttcaccatgttagccaggctggtctcgaactcccgacctcaaatgatccacccacctcagcctcccaaagtgctgggattacagacatgagccactgcgccaggccagcagggagggtcttttgagacaatgacatttcagtaagggtctgaaggaggtggaaggacatttcaggcagaggggatagccagtgcaaagaggtgatatagaagaaatatgtttggggttttgcaggaacagtgtggctggaacagagtgagtgagagggagagtggaaggaagtgagggcagggaggtgatgggacagattgtgaaggagttacgtgccttggggagaactctactttgagacaaggagagatcatggctcaccacagcctcgacctcccaggctcaagcgatcctcccacttcagcctcctgtgtagaagggactacagacacatgccaccacttccggcttattttttaattttttgtagagatggggtctcactatgttgcctaggctggtctcaaactcctgggctcaagtgatcctctggcctcaaaatactgggattacaggtgtaatcacgcttggctgaggatttgggcttttaactcaggggagatgggagccatggagggttctcagcacgggagagactcagtgtgattcatgtgttcacaggtgctctctggctgctgtgggggaagcagactgtgggggcaagtagggggaactgggagaccatggaagggatgaactctgctggttcaggtgagcaatgccaggggcttgaccatggagatggccatcaagagggtagagcaatgggtagattctaaaggtaaggctgatgcattggtataagagaaagagagggtgggcggtgcggtggttcatgcctgtaatcccaacactttgggaggccgaggcaagtggatcacttgaggttaggagtttgagaccagcctggccaacatggagaaacctcatctctactaaaaatacaaaaattagctgggggtggtggtgtgtgcctgtaatcccagctactcgggaggctgaggcaggagaatcgctttaacccgggaggtggaggttgctgtaagccaagatcacaccactgcactccagcctgggcracaagagcgagactccatctaaaaaaaaaatgaaagaaaaagaaaaattgggtggattctgtttgcaagtgaatgtacttaaacgatttattcttgaatgccagagatgtttattgaacacctgctgcgtgccaggcactgttctgttttgaggacacagcaatgaacaaagtgataaaaattcctgccctttggggagtgtacatatgagagcgacagacaagaaataatatgaggccaggcacggtggctcacacctgtaatcccaacactgggaggccgaggcaggcagatcacctgaggtcaggagtttgagaccagcctggccaacatggtgaaaccttgtctccactaaaaatacaaaattagccaggcgtggtggcacatgcctgtaatcccagctacttgggaggctgaggcaggagagtcgcttggacccaggaggcagaggttgcagtgagctgagatttaaaaaaaagaaagaaagaaaaagaaacgagatgaatgtaaggtg

SEQ ID NO: 71720 - DNA, 704 bp, Homo sapiens
ctgaaattggacagcccgcccaagttgtcctctctcacacacatagtgtgcaagccataccacttaaaaacaaataaaagccacactttggcacaccaatagctcatatcacccagatctgcctctgacctgccagctctcttggaaaattttctgctatgatgggagcctgcaatgactgtttttgttttccttttgcagagatggggtcgcactttattgttcaggctggcctcaaacccctgggctgcagcaatcctcttgcctcagcctcgcaagtagctggaatgatttttttttttaaaacgctttctcttgaacctgggaggtagaaaggtacagtgagctgagatcgttgccactgcactccagcgtgggcaacaagagcgaaactccatttcaaacaaacaaacaaamaaacaaacaaacaaaaaaacgctttctcttgaaactgggaggtagaaggtacagtgagctgagatcgttgccactgcactccagcgtgggcaacaagagcgaaactccatttcaaacaaacaaacaaacaaacaaacaaacaaacaaaaacgctttcttcctgagttcctgctctgtgaggctgaccttgaggggtttggtcctgtgtgtcttgttagctcagcctgtacctgaccccgcgacaatgacatcctccgactcccacctcgcagaccttggtttaagcc

SEQ ID NO: 71721 - DNA, 558 bp, Homo sapiens
gaggcccaccgggcactgtgatcatgatgccggtaagaaggagatggagtggcccagccttggggagtggagtcctgatccaggagggggcctctcctgggggcttccctcaccactaaattcctcccagttccagtttgcaggcggctcctttaaaggccccccagtctcattccagcaggcccaggctcaggcagttctgcagcagactcaggtgagtgggaggtgtggacatagtgggaggaaccccagagagtgatagagcctcggcgtaaggaggggctgggcaggagaagggggttatttttctcctgaagatgcctctgtggggaatgttgggggtcttgtgggaggccccaagctctgactcctctgtctttccagctstctatgaaaggcccccctggtccagtggggctcactgggcgcccaggccctgtggtgagtaaggcgactgcgtggagggggcggtgcatgcattagtgaagaatcatctacccacactcctccatctctcctcccccaagggtctccccgggcatccaggtctgaaaggag

SEQ ID NO: 71722 - DNA, 1388 bp, Homo sapiens
ggtaggtgatgggggctgagataagacttggtgggagctgtcaggcttatggggtcaaggctcactggtgtctctggacagggtgatcgtggcttcgatggcctccctgggctgcctggtgagaagggccaaagggtgagtgtgtgaggtccctcccccaagtctaagccctcctcccaatattcaagcccccccaacttctccctcagtatcagagtcatgatccctgtgtccctcctcacaccccatctgccttcccagggggctggtctctccrcccacacccttccactctgaactcccctctgttccctctccagggtgactttggccatgtggggcaacccggtcccccaggagaggatggtgagagggtaagtttggaagagagttagggcctggtttggaaagtaagtttggaagcctgagtgagaatcagagaggaagatctggaggtctcagtggccagcttgagagctagggacaaattgtggggtgaggaggtgagacttgcaggtctaggattggagtcaggggcctgaatggaatcccatgaacttagtctgcaggttcccagggatcctggtctaattccgagaccccctggaaggggctgcccagatgaggggaggtggctctccgagggttgtaccttcctgttcccaagtaatgacgcttttccacagggagcagagggacctccagggcccactggccaggctggggagccggtgagtatcagggatccctgggccccttgcttggtgcaggggagggagtcaggactcccagggccccaggactcataggacccctagagctcacatggccacacagaggtgatgtggaaataattcgcctgctcccttgcagggtccacgaggactgcttggccccagaggctctcctggccccacgggtcgcccggtgagtgtcactggctctctgcatccctgtctgtctttttgtttgttttgagattagggtctcgctctgtcgcccaggctggagtgcggtggcgagatctcagctctctgcaacctccggctcctgggttcaggtgattctcatgcttcagcctcctgagtagctgggactacagggacccaccagcacacctggctaatttttgtatttttagtagagacagggtttcaccatgttagttaggttggtctcgaactcctggcctcaagtggtcctcccaaagtgctgggattacaggcctgagccactgttcctggcccctgtctgtcttttttttctcgcttttctgccttctgcatgtccatatctgttgctggcttctctgcctgctcacatttctttctttctttttttttttagacagagttttgctcttgttgcccaggctggagtgcaatggc

SEQ ID NO: 71723 - DNA, 846 bp, Homo sapiens
ttataatggacacctgatatttttgcctgagtgacatctgttatctctgattttcttcttcattaataattttttttggagcagtcttaggtttacaggaaaaaatcgaatgaaaagtaccgagagtttctacatccccyttcatcccttcattgcccctcatcttccctgttaacatcttgtgttactgtgctacgtttgttacaattaataagccagtattgatacattattattagctgaaatctgcagtttacattaaggtccactccttgtgtgataccttgtacagtctattttttttttaataaagtatttttttggtttttttttttttttttgagatggagtcttgctctgtcacccaggctggagtgcagtggcgcgatctcggctcactgcaagctccacctcctgggttcacaccattctcccgcctcagcctcctgagtagctgggactacaggcgcctgcaatcacgcctggctaattgtttgtatttttagtagagacggggtttcaccgtgttatccaagatggtctcgatctcctgacctcatgatctgcccaccttggcctcccaaagtgctgggattacaggcgtgacccaccgcgccaggccttttttttttttcagttttaaaatcacagcaaaattgagaggaaagtccatagtttacattcagtttctctcttagtgttttattgtctatgggtttgaacaaatttataatgacagtgtgtccaccattatagtattatgcagagtagtttcactgtcctaaaactcctctgggctctgctgattcatccttccctcctcccaaacccctaaaaaccaatgat

SEQ ID NO: 71724 - DNA, 1433 bp, Homo sapiens
tctcacctttggcctcccaaagtgctgggattacaggtgtgagccactgcacttggtccagacccatacagtttttaatctccactcacactttccagatgtgtgatcttgggcagagcgcttccctkggtgagcctcaatttcctcacttgtcaagtccagctaaagtttaaatgagcaaatgcatttaatttttatttatgacaacactaaacactagccatttttcctaagcaccttccatgaatttaatttaaccctcaaaataacccagtgagatacaatatgattttttctttctttcttttttttgagacagagtttcactcttgttgcccaggctggagtgcaatggcatgatcttggctcactgcagcctctgcctcctgggttcaagtgattctcctgcttcagcctcccaagtagctgagattacaggcatgtgccaccacgcccggctaatttttgtatttttagtagagacggggtttctccatgttggtcaggctggtctcaaactcccgacctcaggtgatctgccagcctcggcctcccaaagtgctgggattacaggcatgtgccactgcacccagccagagtatgattttttaaagtattattatctgcacttacagagagggaaactgaggcatggagaatctaagtaacccctccaaggttgcatagagaggggagcagagctgggatttgaatcccagtgctctgcccccaaagtcacacagaaaaccagtgcactacggctgcctctcaatgcctgggcagcctcggaatccgagcgtctctttggaaacgtgtcatggcagcgtggcaagcccatctgtgtgcccatctctgagtgtgtgcatcactgcgtgtctctccctgtggaacagggctacctgtggaccctgggcaggcccagcagggttcaagggtcgggctgttagagttggcatggggacctgcactcgtggtctgtaggtttacacccgcacatgcttccctggatgtaaacacacatccatctggggggatgcaagaagccacaaggaagagactcggcaaacctgggaggcatttctgggggttctgtggtagtataatggctgcaaaatgtacacataggcagcaataggggtagggtgtaatctaattagagggagggcccaggatgcgtgcttaaagttgtatttgcagaagcagcaagcaatttttacttttatttacttacttattttgacatttttatttcttgctctaaatatttatttatttattcatatttatgtttatttttgagacagggtctcactctgtcgcccaggctggagcccagtggcacaatcttggctcactgactgcaacctccaccttctgggttcaagtgatccttctgcctcagccccccaagtagctaggactacaggcatgca

SEQ ID NO: 71725 - DNA, 666 bp, Homo sapiens
ggatccattactctgatcggatgcctsgtgggtcaaggcttgtacataactggatgcctggaaatgtggatctaccctacctttggcatgtctctctcttagcgggatatcttccgcaagcactggggatgtggacaaggaaagtaaattgagtctccgttggggagtgaggggtgttggacgtggcacgggaacccggccggagtcagcggacccaattggctgctctctctcagatacagttccccttcctccctccagggggcgccatggaacgcagggccctcactggctctggggactgggtgacgtcaggggtgagcctctcgtgattggctccatcaccctgcgtaagatcaaagggaagaaaggagagccccgacagccggagccattgtggctccggccgattgcgccggccctcgggccctcagggaggcgagggtgtgagggtacagagttcgaggccaacttggtccacattggtaggaaaaaaaaaattttttttatcgttccctatataacaacaaaacataaagggaggacgccttgataggaagaaatgacatcttcctaagtgtttttaaattacttcaatgtatctttttttttttttttttttttttgggagactgagcctcgctctgtagcccaggctggagtgca

SEQ ID NO: 71726 - DNA, 731 bp, Homo sapiens
tctccctctctgctccatttctctgcatgatttgggtttgcctggcagaagcacagtcaccgctcgtggactgagggagggagtggggcctgaggctcttctgctgctttcttctttacccatttggctaaaatctggcctgggttgttaatgttttaaaacagtactgttttaggttaatgttaagactgcaatgcatcccaaatacttaaaaaaatttctcagaactattttatttttaattaattattgtaagagatagggtctcggtctgttgcccaggttggagtgggatggcrctatcgcagctcactgtagcctcgaccttctaggctcaagccaccctcccgcctcagtcttccaagtagctgggaccacaggcacacgcccatgctcggctaatttttaatttttttttgtagagatggggcctcactatgttggccaggctggtctcaaacttgacctcaagcaatcctcccacctcagcctcccaaagtgctaggattacaggcactgtgcatgactcaaaacaacttaagatttataaaaaattgagaaggaggtatagatttcccagtttcacctattactaacaccttacattcatatatttgttatagttaacgaagatatattgatacattatcattaattgaagtccattattaaatattgcccgtacttcaaatctggatttccttagtttctaatatcctctttctgtttca

SEQ ID NO: 71727 - DNA, 731 bp, Homo sapiens
tctccctctctgctccatttctctgcatgatttgggtttgcctggcagaagcacagtcaccgctcgtggactgagggagggagtggggcctgaggctcttctgctgctttcttctttacccatttggctaaaatctggcctgggttgttaatgttttaaaacagtactgttttaggttaatgttaagactgcaatgcatcccaaatacttaaaaaaatttctcagaactattttatttttaattaattattgtaagagatagggtctcggtctgttgcccaggttggagtgggatggcactatcgcagctcactgtagcctcgaccttctaggctcaagccaccctcccgcctcagtcttccaagtagctgggaccacaggcacacgcccatgctyggctaatttttaatttttttttgtagagatggggcctcactatgttggccaggctggtctcaaacttgacctcaagcaatcctcccacctcagcctcccaaagtgctaggattacaggcactgtgcatgactcaaaacaacttaagatttataaaaaattgagaaggaggtatagatttcccagtttcacctattactaacaccttacattcatatatttgttatagttaacgaagatatattgatacattatcattaattgaagtccattattaaatattgcccgtacttcaaatctggatttccttagtttctaatatcctctttctgtttca

SEQ ID NO: 71728 - DNA, 731 bp, Homo sapiens
tctccctctctgctccatttctctgcatgatttgggtttgcctggcagaagcacagtcaccgctcgtggactgagggagggagtggggcctgaggctcttctgctgctttcttctttacccatttggctaaaatctggcctgggttgttaatgttttaaaacagtactgttttaggttaatgttaagactgcaatgcatcccaaatacttaaaaaaatttctcagaactattttatttttaattaattattgtaagagatagggtctcggtctgttgcccaggttggagtgggatggcactatcgcagctcactgtagcctcgaccttctaggctcaagccaccctcccgcctcagtcttccaagtagctgggaccacaggcacacgcccatgctcggctaatttttaatttttttttgtagagatggggcctcactatgttggccaggctggtctcaaacttgacctcaagcaatcctcccacctcagcctcccaaagtgctaggattacaggcactgtgcaygactcaaaacaacttaagatttataaaaaattgagaaggaggtatagatttcccagtttcacctattactaacaccttacattcatatatttgttatagttaacgaagatatattgatacattatcattaattgaagtccattattaaatattgcccgtacttcaaatctggatttccttagtttctaatatcctctttctgtttca

SEQ ID NO: 71729 - DNA, 573 bp, Homo sapiens
cgaaagctccgtgcctctcttttttcagacgatctctcaggaccatctgacagtgctctccttcctctttgatgcctctctcttgggatactagctgaagctggagagacaccagttagacctaaggaaggacttccctgaggagtargggcttatggtcaccggcaggagctggggcctcccttccccatcagccctaattgccaagatgtcatggggggaagaggaggggattaagcagacgggtgcccctccccctcccagccaatgtcacctcctggtgcccagtcgagtcccccaccttggccgggattaccctccgagttccaggccatgacaaatgacatcactcccggcccaggcttaaaatctccccatgtgaggggatgtgtttccttcagcctctgctgtctggccgctctgtctaggtcctgggccacgggagagccccgtccctcctttctgaaggtgagcgtctgcaggagaggcggaggggaccgaggaggggagaaaaaagagaggggagaagttgggtttatcttattcgtggctgtgtttgccgtgctctgcagg

SEQ ID NO: 71730 - DNA, 966 bp, Homo sapiens
catttgtattgtggtacaatacaaatttcagtgtgcctatgktcctggcaaactgaagaggcctgacgggaactcagtgggtctttggaaaattctgcacccagtggaagaagagcctataagccctacttaaaaaaaaattttaaatctgaaatatgccttttccctttaaggaggtacaaaggcttatttgagcaggaaattaaacagacaccccctccccaccaacatgcctgaattccaagcacctggtgctggcccagagagagagaggggagttatcgcagggagagtgagataagaatttccttggttggtgctaacaaatgaccgagtttgctttcctgtttcacatacggtttttacatgatttaattgttttaaatgtttgtgaacattcagataagtgccatgtggtttttttgttgttgttgttgagacagaatctcgctctgtcacccgggctggagtgcagtggcgcgatctcgactcactgaaacctccgcctctcaggttcaagcaattcttctgcctcagcctcgccttgtggttttatagatggtttttgtgaaaatgaataatgttcgaaattgtattcattaatataagcgactcaacagtaaggtttttttttttttttttttttttgagacagagtcttgctgttgtcgcccaggctggagtgcagtggcacaatctcagttcactgcaacctccgccttcgggttcaagccattctcgtgcctcagcttccctagtagctgggattacaggcatacaccgccacgcctagctaatttttgtatttttagtagagacagggtttcaccatgttggccaggctggtctcgaactcctgacctcaggtgatccacccaccttagtctcccaaagtgctgggattacaggcctgaaccactgcattcagccaacagtaaacttactaaatattttcctaaagatgca

SEQ ID NO: 71731 - DNA, 1314 bp, Homo sapiens
gatccccgcgcagagcgttggaaaggtgacaggacataaaggtgacaggccgggatcgcagccccgagactgagcgccgaatcacctgggcagggattttggcgaccacagcctatctgttttckgagcgtccgccagggggcgccgcgagccgcgaaactgggcccgcgtgggcgggatgagtgcgcggccagcgtgtcccgggacgccgtgggtgtggcctggatgtgagtgcgcgggactcggcgcgcacggtgcgctgcccagctctggccaagagtccccggtgcgtgagcgcgcgcacactcctggcagcccgtgtgggcaaggtcaccacttccccaaccagaaaccagcgtgttcctggtgttacgcgtcgggagttatgtacccaggttgtgcaagggcacgttgccgggcagggcgggagctgggagagcacttcgtgcccgaatacacacacacacacacacacacacacacacacacacacaccccgcgcgcgccccagggcttggttcccaggcccccgccgcgggaggtgggaggaagggatgtcccggggggagggccccagagtcacttttcctcggaaaatatgccgttctggcccccagcccaggcctgagtcaccaggcctcgctgcattgagtcacggactccaccccgcccctgagagcacggaagggggcctccccccaccccaaatcctgcccaggtctctctttccctgggggagggcgggcgatccctgtcccaagccagcctcactgccacatgggaagaagccttggctttattcgctctgtggggacactgttccgttcagaggcccctcccagccatggggtgggggacagtggtgggcgtgggaatcccagcgagcatcctggagggtgcgtcgtctccatgtattttgctcttccccatcttttccatggggtcccctgccagggtcaagcactaatatgtggtgaaggcagcaaacagcgtcggcgtccctttaggggtggggagagggctgtagcaccaagaaccccctcccccgcccacgacatccctgaaaaggagactaaaataaagccccggggcctttctacgtaggggctccacttaaatatggaatggtggtaggcagagaggcggtggcccagcaatccttaagtccagattaccagctgtggggaggcttccagggggccaggagcaggctgggcagttccagccacagacacgtgggtggaggacggaaatatctccaagggggcacagtatcagaggagcaggatggaaggggcttttctgcctgctacg

SEQ ID NO: 71732 - DNA, 744 bp, Homo sapiens
gagcggcctcctccacccggcgtcctcctttgccttcgcccagcctgcgggacggccaggtgctcccgggacctcaggcctcgcgtctgatgcctgtctctgttcttgagacccgtcygggagtcctctgtccagcccccaactcctgaccttacctctaatctcccttctgccctggggctcctcttcctgtgtccccgccacgatccctcgtctccacccacgccctgtgtcctgtttaagttaagcctttgcgtttctagggcttttccccagctccagactcccgttcctatcccgtcaactcgtgagaattccggttctcctgcgggattaattatcctacttatcagttactctctctcgggagtttaggctcctgaatccttgctccggagacactccacttttcttccaattctctctgtaccccactcttaattcgttgaacatgttttgggtcttctttggcattcccaaagctttatgtccagacacccaaccaaggtgatcccttttctctcccagccctacccctgcttccgggaacctcccgtggaagcaggcaggggtagtcccactgaggactcccacgtaggtctctttactgcccttcggagacctttttgaaatcagtctgtcagtgctaagaacccatttcttcacgttggggttcacgttggcattctcaggagcgctcaacgaccacttgcttccagggttaacttccggaaaatccccttt

SEQ ID NO: 71733 - DNA, 744 bp, Homo sapiens
gagcggcctcctccacccggcgtcctcctttgccttcgcccagcctgcgggacggccaggtgctcccgggacctcaggcctcgcgtctgatgcctgtctctgttcttgagacccgtctgggagtcctctgtccagcccccaactcctgaccttacctctaatctcccttctgccctggggctcctcttcctgtgtccccgccacgatccctcgtctccacccacgccctgtgtcctgtttaagttaagcctttgcgtttctagggcttttccccagctccagactcccgttcctatcccgtcaactcgtgrgaattccggttctcctgcgggattaattatcctacttatcagttactctctctcgggagtttaggctcctgaatccttgctccggagacactccacttttcttccaattctctctgtaccccactcttaattcgttgaacatgttttgggtcttctttggcattcccaaagctttatgtccagacacccaaccaaggtgatcccttttctctcccagccctacccctgcttccgggaacctcccgtggaagcaggcaggggtagtcccactgaggactcccacgtaggtctctttactgcccttcggagacctttttgaaatcagtctgtcagtgctaagaacccatttcttcacgttggggttcacgttggcattctcaggagcgctcaacgaccacttgcttccagggttaacttccggaaaatccccttt

SEQ ID NO: 71734 - DNA, 744 bp, Homo sapiens
gagcggcctcctccacccggcgtcctcctttgccttcgcccagcctgcgggacggccaggtgctcccgggacctcaggcctcgcgtctgatgcctgtctctgttcttgagacccgtctgggagtcctctgtccagcccccaactcctgaccttacctctaatctcccttctgccctggggctcctcttcctgtgtccccgccacgatccctcgtctccacccacgccctgtgtcctgtttaagttaagcctttgcgtttctagggcttttccccagctccagactcccgttcctatcccgtcaactcgtgagaattccggttctcctgcgggattaattatcctacttatcagttactcyctctcgggagtttaggctcctgaatccttgctccggagacactccacttttcttccaattctctctgtaccccactcttaattcgttgaacatgttttgggtcttctttggcattcccaaagctttatgtccagacacccaaccaaggtgatcccttttctctcccagccctacccctgcttccgggaacctcccgtggaagcaggcaggggtagtcccactgaggactcccacgtaggtctctttactgcccttcggagacctttttgaaatcagtctgtcagtgctaagaacccatttcttcacgttggggttcacgttggcattctcaggagcgctcaacgaccacttgcttccagggttaacttccggaaaatccccttt

SEQ ID NO: 71735 - DNA, 556 bp, Homo sapiens
cttgcaagttttgtgaaatgaatctgtaaaaataacataggttcggtgcattatttagaataatttaaactacttacattgctctaaggtatactgctaaattcaggcattctattttcctttcattttttttttttttttgaaacatcatctcatgctgtcccccaggctggagtgcagtggcccaatctccacccactgggttcaagtgattctcatggctcagtctcccaagtagctgggactacagrtgcccaccaccacgcctggttaatttttgtatttatagtagagacggggtttcgccatgttggccaggctgttctcaaactcctggcctcaagtgacccacccacctcagcctcccaaagtgctgggattgcaggcctgagccaccgcactgggcacttagtaagtttttaaaaatgtatttacccagatcatttaaattttttatgtactaccatggtcttattatcatcccttttttttcttatagcctatttaatctctgctatctgtattccccgtttagttctcacttactcctcttcta

SEQ ID NO: 71736 - DNA, 775 bp, Homo sapiens
gatgcggaggcgtggctttaaggcgcgtgcgctcaggtcccagagccacagaggcgccgctggcgtcaggggctcgaaatcccggagtcccaggcattatgtgccccttaatgcgctgtgataggaagtacacaccatctactaggaagtagttttgccaaaaagctaactttcttttttcctttttttcctgagacgaggacttgctatattgcccacactggtcttgaactcctgggttcaagcgatcctcccgcctccgcctcccaaagtgttgcgattacaggtgtgagccaccagaaaaaagccttcccggaaaataaaaattttaggtgggataatggtattatcagtcattaacaagaacaataaagttttttaaaaagttaaagtttttaatttttagagaaacacaycaaaatgcttatagatgaaatacctccgatttgctactacataattaaggtggtggggtgtaaatacagtaagattgaccatgagttgataattgttgaaatttggtgccaggcacatggagatttattctatttgggttttatatgtttgagatttttcagtttttatttttgttttgttttgttttgtttttgagacagagtcttgctgggtcgcccaggctgaagtgcagtggcgccatctcactgcatctcagcctcccaggttcaagtgattctcctgcctcagccccacccagtagctggggttacagacgcccaccaccacgcccggcgcccggcttttttttttttttttt

SEQ ID NO: 71737 - DNA, 801 bp, Homo sapiens
atgatatcggcaaggaggttccttggaagtggacaagagcactgcagtccctgaaaatgtctgacatggagttcccaaacatggaagtgtgatgacccccagcaatgtcaccttgaaagagcaccttcatgaccaaacactgccactctctgcaatactgagtatcacatacagtaaatgaatcaactaatgtgcactcttcaagcagtctcctcaatgagaggaatgaataaatacaatgtatgataccttccgtctctccctcttcggaagatattaggattgttcctttcccatcttcaatttggacatctggtgctaccatagcaaatttttctttcactatctacaaaaaaaaaaaaaaggattcaaaatattaacgtaggtaattaaagatcataagaaatcctagacttctataaaggctcttactttccccttctatttattggaaaccggcgaagtcactcttcaagatcccttagagcaagcaggaaagccrtggggattcacctgagttccatccccacatctgaccactgatgcagatcagatccaacttcatctcaacaggggactaggaactccctggctggctcttgctactttgtctttccctgcaggttaggtagtgagctacacacttgacatatttcatttcagtctctgtgccaaccctgtaatggcaggggtttcatagatggaatcagttctcattaacctgactctcagataagtctccccgttccatgcatttagagaagtgataatattctgttaaatcctaccagctcctaaaaa

SEQ ID NO: 71738 - DNA, 672 bp, Homo sapiens
tatgttcatggtgtattactcatttgatatagtaagatgtttcaaatctttttctttatgtttgtgcctttgtgagttgagaaattctgtggcttggcgcagtggctcgcgcctayaatcccagcaccttgggaagctgaggcgggtagatcacttgaggtcaggagttcaacaccagcctggccgacatggtgaaaccccatctctactaaaaatataaaaattagctgggtatggtggtgggcacatgtaatccaagctactcaggcagctgaggcaggagaatcacttaaacccaggaggcggaggttgcagtgagctgagatcatgccactacactccagcctgggtgacagagtgaggcactgtctccaaaaaaaaaaaagaaaaaaaaaaaggaagaaaaaagaaattttttttggcttgatgtagtggtggctcacgccttaatcccagcactttgggaatctgaggctggaggatcacttgagctcaggagtttgaaaccagcctgggcaacacagtgagacccaatctctacaaaacatttaaaaaaaaaaaatggccaggcgcggtggctcacgcctgtaattccagcactttgggaggccgaggcgggcgggtcacgaggtcaggagatcgagaccatcttggctaacacggtgaaacccc

SEQ ID NO: 71739 - DNA, 573 bp, Homo sapiens
tgcagccttgagctcctgggctaccaagtagctgggacttcaggtatgcaccatcacgcctggctaaaggcatttcactacattgtctaagctggccttgaactcctaggctcaagtgatcctcctgcctcaacctcccaaagtgctggtattacaggtgttatccagtgcacccggctgtggctgggctttcactgtgattaggtaatggggttggggttggggcttgcatagtttgaacttcctgctggcaccaaggaggaaactcccagactttcttgttggcttgcccagatgagagggagaaggagaaaggggtkggggcttgaaagctgtcagcaaccatccaaaatggagtcagactctttatcacacttgtaatcacatggctgactttgtcaggatgggattaaagttggtaaatgatttatttttgttaatgagttgtgaacaagtaaagtaaacattattatgggtgtcccacagagatggctggagccgtgtggatgggcataaatggctaatgtccagcaaccatcgatgtcaagtatccacacacctggcctgaatgga

SEQ ID NO: 71740 - DNA, 708 bp, Homo sapiens
gatcctcgcttctgcccttgtgcctcatgatctcttttggccaacaacagccaggagcatttcaccaccacccccaccacattttcttatgagaatcttcataatgaaaagttaaaagaatttcacagttaaaagccatatagccgccacctataattagattctacaattaacattttgctatacagacagtccccaacttatgacggtttgacttacaattttgaccttactatgggtttatcggggcattgaatgcattttcaacttatgttattttcaatttatgatgggattactaggatgtaacaccattgcaagtcaaggggcatctatacttgctagaataatctcttaaagttataaatcaggtcttgtcgcttccgtatttaaaaccagccaatcactcccatcacactcagagtaaagttaaagtctttccaggctgggtgcagtggttcacgcctgtaatcccagcactttgggaggccaaggtgggcggatcacttgaggccaggagtttgagaccagcctggccaacatggcgaaacyccgtctctactaaaaatacaaaaactagccaggcatggtggtgtgtgcctgtaattctagctacttgggaggctaaagcatgagagtcacttgaacccgggaggcagaggttgcagtgagccgagatggcgccattgcactccagcctgggcaaca

SEQ ID NO: 71741 - DNA, 1308 bp, Homo sapiens
tgatcacaggttcatattattactaacaagcttcagctgtgcctaattacaagaaacacttcgcttggggcrtgactgccctcagcattccctctgggaagcagacgcagtttgtcagttggacaacattctgcatttatgagaacagtttgctgtttactcatgtaacctccagaggtatactgcgttgatcacgaccttcactctttcggcctgcaacacctcccctcttcctgggtccaggccccagaccccgccacgcctcctcttaacctacatgatcagggccaggcagaggaaaagaagagccgtgatgccgattcccagaaacgctccgttggagaatgccgttgagatgagtcccttcttatctgcacacggagagggcaaggtgagcatttcccatccacgcagggctcacgaagcccgctcatcactcggcattaaggcttccggttcccatggcggacattgtatctgcaacccctctgtttacttttaggaaaccctgccacaccccggcccaggtgttaggacttcccattgtgttttcctgtctacatacagatgccacgggtctgctgtgtccctccaagctcctgctccaaccacaggaccctactctttgccccagtcagcttctcctccaagaaccttggcatccaggcggccccctaacctggcagctgcaggatggatccactctgggccccatggacgttccaggcctcacagcggagcctgaggccggagctgagccctccatggaggctcagggagctgttggcccagggcccggctgagctgggggtgacctcgaaggagtcctggctgctgttcccctccagcagctcctccccaagccaccagcgcagagagggggccgggctggcctgggaggagcagctgcagtgcagaccctcagcctcccaggagcaggaggggcccagcagcttcggggagtctgaggggagggaggacaggactcagcagggtccccttcctgggacccaggtgtcccctttcccccactcacagtgcacggagaggctgagagagacgtgctgggagcccagtgggtgccgagcgtggcaggtgaactctccttcgtgctccacttgaacccgaggcagctccaggaccccggggtctgagggctgggaggggctcagaacctgtcccctctgggtccagctcagcctggctggggggctgctgtgtgtgacacagaccaggcacaggctttggccctccagtactgggagagacgtgccgttcccaaggttttccaggactagggaaggaaga

SEQ ID NO: 71742 - DNA, 1308 bp, Homo sapiens
tgatcacaggttcatattattactaacaagcttcagctgtgcctaattacaagaaacacttcgcttggggcgtgactgccctcagcattccctctgggaagcagacgcagtttgtcagttggacaacattctgcatttatgagaacagtttgctgtttactcatgtaacctccagaggtatactgcgttgatcacgaccttcactctttcggcctgcaacacctcccctcttcctgggtccaggccccagaccccgccacgcctcctcttaacctacatgatcagggccaggcagaggaaaagaagagccgtgatgccgattcccagaaacgctccrttggagaatgccgttgagatgagtcccttcttatctgcacacggagagggcaaggtgagcatttcccatccacgcagggctcacgaagcccgctcatcactcggcattaaggcttccggttcccatggcggacattgtatctgcaacccctctgtttacttttaggaaaccctgccacaccccggcccaggtgttaggacttcccattgtgttttcctgtctacatacagatgccacgggtctgctgtgtccctccaagctcctgctccaaccacaggaccctactctttgccccagtcagcttctcctccaagaaccttggcatccaggcggccccctaacctggcagctgcaggatggatccactctgggccccatggacgttccaggcctcacagcggagcctgaggccggagctgagccctccatggaggctcagggagctgttggcccagggcccggctgagctgggggtgacctcgaaggagtcctggctgctgttcccctccagcagctcctccccaagccaccagcgcagagagggggccgggctggcctgggaggagcagctgcagtgcagaccctcagcctcccaggagcaggaggggcccagcagcttcggggagtctgaggggagggaggacaggactcagcagggtccccttcctgggacccaggtgtcccctttcccccactcacagtgcacggagaggctgagagagacgtgctgggagcccagtgggtgccgagcgtggcaggtgaactctccttcgtgctccacttgaacccgaggcagctccaggaccccggggtctgagggctgggaggggctcagaacctgtcccctctgggtccagctcagcctggctggggggctgctgtgtgtgacacagaccaggcacaggctttggccctccagtactgggagagacgtgccgttcccaaggttttccaggactagggaaggaaga

SEQ ID NO: 71743 - DNA, 691 bp, Homo sapiens
tcccacctcagcctcctgaggctggtactacaggcatgtgccatcacacccagctaacttttcttttttggtagagatggggtctaactatgttgccaaggctggtctcgaactcctgggctcaagtaatcctcccaccgtggcctcccaaagtgctaggactacaggtgtgagccactgtgccaagcctgcatttcttttttctttttttgagacggagcctccctctgttgccaggctggagtgcagtggsgtgcgatcttgcctcactgtaacctccgcctcccaagttcaagcaattctccctcagccccctgagtagctgagactacaggcgcacgccaccacacccagctaatttttaaatttttagtggagacgaggtttcaacatgttgaccaggctggtctcaaactcctcctgacctcaagtaatccacctgcctcggcctcccaaagtgctgggattacaggcatgactcaccatgcctggccccagcctgcatttctattggactggcagagatggggactggggaacctagagttgagcgggtgggcatgagtatttcacgtaggatggcaaggaaggcccctttgaagaggtgatacctcagcagagacctcaaggaggggaacaagaaagccatgaggcaatccgagggaacagtgttccaggaggagagaacagc

SEQ ID NO: 71744 - DNA, 691 bp, Homo sapiens
tcccacctcagcctcctgaggctggtactacaggcatgtgccatcacacccagctaacttttcttttttggtagagatggggtctaactatgttgccaaggctggtctcgaactcctgggctcaagtaatcctcccaccgtggcctcccaaagtgctaggactacaggtgtgagccactgtgccaagcctgcatttcttttttctttttttgagacggagcctccctctgttgccaggctggagtgcagtggcgtgcgatcttgcctcactgtaacctccgcctcccaagttcaagcaattctccctcagccccctgagtagctgagactacaggcgcacgccaccacacccagctaatttttaaatttttagtggagacgaggtttcaacatgttgaccaggctggtctcaaactcctcctgacctcaagtaatccacctgcctcggcctcccaaagtgctgggattacaggcatgastcaccatgcctggccccagcctgcatttctattggactggcagagatggggactggggaacctagagttgagcgggtgggcatgagtatttcacgtaggatggcaaggaaggcccctttgaagaggtgatacctcagcagagacctcaaggaggggaacaagaaagccatgaggcaatccgagggaacagtgttccaggaggagagaacagc

SEQ ID NO: 71745 - DNA, 860 bp, Homo sapiens
cttgagcccaggagttcaagacctccctgggcaacatagtgagaccccactttttcctccacaaaaaggaaaaaaaaggaccaaaaatatatatatacacaaggatgctggtttgcatgaagttaaatactatgacttaaatatgaatggtagagccattcaaagcaatagtaaaaaggcataaatgataattaagactagcaaaatcgaagaattttttttttttagacagagtctcgctctcgctctgttgcccaggctggagtrcaatggcgtgatctcagctcactgcaacctccgtctcccagctccaagcaattctcctgcctcagcctccggagtagctggattacaggtgcgcaccaccacacctggctaatttttgtatttttagtagagacggggtttcatcatattggtcaggctggtctcaaactcacgtcctcatgatccacccgcctcagcctcccaaagtgctggggattacaagcgttagccaccgcgcccggcgctggaagagtaatttgtaagtgtagttcaagtagaatgtaactgttgattctgttgcaactgtgtaaacagtgggcattagttgtcaaatcctagcagacaaagtatagaaatgcaaagagtagttgtgttagggtcatgaaattatgaggacatttatttcagttttttaaattcctttgaaagttttttttgttttttttttgagacagagcctcgttctgtcacccaggctggagtgcagtggcacaatttcagctcactggaagctctgcctcccaggttcaagcgattctctcgccgtggtgtactgaatagctgggattacaggcccctgccaccatgcccgg

SEQ ID NO: 71746 - DNA, 860 bp, Homo sapiens
cttgagcccaggagttcaagacctccctgggcaacatagtgagaccccactttttcctccacaaaaaggaaaaaaaaggaccaaaaatatatatatacacaaggatgctggtttgcatgaagttaaatactatgacttaaatatgaatggtagagccattcaaagcaatagtaaaaaggcataaatgataattaagactagcaaaatcgaagaattttttttttttagacagagtctcgctctcgctctgttgcccaggctggagtacaatggcgtgatctcagctcactgcaacctccgtctcccagctccaagcaattctcctgcctcagcctccggagtagctggattacaggtgcgcaccaccacacctggctaatttttgtatttttagtagagacggggtttcatcatattggtcaggctggtctcaractcacgtcctcatgatccacccgcctcagcctcccaaagtgctggggattacaagcgttagccaccgcgcccggcgctggaagagtaatttgtaagtgtagttcaagtagaatgtaactgttgattctgttgcaactgtgtaaacagtgggcattagttgtcaaatcctagcagacaaagtatagaaatgcaaagagtagttgtgttagggtcatgaaattatgaggacatttatttcagttttttaaattcctttgaaagttttttttgttttttttttgagacagagcctcgttctgtcacccaggctggagtgcagtggcacaatttcagctcactggaagctctgcctcccaggttcaagcgattctctcgccgtggtgtactgaatagctgggattacaggcccctgccaccatgcccgg

SEQ ID NO: 71747 - DNA, 860 bp, Homo sapiens
cttgagcccaggagttcaagacctccctgggcaacatagtgagaccccactttttcctccacaaaaaggaaaaaaaaggaccaaaaatatatatatacacaaggatgctggtttgcatgaagttaaatactatgacttaaatatgaatggtagagccattcaaagcaatagtaaaaaggcataaatgataattaagactagcaaaatcgaagaattttttttttttagacagagtctcgctctcgctctgttgcccaggctggagtacaatggcgtgatctcagctcactgcaacctccgtctcccagctccaagcaattctcctgcctcagcctccggagtagctggattacaggtgcgcaccaccacacctggctaatttttgtatttttagtagagacggggtttcatcatattggtcaggctggtctcaaactcaygtcctcatgatccacccgcctcagcctcccaaagtgctggggattacaagcgttagccaccgcgcccggcgctggaagagtaatttgtaagtgtagttcaagtagaatgtaactgttgattctgttgcaactgtgtaaacagtgggcattagttgtcaaatcctagcagacaaagtatagaaatgcaaagagtagttgtgttagggtcatgaaattatgaggacatttatttcagttttttaaattcctttgaaagttttttttgttttttttttgagacagagcctcgttctgtcacccaggctggagtgcagtggcacaatttcagctcactggaagctctgcctcccaggttcaagcgattctctcgccgtggtgtactgaatagctgggattacaggcccctgccaccatgcccgg

SEQ ID NO: 71748 - DNA, 641 bp, Homo sapiens
caggcttgagccactgcgcccagcctggggtttcccttcttggaccattttgtttctacataacacttactgtgtaatgtgcccataacatcctaatttctctattttccatttccccaccaaaatataagctcctgagaccacgagtttcatcagtttagttgccagagtctggaattgtgcctgagctatagttggtgcttggaaaatacttgctgcctgaaagaatctccctctcacatacagtataagaggagactcaggagggacagtgactaccacacgtcagtcctacccagtgcttccacaaaacttccaasggccctggctgtgttagtctgtttacacggctataaaggaatacctgaggatgggtaatttacaaagaaaagagatttatttggctcacggttctgcaggctgtacaggaagcatagtgctggcatctgcactatggggaggcctcaggaagcttccaatcatggcggaaggcaaaggggagctggtgcatcatatagtgagagagaaaacaagagagaggggaggaagtgccaggctcctttaaataaccatctcttgggtgaactcataaagggagaactcactcattaccatgaggacagcactaagccattcatgtg

SEQ ID NO: 71749 - DNA, 641 bp, Homo sapiens
caggcttgagccactgcgcccagcctggggtttcccttcttggaccattttgtttctacataacacttactgtgtaatgtgcccataacatcctaatttctctattttccatttccccaccaaaatataagctcctgagaccacgagtttcatcagtttagttgccagagtctggaattgtgcctgagctatagttggtgcttggaaaatacttgctgcctgaaagaatctccctctcacatacagtataagaggagactcaggagggacagtgactaccacacgtcagtcctacccagtgcttccacaaaacttccaacggccctggctgtgttagtctgtttacacggctataaaggaatacctgaggatgggtaatttacaaagaaaagagrtttatttggctcacggttctgcaggctgtacaggaagcatagtgctggcatctgcactatggggaggcctcaggaagcttccaatcatggcggaaggcaaaggggagctggtgcatcatatagtgagagagaaaacaagagagaggggaggaagtgccaggctcctttaaataaccatctcttgggtgaactcataaagggagaactcactcattaccatgaggacagcactaagccattcatgtg

SEQ ID NO: 71750 - DNA, 641 bp, Homo sapiens
caggcttgagccactgcgcccagcctggggtttcccttcttggaccattttgtttctacataacacttactgtgtaatgtgcccataacatcctaatttctctattttccatttccccaccaaaatataagctcctgagaccacgagtttcatcagtttagttgccagagtctggaattgtgcctgagctatagttggtgcttggaaaatacttgctgcctgaaagaatctccctctcacatacagtataagaggagactcaggagggacagtgactaccacacgtcagtcctacccagtgcttccacaaaacttccaacggccctggctgtgttagtctgtttacacggctataaaggaatacctgaggatgggtaatttacaaagaaaagagatttatttggctcacggttctgcaggctgtacaggaagcatagtgctggcatctgcactatggggaggcctcaggaagcttccaatcatggcggaaggcaaaggggagctggtgcatcayatagtgagagagaaaacaagagagaggggaggaagtgccaggctcctttaaataaccatctcttgggtgaactcataaagggagaactcactcattaccatgaggacagcactaagccattcatgtg

SEQ ID NO: 71751 - DNA, 999 bp, Homo sapiens
tttatagaacaagcttgtaaactttyttaaagcattatgagatttatgcacagaccagtttttttgtttatttgttgtagctcatcagcgatcgttagtgttagtgtattttatatgtggtccaaggccattcttcttcttccagtgtggcccacggaagccaaaagattggacacccctggtgtagaggattccccatgaaaataaagatttaagtaaatgagtttatttaatgtatggattaaaaactttaagactttaaatgtgtatgaagttggacttggttttccaggctcaagcaattcttctgcctcaaccttctgagtagctgggaccacagacctgtgccagcatgccctgctaatttttgtatttttagtagagaggaagtttcaccacgttggccaggctggtcttgaactcctaacctcaagtgatctccctgccttggcttcccaaagtgctgaggtatgaggcatgagccattatacctgggcaacatttttgttattttaaaaatagttttagtgcatgtattggaaatgttatatgattagtttgctatttgtaaagttacacttgaccatctttagaatccccgaaggcaaaagtattggttccccattgaaggacatggtgttatgtcttgcatgggcctcttcttttgtgcatttttccctccagcagggtctgaattattcaaacgtagtctcatgtctggattggaacaaatggaagagctgaggacaggagtgacaggagttctgcagggtgagttcataagcagatgtggtattatggcactgctgtgccaccctaggagacatgcagtacattggaaatgttactttgcgaacttctcagggtatactcttcttcctgagaaggctgaggccatttggtttccttagatactttcaactcccctcatctttaaatttccattgatcttctcaacctcttttctgttctcagaaaggtttgtctgccttatttgaa

SEQ ID NO: 71752 - DNA, 569 bp, Homo sapiens
tggtacaaggtttacraggtatgtaagaatgcctccattattttaactgaactcttaagttctgagaaaacccaggcagggtcttaaggactttgttttaccttctagcccttgctcgaaggccccagtttttccaggtctttaatatttaacttacgtattcatcagagctaccacaaggtgttggtgaaggctcactgctgtggttgcacatggagacctagcctgctgtaggaagatctgctgttctcacagccgcttttccttgggggaggtggatacttcccaggaggtagagttttgggtcaagacccaaggagcaagctggggaggcttcttctccccccttgcttcttgggttcctggcccagaggaaggagcttgtatgtgggtttcttttgctctcacctgactacttccctctctccagccctgtatgctggtggtgcaggaaccccctgtaactgagtagggatggcagggaagggacacctgggttctgccaaacttagaggcactccccttcccctgccagagttcacaagaagggaaataatcttaggggtgga

SEQ ID NO: 71753 - DNA, 567 bp, Homo sapiens
tctgaaggatcagccagatgctagagccatctgatcccccagacctggtgcgatgttgcacctcctccctcctcctcagccctgagatttatgacatggccgtgtgcgcatcgctggcatcgggaatgtataaagccacagtgcctgcttgtggcactcacacccagtcaagtcatcgtaatagagtgttagtggccttctatcatggggggaargtctggcacaggaagaagcaggtcttgactgacaggggaattacctgggaagacagctaacgaaggggcaggggagggacagaggacccgagtgttcaaggaggagagcagccagaaaaccacccaggcacctcccgagcaggaaggcagcagggggagctgcggggactcgtgtgatttcaatagtagcgcttctgcggagagacacagcgaggaaaccttctctatggagaggaggccgtcgttcttctcaggccagacatccttgccctccagttcatagaagagaaaattgagggccgggcgcggtgtctcatgcctgtaatcccagcactttgggaggcaaaggtgg

SEQ ID NO: 71754 - DNA, 554 bp, Homo sapiens
ccccaaatgcattacatttagagtatccctctagagcagaggtccccaacctttttgctaccagagactgatttcgtagatgacaatttttccacaaacaggggtggaataggggtgggatagggatggtttcagcatgattcaacaacattacatttactgtgactttatttctattattattacattgtaatatataatgaaataattatacaactcaccataaaataggatcagcaggaggcctgagcttgttttcctgcaactagacagtcccatctaggtgatgggagacagtgacagatcatcagtctcataaggagcacacaatctagaaccctcgcatgggtggttcacagtaaggtttgtgcttctatgacaatcgaatgctgctactgacaggtggagtatatgacaggcagtaatacaagcratggggaatggctatacacacagatgaagtttcgttcatctgccacttacctcctgctgtgcagcccagttcctaacactaacagaaacagtaccagtggggacccttgctctagagacat

SEQ ID NO: 71755 - DNA, 540 bp, Homo sapiens
tcagcctcctgagtaggtgggactacaggtgggtgccaccacacctggctatttttttttttttgagacaaagtctcattctgtcacccaggctgcagtgctgtggcgagatctgggctcactgcaacctctgcatcttgggttcaagtgattctcctgcctcagcctcctgagtagctgggattacaggcacacaccaccamgcctggctaatttttgtctttttagtagagacggggtttcaccatgttggccaggctggtctcgaactcctgacctcaggtgatccgcccatctccacctaccaaagtgctgggattacaggcgtgagccaccacacccggcctcacatgacatttagtcatcacttctccttccattcaactgggacagtttctcaggaactgagaggctaaggctggagaattgcttgaacctgggaggtggaggttgcagggagccaagatcacgccattgcactccaggttgggtgacagagtgagactctgtctcaaataaataaatgtgaaatcctgcatg

SEQ ID NO: 71756 - DNA, 540 bp, Homo sapiens
tcagcctcctgagtaggtgggactacaggtgggtgccaccacacctggctatttttttttttttgagacaaagtctcattctgtcacccaggctgcagtgctgtggcgagatctgggctcactgcaacctctgcatcttgggttcaagtgattctcctgcctcagcctcctgagtagctgggattacaggcacacaccaccaagcctggctaatttttgtctttttagtagagacggggtttcaccatgttggccaggctggtctcgaactcctgacctcaggtgatccgcccatctccacctaccaaagtgctgggattacaggcgtgagccaccacacccggcctcacatgacatttagtcatcacttctccttccattcaactgggacagtttctcaggaactgagaggctaaggctggagaattgcttgaacctgggaggtggaggttgcagggagccaagatcacgccattgcactccaggytgggtgacagagtgagactctgtctcaaataaataaatgtgaaatcctgcatg

SEQ ID NO: 71757 - DNA, 1373 bp, Homo sapiens
ctttgggaggccaaggcaggaggatcacttgaggctaggagttcgagaccagcctaggcaataggaatagagtgagaccccgtctcaaaaaaaaaaattgctcttaactcctgtgataatcacacacttttcaggtaccacagttaatgcagtctctctattggaaataccacttatttccaacttttcattgtaatgtagaaacaatcacgtgtgtgatgttttcctgtctcagttatttcattatgataggcttacagttctcaggttagagggtatgaaacgttaatcactcttaatatggtttgtctggtcgtattttagaaaggttataccaattcagcctcaaaccagtggaatttcagagtgcctacttcacttcatcctcaccagcactgagtgttactgttttatttttgttttcttttctcagtcgtttatgcgtggagcatggtgcttgtttcaggcctgtgctgtgtatgtcctcacaaatgcacttgcaggtttggtgtccaagctcagatgtcagggttaatgtccagtcactgtgtttggggcctgagtcactggagccctttttgccacatatagttttaatcaccctctaaagaggctttccctttccaggtcttgcgagattcacggatccaccatctccggctgctcaacatcctgggctgccacgccgtcttctttatgatccccacctgggttctggtggacctctcggctttcctggtcagcagcgacttggtgagttgtacagcaccaagaacacgccattttcttggctagttccagaatagktgctttgttgaggagctgtagctgcatgttaacattgtggtatcttttgggcacctgacagccagcgctttcagcagtcagtcctctgtaatgcctcacggtgacgatgcacgccatcgaggaagtgggtttcctgtgtatttccttctctggtgtgcttgatcccaggtgctgatagctgctgtgtgtgcgccagtagcgtcaaggaagagaaggtgactctttcacctcctgacagtatagtccagatagcacattgactttttatttttactcattttttattttaaatgtttattttttagagacagaacctcgctctgttgccagggctggagtgcagtggcacaatcatggctcactgcagccttgacctcaatccggggctcaagcgatcctcccacagcctcccgagtaactgggactgcaggcgaataccaccatgcctggctaatttttttttgtttgatttttgtttttttactgtttttggagagacagggtctcactatgttgcccaggctggtcctgaactcctggcgttaagagatctgccttggcctccc

SEQ ID NO: 71758 - DNA, 846 bp, Homo sapiens
ctttgggaggccgaggtgggcagatcacttgaggtcaggagttcaagaccagcctggccaacgtggtgaaaccccatctctacagaaaatacaaaaatttgccaggcatggtggtgcacgcctgtaatcccagctactcaggaggctgaggcaggagaattgcttgaacctggaaggcggaggttgcggtgagctgagatcgtaccactgcactccagcctgggcgacagagcgagactccatcttaaaaaaaaagaagaaaaaaaaattgtcctgtcttagccattggagcccttctgattggctccttgcccttctagcactgtgggtcagcgtttctcccagcgggatgcccgccttcaccttgtgtacttcccatcccagagctgcagtcagcccctccttcaggactccaggtgccgttagtggggagcrgtatttagagacacaatccaggtgccatgggtgctttttgctgctgggtggtcattgttgttaggcctttactgtgaaaaattaggaagtacacacttggggcagcagcaaagagttcctagcaattagcgtcactttcagttgaacagtccagatctttgctgttttgaatttcatatttagatctcgtcgctggtatgcttggttccgctcctcgtttcttagttgcttattctacccgttattcactgatgttattctactgtacactcactcatataattgcttcagaatgagcattctcacagcacaattgcaactggagtgctgagaaaaggttagtatttctttgcaggctgggtgtggtggctcacacctggaatcccagcactttaggagaccgaggtaggt

SEQ ID NO: 71759 - DNA, 565 bp, Homo sapiens
gaaaaaggagggaacagggcatttttggaaggtgagtcacttggctttctggtagcaggttgacaatgagtgggagatgtattgattagtactgttctagtactagatgctttttgtacattgtcaccaatcctgacagcacctcactaaggtaacagactctgtggtccatgctttctttaccttgtagtccatgactactaacaggtcactgatgagtctccttaccctgsttcttgtctgcatgctaacaccccttgattaggaactgaggatgagaagctctggaaaagtgatgatcacagtatttttcaatctgcaagataaagaatattacctgtttccttgttccagagtggtaaactcctaactgacagatctaggattcaagtccagctctgcctccaagcctctgtccattctttctttctttcctgcacaacctaatgggaatatctaacaaaacatttgaagccacaagcctggaaatcatcagaaaagtctaaggttgcctctactaaatctttccagtcttgcccttgccctctgagagcactaaccattc

SEQ ID NO: 71760 - DNA, 791 bp, Homo sapiens
tttaatcctgaacgcccatgggaatatgtactcccataaacagttatctttcttctaaagcttaactgctcccatacaaggcttaatttcattcaccaggatgaaacaaattgaggcacaatattgttttcagaatgattagtatatagttcacttcttatttctataatctttggcactagattctttccttctaactcctctttgtataatacacatacttgatccatgcatacttcacttgtaaaacttgtttcttcttgcctagaggccattaaacttcaaatggtcatgcaattggagcctcagatgatgactcccttttaccagggacccttaggtagacctctgagggaaatctgactgctgttttccccaaaacaacaccccctgtcagcaggaaatagctaagatcagtcatcattcatattctaaaagagacagttagatgtgcctctttagagggggcaatgatagaggaaggaggcaaaaaaactctaggcagacaggggcaggtcccgggcaaaaccccaccttcaagttaaaaagcctgaagcccacrgcccaaagtgaacacttcgatccctgtttgcctgctctctctcaattggttctttctgaataatgtcattttgacaattgaatgttgccttttccaaaactacctatggcctgccccaaccccatcctgtgcctataaagacctcagactcagtcagtagagaaagataaccagcttgactggagagaggcaacataacttcagagggacagctggacttcagaggaga

SEQ ID NO: 71761 - DNA, 791 bp, Homo sapiens
tttaatcctgaacgcccatgggaatatgtactcccataaacagttatctttcttctaaagcttaactgctcccatacaaggcttaatttcattcaccaggatgaaacaaattgaggcacaatattgttttcagaatgattagtatatagttcacttcttatttctataatctttggcactagattctttccttctaactcctctttgtataatacacatacttgatccatgcatacttcacttgtaaaacttgtttcttcttgcctagaggccattaaacttcaaatggtcatgcaattggagcctcagatgatgactcccttttaccagggacccttaggtagacctctgagggaaatctgactgctgttttccccaaaacaacaccccctgtcagcaggaaatagctaagatcagtcatcattcatattctaaaagagacagttagatgtgcctctttagagggggcaatgatagaggaaggaggcaaaaaaactctaggcagacaggggcaggtcccgggcaaaaccccaccttcaagttaaaaagcctgaagcccacagcccaaagtgaacacttcgatccctgtttgcctgctctctctcaattggttctttctgaataatgtcattttgacaattgaatgttgccttttccaaaactacctwtggcctgccccaaccccatcctgtgcctataaagacctcagactcagtcagtagagaaagataaccagcttgactggagagaggcaacataacttcagagggacagctggacttcagaggaga

SEQ ID NO: 71762 - DNA, 901 bp, Homo sapiens
atagttgtacaggttgtggggctgtaggtgatttattttcttctttyttcttacttgtgtctttaaagtttctataataagtattatattgttttattaaaatgagaaaataaaaaaatcatttgctttcattttactagagtttctttcccctaagatattttcttctcttgtcagttttgccaggtcccaaagctcaagtggccaggcagcagaaaccatagcctggacctgctgcggcgccatttcttatttcaggccccattcaaaactggtacctcatgggctgcccgctaaatgagtcaaagcaacccaaatggggtataagtacctccgaattccaaagaggctcaccaagctctgggcctcattctgagcaaggcaaggtacaacaacctgtctttcaatttagaagaaatatccccaaatacccaaatcactggactctagaaaatctcaagatggcaaggccctaagctttctttttatttttcttcctgtggcatacatgtgtcttgctacggcagcaaagaagtttgctacttcctgatcatgaagttgattaacataattttatcaactgtgggatatcataatgatccagaatcctccaaaccatattacaatagaaagcagaactggcttagccccaggactaagcattggaccaggatgtatattccaaatgcagtactttggaaaatataatctgtcacaccatggctgagtccagattttaatcagccaatttagcacactattaatttgactcctaggaactaaagccaacacattaaatccagaatcctgaatgagtccttctacattaataaatttaagcaaaagagctttcaatgatgttctttttggtctaacacctttagaatccacgctcacgtat

SEQ ID NO: 71763 - DNA, 901 bp, Homo sapiens
atagttgtacaggttgtggggctgtaggtgatttattttcttcttttttcttacttgtgtctttaaagtttctataataagtattatattgttttattaaaatgagaaaataaaaaaatcatttgctttcattttactagagtttctttcccctaagatattttcttctcytgtcagttttgccaggtcccaaagctcaagtggccaggcagcagaaaccatagcctggacctgctgcggcgccatttcttatttcaggccccattcaaaactggtacctcatgggctgcccgctaaatgagtcaaagcaacccaaatggggtataagtacctccgaattccaaagaggctcaccaagctctgggcctcattctgagcaaggcaaggtacaacaacctgtctttcaatttagaagaaatatccccaaatacccaaatcactggactctagaaaatctcaagatggcaaggccctaagctttctttttatttttcttcctgtggcatacatgtgtcttgctacggcagcaaagaagtttgctacttcctgatcatgaagttgattaacataattttatcaactgtgggatatcataatgatccagaatcctccaaaccatattacaatagaaagcagaactggcttagccccaggactaagcattggaccaggatgtatattccaaatgcagtactttggaaaatataatctgtcacaccatggctgagtccagattttaatcagccaatttagcacactattaatttgactcctaggaactaaagccaacacattaaatccagaatcctgaatgagtccttctacattaataaatttaagcaaaagagctttcaatgatgttctttttggtctaacacctttagaatccacgctcacgtat

SEQ ID NO: 71764 - DNA, 1729 bp, Homo sapiens
acccatgacgcaaaaacctcccaccaggccccatctctcacattgggtatcatatttcaatgtgaaatttggaggggccaaaacatcctaactgtatcaatccctaaaatgccagtttcttaatggattattaccactgggaatcaaacatatcttttatagatattaaagcttaaatttgttgaatcagccttttatctttaatttggttgcacattatacaacattgggccttactcagatttcttggtcttaaagttggaaaagattgtcttccattggtctgccagtttagtatggtaaacttattttgtaaggtttcatatcccaaattccatatttccttactaatgggtagtattatccctgtaatccaggataacttacgttttagttttaattataagaataaacggtttcagtatcaacatagattattgtctcagggaggttttattctgctggggttgtgtaagagcaaggctttgaagctggaaaaagtgtttgaattctggctttgtcacttactgtgatttaggccaatcagcctgtttataaaggagggaactaaggttgagaggctgactgaagtgttcctccgttggtgcactcaaggaaaaaggtagttccatgaacttctgaaatacgccatttaatgggcctcttgtgctatttggcctgtaaaaggaacttaatcaatagtgggggtgggggtggttcctgttattatgaattcctatgagattttgattcagttgcatgcatgcaaatatacaattatttttacaattatttgaagggccgtgaaagggaagagttagttcctaatcatgtctcacaggtgatattttggatcatagtctttttttatataaagtatgccattgtagcaagagtttttataagggtttgcaagttagaaggcaactattagaattatgtgggtcgcaggttaatttgctttctttcttagaggtaaatacttaacatgaggcttgataaaaattttacatgctcatttcaaatcccaaaccacattttgcttcctttatcaatgaaagggcatattttgttcaaaaataccagaatggtagatttggtttagagtttttcttatctagttgccaagaaaggctgggctgtgttataccccaagctttgagcattccagcctccattttaaagaaaatattgtaattttgtatgaagaggtttgagtatctgaatgtaggggtaatattaaatgaatccaacttattttctaatgcttgatgtttggcttactattgctttatagcagttgtgttactcatcataatgaattcttttctaggaagccctccaaaaaatacggcagaagaatacaatgagacgagaagtaacggtggagctaagtagccaaggattctggaaaactggcatccgttytgatgtctgtcaggtggggagacttctgaggacacagttatgcccatacttttcttcctttaaaacaatctggtactgagggtttcttaattgagaatgttctttagaaaatactaccttgagactaaatggaatatcaactataaattgttttctattatttggattttgtttttgttgtctgttttgatgctggtgtgtgtgtgtatgttgtatttgtgggtgctggggcagggagaagcttacttagtagtgttcagttcagtgtcttctctttggataaaggtaagtctgtcctcat

SEQ ID NO: 71765 - DNA, 566 bp, Homo sapiens
acagcaagttgaaggatgtattttctaaattagatcttgtagcgggggaaggaggaatgtctgggagggcaatggcttcatagttattgttaacaaaggaattttgatttttagtctgtatgagatacttgattttttaattggagcgtagtgctgcttgtgaagaaaggaaagatttgtttaaaggctaactgacctgagagagattttttttttttttttttttttaagacatgggagtcttgctgtgttgcccaggctggaatccagtggctatttgcaggtgcaataatagtgcactctggcctttttgcmttggactcctgggcttaagcaaccctcctgcttcagcctcctatagctggaactacaggtgcatgtcacctcatctggctagtattatattttattaggaataatttaaaacatacaagatgcaagagaaaagtataatgaactctgaactatcacttagcttcaactgttttcagaagcatttctgtaatatcatcaaatacctagtcaatgtttacatttttctcattgtctgttaaatttattttagt

SEQ ID NO: 71766 - DNA, 701 bp, Homo sapiens
cttgagcccaggaatttaaaaccagccagcgccacagagggagaccctgtcttaaaaacaaaatttatatgtacaagccctaaaccccaacacggtcatatttggacacgacgaaccttttaggatatcacataacatttataaaagagggccctcataatgggattagtgagagagagagagaactctgtctctccaacatgtgaggacaaagcaagaaggcatctagctgcaagccaggaagatagccttcactaggaacaaaattgctggcagcaagattttggattccccaagctccagaactgtgagaaacaaatttctgctgtttaagaaactgagtccatggtgttttgttatactagcctgagctaagtcaccccaagagtcctcacattaaccatatactgtcatacaagtgctgcatttggatctacctggaatgtctccaaattttctgcttttcctcttggacccattgtgagaataggtttgcttcacaggaaactgctggtaatagtagtgatagcctaacagctagggacaaaaaggaaactttctttttctttttctgagatggagtttgtgctctgttgcctaggctggagtacaatggcgcgatctcaactctytgcaacttctgcctcctgagttcaagggattctcctgcctcagcctccagagtagctgggattacaggt

SEQ ID NO: 71767 - DNA, 590 bp, Homo sapiens
ctatggacccatgactatagcattttgtggatcagatttttaagtgggccaggcattcaaataaattaacagatacttaggaacatgtgaagttattatttaggttasataccttattcaaaaatttatccaaattattgtttagattaaaaaatttttcatagacacaactgagtaatattaagctggtgcaaaagtaattgcagtctttgccattaaaagtactttctctttactttttttttttttttttttgagacagagtctctctctgttatacaggctggagtgcagtggcacaatctcagctcattgcaacctctgcctcgcaggttcaagcgattctcctgcctcagcctcctgagtagctgggattccaggcgtgcaccaccacacccagctaatttttgtatttttagtagagacaggttttcactatgttggccaagctggtctcgaactcccaacctcaggtgattcgcctgcctcggcctcccaaagtgctgggattataggtttgagccactgtgcccagcctttctttacttttaatggcaaataccacaattacttttgcacctagtaattgg

SEQ ID NO: 71768 - DNA, 930 bp, Homo sapiens
gtgaaagttgagtaaagaatgggatgtttacacagtctaggggtatctctccaggaaacacttgttgactgcaaagtaaaaaaaggtaattggtggtaactgggagatacagggtttctttttggagtgatgaagacatagtagaattagatcatggtaatggttgcacaacattatgaatttactaataatcactgaattgtacactttcaaacagtgaattttatgttacatgaacttatctttaaaaaaataaaattaatttgacaaatcagttacatactctaggcctggggaaacaacagtcaagaggtagagttagcagaaccaagtggctcagasgcggacccattgactgagctcaaccccctggagatgggcatcgcctggctgttgctagtgcctgccagggggaatgggaggctggttctggggctactgaaagctggagccaactatgctgctggagcaatactgctgctggagagacactcccagaaagtgcaaagaccaggaaggagggtccctttccttcctcccaacctccagtcacactctaaggcttctgccggcagcatctaaggggaaatgaaccagatggcttaccatatccaagagcagagtatagaaaggtgggcttggatccaagagacaatagataaataaccaacacgcagagaacaatggagaattaacagctcatacaatgaggggagaggattcttttctcatataattattttcttctctaaaagagtgattcgttagatcttaaactaaatgttgcttaattttagaataacttcaggaatatttttataaatcagaaaaaaatcttattcctttatatatgctaattctacatctgaaaacatttttcggttcttacattgctcccacctccttgacccttaggtataatggagagaa

SEQ ID NO: 71769 - DNA, 930 bp, Homo sapiens
gtgaaagttgagtaaagaatgggatgtttacacagtctaggggtatctctccaggaaacacttgttgactgcaaagtaaaaaaaggtaattggtggtaactgggagatacagggtttctttttggagtgatgaagacatagtagaattagatcatggtaatggttgcacaacattatgaatttactaataatcactgaattgtacactttcaaacagtgaattttatgttacatgaacttatctttaaaaaaataaaattaatttgacaaatcagttacatactctaggcctggggaaacaacagtcaagaggtagagttagcagaaccaagtggctcagaggcggacccattgactgagctcaaccccctggagatgggcatcgcctggctgttgctagtgcctgccagggggaatgggaggytggttctggggctactgaaagctggagccaactatgctgctggagcaatactgctgctggagagacactcccagaaagtgcaaagaccaggaaggagggtccctttccttcctcccaacctccagtcacactctaaggcttctgccggcagcatctaaggggaaatgaaccagatggcttaccatatccaagagcagagtatagaaaggtgggcttggatccaagagacaatagataaataaccaacacgcagagaacaatggagaattaacagctcatacaatgaggggagaggattcttttctcatataattattttcttctctaaaagagtgattcgttagatcttaaactaaatgttgcttaattttagaataacttcaggaatatttttataaatcagaaaaaaatcttattcctttatatatgctaattctacatctgaaaacatttttcggttcttacattgctcccacctccttgacccttaggtataatggagagaa

SEQ ID NO: 71770 - DNA, 930 bp, Homo sapiens
gtgaaagttgagtaaagaatgggatgtttacacagtctaggggtatctctccaggaaacacttgttgactgcaaagtaaaaaaaggtaattggtggtaactgggagatacagggtttctttttggagtgatgaagacatagtagaattagatcatggtaatggttgcacaacattatgaatttactaataatcactgaattgtacactttcaaacagtgaattttatgttacatgaacttatctttaaaaaaataaaattaatttgacaaatcagttacatactctaggcctggggaaacaacagtcaagaggtagagttagcagaaccaagtggctcagaggcggacccattgactgagctcaaccccctggagatgggcatcgcctggctgttgctagtgcctgccagggggaatgggaggctggttctggggctactgaaagctggrgccaactatgctgctggagcaatactgctgctggagagacactcccagaaagtgcaaagaccaggaaggagggtccctttccttcctcccaacctccagtcacactctaaggcttctgccggcagcatctaaggggaaatgaaccagatggcttaccatatccaagagcagagtatagaaaggtgggcttggatccaagagacaatagataaataaccaacacgcagagaacaatggagaattaacagctcatacaatgaggggagaggattcttttctcatataattattttcttctctaaaagagtgattcgttagatcttaaactaaatgttgcttaattttagaataacttcaggaatatttttataaatcagaaaaaaatcttattcctttatatatgctaattctacatctgaaaacatttttcggttcttacattgctcccacctccttgacccttaggtataatggagagaa

SEQ ID NO: 71771 - DNA, 930 bp, Homo sapiens
gtgaaagttgagtaaagaatgggatgtttacacagtctaggggtatctctccaggaaacacttgttgactgcaaagtaaaaaaaggtaattggtggtaactgggagatacagggtttctttttggagtgatgaagacatagtagaattagatcatggtaatggttgcacaacattatgaatttactaataatcactgaattgtacactttcaaacagtgaattttatgttacatgaacttatctttaaaaaaataaaattaatttgacaaatcagttacatactctaggcctggggaaacaacagtcaagaggtagagttagcagaaccaagtggctcagaggcggacccattgactgagctcaaccccctggagatgggcatcgcctggctgttgctagtgcctgccagggggaatgggaggctggttctggggctactgaaagctggagccaactatgctgctggagcaatactgctgctggagagacactcccagaaagtgcaaagaccaggaaggagggtccctttccttcctcccaacctccagtcacactctaaggcttctgccggcagcatctaaggggaaatgaaccagatggcttaccatatccaagagcagagtatagaaaggtgggcttggatccaagagacaatagataaataaccaacacgcaragaacaatggagaattaacagctcatacaatgaggggagaggattcttttctcatataattattttcttctctaaaagagtgattcgttagatcttaaactaaatgttgcttaattttagaataacttcaggaatatttttataaatcagaaaaaaatcttattcctttatatatgctaattctacatctgaaaacatttttcggttcttacattgctcccacctccttgacccttaggtataatggagagaa

SEQ ID NO: 71772 - DNA, 930 bp, Homo sapiens
gtgaaagttgagtaaagaatgggatgtttacacagtctaggggtatctctccaggaaacacttgttgactgcaaagtaaaaaaaggtaattggtggtaactgggagatacagggtttctttttggagtgatgaagacatagtagaattagatcatggtaatggttgcacaacattatgaatttactaataatcactgaattgtacactttcaaacagtgaattttatgttacatgaacttatctttaaaaaaataaaattaatttgacaaatcagttacatactctaggcctggggaaacaacagtcaagaggtagagttagcagaaccaagtggctcagaggcggacccattgactgagctcaaccccctggagatgggcatcgcctggctgttgctagtgcctgccagggggaatgggaggctggttctggggctactgaaagctggagccaactatgctgctggagcaatactgctgctggagagacactcccagaaagtgcaaagaccaggaaggagggtccctttccttcctcccaacctccagtcacactctaaggcttctgccggcagcatctaaggggaaatgaaccagatggcttaccatatccaagagcagagtatagaaaggtgggcttggatccaagagacaatagataaataaccaacacgcagagaacaatggagaattaacagctcatacaatgaggggagaggattcttttctcatataattattttcttctctaaaagagtgattcgttagatcttaaactaaatgttgcttaattttagaakaacttcaggaatatttttataaatcagaaaaaaatcttattcctttatatatgctaattctacatctgaaaacatttttcggttcttacattgctcccacctccttgacccttaggtataatggagagaa

SEQ ID NO: 71773 - DNA, 340 bp, Homo sapiens
cccccctcccactcactccctctccacccaggatggagtgacatttctgacagggaccatgtctcctctgtggctccaactcccgtagaacagtctgccatggatctagccttcattgacaagagttaccaaaaatctgagaaacattgaggaggaaaaaamgtcttaaaactgggaaaattcggtccattcacttaatgacttttattcccctgtgaattgggaaggggagaaacaccctttttctattttctttctttctttctttctttctttctttctttctttctttctttctttctttctttctttctttctttcttctttctttctttttctt

SEQ ID NO: 71774 - DNA, 634 bp, Homo sapiens
  misc_feature (1)...(634): n = A,T,C or G
acctgtnnnnnnnnnnnnnnnnnnnnnnnnnnnnnnnnnnnnnnnnnnnnnnnnnnnnnnnnnnnnnnnnnnnnnnnnnnnnnnnnnnnnnnnnnnnnnnnnnnnnatggtggaaagtttggcttctgcttggtttcgyctgggtacattcatattgaggtaggaggtgggactccagaggtggagcttggacactggaccaaactgaggacttgctaaaacagggacagggtggaagcagcttcccataagacatgcccaccagtgtgccctgtcagtttaccactgccatggcaacaccctgaagctacctccccttttcatggcaataacccaacaacccagaaattaccacatatttttctagaaatttctgcataatacacccatcaatttgcatattattaaaagtggatataatatgactacagaactgcctctgagctgctactctgggcacactgactatgaggtagtcctgttaagcaaggagcagtgcctctgctgtggctgcatactgacatttcaaaaaaagttgttgcctaacaccactagctcacccttgaattatttcctgggtgaagccaagaaccttcttttggggctcacctgccctgcatcaatgttactgaat

SEQ ID NO: 71775 - DNA, 634 bp, Homo sapiens
  misc_feature (1)...(634): n = A,T,C or G
acctgtnnnnnnnnnnnnnnnnnnnnnnnnnnnnnnnnnnnnnnnnnnnnnnnnnnnnnnnnnnnnnnnnnnnnnnnnnnnnnnnnnnnnnnnnnnnnnnnnnnnnatggtggaaagtttggcttctgcttggtttcgcctgggtacattcatattgaggtaggaggtgggactccagaggtggagcttggacactggaccaaactgaggacttgctaaaacagggacagggtggaagcagcttcccataagacatgcccaccagtgtgccctgtcagtttaccactgccatggcaacaccctgaagctacctccccttttcatggcaataaccsaacaacccagaaattaccacatatttttctagaaatttctgcataatacacccatcaatttgcatattattaaaagtggatataatatgactacagaactgcctctgagctgctactctgggcacactgactatgaggtagtcctgttaagcaaggagcagtgcctctgctgtggctgcatactgacatttcaaaaaaagttgttgcctaacaccactagctcacccttgaattatttcctgggtgaagccaagaaccttcttttggggctcacctgccctgcatcaatgttactgaat

SEQ ID NO: 71776 - DNA, 729 bp, Homo sapiens
ctaaaacccacttatgacgtacaagctcctcccctgacctacctgcaattacctgcaattggttgtctccttggaatgtataaaamcaaactgtaacccggttgccttgggcatgctttccgaacctcttgagatagtgtaacccaggccttggtcacttatactggctctgaataaacctctttaaatatattttgacagaatttgttttttgtgtatttttctgtgtatttctacctctgagaagaggagtaatttatactctttacaaatcatggtcaggtatgactggtgctagaatgaggatgaagggaagagaaaaggaagaaataattctccactctttgtttccaattttagttctttaaagtaaaagtacaaaacattttgtagagatgtagcttgtggtggcatggttgaaaaacttctgcactttatgattcctccactacagtgtgataatgttttaaatagcatttaaaatgtagattctgtccaatccttacaattaacttttttattgtttggaatccatgaagttggtatatgcatgagcagatacatatttatttaagaaaaaaaattaggccttacagaaaattggtttctcagagacatgataaaagttaccagatgtctctcagactatatctatgaaaaaatacataaccaaatagacaccaattgcaaatgaattaattacattgaaattctaataactttcatttc

SEQ ID NO: 71777 - DNA, 681 bp, Homo sapiens
acctgcctcggcctcccaaagtgctgggattacaggcgtgagccaccgcacctggcctatccctatattcatatgaggaaactgacccttagagaaatgaaatacaatgcaatatttgctcagagtaacacaaaaacagacattccaactaagatacaaaaccaggattgtctgaccccaaagcccatgcttttccccaacagcaaacattaactttataagaataaataaatgcacctttgtgcatttatttattttggtgcatttatctattatttcataaaggtgcaccaaagatgcaactttgtacatgaaaatkatttttctagagtagagttgtaaattatatctgttggatagaaaagggaattccaggccaggcacagtggctcatgcctgtagtcccagcactttaggaggtggaggtgggtggatcatttgatcccaggagttcaagaccagcctgggtaacatggtgaaatcctgtctctatttaaaaaaaaaaaacaaaaaaacaaaaaaaaaactagccaggcctagtactgtgcgcctgtagtcccagctactcggtaggccaaggtgggaggatcacttgagcccgggagattgaggctacagtgatccactgtgatcttgccactgcactctgtcctgtaacagagtgagaccctgtatttaaaa

SEQ ID NO: 71778 - DNA, 567 bp, Homo sapiens
ctgcactccagcgtgggtgacagagcgaaaaaaaaaaatctaatgtagtaatcttatttctagattatttctttcataaattgcagatattcagtctcttgaattctcctgtgaaccagtttcaccatcttgatggctccccaattaacaaggtaagtaaatatttgacatgtgcttacttaaatatttgtgttaagggccatgctttttactttctacaaattatactttgaaaatgataacctaccatatttcccacmtgaaagacataacctaacacacactacaggaagaaaatcttttgtcatttttctagccatggtaatgaacttcacagtcacactgagatttcctaagggtagactcacatgtaaactggctcaataacccttttcaaagctattattttaccagtgcaaaagagtacctgtaggggtgggttgcccctccacacctgtgggtgtttctcgtaaggtgggacgagagatttggaaaagagaaagacacagagacaaagtatagagaaagaaataaggggacccggggaaccagcgttcagcatatgga

SEQ ID NO: 71779 - DNA, 567 bp, Homo sapiens
ctgcactccagcgtgggtgacagagcgaaaaaaaaaaatctaatgtagtaatcttatttctagattatttctttcataaattgcagatattcagtctcttgaattctcctgtgaaccagtttcaccatcttgatggctccccaattaacaaggtaagtaaatatttgacatgtgcttacttaaatatttgtgttaagggccatgctttttactttctacaaattatactttgaaaatgataacctaccatatttcccacatgaaagacataacctaacacacactacaggaagaaaatcttttgtcatttttctagccatggtaatgaacttcacagtcacactgagatttcctaagggtagactcacatgtaaactggctcaataacccttttcaaagctattattttaccagtgcaaaagagtacctgtaggggtgggttgcccctccacacctgtgggtgtttctygtaaggtgggacgagagatttggaaaagagaaagacacagagacaaagtatagagaaagaaataaggggacccggggaaccagcgttcagcatatgga

SEQ ID NO: 71780 - DNA, 873 bp, Homo sapiens
agcacataataaaagaaaactgctgaggtcagcagcagcagagaagccacacttcttattttcacaaacacagttttggggatggtaatcatatctattagcaagggtgacaccactgtgggcctggcagaaaaatgagctctcccgcattgcaaaatgagcaaagtggagatcgataaatcataaaattagttgagacatcatctatctttcatggctttccctttattcctgccacggtccctcaggacactcattcatttactgcattttattgttgggaaaacacgtcaaggtttggaggctgcattcagttaggggagcaggggccataatgtgtgtcattaattaggcrggtttgggaggttcaatccaaagtctggtctcaactgacttccataaattgagttttaggactgcttctgcgtcttgtgtgacttcatcaaaaagagaacgttattgaaatatgccctgagagggagagagagagaaagagggacatgtctgctcactctgtagaaacgataaatttagggacaaaccaggtgataagccagatgcaatctgagttgtctaaagattcttgctgttatctacatgtgattgaaataaatgtgagacacagagcttggagtgcatagatacgtcatctggtacctatattcttcatgtcaaggcatatagtaaacagattttttttcaaaaaattattgtgataacacttaacatgagacgtaccctcttaacaaattttaagtgcacaataccttgttgactctaggtacataatgtgcagcagagctctagaacgcattcatcttgcctgacggaaacttcacgcccattgatgagtagctcctcattttctcctcc

SEQ ID NO: 71781 - DNA, 779 bp, Homo sapiens
caggctgtaattttcataaaaggaagtatgggaaggctttcttcgaattgaagttgagccttgcgcaagcatgagaggtaaaaaaaaaatccattctggagggatctaagatgaccagaaagaactcaaccatctgggggagagtggatgctgcgtgggagatgagaccaggaaatttgccactgcatcattggtttttggacytttggcagatctgatataatggaaggcatttagagcatctgaatctattgactgtccaattcagtcgattgattgttcagtgttgccaacattttgactttagttcacagcatttctcttgaaatgggttggctatattcccaatcaaatactgattgacacattggcatcaagcattcttatgtgcccagctcagtggtggtcacttggtggaagaatatgatctatcaccaaggagttactacttagtttgggaggaatcttaagtaacatggaataatttggtctatcttagccccccaaaagattgctttcatttatttatttagccacgctttggcataattctttaacttgctattgggagatattttggttacccattgtcaataatggggcatagtgaatcttccccaaactctgtggcatgcaacagtgaacatatatttagctcatgcatctgcgactggggggtggctgaacccagctgggcttgcttatgcaactgcaggtcagcagggggtgtgctgagctaggctgggctcagctgtgtggttctgctgtaggctacaggt

SEQ ID NO: 71782 - DNA, 779 bp, Homo sapiens
caggctgtaattttcataaaaggaagtatgggaaggctttcttcgaattgaagttgagccttgcgcaagcatgagaggtaaaaaaaaaatccattctggagggatctaagatgaccagaaagaactcaaccatctgggggagagtggatgctgcgtgggagatgagaccaggaaatttgccactgcatcattggtttttggacttttggcagatctgatataatggaaggcatttagagcatctgaatctattgactgtccaattcagtcgattgattgttcagtgttgccaacattttgactttagttcacagcatttctcttgaaatgggttggctatattcccaatcaaatactgattgacacattggcatcaagcattcttatgtgcccagctcagtggtggtcacttggtggaagaatatgatctatcaccaaggagttactacttagtttgggaggaatcttaagtaacatggaataatttggtctatcttagccccccaaaagattgctttcatttatttatttagccacgctttggcrtaattctttaacttgctattgggagatattttggttacccattgtcaataatggggcatagtgaatcttccccaaactctgtggcatgcaacagtgaacatatatttagctcatgcatctgcgactggggggtggctgaacccagctgggcttgcttatgcaactgcaggtcagcagggggtgtgctgagctaggctgggctcagctgtgtggttctgctgtaggctacaggt

SEQ ID NO: 71783 - DNA, 779 bp, Homo sapiens
caggctgtaattttcataaaaggaagtatgggaaggctttcttcgaattgaagttgagccttgcgcaagcatgagaggtaaaaaaaaaatccattctggagggatctaagatgaccagaaagaactcaaccatctgggggagagtggatgctgcgtgggagatgagaccaggaaatttgccactgcatcattggtttttggacttttggcagatctgatataatggaaggcatttagagcatctgaatctattgactgtccaattcagtcgattgattgttcagtgttgccaacattttgactttagttcacagcatttctcttgaaatgggttggctatattcccaatcaaatactgattgacacattggcatcaagcattcttatgtgcccagctcagtggtggtcacttggtggaagaatatgatctatcaccaaggagttactacttagtttgggaggaatcttaagtaacatggaataatttggtctatcttagccccccaaaagattgctttcatttatttatttagccacgctttggcataattctttaacttgctattgggagatattttggttacccattgtcaataatggggcatagtgaatcttccccaaactctgtggcatgcaacagtgaacatayatttagctcatgcatctgcgactggggggtggctgaacccagctgggcttgcttatgcaactgcaggtcagcagggggtgtgctgagctaggctgggctcagctgtgtggttctgctgtaggctacaggt

SEQ ID NO: 71784 - DNA, 752 bp, Homo sapiens
acagaaagtcccagactcacctgagtccttcatctgcgttatttaacttgaatttagaatgtctgtagaggtaatggtgagctactgaagcctcatctgcaggggtgacacagggttagggttatagatgacagctgctgtggatcagggctcttcgtcttggtttgtacaatggtatcactcgaggagtcttgagccagacctttgtcaggctctccctcagatcaattgcgtctgaatctctgggggtggggccctggaaacagtattttatttttgctgattcttacaggtactcatatattcacacactggcacttacttattcagtagccttttgtgccaygctcaaagcactgggaatatagaagtgaatgcgccacaggctctgctctcattgaaattacctttactgttgtggtagacaataagcgaataaacacgtattaaatcagtgtatttatttatgaagaaatatatgaagccatattgaacaatgaggaagtgataggaatgggaggtttatttttttaaaaatataagttttattcagatacataattcacattccatacaattcacccatttaaagtacacaatttaatagtttgtcgtatattcacagaattgtgcaaccatcaccacaatcgactttttttattttttagagacagggtctcacattgtcacccaggctggagtgcagtgatgagatcatggctcactgccgcttcaaattcctaggctcaaag

SEQ ID NO: 71785 - DNA, 752 bp, Homo sapiens
acagaaagtcccagactcacctgagtccttcatctgcgttatttaacttgaatttagaatgtctgtagaggtaatggtgagctactgaagcctcatctgcaggggtgacacagggttagggttatagatgacagctgctgtggatcagggctcttcgtcttggtttgtacaatggtatcactcgaggagtcttgagccagacctttgtcaggctctccctcagatcaattgcgtctgaatctctgggggtggggccctggaaacagtattttatttttgctgattcttacaggtactcatatattcacacactggcacttacttattcagtagccttttgtgccatgctcaaagcactgggaatatagaagtgaaygcgccacaggctctgctctcattgaaattacctttactgttgtggtagacaataagcgaataaacacgtattaaatcagtgtatttatttatgaagaaatatatgaagccatattgaacaatgaggaagtgataggaatgggaggtttatttttttaaaaatataagttttattcagatacataattcacattccatacaattcacccatttaaagtacacaatttaatagtttgtcgtatattcacagaattgtgcaaccatcaccacaatcgactttttttattttttagagacagggtctcacattgtcacccaggctggagtgcagtgatgagatcatggctcactgccgcttcaaattcctaggctcaaag

SEQ ID NO: 71786 - DNA, 752 bp, Homo sapiens
acagaaagtcccagactcacctgagtccttcatctgcgttatttaacttgaatttagaatgtctgtagaggtaatggtgagctactgaagcctcatctgcaggggtgacacagggttagggttatagatgacagctgctgtggatcagggctcttcgtcttggtttgtacaatggtatcactcgaggagtcttgagccagacctttgtcaggctctccctcagatcaattgcgtctgaatctctgggggtggggccctggaaacagtattttatttttgctgattcttacaggtactcatatattcacacactggcacttacttattcagtagccttttgtgccatgctcaaagcactgggaatatagaagtgaatgcgccacaggctctgctctcattgaaattacctttactgttgtggtagacaataagcgaataaacacgtattaaatcagtrtatttatttatgaagaaatatatgaagccatattgaacaatgaggaagtgataggaatgggaggtttatttttttaaaaatataagttttattcagatacataattcacattccatacaattcacccatttaaagtacacaatttaatagtttgtcgtatattcacagaattgtgcaaccatcaccacaatcgactttttttattttttagagacagggtctcacattgtcacccaggctggagtgcagtgatgagatcatggctcactgccgcttcaaattcctaggctcaaag

SEQ ID NO: 71787 - DNA, 752 bp, Homo sapiens
acagaaagtcccagactcacctgagtccttcatctgcgttatttaacttgaatttagaatgtctgtagaggtaatggtgagctactgaagcctcatctgcaggggtgacacagggttagggttatagatgacagctgctgtggatcagggctcttcgtcttggtttgtacaatggtatcactcgaggagtcttgagccagacctttgtcaggctctccctcagatcaattgcgtctgaatctctgggggtggggccctggaaacagtattttatttttgctgattcttacaggtactcatatattcacacactggcacttacttattcagtagccttttgtgccatgctcaaagcactgggaatatagaagtgaatgcgccacaggctctgctctcattgaaattacctttactgttgtggtagacaataagcgaataaacacgtattaaatcagtgtatttatttatgaagaaatatatgaagccatattgaacaatgaggaagtgataggaatgggaggtttatttttttaaaaatataagttttattcagatacataattcacattccatacaattcacccatttaaagtacacaatttaatagtttgtcgtatattcacagaattgtgcaaccatcaccacaatcgactttttttattttttagagacagggtctcacattgtcasccaggctggagtgcagtgatgagatcatggctcactgccgcttcaaattcctaggctcaaag

SEQ ID NO: 71788 - DNA, 672 bp, Homo sapiens
ggatccgagaagaagcagggtcacaaacagcgtaagcccaaaggacattccctgctgtttctgaaccckccttggctggcccgtaaactgggcaggggtgacagtcctgtgttgtaaagggcgtagagggcttaagcgaggtaattgatatagcctggaagctacactgatttgaactttgttcatacatctaattaattacctgatattattatttacatttggctctcttgtcttacttatctttataactgtctctctatttgcttaacctcaggacctataacagagccagatttacagtttcttttccttccctttattaacagctgagcactcactgtgtgccagttgttgtacatatgggttatgcaatgtcggcttccagcagccctgttttacagatgagccaaacaaaccccctccccgagttactcgtctgtagactgagttatggcactgtgacggaaggggataagtttgctgactgcatgctataagcccgtttatgtcatttttcttttttaatcttccagtctcccagtaaggtgggtgtgattgtcctcatgttgcagaaaggcaatgaattgcccaagaccccacagccagtgaagtgtcagggtctgattgcaaaacccataactccccattgtagcacatcccctcttctga

SEQ ID NO: 71789 - DNA, 591 bp, Homo sapiens
aatggtacatttaaaaaatttttaaagttatttgtagagatgggatctcactatgttgccaggctggtctccaactcctgggctcaagtgatcctctgccttggcctcccaaggtgttgggattacaggcgtgagccaccacacctagtctctcagtgcgtttaacctcctcactcactctgccaaaacccactcgtctcccgaagacagacccccatctgaagctcaggtccctgytcagctcccttcctgagcctcccgagggctccttggtggaccccggagcacaagtcctcagtggccctggacagatggtctgcactctggtcagcggactcccgtgtcgttattttccagactcatttacgtggcgggccgggagggtcacatgctcaaagtgctttcttacatcagcgtcaggcgcctcactccagcccccgccatcatcttttatgtgagtacaaatcccgctaccagcctatcttcaaggcggggacactccatccatggggtgctaagcccggcggcttccaaatgacccagatgcccttattccttgctatgaaacagatatagaaagagtcccaggac

SEQ ID NO: 71790 - DNA, 750 bp, Homo sapiens
cataatgaaggataagctaatatgatatagattattacaggtataaatgtcaggaaaaaagagatcaaaactcactagcttagttaaggaataattctcggagaatatgagcttggtgttcaaggctataatcaggattccaaaatatagtgactatttcagtgacagagacattttcatgtttagatgtggttacggattattttagaactacgtattttggcatttgggggttaaatagatacagtctttgccataacagtttctcatctgttgaaaagtaaagctgtctccagtataggtcagaacaaaattgaaaaggaaatattattcatctgtatctttcttctttccaatacacccttcacccaaggaaagcctcatccctaccagtccgtcctatataccgccttggattttcttacttgtctacacccaggmctgagaggccttgttcgcctgtcctttgtcaggtccataccattcattctttccctagaaatacaactacttctgttccctcactcacttgcctggatctcatctcttgtaggcatcacctgaagccactatactccatcttaccaaaaataagtctttactccaggcaaatagcagatttatacaataactaacttaatgctgaataaaagaagcctgatgggagaagactacagttattttccaacatgggagactctgaggtgcctggagctccaaccactatctttacatatagacttacagatt

SEQ ID NO: 71791 - DNA, 750 bp, Homo sapiens
cataatgaaggataagctaatatgatatagattattacaggtataaatgtcaggaaaaaagagatcaaaactcactagcttagttaaggaataattctcggagaatatgagcttggtgttcaaggctataatcaggattccaaaatatagtgactatttcagtgacagagacattttcatgtttagatgtggttacggattattttagaactacgtattttggcatttgggggttaaatagatacagtctttgccataacagtttctcatctgttgaaaagtaaagctgtctccagtataggtcagaacaaaattgaaaaggaaatattattcatctgtatctttcttctttccaatacacccttcacccaaggaaagcctcatccctaccagtccgtcctatataccgccttggattttcttacttgtctacacccaggccygagaggccttgttcgcctgtcctttgtcaggtccataccattcattctttccctagaaatacaactacttctgttccctcactcacttgcctggatctcatctcttgtaggcatcacctgaagccactatactccatcttaccaaaaataagtctttactccaggcaaatagcagatttatacaataactaacttaatgctgaataaaagaagcctgatgggagaagactacagttattttccaacatgggagactctgaggtgcctggagctccaaccactatctttacatatagacttacagatt

SEQ ID NO: 71792 - DNA, 750 bp, Homo sapiens
cataatgaaggataagctaatatgatatagattattacaggtataaatgtcaggaaaaaagagatcaaaactcactagcttagttaaggaataattctcggagaatatgagcttggtgttcaaggctataatcaggattccaaaatatagtgactatttcagtgacagagacattttcatgtttagatgtggttacggattattttagaactacgtattttggcatttgggggttaaatagatacagtctttgccataacagtttctcatctgttgaaaagtaaagctgtctccagtataggtcagaacaaaattgaaaaggaaatattattcatctgtatctttcttctttccaatacacccttcacccaaggaaagcctcatccctaccagtccgtcctatataccgccttggattttcttacttgtctacacccaggcctsagaggccttgttcgcctgtcctttgtcaggtccataccattcattctttccctagaaatacaactacttctgttccctcactcacttgcctggatctcatctcttgtaggcatcacctgaagccactatactccatcttaccaaaaataagtctttactccaggcaaatagcagatttatacaataactaacttaatgctgaataaaagaagcctgatgggagaagactacagttattttccaacatgggagactctgaggtgcctggagctccaaccactatctttacatatagacttacagatt

SEQ ID NO: 71793 - DNA, 849 bp, Homo sapiens
agtttcaaccagaattccataaggattttatttcagaacttaagaaaattattttaaataaacttggacaaaagtaatcaataatataaaagaaaattatgaacaaaaaaagaacattccaaaaccaataataggacctaagcccttgcattttatacctttcttccaccaaaatctctgtgaaagaactcaaccagggttgacttgtaaaattccctatcattgtggaaaaggtcatgaaaaaaatatcaagagaaacacacttacagcattaaaaacctgcaagacacagagaacacagtgaaggggagcatgacctcctcactaccatcctgacgacatctggttgaarggaatgaatttgacattaaccttgaaaacttgtgtgcgggagaaaacacaaagtcaaaaggcaagggacaatctgagaaaaaacaactaaaacatatatcatagaaaaatgaataatgcccagaatttagttctactacaaatcagtaagaaaaagaaaaataatctaattctccaaaagtggaagtatgccagtaatcccaacagtttgggatgccaagatgggaggatcgcttgagcccaggagtgctagaccagcctgggcaacacagtgagacctcgtctctacaagaaaaataaacaaaaaaattaaccaggtgcagtggtgtgcatgctgaggtgagaagattgcttgagttccgtaggtataggctgcagtgagccaagatcatgccactgcactccagcctgggcaacagagtgagaacctgtctcaaaaaacaaaacaaaaaaatgtatgagcaggtaattcacagaagagaaaaactttatagacaa

SEQ ID NO: 71794 - DNA, 553 bp, Homo sapiens
tccattcatcttgcttctccagttgagctagtgctttgtgagtcagcctggaaactttctgtataaattgcctctcttttccccagaggcctcgttatcttaccttcaaattggtacaaagtatctcaggaaatagaaccagagtgtcccatcacagttagtaatgtcatgctgtggccctaccacctccttctgtaaaacatactttttaatcttttagtagatagtttgttgtttatttcattaaaaaaagttttttagagttcccccacatatggctagaaataagtagaaacaagtacagaatgtctcatgcttgtggttcctttgtgaattggcacacattccttcttcctctggggatacaatttgccccttctctaactatcttaaaatacttcaacataggttkggttttttgtttgttcttttttaaaaaatcaagatcgtgattctgactttctgtatctcctcttccttgggctccatgcagagattgagatcccctgctatgatttgtctattttttttctgcagataatgtcagttttta

SEQ ID NO: 71795 - DNA, 798 bp, Homo sapiens
aggttagaagaagaagctgtaggtgttctggcatgcatatactgcttaaatcctcataatagttcacacacacacacacacacacacacacacayacacacacacatatatatatatatatatagagagagagagagagagagagagatgaaaaagctgaggctcgagtcctttatttaaaatacagctctaggaccatctaacttccaagctctaaaatccatgctttgacaagccaaagaaccagacacggtgaagaagggtgagaagacagggacataaaggaaagtcctggagattggggtgagacagtgcacaaggagcagaaattagagaagaggatgtggaagagacatgtggaaagggccaggaagaaagggagaagaaaatgcagggactgccagggctacagttcaagtggataattccagtcctggtagcaattagagctgacccatttggcagtgcctgcccctctgcaggggtttgttgccaccctctttcctgccaagactgtttacacaaccttttttagccctggctagagtagcctggttctatccagcatggagaatttggtttccacctctactacactaccaagtggaaagaagaggtgtactgtaatctaggtgggggaagctgtgtagcagaaacttggggacttctagaagctgcctgtccctcatgcccccctggagtacaatggagccaaaggtactccattctcagcatcttactctatctttgacatcttcttttgactcagtagatcctttcaaatccccatctctgaga

SEQ ID NO: 71796 - DNA, 798 bp, Homo sapiens
aggttagaagaagaagctgtaggtgttctggcatgcatatactgcttaaatcctcataatagttcacacacacacacacacacacacacacacacayacacacacatatatatatatatatatagagagagagagagagagagagagatgaaaaagctgaggctcgagtcctttatttaaaatacagctctaggaccatctaacttccaagctctaaaatccatgctttgacaagccaaagaaccagacacggtgaagaagggtgagaagacagggacataaaggaaagtcctggagattggggtgagacagtgcacaaggagcagaaattagagaagaggatgtggaagagacatgtggaaagggccaggaagaaagggagaagaaaatgcagggactgccagggctacagttcaagtggataattccagtcctggtagcaattagagctgacccatttggcagtgcctgcccctctgcaggggtttgttgccaccctctttcctgccaagactgtttacacaaccttttttagccctggctagagtagcctggttctatccagcatggagaatttggtttccacctctactacactaccaagtggaaagaagaggtgtactgtaatctaggtgggggaagctgtgtagcagaaacttggggacttctagaagctgcctgtccctcatgcccccctggagtacaatggagccaaaggtactccattctcagcatcttactctatctttgacatcttcttttgactcagtagatcctttcaaatccccatctctgaga

SEQ ID NO: 71797 - DNA, 798 bp, Homo sapiens
aggttagaagaagaagctgtaggtgttctggcatgcatatactgcttaaatcctcataatagttcacacacacacacacacacacacacacacacacayacacacatatatatatatatatatagagagagagagagagagagagagatgaaaaagctgaggctcgagtcctttatttaaaatacagctctaggaccatctaacttccaagctctaaaatccatgctttgacaagccaaagaaccagacacggtgaagaagggtgagaagacagggacataaaggaaagtcctggagattggggtgagacagtgcacaaggagcagaaattagagaagaggatgtggaagagacatgtggaaagggccaggaagaaagggagaagaaaatgcagggactgccagggctacagttcaagtggataattccagtcctggtagcaattagagctgacccatttggcagtgcctgcccctctgcaggggtttgttgccaccctctttcctgccaagactgtttacacaaccttttttagccctggctagagtagcctggttctatccagcatggagaatttggtttccacctctactacactaccaagtggaaagaagaggtgtactgtaatctaggtgggggaagctgtgtagcagaaacttggggacttctagaagctgcctgtccctcatgcccccctggagtacaatggagccaaaggtactccattctcagcatcttactctatctttgacatcttcttttgactcagtagatcctttcaaatccccatctctgaga

SEQ ID NO: 71798 - DNA, 798 bp, Homo sapiens
aggttagaagaagaagctgtaggtgttctggcatgcatatactgcttaaatcctcataatagttcacacacacacacacacacacacacacacacacacayacacatatatatatatatatatagagagagagagagagagagagagatgaaaaagctgaggctcgagtcctttatttaaaatacagctctaggaccatctaacttccaagctctaaaatccatgctttgacaagccaaagaaccagacacggtgaagaagggtgagaagacagggacataaaggaaagtcctggagattggggtgagacagtgcacaaggagcagaaattagagaagaggatgtggaagagacatgtggaaagggccaggaagaaagggagaagaaaatgcagggactgccagggctacagttcaagtggataattccagtcctggtagcaattagagctgacccatttggcagtgcctgcccctctgcaggggtttgttgccaccctctttcctgccaagactgtttacacaaccttttttagccctggctagagtagcctggttctatccagcatggagaatttggtttccacctctactacactaccaagtggaaagaagaggtgtactgtaatctaggtgggggaagctgtgtagcagaaacttggggacttctagaagctgcctgtccctcatgcccccctggagtacaatggagccaaaggtactccattctcagcatcttactctatctttgacatcttcttttgactcagtagatcctttcaaatccccatctctgaga

SEQ ID NO: 71799 - DNA, 798 bp, Homo sapiens
aggttagaagaagaagctgtaggtgttctggcatgcatatactgcttaaatcctcataatagttcacacacacacacacacacacacacacacacacacacayacatatatatatatatatatagagagagagagagagagagagagatgaaaaagctgaggctcgagtcctttatttaaaatacagctctaggaccatctaacttccaagctctaaaatccatgctttgacaagccaaagaaccagacacggtgaagaagggtgagaagacagggacataaaggaaagtcctggagattggggtgagacagtgcacaaggagcagaaattagagaagaggatgtggaagagacatgtggaaagggccaggaagaaagggagaagaaaatgcagggactgccagggctacagttcaagtggataattccagtcctggtagcaattagagctgacccatttggcagtgcctgcccctctgcaggggtttgttgccaccctctttcctgccaagactgtttacacaaccttttttagccctggctagagtagcctggttctatccagcatggagaatttggtttccacctctactacactaccaagtggaaagaagaggtgtactgtaatctaggtgggggaagctgtgtagcagaaacttggggacttctagaagctgcctgtccctcatgcccccctggagtacaatggagccaaaggtactccattctcagcatcttactctatctttgacatcttcttttgactcagtagatcctttcaaatccccatctctgaga

SEQ ID NO: 71800 - DNA, 798 bp, Homo sapiens
aggttagaagaagaagctgtaggtgttctggcatgcatatactgcttaaatcctcataatagttcacacacacacacacacacacacacacacacacacacacayatatatatatatatatatagagagagagagagagagagagagatgaaaaagctgaggctcgagtcctttatttaaaatacagctctaggaccatctaacttccaagctctaaaatccatgctttgacaagccaaagaaccagacacggtgaagaagggtgagaagacagggacataaaggaaagtcctggagattggggtgagacagtgcacaaggagcagaaattagagaagaggatgtggaagagacatgtggaaagggccaggaagaaagggagaagaaaatgcagggactgccagggctacagttcaagtggataattccagtcctggtagcaattagagctgacccatttggcagtgcctgcccctctgcaggggtttgttgccaccctctttcctgccaagactgtttacacaaccttttttagccctggctagagtagcctggttctatccagcatggagaatttggtttccacctctactacactaccaagtggaaagaagaggtgtactgtaatctaggtgggggaagctgtgtagcagaaacttggggacttctagaagctgcctgtccctcatgcccccctggagtacaatggagccaaaggtactccattctcagcatcttactctatctttgacatcttcttttgactcagtagatcctttcaaatccccatctctgaga

SEQ ID NO: 71801 - DNA, 646 bp, Homo sapiens
tgtatcttggttgcttgtatcttggttgcttggttgctctcatctttctgccacactcactgtcaggagagttgggctgcagtawatgttgcttccttgctgtttctttactccctttgtgctcctttattactgagcaggctcagttctctagctttggagttataaactgggttcacaatacagactaaatacatgctgttcctcaatcctttatgtgaatgctaggtgtttaagtgcataaaatgttacctttttcttataagtgtgcccatctcagtaattcatttagcagggaggtctctccctaacattgctggagcatctgctaacattgtagttcattttctagagacaacaccttaatggcagaagttgcataggctaaatgacttttgtttgtgacactttacaattgtaactagaaagaaattcaacacagcactgggtaaaaaaaatgcagagaatgatctcttgctttcttcttaagctcaccatctttctccatcaaactcagcagcagcagcgggaaggttacagttacttttgagaacactgcggctgatgcttcttgtacaaatattcgctttcttcatgacagaactccttttccaaatttacattcaggccaagataagtcatccag

SEQ ID NO: 71802 - DNA, 674 bp, Homo sapiens
gctgatgcctggtctgttggttcgctttgggatcaccttgatttgccttcctctaaatagggactcatccaaggccaaggaagtcctcactgactctttgagaactctatatatgcaaaccctttgggatggccactaaatttgtcacagagtatggtaacgtggttgactgaaccacagccatgaaagtgagcttccagctcttctgctgttgcaccgcagtccacattgccagcattgatggaacgggcatcagcctccatcttctcctcaatggacgtgatcactgggccagcattgcctggaggtagactcatattcctctgcttctctacgtcgttctgtagctcctttagcttctcagcttcttcctccacctccctgactscagcttcgatagcttccagccccgggtcaccctcgaccagtcccggctcctccccctcctcttggctgccggtggctcctgaacgaggcccaggtcctggagctcccaggcatggggcgcggggctggagcggctcctcttcgggctccggctccaacagcagctcctcaggctccagttcctcagactccaggccgttcccatcgtcccctgcgccccccggggcaacctccccggcctccccaccggccccgggcacaagatggcgccgccccggcctggatcc

SEQ ID NO: 71803 - DNA, 555 bp, Homo sapiens
ttcaggcccaggatcaagtttgtccctcacttactgtatgtgcaaattggggtcatgtacrtgaacactgtgggcctgctgtacttatttgagaacttatttgagaaataatgttaatttttctccagattttttgtttgtttgttttttgagatggagtttcgctcttgttgcccacgctggactgcagtggtgcaacctcagctcactccagcctctgcccgcaggttcaagctattctcctgcctgaggctcccaagtagctgggattacaggcatgcaccaacacacccagctaattttgtatttgaagtagagacggggtttttccatgtcagtcagactgctctcaaactcccaacttcaggtgatccacccactgcggtcttccaaagtgttgggattacaagcatgagccaccgttcccagctgcctccaggtttttaaacaagttagtgctattagatggcttcacacattgcagcttttatatgacaggctgtaaactgcctttgtgtaataagagttgtcagccttcagcgatgttgatgatga

SEQ ID NO: 71804 - DNA, 555 bp, Homo sapiens
ttcaggcccaggatcaagtttgtccctcacttactgtatgtgcaaattggggtcatgtacgtgaacactgtgggcctgctgtacttatttgagaacttatttgagaaataatgttaatttttctccagattttttgtttgtttgttttttgagatggagtttcgctcttgttgcccacgctggactgcagtggtgcaacctcagctcactscagcctctgcccgcaggttcaagctattctcctgcctgaggctcccaagtagctgggattacaggcatgcaccaacacacccagctaattttgtatttgaagtagagacggggtttttccatgtcagtcagactgctctcaaactcccaacttcaggtgatccacccactgcggtcttccaaagtgttgggattacaagcatgagccaccgttcccagctgcctccaggtttttaaacaagttagtgctattagatggcttcacacattgcagcttttatatgacaggctgtaaactgcctttgtgtaataagagttgtcagccttcagcgatgttgatgatga

SEQ ID NO: 71805 - DNA, 640 bp, Homo sapiens
ccgctgcttcctgagtagctgggacctcaggcttccgcctcgtgcccgcatccctgctgtgtttaggcagcaggtggtgacctcactcctccctggcctgagctctccgtcccgcatcccaggcggaggccctagggaacactttgaagctgagcacrgggtggaccctccctcctgagtgaatggagaatagaaagggagaggatttctgttctgttctgtgggccatcagcatgaaatcgtatgttccgccctggcagggctttgccatttcacattctagtttgcattcccgttccagataattccagggcttttgaatcatgcctcagccttcctggccgctgtcgcctccaaaaactcgaaaaacagaggcgctgagtgcgaggctgagaagcacaggtcccgccccgggccctccctctgccggttctaaagggcaaggtctctccgcctggggccccgcctctaccccgcccaggtccagccaacctgccccggcctggcttcagtcctgggcgcgcacaaacccggaagcggatcgcgtggagtgaaggtcctaccacggcgcgtgagttttgctctgccttggattaagtctgcacttcccaggtccccggcgcttctgcccctgggacgt

SEQ ID NO: 71806 - DNA, 640 bp, Homo sapiens
ccgctgcttcctgagtagctgggacctcaggcttccgcctcgtgcccgcatccctgctgtgtttaggcagcaggtggtgacctcactcctccctggcctgagctctccgtcccgcatcccaggcggaggccctagggaacactttgaagctgagcacggggtggaccctccctcctgagtgaatggagaatagaaagggagaggatttctgttctgttctgtgggccatcagcatgaaatcgtatgttccgccctggcagggctttgccatttcacattctagtttgcattcccgttccagataattccagggcttttgaatcatgcctcagccttcctggccgctgtcgcctccaaaaactcgaaaaacagaggcgctgagtgcgaggctgagaagcacaggtcccgccccgggccctccctctgccggttctaaagggcaaggtctcyccgcctggggccccgcctctaccccgcccaggtccagccaacctgccccggcctggcttcagtcctgggcgcgcacaaacccggaagcggatcgcgtggagtgaaggtcctaccacggcgcgtgagttttgctctgccttggattaagtctgcacttcccaggtccccggcgcttctgcccctgggacgt

SEQ ID NO: 71807 - DNA, 640 bp, Homo sapiens
ccgctgcttcctgagtagctgggacctcaggcttccgcctcgtgcccgcatccctgctgtgtttaggcagcaggtggtgacctcactcctccctggcctgagctctccgtcccgcatcccaggcggaggccctagggaacactttgaagctgagcacggggtggaccctccctcctgagtgaatggagaatagaaagggagaggatttctgttctgttctgtgggccatcagcatgaaatcgtatgttccgccctggcagggctttgccatttcacattctagtttgcattcccgttccagataattccagggcttttgaatcatgcctcagccttcctggccgctgtcgcctccaaaaactcgaaaaacagaggcgctgagtgcgaggctgagaagcacaggtcccgccccgggccctccctctgccggttctaaagggcaaggtctctccgcctkgggccccgcctctaccccgcccaggtccagccaacctgccccggcctggcttcagtcctgggcgcgcacaaacccggaagcggatcgcgtggagtgaaggtcctaccacggcgcgtgagttttgctctgccttggattaagtctgcacttcccaggtccccggcgcttctgcccctgggacgt

SEQ ID NO: 71808 - DNA, 640 bp, Homo sapiens
ccgctgcttcctgagtagctgggacctcaggcttccgcctcgtgcccgcatccctgctgtgtttaggcagcaggtggtgacctcactcctccctggcctgagctctccgtcccgcatcccaggcggaggccctagggaacactttgaagctgagcacggggtggaccctccctcctgagtgaatggagaatagaaagggagaggatttctgttctgttctgtgggccatcagcatgaaatcgtatgttccgccctggcagggctttgccatttcacattctagtttgcattcccgttccagataattccagggcttttgaatcatgcctcagccttcctggccgctgtcgcctccaaaaactcgaaaaacagaggcgctgagtgcgaggctgagaagcacaggtcccgccccgggccctccctctgccggttctaaagggcaaggtctctccgcctggsgccccgcctctaccccgcccaggtccagccaacctgccccggcctggcttcagtcctgggcgcgcacaaacccggaagcggatcgcgtggagtgaaggtcctaccacggcgcgtgagttttgctctgccttggattaagtctgcacttcccaggtccccggcgcttctgcccctgggacgt

SEQ ID NO: 71809 - DNA, 640 bp, Homo sapiens
ccgctgcttcctgagtagctgggacctcaggcttccgcctcgtgcccgcatccctgctgtgtttaggcagcaggtggtgacctcactcctccctggcctgagctctccgtcccgcatcccaggcggaggccctagggaacactttgaagctgagcacggggtggaccctccctcctgagtgaatggagaatagaaagggagaggatttctgttctgttctgtgggccatcagcatgaaatcgtatgttccgccctggcagggctttgccatttcacattctagtttgcattcccgttccagataattccagggcttttgaatcatgcctcagccttcctggccgctgtcgcctccaaaaactcgaaaaacagaggcgctgagtgcgaggctgagaagcacaggtcccgccccgggccctccctctgccggttctaaagggcaaggtctctccgcctggggccccgccyctaccccgcccaggtccagccaacctgccccggcctggcttcagtcctgggcgcgcacaaacccggaagcggatcgcgtggagtgaaggtcctaccacggcgcgtgagttttgctctgccttggattaagtctgcacttcccaggtccccggcgcttctgcccctgggacgt

SEQ ID NO: 71810 - DNA, 640 bp, Homo sapiens
ccgctgcttcctgagtagctgggacctcaggcttccgcctcgtgcccgcatccctgctgtgtttaggcagcaggtggtgacctcactcctccctggcctgagctctccgtcccgcatcccaggcggaggccctagggaacactttgaagctgagcacggggtggaccctccctcctgagtgaatggagaatagaaagggagaggatttctgttctgttctgtgggccatcagcatgaaatcgtatgttccgccctggcagggctttgccatttcacattctagtttgcattcccgttccagataattccagggcttttgaatcatgcctcagccttcctggccgctgtcgcctccaaaaactcgaaaaacagaggcgctgagtgcgaggctgagaagcacaggtcccgccccgggccctccctctgccggttctaaagggcaaggtctctccgcctggggccccgcctctaccccgcccaggtccagccaacctgccccggcctggcttcagtcctgggcgcgcacaaacccggaagcggatcgcgtggagtgaaggtcctaccacggcgcgtgagtttygctctgccttggattaagtctgcacttcccaggtccccggcgcttctgcccctgggacgt

SEQ ID NO: 71811 - DNA, 648 bp, Homo sapiens
gtctaacctgggattcagtgaaccggagtgctatatgttaataattattattgctttaggggtaatgggcaagaagctggtcattatgtcttatagcccccaaattccaggtgactgtgtactttcctttagatatgacaatattcacatgggctgctgtggttctcccagacagtttttgttcagtatctttagggaagagccctcatgtctcccctctgagataaatgcctattttctggctgtcgggatgaatagagtggggaagccagctactctgttctcagaccttccactagtcccacatgttttactccttccatggggccttgagtctgaagccttgccagtgtcccctgggaaaagtcgtgggcttctttggtggctgcacatatagcctggattctaggctgcagcttcctcccacacagtctctgtagccaacatcacctctatctttctgccttccagaaacattgaaattgcttttccattaatagtctctctcttcttctatctgttgttatggacaaatgcatttttttattcctgtcctactgattgaatggagacttgggaggaagaaaagataaatacagaagtccagtcggccatctttaatgagcactgtcggagatgtatttwaaa

SEQ ID NO: 71812 - DNA, 577 bp, Homo sapiens
tttttagtagcgataagtttctgcatgttggtcaggctggtctcaaactcctgacctcagatgatctgcccgcctcagcctcccaaagtgctgggattacaggcgtgagccactgcacccagccgctttaaaatttttataactctttgggccacagagtgaaaaacttttagttggaaggtagtgacacattctattaaaactctagytactttttggttaatcccataaaccgattagtgttaataaatttgttagctactaaatgcattacctttccgaggtaacataatgctttatgctaaaatgtaaattcccatgatacccttaacaagtagcatggggtttggcggctccttccaaaatagccagaaagatgcttttagtctggcaagctttcaaataaaattcacatacacaaacatttgttcatttttaccgtcactaatgttactcagttcaagtatctgaaaaagggcatgggttaaaagaaatggatactaactgacacacaagaaattgctgggaacttaaatcacaattaagtaaagtggttgctatcaccaattaataggag

SEQ ID NO: 71813 - DNA, 602 bp, Homo sapiens
aaaaaaaaaaaaatagatgccagactcttagttaattctctcctggatcaggaagaagacctggaagatgaaggggattctctacagaatgtagattttccccacaagagacagctttgcagggccatttcaaaatgtgtcaaataaataaatttggggttaaaatattttgatttctttcaggtcctgctagctgtcgtgctggtatcttactgctacagagtctgatgtgtcagtcttaagatctctgttttaatgttaatgctggtcagctgagcctgaatccccaagggaggagggtataatgaggcatgcctgactcccgcttcccatcgcggcctgaattaggttttcaggtttctttggygtgcccttggctgagagggtgtccattagtcagttggaggtcttagaattttatttttggttttcaaagtccagggcttgactctgacacaaaggtgtggagaaagctgtggaaaagggggtaggaggtggacgctggttgctccagtgttctttctaaagaattgatcacatcttataccagtgaagagaactactggggctaagggaggtctaagcttttggcaaaagggaaa

SEQ ID NO: 71814 - DNA, 611 bp, Homo sapiens
aaaattgaatgagkcaatggagggcatgggagctgctccatggacccccttaaactcaatgcttggacagggaaaggacagggattggggagatggactaaaggaagagaatgtgaatatgatcgttggtagatttataatgttgattttataactggtattttcaatgagtgagaacaaaaaagctaacataacagagagcagaatgataagaatttacctgtgtgcaaaactgttcttcactgattttgtaacgtaaaaactttggaaataacagcattcacagtagaagatgtgttctagaaatgttggtacattcagaccatgagacaccttgcagccattagagagaataaggcggattataggaactgacatggaaggtgtcactgatactgcaaaacagcatgtttcatggtgcactcattaagaggagttgggtcagcttgcttagatgtacttttctgcccctcatgtactacttagccttggaaatattccttatcctctctaatcctcagtattctcacctgtaaaatggggagaatggtagtccctacttcaaagagttgtgaggattctagatatgcgtggcacagttgtaagcatgc

SEQ ID NO: 71815 - DNA, 472 bp, Homo sapiens
agatactcatgctttgacctctggcttccaacagtggcatagtggctggcctttgctttactgacttgggtagatagataattctcagataagtactaatgcctctgaaaatatcttctttctttcacactcagttattccaagaaggcaaagagggaggcagttagttgttatgaattcagggcmattataaccctgatttacttaagagtacatggaatgaaacaaataaagcattaaccaacattttctttgaaatgaggttgggtaagattagcttagaggagggcatcattacggggagaagagccattcatcactgtctgcaataatccatgttgaatatcttaatgtttaattatttttaatcttttggaaataaagaactgccctagggtgttttccttactctttccctcctacagagcagcctgctttgggagctgaagattttctatgtattctttgaaat

SEQ ID NO: 71816 - DNA, 1045 bp, Homo sapiens
gttttatctccgatacttggaaagggctctagtcaaaagttttgcagtttagtcaattttcttcacatttttaagtgaaacctttaaaaaataacaacagaaattgttctcagcctgttatgaattgaagtttcaaaagtttgaaggaatggctgaaccacacccctggtctcttacagaaattatctggccatcgattctactcaatctattctgtcatctgaccctgagctttcatcctctcatatttctataaatcagaagcaagttgaagttccaaagaggactgtagtagatctgagccaatcagcttacatttaaaacatggcctgggagaccacaaaatattcctttgattatwtatatggttcttaactctgacctaaaaaaagactcagtctttaaaataagtcactgctacagcaaggaaggactctcctgtgggcagagtccatttagtcaatcaacaaacaaatattgggcacctaatgcctataaagactgtgccagaatttgggaccacaatgggacattaaaaagcccaatttgggtacttatagatcttgaagtccagtgaagtagacaagcattaataaaaacttatgcaaattaattatttacatatcattatggaaactgccataaaggaaaagttcaaggaattctgtaactgggtatcacaaccaaacctgggagtcagcaaaggctttcttgaggatgaaacatttaaactgtcttgaggctgaagaggcattaactagatgaagaaggggagacaagtatgtcaaagagaagtataaatacagagccctaagagttctgttagctcagatcaatcatatgaattatgagtaggcatgttcaaatctgcatgatccttgagtactcttgcttgtgagtctgcagcctgttcccccaccccaatcccaccaagccctgggagtcttcttctaccaccaaagctactcagacccctcctgcccccaaaacatttatcatattcttcacttagtgctaggcacttactgtcttgaactacttttaa

SEQ ID NO: 71817 - DNA, 1045 bp, Homo sapiens
gttttatctccgatacttggaaagggctctagtcaaaagttttgcagtttagtcaattttcttcacatttttaagtgaaacctttaaaaaataacaacagaaattgttctcagcctgttatgaattgaagtttcaaaagtttgaaggaatggctgaaccacacccctggtctcttacagaaattatctggccatcgattctactcaatctattctgtcatctgaccctgagctttcatcctctcatatttctataaatcagaagcaagttgaagttccaaagaggactgtagtagatctgagccaatcagcttacatttaaaacatggcctgggagaccacaaaatattcctttgattatatatatggttcttaactctgacctaaaaaaagactcagtctttaaaataagtcactgctacagcaaggaaggactctcctgtgggcagagtccatttagtcaatcaacaaacaaatattgggcacctaatgcctataaagactgtgccagaatttgggaccacaatgggacattaaaaagcccaatttgggtacttatagatcttgaagtccagtgaagtagacaagcattaataaaaacttatgcaaattaattatttacatatcattatggaaactgccataaaggaaaagttcaaggaattctgtaactgggtatcacaaccaaacctgggagtcagcaaaggctttcttgaggatgaaacatttaaactstcttgaggctgaagaggcattaactagatgaagaaggggagacaagtatgtcaaagagaagtataaatacagagccctaagagttctgttagctcagatcaatcatatgaattatgagtaggcatgttcaaatctgcatgatccttgagtactcttgcttgtgagtctgcagcctgttcccccaccccaatcccaccaagccctgggagtcttcttctaccaccaaagctactcagacccctcctgcccccaaaacatttatcatattcttcacttagtgctaggcacttactgtcttgaactacttttaa

SEQ ID NO: 71818 - DNA, 756 bp, Homo sapiens
acataggccatgagggtggagccctcatctatgggattggtgctcttataaaagagacttcagagagctttcttcttctctttctgccatgtaaggatacaatgagaaacaggtgatctgcaacccagaagagagcctttatcagaacccagtcatgatggtactctgatctcggacttccatcctccagagctgtgacattctccagaacagaaaataaatttgtgttatttataagtcactcagtctatggcactttgttgtagcatccttaagtgactaagacaattacccactttcctgttcttttccagggtttggaaaatgaatggaacaaaacttaccctcatgaataagaaaagtcacacttctcttcagttttgaaccccactttttcctctttatctctaaaacatttaagtctgtattagttttctattgctgtggcaacaaattactgtacacttagtgactttaaacaacacaaatttattttctgctctagaggccaaaagtcagaaatgagttttacaggactacaattaaggtgtaaagtcaagggctagtttcttctaaagcctccaagagagaatctgtgtctgrcttcttccagtttctggcaggtgccagtattctttggctcatggttgcatcattccagcctcttgcctccattgtcacatctcctacttcctcttctgtggtcagaatttccctctgccttccttttataaggacacgtacctgataatcagg

SEQ ID NO: 71819 - DNA, 686 bp, Homo sapiens
gcttagagccttccaaaaacctgatttttwaaaaaaatatatgttgatacacacacacacacacacacagaacatctgtaacaagcatatagacagagagagaaagagaaagaacttatttttccatcaatttttgccacatattttcatcaacttctgtgagaattctacttaaagatcaatagaggatatacccttagtaagcatgattaaataaaatagaaaatgctgtttctaagcccctgttttagctttggctttactttttttccccctccagatctaaactggctaagcaaagtaagtgtagaattatcgcaaactaagatattctttcctcatattatgtgtatttttttttttaggtaaaagacttctttagggggattttggtgtcagtatttttcgagtctgggaaaaattgttctcctactgcagatttataactctagtctgagacttctaaatgccttatgccaacattgtaaattttattgtgatgctgttaagttacagtttaaggtataatttttttaaaagcatttcatcttgtagtttgggataatagttataaagctggtctctatagaaaccattttaacttatgatcttagaacgccaggtaataatgcagaggattattggccaaaactttttttttaatgagaaatattttactgaattga

SEQ ID NO: 71820 - DNA, 686 bp, Homo sapiens
gcttagagccttccaaaaacctgatttttaaaaaaaatatatgttgatacacacacacacacacacacagaacatctgtaacaagcatatagacagagagagaaagagaaagaacttatttttccatcaatttttgccacatattttcatcaacttctgtgagaattctacttaaagatcaatagaggatatacccttagtaagcatgattaaataaaatagaaaatgctgtttctaagcccctgttttagctttggctttactttttttccccctccagatctaaactggctaagcaaagtaagtgtagaattatsgcaaactaagatattctttcctcatattatgtgtatttttttttttaggtaaaagacttctttagggggattttggtgtcagtatttttcgagtctgggaaaaattgttctcctactgcagatttataactctagtctgagacttctaaatgccttatgccaacattgtaaattttattgtgatgctgttaagttacagtttaaggtataatttttttaaaagcatttcatcttgtagtttgggataatagttataaagctggtctctatagaaaccattttaacttatgatcttagaacgccaggtaataatgcagaggattattggccaaaactttttttttaatgagaaatattttactgaattga

SEQ ID NO: 71821 - DNA, 779 bp, Homo sapiens
caaaaagaagtattatgtttgaaacgtgaataggactttattatttcatataaactgcatttttatttaaatgaaatatacaataatattgtttttgtctttttttttcttttctttccttttttttttttcgttgtgtttttgaggcagggtctcactctgtcactcaggctggaatgcagtggtgctatcctggctcactgcaacctctgaccactgggctcaagccatcctgccacctcagccttccaagtagctgggaacataagcacacaccacsattcctggctaagtttttttgtatttttattagagacggagtctcaccatgttgcccaggctagtctcagactcctgagctcaagcaatctgcctacatcagcctcccaaagtgctgggattataggcgtgagcaactgcaccgggctccaataatattgcatgtattaattttagtacattctctatagatgcttttcctctcagtttttgtattcaaatgtgtgtgataaatataataattcatgatacctaaattgaattattggattaaattcaattgcaaatataactacacttaatacacatgtaattccatatcaatatctaagagctgacttatgtattataaaaattcttaagtttccttccatagcaaaacatacaaagaaaaagagaatcagtactgaagcaatttttcttggtgaattctaagaaaatttcaaaaagatactgctttacagataatatggtgctcagaacgggatttagcatggaat

SEQ ID NO: 71822 - DNA, 779 bp, Homo sapiens
caaaaagaagtattatgtttgaaacgtgaataggactttattatttcatataaactgcatttttatttaaatgaaatatacaataatattgtttttgtctttttttttcttttctttccttttttttttttcgttgtgtttttgaggcagggtctcactctgtcactcaggctggaatgcagtggtgctatcctggctcactgcaacctctgaccactgggctcaagccatcctgccacctcagccttccaagtagctgggaacataagcacacaccaccattcctggctaagtttttttgtatttttattagagacggagtctcaccatgttgcccaggctagtctcagactcctgagctcaagcaatctgcctacatcagcctcccaaagtgctgggattataggcgtgagcaactgcaccgggctccaataatattgcatgtattaattttagtacattctctatagatgcttttcctctcagtttttgtattcaaatgtgtgtgataaatataataattcatgatacctaaattgaattattggattaaattcaattgcaaatataactacacttaatacacatgtaattccatatcaatatctaagagctgacttatgtattataaaaattcttaartttccttccatagcaaaacatacaaagaaaaagagaatcagtactgaagcaatttttcttggtgaattctaagaaaatttcaaaaagatactgctttacagataatatggtgctcagaacgggatttagcatggaat

SEQ ID NO: 71823 - DNA, 662 bp, Homo sapiens
tacacacacacacacatatatatatataaaaattagaggatgggtggtaatttgagcggacacttagaaagccacatttaaaaaattaaccaccaaaaatacaaaaatttttaaaaaaactactgtatttggtcaaatcattatcaattctataatgattcttgactatcataaatcccatgccatggtacaactcagtagttacacagagattatttaacatttcyaatccagtgttttaattgcaatattagaacactcagtcttggtatgagcaattttctcacaactaatgtgaaacacttctattgttatatgtaaattatgggggaattttgcttgatgttttcaggggacatacaagatatcttaaaaatgaaaaggttttggttttctagaaaaccttcaagcatctggaacttgagcttcctactgcagtattgaaatagtttcaaggggtgtgcaagtgaacccagcttgtgcaataaaacttgtctctcctcccaatttctgtctttagttcttccctggctgaaattagagactgacaataaagacagttatgtaagttcttgaccgttccagccatgcccacttgcaataataacttatatttacattaacatgtattcaaactgtacccattgcttgagatttgcttg

SEQ ID NO: 71824 - DNA, 1335 bp, Homo sapiens
agagtgagaccctgtgtctaataaataaatatataaatacctaaatatagttaaaaagtaaataattgaatgcaattaccagagtaattaacctcttaaaaactgagataggagaaagaaggagagaaacttaccaggaaaaaatctattcctgttcctccacctgtaaatacactctaagaaaatgaattgactttagagttattttaattttaacttaattttattgtgtctacttgtgtttgcaaacatttttgagaatctttccataactattgctttcattcaaattcactcatttcacatcagtaaaattagtgtgaaaactggaagtataggttctgattgaatcagcatatagcaagatagcactaattgatttgacttgtgattcaagtcagaacattttttttggtaacgttgtattattatgcatgtagacatagccttagtattaactgacattatctgtcaaggtccaccacacttacacaatacagtctgatcataaaagagcaagtgagtttttgatagatgaaacacctaaatatattcatgtattttaaaaccaaactctctagataggtcattaaaaacatacttcaaaatggaaactgacaagccaacggaggtaagtgtggctccattgttacagctccctatagctcccataccattaaaaatgggattttaatctgctaacaaaagtgacgttttgattttactgtctcttctcacatccttctcacactgacaatttgtagtcaaaaaaagaacaaatcatgcagataatttgaatattggcttttgtcttcccttctgtctaccttttctaaatagatgaactgacaactgatgcctcggtttctctaatctcaacaaatctttttgtgtgtgtgtgttaaataatatcacttgacacttttcacaagctcatttacgttagcatgtttctctacatggattttacataagatgaataagttatttagtatgaaatttaaacatataattaaatgaaatgaagtattagcttccactaatctttaataacttctgatcaaataaatatgcgttgttgtaacataatcatttaaataatatttttaaactgtccttctgattaacatttctttctatgatttttacctattagcataacagttttaatacaatcctatgcaatgtcttccactggtatataaaattctaaataagaatgtgtgcacatatgtgtgagaacatatacaatatttataaaatatttctgttttttkatttttatttttgaattatactttaagttctagggtacatgtgcaccatgtgcaggtt

SEQ ID NO: 71825 - DNA, 740 bp, Homo sapiens
tattttaagtgcaagccaaaaaacaaaaaaggctactaacaagtaaccagaacatttagtatcttggaatccaacattctgagctatagtgtcaaataacaaagaaaaagtcaagtgagaagagatgaagatagggtaataggagtatcattagtgatcttaacagagatagtttagtggaatagatctgaagttggattctactggattgagtactgaaaggaagaaaggaaatgtggttatcctgaggttggtctattatttcaagactcttgactgtaattgggcagagagggaaacaagagtaactacggagagtggacatttcgttgtgcaggttttatatattattaatggtagagacttaggtaagtttacttactaagagcaaagtagcaagtaggagcttatagacagagagagagtgagagggagaataatcaatgaaacaagtacctcagagaataagaarcatggtggccatagcaaaacatggcagaatgagtcttagacaggtatatgtatgtaacttggtaagtgttagtacaggaaatagggagatctcagctgaaactctggaatcagtgaggaacagaacaaattaagggaagggaaataaaattgaatgagttctttaccccaagtggtttctccaagcatgatcagaatccagggtaaatagaaaaatgaaataaacatatgaacttatgaaatgagacactaaacagaaacgtatttcc

SEQ ID NO: 71826 - DNA, 593 bp, Homo sapiens
tttaattaaaataagcatgtttcctttaataagtagctttttaaaaatgaatgaatgataaatgaactgaaattcgtctgaaaaacccatatgattattttttaatttatttaaaaatagaatcaatgcttacattttaatacatttggattcacataacttgaaaaattttagagattaccgaatatagattggaatcattaacaatattttaaaagaataaaggcatgtataatttttatggttcattaatgtttaatgctaaaagcaagatatacagttgaatatacactatgactctaattctataaggaagtatgtagtccataatagtcacatactatattgcatacatgtgctcacatacatgcagtgggaaaatgttatcaatagttatctttgaatggttctttaagttgttctatatctcccaaagtatgtatatgtatgcatgtacttcatatgtgtgtatgtatatatatacatacacatatgtatgtatacgtgtatctrtacatacacatatgtatgtatacgtgtatctatacatacacatatgtatgtatacgtgtatctgtacatacacgtgtatg

SEQ ID NO: 71827 - DNA, 593 bp, Homo sapiens
tttaattaaaataagcatgtttcctttaataagtagctttttaaaaatgaatgaatgataaatgaactgaaattcgtctgaaaaacccatatgattattttttaatttatttaaaaatagaatcaatgcttacattttaatacatttggattcacataacttgaaaaattttagagattaccgaatatagattggaatcattaacaatattttaaaagaataaaggcatgtataatttttatggttcattaatgtttaatgctaaaagcaagatatacagttgaatatacactatgactctaattctataaggaagtatgtagtccataatagtcacatactatattgcatacatgtgctcacatacatgcagtgggaaaatgttatcaatagttatctttgaatggttctttaagttgttctatatctcccaaagtatgtatatgtatgcatgtacttcatatgtgtgtatgtatatatatacatacacatatgtatgtatacgtgtatctatacatacacatrtgtatgtatacgtgtatctatacatacacatatgtatgtatacgtgtatctgtacatacacgtgtatg

SEQ ID NO: 71828 - DNA, 593 bp, Homo sapiens
tttaattaaaataagcatgtttcctttaataagtagctttttaaaaatgaatgaatgataaatgaactgaaattcgtctgaaaaacccatatgattattttttaatttatttaaaaatagaatcaatgcttacattttaatacatttggattcacataacttgaaaaattttagagattaccgaatatagattggaatcattaacaatattttaaaagaataaaggcatgtataatttttatggttcattaatgtttaatgctaaaagcaagatatacagttgaatatacactatgactctaattctataaggaagtatgtagtccataatagtcacatactatattgcatacatgtgctcacatacatgcagtgggaaaatgttatcaatagttatctttgaatggttctttaagttgttctatatctcccaaagtatgtatatgtatgcatgtacttcatatgtgtgtatgtatatatatacatacacatatgtatgtatacgtgtatctatacatacacatatgtatgtatacgtgtatctatacatacacatrtgtatgtatacgtgtatctgtacatacacgtgtatg

SEQ ID NO: 71829 - DNA, 1023 bp, Homo sapiens
aaagtgaacaagatcctacaagtgtttacttgacttttctgggttcttttcacctacttactgattttgaatagtataaattcctggataattaatctggataagtaagtygtcactgtacctctagagaaaataaaatcaaccaaaatatgtttaattctgtgctctgggtttcaagaaaacaaaaatgaataagatatagtcctacccccaaggacttgacacaatataattgtacatgtgcaaaagaaactgtctaggtgtggtggctcacacctctaatcgcagcactttgggaggctgaggcaggaggatcacttgagcctaggaatttcagaccagcctgggcaacatgatgaaaccttttctctacaaaaaaaaaatacaaaaattagccaggcatggtggcacatgcctgtagtcctagctactgggggagttgagataggagggttgcttgagcccaagaggtctaggctgcaatgagctatgatcacagcactccagcctgggcaaaaaatcttaagtagtctcaggactgtaccacagagtatcgtaagaattcagaggaggcaaagaccaaattagaataataagcaatgaaggcttccagcaaacatggtatttttgttgggccttgaacactctttagatgctttagtttaatgtgccatagtcacactttctgtattgggagtgttaatgggtgataactactccagagctttaggattgcttccagtatcccagcaaagcagcccttttcaactagaaccgtttgctattacaaaagagaggtgatcacttgtgatttcttaacatttcttcactttgcctctggcactgggcttctgaaagtccaggaaagagcaatgacctcagggttttaagaccaggggtataatcccagctctgcctagctctctgtgtaatttttggtcagtaatttaacctgggttgtgttctgtaaaatgatgatattggattaaatagtacctaatcatctaactttttcctaatatt

SEQ ID NO: 71830 - DNA, 1023 bp, Homo sapiens
aaagtgaacaagatcctacaagtgtttacttgacttttctgggttcttttcacctacttactgattttgaatagtataaattcctggataattaatctggataagtaagtcgtcactgtacctctagagaaaataaaatcaaccaaaatatgtttaattctgtgctctgggtttcaagaaaacaaaaatgaataagatatagtcctacccccaaggacttgacacaatataattgtacatgtgcaaaagaaactgtctaggtgtggtggctcacacctctaatcgcagcactttgggaggctgaggcaggaggatcacttgagcctaggaatttcagaccagcctgggcaacatgatgaaaccttttctctacaaaaaaaaaatacaaaaattagccaggcatggtggcacatgcctgtagtcctagctactgggggagttgagataggagggttgcttgagcccaagaggtctaggctgcaatgagctatgatcacagcactccagcctgggcaaaaaatcttaagtagtctcaggactgtaccacagagtatcrtaagaattcagaggaggcaaagaccaaattagaataataagcaatgaaggcttccagcaaacatggtatttttgttgggccttgaacactctttagatgctttagtttaatgtgccatagtcacactttctgtattgggagtgttaatgggtgataactactccagagctttaggattgcttccagtatcccagcaaagcagcccttttcaactagaaccgtttgctattacaaaagagaggtgatcacttgtgatttcttaacatttcttcactttgcctctggcactgggcttctgaaagtccaggaaagagcaatgacctcagggttttaagaccaggggtataatcccagctctgcctagctctctgtgtaatttttggtcagtaatttaacctgggttgtgttctgtaaaatgatgatattggattaaatagtacctaatcatctaactttttcctaatatt

SEQ ID NO: 71831 - DNA, 1023 bp, Homo sapiens
aaagtgaacaagatcctacaagtgtttacttgacttttctgggttcttttcacctacttactgattttgaatagtataaattcctggataattaatctggataagtaagtcgtcactgtacctctagagaaaataaaatcaaccaaaatatgtttaattctgtgctctgggtttcaagaaaacaaaaatgaataagatatagtcctacccccaaggacttgacacaatataattgtacatgtgcaaaagaaactgtctaggtgtggtggctcacacctctaatcgcagcactttgggaggctgaggcaggaggatcacttgagcctaggaatttcagaccagcctgggcaacatgatgaaaccttttctctacaaaaaaaaaatacaaaaattagccaggcatggtggcacatgcctgtagtcctagctactgggggagttgagataggagggttgcttgagcccaagaggtctaggctgcaatgagctatgatcacagcactccagcctgggcaaaaaatcttaagtagtctcaggactgtaccacagagtatcgwaagaattcagaggaggcaaagaccaaattagaataataagcaatgaaggcttccagcaaacatggtatttttgttgggccttgaacactctttagatgctttagtttaatgtgccatagtcacactttctgtattgggagtgttaatgggtgataactactccagagctttaggattgcttccagtatcccagcaaagcagcccttttcaactagaaccgtttgctattacaaaagagaggtgatcacttgtgatttcttaacatttcttcactttgcctctggcactgggcttctgaaagtccaggaaagagcaatgacctcagggttttaagaccaggggtataatcccagctctgcctagctctctgtgtaatttttggtcagtaatttaacctgggttgtgttctgtaaaatgatgatattggattaaatagtacctaatcatctaactttttcctaatatt

SEQ ID NO: 71832 - DNA, 1023 bp, Homo sapiens
aaagtgaacaagatcctacaagtgtttacttgacttttctgggttcttttcacctacttactgattttgaatagtataaattcctggataattaatctggataagtaagtcgtcactgtacctctagagaaaataaaatcaaccaaaatatgtttaattctgtgctctgggtttcaagaaaacaaaaatgaataagatatagtcctacccccaaggacttgacacaatataattgtacatgtgcaaaagaaactgtctaggtgtggtggctcacacctctaatcgcagcactttgggaggctgaggcaggaggatcacttgagcctaggaatttcagaccagcctgggcaacatgatgaaaccttttctctacaaaaaaaaaatacaaaaattagccaggcatggtggcacatgcctgtagtcctagctactgggggagttgagataggagggttgcttgagcccaagaggtctaggctgcaatgagctatgatcacagcactccagcctgggcaaaaaatcttaagtagtctcaggactgtaccacagagtatcgtargaattcagaggaggcaaagaccaaattagaataataagcaatgaaggcttccagcaaacatggtatttttgttgggccttgaacactctttagatgctttagtttaatgtgccatagtcacactttctgtattgggagtgttaatgggtgataactactccagagctttaggattgcttccagtatcccagcaaagcagcccttttcaactagaaccgtttgctattacaaaagagaggtgatcacttgtgatttcttaacatttcttcactttgcctctggcactgggcttctgaaagtccaggaaagagcaatgacctcagggttttaagaccaggggtataatcccagctctgcctagctctctgtgtaatttttggtcagtaatttaacctgggttgtgttctgtaaaatgatgatattggattaaatagtacctaatcatctaactttttcctaatatt

SEQ ID NO: 71833 - DNA, 1023 bp, Homo sapiens
aaagtgaacaagatcctacaagtgtttacttgacttttctgggttcttttcacctacttactgattttgaatagtataaattcctggataattaatctggataagtaagtcgtcactgtacctctagagaaaataaaatcaaccaaaatatgtttaattctgtgctctgggtttcaagaaaacaaaaatgaataagatatagtcctacccccaaggacttgacacaatataattgtacatgtgcaaaagaaactgtctaggtgtggtggctcacacctctaatcgcagcactttgggaggctgaggcaggaggatcacttgagcctaggaatttcagaccagcctgggcaacatgatgaaaccttttctctacaaaaaaaaaatacaaaaattagccaggcatggtggcacatgcctgtagtcctagctactgggggagttgagataggagggttgcttgagcccaagaggtctaggctgcaatgagctatgatcacagcactccagcctgggcaaaaaatcttaagtagtctcaggactgtaccacagagtatcgtaagarttcagaggaggcaaagaccaaattagaataataagcaatgaaggcttccagcaaacatggtatttttgttgggccttgaacactctttagatgctttagtttaatgtgccatagtcacactttctgtattgggagtgttaatgggtgataactactccagagctttaggattgcttccagtatcccagcaaagcagcccttttcaactagaaccgtttgctattacaaaagagaggtgatcacttgtgatttcttaacatttcttcactttgcctctggcactgggcttctgaaagtccaggaaagagcaatgacctcagggttttaagaccaggggtataatcccagctctgcctagctctctgtgtaatttttggtcagtaatttaacctgggttgtgttctgtaaaatgatgatattggattaaatagtacctaatcatctaactttttcctaatatt

SEQ ID NO: 71834 - DNA, 572 bp, Homo sapiens
atcaaacacaaaattttaatcccaaatcgataccaataaycttaggagcaatgaaagggagccagaggctgagtggaaccagtgagaatttacaaaatcccaggctgctttccccaactttcccccaccctgctaagaaattcatcatctcagcaaggcatatttgaagagattgatgccattggcacatatgtgaggctgtgcatgcaggttccacaaaaacatctcaaactaaggcagcaaagcagagcatagaccctaggatcacattcgtttagttcaaatctcagcttcgttacttaaaacaagttcttcaaattctcaaagttttgtttttctcattggtaaaatgagaacaatgaaacttacttccttaaggcttattgtaaggattcaatgagataattcatttaaagtacttatttagcaatgtctgatccacaagaagtgtttattaagtgttcacccttggtagaggcaatatatatataattattatatacctaatatatatatatatatatatatatatatcagacatctttgaatgtatctaaaagtgttttttaatc

SEQ ID NO: 71835 - DNA, 674 bp, Homo sapiens
aatggtatttcctaagttttcttccagagtttgtagttttagattttacatttaaggctttaatccatcttgaggtgatttttgtatgtggtgtaaggaacgggtgcagcttcaatcttctgcatatggctagccagtaatcccagcattatttattgaatagggagtcttttcctcattgattgattttgtcagctttgtcaaagagcagatggttgtgtgtgtgyggaattatttctgggctcctcattctgttccactggtctaggtgtctgttttggtaccagtaacataattgtgtagattatttcaggcttgactactgttagttttcctattagtctgtattttctgtattgtaactgtcattacaattgattgtaatgattgctttttaatttttactatgtattctttatttttaattatgaattgaataaaaattaaaataattcaccagaaacccatgatttatttaatatttaatacataaaggttttcgtttgttatatttccttcatctcttttgtttcattttatcgttttcttttccctagaattcatggcagctaaaattgttttgcttttaaaacaacgtatagctgaagcatttttctctcaacccattattttcccttcatcctttcacaaagataactactattcagatatta

SEQ ID NO: 71836 - DNA, 1381 bp, Homo sapiens
agctctccacagccttgacctcctgggttcaaggaatcattcccacctcaacctccagagtagctgggaccacaggcacatgctaccatgcccagattgccattttttaatgcaatatttataaaaagtgttttccaagtctataatctatgtgatataaatggcatttattcactttataatccacaaatatcattttttctcatttgagaaaatcgataattatgaacattgtggccaaataattggcaccatgctatttacatttgctgtctctaagttttattacctatttttatttattgatcctgattattttatttaatgattcttctatacttaatgagatgccttctagttctaatattctagatctggataaacaaatattaatcatattcacatcttttataattttataaactttgattcttccaaccctacrttcacccttacctctaagtttttgtctctttaaatcacatatcttaaaaagcccattcatctttgtatggttgttcttttctggatcagtttctatactgttatttctttcttaaggtatggcatacagaactgcattcagtacattaatttcaataaattatattttactcaaggataagaataaacttactagctaattttccttttaactacattctcaataataagccttattgttctgttggcctcatgtttttcagaaaatattcttaggaatgattctacaagatgaatgcattttcctcgcagtatagaaagtatgtatgtgggtattgtgtgtgtgtgtaatttttatttttcaaatgcattattatactagttcattcagatacttagcttctactcatatgccaatttatacgtaagactcagttgtagcctatactcctccaccagacatttcactttctttaaatatttagtgctatttgaaagtcatgaagtttccctgctgactttctttcatagtgaagttgttcaggtaggtcttggcaggccaccaagtaggttaaatcttatgtattagtcagggttctccagagaaacaaaaccaattgaatatatagaaatgaaacgagctgactttacttggttaagtgaatttggcttcaccaatgatgtatatcgactgttgcgcataactcctaacaattctgtcacgaggccacactgtacccagcttggtgcacgtgaaacttggataacactgcatgtagacaaccacggatagaagtctgactgttccacgtttgaggacccagtcagggcacaggagaatttctctcacctcaagaacatttgtcagccttttcttctatgtaggccttcaactgattggatgaggcccacccacactatggagggcaatctgctt

SEQ ID NO: 71837 - DNA, 724 bp, Homo sapiens
tttacatttttgcttactatttacagctagaacacaagttctggtatttatatataaaccatgycttcttatgtatactcattataagccatgtagttttgttcatctttgttagttatatatttattttattataataactaaaactatccaaatacaccatttaaatatatgacaatgataattgtaatgtctcataattgtatagttacgcttaattaatttcataaagttgacagttttaattaatgttttatatttctagtactcagtagctgagaagttattttctgtttcaataattcatatacaaaaatgatgtgggaagcagaaaaacacacagataaaatgttcagacaatactgaaatccataaatgattctttaaaattatattacaaatcacgctataaaaaggcaatgaataaagaacagttagattaataaattgcagggaaattattaacttgtcacaatttctgatttttattctgattacatctcagtaatgtttcttaagtcgtgagagttttttatcctatcctttagtataaagatgtatgaacagacattacttgtctctgacactcagtactaaccatcacactgatcattgatttttagtagtgccgatttagatttgcattcagccgtttcttacctgagcatctatctgtccagaggtcacacggtttgctgaacttagagctctaagctatgactac

SEQ ID NO: 71838 - DNA, 724 bp, Homo sapiens
tttacatttttgcttactatttacagctagaacacaagttctggtatttatatataaaccatgtcttcttatgtatactcattataagccatrtagttttgttcatctttgttagttatatatttattttattataataactaaaactatccaaatacaccatttaaatatatgacaatgataattgtaatgtctcataattgtatagttacgcttaattaatttcataaagttgacagttttaattaatgttttatatttctagtactcagtagctgagaagttattttctgtttcaataattcatatacaaaaatgatgtgggaagcagaaaaacacacagataaaatgttcagacaatactgaaatccataaatgattctttaaaattatattacaaatcacgctataaaaaggcaatgaataaagaacagttagattaataaattgcagggaaattattaacttgtcacaatttctgatttttattctgattacatctcagtaatgtttcttaagtcgtgagagttttttatcctatcctttagtataaagatgtatgaacagacattacttgtctctgacactcagtactaaccatcacactgatcattgatttttagtagtgccgatttagatttgcattcagccgtttcttacctgagcatctatctgtccagaggtcacacggtttgctgaacttagagctctaagctatgactac

SEQ ID NO: 71839 - DNA, 1131 bp, Homo sapiens
ttttatgttgaattttgtttacttctgggaatcaaaaaaaccaaaaaagtaaatgttttaaaaaaggtggaatactaggtctgatcattgttactttgctagtataatacagtagtgttataatttttgttcttccgttgtcattgtacttcaaagaaagaygattacttgtgtcccttgaagggtttttttgaactccttcttaaggaaaaaaataaaatcatatagaagcattttagtttttaggagtaattactattccatattcaaaatgtttgaagtccctaaaatggacccataatatgagtgaaatggaatcataacatgtgataaggcaaacataaacagctgtataaaacacatatcaaaaggaacaaagacattatgtcactgggtatggtagataagcaaattatttagttggccactgaactggattgacttgacatttttggcatgtacagcaaatgggaaatacgttggttacacaatcttcattgtctaacctgaaagcaattatatggttagcggagaaaaacttatatcaggatataaattcaaagataaatttttttgtgtggattcttgaaaaagggacttttaataataaagtagacagcatcttcaatgccagctttgtcttatagaaagattgttcaaatggaccctttttgaatcagtcctctttgaaggttgaggatatgatattaaaccataactcagtgaaggcaaccctaggggtgcttggataataaagtgtaagtattccacttgttgaagatatggcttaatacagggatagaactgggagaatccagaagaaggaagtgctttcaatatccctggacagtctctctcaaattccatatgctttaagcaggcctggattattgtcaacttcgggatactcttctgaactagaaacagatagatgggaatgaagcacaactgctctattatgaaagctcaacttgtattttcatcatccagaaagtattaccttttagcacagtcacgggcagctacaatacttggagagaggaccaatctgttctccatatcttcctattgcctagctattgtaaccatagagcatgctggttttgaattagccagagaaatgtttatgct

SEQ ID NO: 71840 - DNA, 737 bp, Homo sapiens
ttttgtctatcagataaatcataaaggcaaggtagaatcaatcatccctctccagaccctaagacatagatatgctcattaacattttaccctatatatgttaaccacatatttgttttatctcatatacatgactgagcaccagtcagaatggcaagaatgtcatctttgcttcactacctacttctcccattttctctataacagaacatgtaaacaccgtgtcttgcgtagcacactccagcacacattcttagtttgatctgtgtctgtttcctgggctattagtttgaacttggctctgaataaaactaattttaaatttcagttataatgcctgctatttaacctttcagttgacactacttttaattattctggggtgggggggaaacctgcaatagaaaataagacaccacaaggggctcatatacttgggtaagaaaaaaatattttattccttctagacttaggttttgaagcttaaccacacttggaatatacctagcatatcccaacatacatttaatgagtacttatatgtcactatgaaaatctcttaaatttttttctgtataaaaaatccttattacataagcaaatgctgccttactatcctgcactctgaaacatccactaggaaactggccaatcaaattggccgagaaagtactatgcaaaaaaatagctttatattawgacaaataatttagtaaccactgaataaacatgtatgc

SEQ ID NO: 71841 - DNA, 1039 bp, Homo sapiens
ctaacccctaaggtgatgttaggaggtgaagcctttgaggagttaagtcatgacagctctgccttcattaatggaattagtgcctttataaaaaagaccccagagagctacctagccccttccatcaagtaaaggcacagagagaaggcaccatctattaaccatgaaacttgctccactagacacagaacctgccagcaccttgatcttcgacctcccaaactccagaactgtgagaaataaatttccgttgtttgtaatccttgtttttaagagagacacacagtatttagagataaaattcgtgacatttacaatttactctcaaatcatttagcaaagctaacagtaatagtaatagggagaagaaggagaaggagactgttggagggggaggggaggtggagaaagagaaagcaaggattgtataacattaacattggtgaatctaggtaaagggcatatggaagttaattacattacacttgcaactttctgactttcgtaagtttgaagttttttcagaataaacattttacaaaacattacgaaaaaaagagaaacacagagaaagagagagcgtgcaccatgtataagacaaataactagctgattgtaagataggtttgttaactgaaagcaccatcccctccatgaggagaacactgaccttggtcacattttttttttcttttaagacagagtcgcactctgtcgcccaggctagagtgcagtggcgcgatcttggcccactgcaacctccggctcccaggttcaagtgattctcctgcctccgcctccckagtagctgggactatgggtcacatttcacttggaagtactccactaagttcccatattgttgcagtttccagggttgtaacccccaatcattgtgctttcactgccaagttacactgctgattttgtgtagccttaattctttctgaaagcattaaattatttttagtagaactcatgctacctaccagtcatgaaaaattgtttactgttaattgaaaatgtttgtaaaaagagc

SEQ ID NO: 71842 - DNA, 972 bp, Homo sapiens
cagtcagtgttggatagtgacacaagatgctttggaagcacagtgagagagactcacctgccaactgcagggatataatcaaggctgcttaccaccacttttgggtttcaataccaggcgagtgggacttcaaaaaataataattttaaaaaattactctaaggataaacttggaatcttgtaactggtcacatttttttttctttgttttgatcacatctagaaacaatatatgatctattctaaagtaactttagttccttatggaaatgatttcatatgttaacctcactcctaaattaatcttaattcttacaaatgttttcatttattcttattccactgtacaatgcacatttctgtaaaatatttcaaatttggaggtaatgaaaggtaaataagtaaatcatgtacttatatatcttagtaacttttcaattacttaaaacaagtaagtttttttaatgatcattaaagcataggtagtaactcttttatagtaaccctatgatccttgcttaaatgaataaagtagtatgtactggttcatgaaagtacaaatatcaataggacagaacaaatatccaagaaaccaacactagtatatataatgatttagtgtaagataaatgtaatatcacagcttaatagggaaaaggatgactcttcaataaatagtgcagggataattagatcactatttagtgggaaaaaagtaacctcaagcaaataaaacttctgatggcttaaagagtgaaatgtttaaaattcgcctcaaataaatgaagagaaatatatttartatttatcagatccttagatgtggagtgacttttaaggaattacccaatataataatcaaaatagaacaaaatatgtttattttttattttatatgttttctatatttatttttatttttattcctattgattcctagggctagcccagtcactgggctccttatcatta

SEQ ID NO: 71843 - DNA, 1432 bp, Homo sapiens
acactgagttcacattccccaccccaactcctgtgccacgcatgcacaacctttgctatctcacttctcatcaggttctgcatttccatgggcagtttgtcagaagcacagctgtttgtactttttaaatccaaaagatagacctttaggtgcttaagtcataactcttcacttactgttttcttcttctgaaccacataaggagtttacagaaacagagggcatgcattctccaaagagagatgctgatggtccaacctggtcatgaagggtatctcccaactccagtgagacaagtaggcaagctttgtaacattcagtgacataaatgcaaaagccctgcatttgaggacttggtcttgtatttcttggaccaaatcaagccttcaaagtcacaattaatctgaatctaattgcattctaaattcataaacctctattcagtatattttgaaagcaagtcttttaggtcagagttttgaaagattaatgtaaagcacctggggaaaaactcattggcacatcaatgttaagtagattcatgtgttgcctatgaaacaggttgtctaattttatcattcaactctaccaaaacccagattaccaatgagaaccactccagcatgcctggcaaattacttcagattctaataatggatccagttcacatttcagcgcctaggggctggctttcagcccttgatgtcttcccaagtctctctgagaagaatttgggaattctccgtaaagtcattcccaccagaagtctctagtcctgggtaaagtgtaacttttctttcaggggtggagtggggtgtaaaaagaggagagaataattaggtttacaaaatgttaactagaaaccacaagataaggacctcttacctttccaatatcctcacaggaaaagggtagaaagggtgtcttgtcattcttctcctaggagagtacttagctggtacatgatgatagtcgaagagaaaataagcctccttcatcttaaaatccttgacccactggcttagattccactacttagaaagcagtaagtagatagatataagtgtgtttgcatgaagaaagtatgacagtaaagctcaaaccttcaaaacaaattaactacagagtgattataataccaaaaaaacctgaaactaagtaattcttttgaatggacctcttagtattatttatttgctgcacattatgcactacttgggtatagaggaattttgaatttttaaacattttaagtatcagctagaaatcaatgccaactgtaaatcattcagaaattaaaacagaacatttgttattgttttaatttcaatgggatatgtgatttaacttatatacagcttttccagaatatttttggtggtggtggtggkttttttttggtgttttttgtttttgtttttttggttttttg

SEQ ID NO: 71844 - DNA, 685 bp, Homo sapiens
catgattaagaaacccattctctcatctcctttgctataaagtgggcccctgctctaatatgatgttatgtagatcttatgccaacagatcaaatgccccaaaagctctcagatcatggggctaagggtcttaggacatgggatgcaaatctatatgcagactatgtgtctatctattcctttcagaatgaatcattagcccttcctaagtggaagggactcaatgaagtcaatttgccaccaagtagatggttggtctccttgatggatgggaccatatcaatractgaatattgatccctggtgcagtcagattggacattcagtagcagcaggcacagttaaatcagtcttggtaagtggttgcccacagtgttgggtccatttatagtgtccatctctgccactaagaccacgttgttcatttactcattggcatgtatctgtctgtttttaatgcctctactgtagaagatgctctctggtgagaataaacatgctatattaaagatctgcactctttgcacccacttcgatatattcatctgtatgcttctatcccagaaaacctgtccctacattccaatatttcttctgacaagcttctgacaagctggccaggccattcaccactgcctatcagtcagattatattctaacttgagaccacttctctatctacaca

SEQ ID NO: 71845 - DNA, 685 bp, Homo sapiens
catgattaagaaacccattctctcatctcctttgctataaagtgggcccctgctctaatatgatgttatgtagatcttatgccaacagatcaaatgccccaaaagctctcagatcatggggctaagggtcttaggacatgggatgcaaatctatatgcagactatgtgtctatctattcctttcagaatgaatcattagcccttcctaagtggaagggactcaatgaagtcaatttgccaccaagtagatggttggtctccttgatggatgggaccatatcaataactgaatattgatccctggtgcagtcagattggacattcagtagcagcaggcacagttaaatcagtcttggtaagtggttgcccacagtgttgggtccatttatagtgtccatctctgccactaagaccacgttgttcatttactcattggcatgtatctgtctgtttttaatgcctctactgtagaagatgctctctggtgagaataaacatgctatattaaagatctgcactctttgcacccacttcgatatattcatcygtatgcttctatcccagaaaacctgtccctacattccaatatttcttctgacaagcttctgacaagctggccaggccattcaccactgcctatcagtcagattatattctaacttgagaccacttctctatctacaca

SEQ ID NO: 71846 - DNA, 751 bp, Homo sapiens
taaacccagcctgctgcaaacacaggttacttccagcacgaaaaagttacacccgaggaggtggccattctcttctcaagaggtgktgagtctaggcccttcttgcagaagcagagctgcacatacacatctttttttttttttttttttttaagacacggtcttggtctgttgcccaggctggagtgcagtggtgcaatctcagccttctggtttcaagcagtcctcccgcctcagcctcctgagtagctgggactacgggtgcatgccagcacgtctggctaatttttgtattttttgtagagatgaggttttgccgtgttgcgtatgctggtcttgaactcctgggctcaagctatctgcctgcctcagcctcccaaagtgctgggattacagacgtaagccatcatgcccggccaaattccttatccttatctctttctctctctttttctttttctttttttcttttttgtttgttaagacagggtttcactctgttgcccaggttggagtacaagaggcaggatcacagctcacagcagcttcgaactcctgggctcaagtgatcctccctcctcagcatcctgagtagctgggactataggtgtgccactacacctggccaatttttaaattttttggagatagtgtcttgctgtgttgcccaggttggttttaactcctggcctcaagcgatcctttcactggcccctcccaaagtgttgggattataggaatgagacactgc

SEQ ID NO: 71847 - DNA, 751 bp, Homo sapiens
taaacccagcctgctgcaaacacaggttacttccagcacgaaaaagttacacccgaggaggtggccattctcttctcaagaggtggtgagtctaggcccttcttgcagaagcagagctgcacatacacatctttttttttttttttttttttaagacacggtcttggtctgttgcccaggctggagtgcagtggtgcaatctcagccttytggtttcaagcagtcctcccgcctcagcctcctgagtagctgggactacgggtgcatgccagcacgtctggctaatttttgtattttttgtagagatgaggttttgccgtgttgcgtatgctggtcttgaactcctgggctcaagctatctgcctgcctcagcctcccaaagtgctgggattacagacgtaagccatcatgcccggccaaattccttatccttatctctttctctctctttttctttttctttttttcttttttgtttgttaagacagggtttcactctgttgcccaggttggagtacaagaggcaggatcacagctcacagcagcttcgaactcctgggctcaagtgatcctccctcctcagcatcctgagtagctgggactataggtgtgccactacacctggccaatttttaaattttttggagatagtgtcttgctgtgttgcccaggttggttttaactcctggcctcaagcgatcctttcactggcccctcccaaagtgttgggattataggaatgagacactgc

SEQ ID NO: 71848 - DNA, 670 bp, Homo sapiens
atgtgccaccatgcccggctaattttttttttttgtacttttcatagagatggggtttcaccatgttggccaggctggcctggaactcctgatctcaggtgatctgcccacctcagcctcccaaagtgctgggattacaggcatgagccactgtacccggccccttatgtaatgtatattttatcacaattttwaaaaatctaataaataaaagattattatttttcagaactgcaagaaattagaaaacacaccaaccaaatattctgtgaaagacaagaacacttttatggaatcaacagcaataggcttaatattttaatacggaattacagtagagtcgtacccataaagttgtttttgttttattttgttttgttttgtttttgagatggagtcttgttctgttgccaaggctggaataaagatgcgcgatcgatcttggttccttgcaacctccgcctcccgggttcaagcgattctcttgtctcagcctcccgagtagctgggattacaggcacctgccaccacacatggctaatttttgtatttttagtagagatggggtttcaccatgttggccagactggtttcgaactcctgacctcaagtgatccacctactggtctcccaaagtgctgggattacaggtgtgtgccaccgcgcccgt

SEQ ID NO: 71849 - DNA, 658 bp, Homo sapiens
tgcatcatttattacatttttggtcaaaatctcatagccagcagctttgctagttgtaaagccattttagattttgggcatttacatgatagataatctgtttcacctgacctcatatttggagttgcttttccgtatcacttagtggatgtttgaattaatcttttgttttgaagarataagtacatatgtgagttttaacattggcttaaacagcataaagtgttaaaagctccctagtaagatacaattccaagaacaaagactgtgaattttagattatttacatagcctttgtgataaagataaaagttgtcatgttttgagatttcaatttcttataattcccatggtctgtaggccaggcatggtgactcatgcctgaaatcccagcattttgggaggccgaggtgagaggattgcttgaggccaggtgtctgagaccagtctgggcaacatagtgacactctgtctctacaaacaaaaatttttttaattagctgggcttggtggtgtgctcctatagtcccagctacttgggaggctgaggcaggaggatcaattgagcccaggagttcaagcctccagtgagctatctataattatgccgttgcactctagcgtgggtgacagagtgagaccctgtcttaaaaaaaaa

SEQ ID NO: 71850 - DNA, 1719 bp, Homo sapiens
actgatcaaaggctggaaaacaggcactatgaataaaagatacggtagctgaatatattaccttaaatatgcaaactctggctaggtaattagacaaattcccatctccatgaatagctactatagccttttcagacatggaggtgagacctgaatttattaacagtcttcagttgtacaaaggacaattgcacagaaggtaagtgttactttcacactgaggctaaggtgagaatgaacacaagttaaccaagcagaagttatttaggtcaggcatttagaagaacgtgctgaacaagattgggcttatcagttaataacttttgcatggattagtaggaactagattgaagctagagttcaatatagttgaagtataggagagggcagaggcaggtgctgagagctgccaaactgggctacttcaaaatttcaaaaacaatggatcttaaatgaaatgaccttagtgggtgaaaatgaattagattcaggaaaggatattaagctgaaatcaaggtttgcagaccagataagtctggattgcttgcttttccagggagtatttaccctaagagtctttaaatagccaaatkgttttacaaatatttgattcagaaaattgtgattttctcatatagctttccacggctacttcttttttttgaagccaggtatacctataaccatgcattaattactggttccttggaacacaactctagattcaaagaataaggccaaaaaccagctggtatgatctaaatagagacctgtataacgttctcttccaaccctttaattctttcactttcaatcaaaagagctagaagacaattccaagtataatttccacattggatattagggtgaactataagaaattgccattttgtaggtcaaaacagtcacatataggaaatttcatataattcaacctaatacaataattattacagtagttcatcttcactaaagcaaaaggccttaatatatttagtttttaggtaaaaatattggtatacatataaatgcctgtgcacataagtattggtaaagaacagggttgggactaaagatgtgtcttggataaaccacttatcggcatctagctcatccttctattgtactggacactggtgcctcctgtctgacttgaaggtttttcagactatggaaaacaagaaaaaaagtgcaaagacttgatctctcaacccatgggaaattctgtctgggaaatgggccaaaggaagaacaggagacggtataacaaaatttgtaccatgttacaagtttagtgaaggaagatcacaacaaagctgtgagcagaaaaacaaagcatgtggcttcctcctttctaaaatatagtattgcttaatgtgtcctgctttcaagagtctaagcataagacaagacaccaagtacacgttggaaaaatcttatctgcatagtcatctaaaatgagacaagcttagcttaactaaaaaactttattaacaatgtaaaatgttaaatatttttataatctgagctaattccagcatgccctataagatttaacactatgctgatgtgcagacaccatgcttcagatttcaattagaacaaaatgtaataatatttgattttacatttgagggcaattgtatatgttactacaccatttcctaactggattacttcattctccaagaagctgaaaaagacatcattggatcaaaa

SEQ ID NO: 71851 - DNA, 1719 bp, Homo sapiens
actgatcaaaggctggaaaacaggcactatgaataaaagatacggtagctgaatatattaccttaaatatgcaaactctggctaggtaattagacaaattcccatctccatgaatagctactatagccttttcagacatggaggtgagacctgaatttattaacagtcttcagttgtacaaaggacaattgcacagaaggtaagtgttactttcacactgaggctaaggtgagaatgaacacaagttaaccaagcagaagttatttaggtcaggcatttagaagaacgtgctgaacaagattgggcttatcagttaataacttttgcatggattagtaggaactagattgaagctagagttcaatatagttgaagtataggagagggcagaggcaggtgctgagagctgccaaactgggctacttcaaaatttcaaaaacaatggatcttaaatgaaatgaccttagtgggtgaaaatgaattagattcaggaaaggatattaagctgaaatcaaggtttgcagaccagataagtctggattgcttgcttttccagggagtatttaccctaagagtctttaaatagccaaattgttttacaaatatttgattcagaaaattgtgattttctcatatagctttccacggctacttcttttttttgaagccaggtatacctataaccatgcattaattactggttccttggaacacaactctagattcaaagaataaggccaaaaaccagctggtatgatctaaatagagacctgtataacgttctcttccaaccctttaattctttcactttcaatcaaaagagctagaagacaattccaagtataatttccacattggatattagggtgaactataagaaattgccattttgtaggtcaaaacagtcamatataggaaatttcatataattcaacctaatacaataattattacagtagttcatcttcactaaagcaaaaggccttaatatatttagtttttaggtaaaaatattggtatacatataaatgcctgtgcacataagtattggtaaagaacagggttgggactaaagatgtgtcttggataaaccacttatcggcatctagctcatccttctattgtactggacactggtgcctcctgtctgacttgaaggtttttcagactatggaaaacaagaaaaaaagtgcaaagacttgatctctcaacccatgggaaattctgtctgggaaatgggccaaaggaagaacaggagacggtataacaaaatttgtaccatgttacaagtttagtgaaggaagatcacaacaaagctgtgagcagaaaaacaaagcatgtggcttcctcctttctaaaatatagtattgcttaatgtgtcctgctttcaagagtctaagcataagacaagacaccaagtacacgttggaaaaatcttatctgcatagtcatctaaaatgagacaagcttagcttaactaaaaaactttattaacaatgtaaaatgttaaatatttttataatctgagctaattccagcatgccctataagatttaacactatgctgatgtgcagacaccatgcttcagatttcaattagaacaaaatgtaataatatttgattttacatttgagggcaattgtatatgttactacaccatttcctaactggattacttcattctccaagaagctgaaaaagacatcattggatcaaaa

SEQ ID NO: 71852 - DNA, 1066 bp, Homo sapiens
aaggtgagtcaggcaaactctgtacccttatatcacacgtaggtgtctgcttggttgtatttggcataagttttataaattcttattggttaacatattattttgcaggaaaaattgtgaactctttcagggaagagattaaactaactgatctttacatccctggtacctagcacagagtcttgcatgtagaggaagacaataaatctttgttaaagtgaagtaaattcctagccttcttgctgagttraaattcatgattgatgacacacagggtttttgtattatttaaacgtttgtaagttggtttctcaaattattttactcaattgattgggctgcaaaatgaatacctagcataataaattaaatcttctgtgcatttttattgtaaaaggcagtatggaattgagaggaagtaggaaacttacagatgatggaaccaagctacttggatcccagccttgaattttactggttatgttaacttgggaaagttacttaactaattcattcctcagttttctcaagagaaaaataggagtaataacaaacctatgtcaaaagggttgtttacatagtgtgaaaatcacttgtaataatgattggcatatagtgttacatgggtgttaactaatattatacaacaaaaaggcctctggttttacacatgtaattttctctgcctgaaacgtatttccctgttcttggcattaactagaatgtcaatttcatcagcaggcctttttcttttaatcagtcccctaactcagttttgctagaagggattctccaagagcatccactcctcactcatcttgcacttatcgtacggtactataatttcctaataacaatataattatccaagtgaggtaagaactgtatctaattcaaatgtgcatcccagatatagcaaaatgcctggcacctagaatatgttcaataaatatttgttgaataagtgaatgaaagaattaaaggatattgaagagattaggatatcatcttaatcaaatgagtgctaatataataatcaaaagacattatttctataaaattccat

SEQ ID NO: 71853 - DNA, 1066 bp, Homo sapiens
aaggtgagtcaggcaaactctgtacccttatatcacacgtaggtgtctgcttggttgtatttggcataagttttataaattcttattggttaacatattattttgcaggaaaaattgtgaactctttcagggaagagattaaactaactgatctttacatccctggtacctagcacagagtcttgcatgtagaggaagacaataaatctttgttaaagtgaagtaaattcctagccttcttgctgagttgaaattcatgattgatgacacacagggtttttgtattatttaaacgtttgtaagttggtttctcaaattattttactcaattgattgggctgcaaaatkaatacctagcataataaattaaatcttctgtgcatttttattgtaaaaggcagtatggaattgagaggaagtaggaaacttacagatgatggaaccaagctacttggatcccagccttgaattttactggttatgttaacttgggaaagttacttaactaattcattcctcagttttctcaagagaaaaataggagtaataacaaacctatgtcaaaagggttgtttacatagtgtgaaaatcacttgtaataatgattggcatatagtgttacatgggtgttaactaatattatacaacaaaaaggcctctggttttacacatgtaattttctctgcctgaaacgtatttccctgttcttggcattaactagaatgtcaatttcatcagcaggcctttttcttttaatcagtcccctaactcagttttgctagaagggattctccaagagcatccactcctcactcatcttgcacttatcgtacggtactataatttcctaataacaatataattatccaagtgaggtaagaactgtatctaattcaaatgtgcatcccagatatagcaaaatgcctggcacctagaatatgttcaataaatatttgttgaataagtgaatgaaagaattaaaggatattgaagagattaggatatcatcttaatcaaatgagtgctaatataataatcaaaagacattatttctataaaattccat

SEQ ID NO: 71854 - DNA, 664 bp, Homo sapiens
ggttgttacactcggccacaaataaacacagaaatagtccagaatgtcacaggtccagggcagaggaccaacatgggcattttgtttttgagcaaggtgggtctcagaggtgatcggcgatcagagggcgatgaagttctagatccattgagacaagctctagacagtagcatgcagtcccacaacttgtaccagcatccccagcgtctggcattccatgtttctgctcctgtggcctccacggtgcaacaagctagcggtttacttggacctctgcytcatctttcttcttttgcgcttcagcctgcgcattcgcttcttcctccacttggctctcatggcgccgaggtttccaaaaaaatggcgctaaggccgagagagaactgcagtcttaacgctactgagtctttcaatccgtgaacctggtttatttctttatttatttgggttttgtttaatttacttttgcagtgttttgtagttttcagtagacaggccttgcataactttttttgaattcatgacaaaagtattttttgttattataaatgaaatgtttaaaaatattttctaattcttagtatatagaaatgcaattgattttttaaaatatattcatcatgtatactgagactttgataaattcatttattagtagcttttt

SEQ ID NO: 71855 - DNA, 264 bp, Homo sapiens
attctagaacaatcccacaattttcctgaatgtcctaatttaactttgcacaaaattcaggccccaaataagaaacatcctgccaaatattgaaagtaatggcaaaaccgcaattacttttccaccaacctaatacatttcaatctcaaggattttggctgtaagtrttgactacatatttctccctccaatggaagtttcttggactcaccctttagctcctatatttctatttcctaaagtaacataaaattccaaagtgaa

SEQ ID NO: 71856 - DNA, 1284 bp, Homo sapiens
gcataagagaaatgttagaaaatagccctgatgaaacaggtagacaacagagttgtgacttttaggcttttgaaaatacaggtaatctagttcagaagtatcatcttctcgcaggtctacttgtgagtatgctgaaattcaragtgctgaatcatgcaagatcacacaggatgtaactgaaagtggttgttgtgtggtagaagaggtattgggttgacagtaaggggaactaaatgctcattcactagcttagctttattaaatcagaatgcctcagctttcatatctgtacttgtaaaattaaaattgaactcaaatataacaacttaaaggaataaacatatttcaatgtctatatctttagaaaattaattttcagaactgcacacatagtatatttaaaacacataacatactgtgatatatgtagacatttgaatgtaaaaaattaaaatgaaatcaatcaatatacaccaaactcatgctagtgattgcttccaaggaaagagtataagaaacacgactggagcatatgatcaaaagaaactttatctatatctgaaagtcagtttttccacctgtaaaatgaagataatagtatgcacctcatgaagtttctgtgactattaaatgagctaacatggtaaagtgtttagagcagtgactgggactcagtaagctaattatttttttaaaaattgggacatcagatctatcacattcaaatacattccatcccaaatagagaaagattcctgaatcttcctctattcctagatatacatcaggcaccagagagatagaaaaaaaattttaaacagtttgattattattatgtcaataggttttgcggaacaagtggtgtttggttacatgtattagttttttagtggtgatttctgagatttgggtgcacccatcacctgagcagtgtacactatactcaatgtgtagtcttttatctcctatcccctcccacccttgccccctgagtcctcagagtcctttatatcatccgtacaccttgcattctcatagattagctcccacttataagtgagagcatataatgtttggttttccattcctgagttacttcacttagaataatggtctccaactccatccaggttgctgcgagtaccattatttaattactttgtatggctaagccatattccatggtgtgtgtataaatgtatatacctcttacatctttttatccactcattgattgatgggcatttaggctggtaccatattttggcaattgtaaattctgat

SEQ ID NO: 71857 - DNA, 564 bp, Homo sapiens
aaatttaggggtgttagtcatcctgtaggggaggggtctcaaatatgtttgctttttaaaagcttcaacactcagtgcagaaaatattaatcttcagtcttgattatttttcagtggactgctgcttcatattatattttgtttataaatgtgctctgattacatttttattattttattaatataaaggcaattaacatatttttgtgttttttaaacataatctagttgaggaagaggatggcaagactgcaactcaaccactgttgaaaaaaggcaggcatttttcatcattttattttaamccctttttcatactgtaaactctttaactccaaccttattcccttttttttaaccttggtttttatttccatggtgaggtaatgttacagttctataaatgcagattagaaaaattattattagtctaactaaaaagttaaatattctcaggaaatggagttatatcacaaattcttttctattatcacagcatttctgaaatattagacccagacagccggtattaattttttttaatttaaactgcatggtttagat

SEQ ID NO: 71858 - DNA, 723 bp, Homo sapiens
ggatcctagaattgaggaccaggagagtagagcagtcactttcaaatcttatactggataagaatcactgatggaaacctttaaaacatgccagttctcaggtaccacccccagagattctgaatctggaagggagataggaggcagagggagtactgtggagagatcattgaaaattgactcttctaagaagccataggtaattcctaggtagatgccttwtaaactgaaaaccttctatattaaaagctccctgtctgtgggcttcgtccctcctgcaagtttctgaagtcacatctttgtaaagccaatgtccactgcctgtctgcaattaactatttctgggatttggtatcacttgtggcactgtttagttgtaaagctccaagaagtttatgggtgagagaggaaattcgtttttggaaatggataaaatgtggccctttgttttttggatattaggaaaaagacattaagccacaaatagaagaggaaatacagttgtgtttaggggcatggaagtggaaattatattcatctgcttttcattatgtggctggtaaaagaacaaagttgcaagaagtaaaaacttgaaaattagagaagatttaagaaagacacaggaaaaatattgctaagtaaaatcttcaaaactgtctgaaactgaatcaagtggatttaagattgtagttcaaattatggctatttaaagaacattatcct

SEQ ID NO: 71859 - DNA, 723 bp, Homo sapiens
ggatcctagaattgaggaccaggagagtagagcagtcactttcaaatcttatactggataagaatcactgatggaaacctttaaaacatgccagttctcaggtaccacccccagagattctgaatctggaagggagataggaggcagagggagtactgtggagagatcattgaaaattgactcttctaagaagccataggtaattcctaggtagatgccttataaaytgaaaaccttctatattaaaagctccctgtctgtgggcttcgtccctcctgcaagtttctgaagtcacatctttgtaaagccaatgtccactgcctgtctgcaattaactatttctgggatttggtatcacttgtggcactgtttagttgtaaagctccaagaagtttatgggtgagagaggaaattcgtttttggaaatggataaaatgtggccctttgttttttggatattaggaaaaagacattaagccacaaatagaagaggaaatacagttgtgtttaggggcatggaagtggaaattatattcatctgcttttcattatgtggctggtaaaagaacaaagttgcaagaagtaaaaacttgaaaattagagaagatttaagaaagacacaggaaaaatattgctaagtaaaatcttcaaaactgtctgaaactgaatcaagtggatttaagattgtagttcaaattatggctatttaaagaacattatcct

SEQ ID NO: 71860 - DNA, 723 bp, Homo sapiens
ggatcctagaattgaggaccaggagagtagagcagtcactttcaaatcttatactggataagaatcactgatggaaacctttaaaacatgccagttctcaggtaccacccccagagattctgaatctggaagggagataggaggcagagggagtactgtggagagatcattgaaaattgactcttctaagaagccataggtaattcctaggtagatgccttataaacwgaaaaccttctatattaaaagctccctgtctgtgggcttcgtccctcctgcaagtttctgaagtcacatctttgtaaagccaatgtccactgcctgtctgcaattaactatttctgggatttggtatcacttgtggcactgtttagttgtaaagctccaagaagtttatgggtgagagaggaaattcgtttttggaaatggataaaatgtggccctttgttttttggatattaggaaaaagacattaagccacaaatagaagaggaaatacagttgtgtttaggggcatggaagtggaaattatattcatctgcttttcattatgtggctggtaaaagaacaaagttgcaagaagtaaaaacttgaaaattagagaagatttaagaaagacacaggaaaaatattgctaagtaaaatcttcaaaactgtctgaaactgaatcaagtggatttaagattgtagttcaaattatggctatttaaagaacattatcct

SEQ ID NO: 71861 - DNA, 723 bp, Homo sapiens
ggatcctagaattgaggaccaggagagtagagcagtcactttcaaatcttatactggataagaatcactgatggaaacctttaaaacatgccagttctcaggtaccacccccagagattctgaatctggaagggagataggaggcagagggagtactgtggagagatcattgaaaattgactcttctaagaagccataggtaattcctaggtagatgccttataaactgaaaaccttctatattaaaagctccctgtctgtgggcttcgtccctcctgcaagtttctgaagtcacatctttgtaaagccaatgtccactgcctgtctgcaattaactatttctgggatttggtatcacttgtggcactgtttagttgtaaagctccaagaagtttatgggtgagagaggaaattcrtttttggaaatggataaaatgtggccctttgttttttggatattaggaaaaagacattaagccacaaatagaagaggaaatacagttgtgtttaggggcatggaagtggaaattatattcatctgcttttcattatgtggctggtaaaagaacaaagttgcaagaagtaaaaacttgaaaattagagaagatttaagaaagacacaggaaaaatattgctaagtaaaatcttcaaaactgtctgaaactgaatcaagtggatttaagattgtagttcaaattatggctatttaaagaacattatcct

SEQ ID NO: 71862 - DNA, 576 bp, Homo sapiens
ggttcaaattaagttctcaagcgctggtggaaggtttagctacaggtcacggagaagatcagggaagcaacaggacacgcggggcaagggagcgtgaggcttaggagcaatcagagggagacaaaaaggttctgctatccaccaaaccttcttcggtctgggccctcccttaccaaccctggggctttatactccctctccaccaatccctgatgaccccggtggtgcctcacaatggacagtgcctcacaatggacaatgccaagtagcgcccgcatcattccaatgacccctcccccatctcagtctcccacactcctcccaaagacaggtcctctctggaaccttcacaaacctgatttctggtcctccccaaccagctccctgtccctgcttctgggcgctccttccttcctgagctcccagggttcctcaaggtcacttatggygacaaaacataaaaaacaaatgatggcaggatggcaggaagaacctcatacccaagcagagtgccaggttttacagcctccgctcagccattcatatcctaagcaacaaaacatcagcagggtgcgg

SEQ ID NO: 71863 - DNA, 600 bp, Homo sapiens
ttgggcaaaagctcaggatcacttttagagagatgcaaaagccacctttttgcctcattgcagccttagtactgcagagttctgtcagtcataatagcgtctaaccaaaatttcctgtgtcctggaatggccctactgctggaaaatagctcctcacttctgaaygtgacctttgccatttttgtgctcagtgatcttgattctgcgttttggggcctgtaggtacaacagtggcctacacaaaagagagaacacttctgccctacactgggcttctccttttcctttatctcctgggtaaattctctctggagttaagttattctccctttgttcaaaaaatgtcatgtgctggtaggaaaagcaaatattgaaaactgcaaagaccatgcctacaaagttcctggagattgtttgactgttctaaactgaattataaactagatcacattcattggaaataaattagcgtggagcagatacttctgtttactgaaactagttcctacaggatttatccaatagtattcctactgaagctcagtgtaaccatgcttgagataatgtccacatatccttggtaaagcacgagattcataa

SEQ ID NO: 71864 - DNA, 715 bp, Homo sapiens
ccacctcagcctggactttattgtccatatcactatcagcattttggtcaaaaccattcaacaagtctctaggaagttctaaactttcccaaattttcctgtcttccgaactgttccaacctctacgtgttacccagttccaaagttgcttccacattttcagattatctttctagcagtactccactcttggtacaaattctatgtatcagtccattttcacactgctgtaacgatactgagactggttaatttataaaggaaagaagtttaactcacagttctgcatggctggggagacctcaggaaacttacagtcatggcagaaggtgaaggggaagcaaggcaccttcttcacaaggtgacagaaaggagaagtgctgaatgaaagggaaagggctccttataaaaccatcagatctygtgagaactcactcactatcatcagaataacatgggggaaaccgcccccatcatccagtcacctcccaccaggttcctcccattgacataagaggattacaatttgagatgagatttgaatggtacacagagccaaacgatatcattaattatactaatactaatatgaaaataaagttaaactttatatcataactcaaaagaaattcaatattaattaaaaagttaagtacaataattaaaatcatcaatcaagcacagaacaaacttttaaaaagtggattgcaatgca

SEQ ID NO: 71865 - DNA, 715 bp, Homo sapiens
ccacctcagcctggactttattgtccatatcactatcagcattttggtcaaaaccattcaacaagtctctaggaagttctaaactttcccaaattttcctgtcttccgaactgttccaacctctacgtgttacccagttccaaagttgcttccacattttcagattatctttctagcagtactccactcttggtacaaattctatgtatcagtccattttcacactgctgtaacgatactgagactggttaatttataaaggaaagaagtttaactcacagttctgcatggctggggagacctcaggaaacttacagtcatggcagaaggtgaaggggaagcaaggcaccttcttcacaaggtgacagaaaggagaagtgctgaatgaaagggaaagggctccttataaaaccatcagatctcgtgagaactcactcactatcatcagaataacatgggggaaaccgcccccatcatccagtcacctcccaccaggttcctcccattgacataagaggattacaatttgagatgagatttgaatggtacacagagccaaacgatatcattaattatactaatactaatatgaaaataaagttaaactttatatcataactcaaaagaaattcaatattaattaaaaagttragtacaataattaaaatcatcaatcaagcacagaacaaacttttaaaaagtggattgcaatgca

SEQ ID NO: 71866 - DNA, 942 bp, Homo sapiens
tggagcatcaacacaagtttctgattcaattccaattccaattatgtacttacatattcaaagcctaattatatttaaaatatcagaaattcaagatgtaaagaagtatcaggactgtgggagggaaagagcaaagtatagtcaatattaccagcatcgctaaacaataataaacatatcatttctttcaaacaccatgacccaagttcttcttaaaagtttatcccttttgtaaaaagcctctttaatatgaatagttattcaaaattgttgccagagactgttggctctcaactgtggccacctaatgagaaatttggtggaggtagagggacctcttcagtagacagtttatataatgattagagccctgttggatcttgttacctttcagccctgtgttccccaaaaggaaaagagaggtgcagaaaacaaacaggctgccattaactgcaaaagacaagggtcgtaacttctccggtgtagattagctactggcttgccactagagagaggctctcgggaaaggaaacgggcagatatggttycacagcccttcgtggagttgatttgttgcttgatcctgggatgctacagatgctttaaagctgccactgacgatcagagtaaaaacgtcaaatttaacaggcaccgatgtgtgtcttggcaatgggaagtgataaaatcaacagcttgccttagaaaacatccagattatttatttaaaatttttattccaaatttgtcagcatcaatcattcctcttaaacactggacggtatctcgttttcctccttggagttttccacttttccagtcacctagcattacacttattagtaccaaaaaaatagaaatctcttttaaaattaaaagtagattaatatctttagactattgttagaatttcaactatggcccaaaaaagtctaattcacatgc

SEQ ID NO: 71867 - DNA, 697 bp, Homo sapiens
tttcccacagtttacctctctgaaatcaagacatataattagtactatgtcatggttcaattgctgcattgttttctttcttaatagtacagaaaataacggtgccttttacagttgatgacatgtattagaagaaagatgatagtacatatcttgccaaggcagagatactgaggggaagaacagattttcttggggcaagagaaaggggtgaaatagaattagtttggttttctatatgttaagtttgagaatgacctatgtgcagttgaaaatttagggctgaaactccagcgggtgatgaagtatgttctgaaatttatgtgggaaaactccttgagttcttaagaatgtgattatttgtacctcttgttttccaaaaataatttcaagtgacagatcttcactataggtagaaattctttcatttgttgccaaagcctcagctgcactgctagatgtcatgataattttataagatgataaggtattaagtttttcaaataaattagcagtgaaaaatgagatgtgataaaaaaattagtttgyagccaataaagtgatggtggaattttgtcatgtctatagtgattgtatgtgaaacttctgatagaaatgtctggttttaatttatttttttctggatgctttactaaagacccatgtgcaaggggaaaaattaaaaacagacaacttt

SEQ ID NO: 71868 - DNA, 704 bp, Homo sapiens
cagggtaagtccctggacaatcaaagaaaaacaacttgatttatagtaaacgacactatctaataatcattctaaaagtaatcctgccaacttgggggattatccagtacaggcttgcttcttggtagccactgtacatagagttttgtttataattagactgtgtagtgttaattatgctggttgccctgccagtatcctacagaggctacaggaggagatcaaaacaatcattccagaattatgagtcacttcactctctccccactacacaccactggcagcccctcaaccctggaaaaaggaaattatgcacactatttgcctatacagtctttcacatttaggatgaaatattgagttccaaaacctgctctacatttacttttctagaataacggatacatttcaatcctggtaactttttgctgttcaagaattagaagttgaggawagaaggtttaggaaactctcaaggcccggtttatgctgtagaaaaaaagaatttctgcataagtaaactgcaattataaattttgctccaaatatgaataattcctccaaggagaggttcataacctcattcatctttgtattcctggtgcctagcagggaagaaacctgccataaatgttgaaatgaaagtagcaataatctaatatattaaaatgaagtataaacaaaaattacctccatgtccatgc

SEQ ID NO: 71869 - DNA, 1296 bp, Homo sapiens
attttgcaattgtatttttgctttgttgtttcagcacaagggctattagtttgaacacttaactgcactaaagttggaaaaaatagaaagtgtagtcttcacagtgagaacatgttctggcctctcggcaaagctgggtgtaagttaatatgcttgtatgaacacagacatgcagagacaattgattctagaatccctctttacacttattcagcttctaagaaagagagcagtgtcagaatgtccttttggtcttttgatcacgtggaatttttgtgaatatggacatatgaggcttgaggttgaattaattggcattagagagtatacacccatttcagctttaatgtgggagaagaaacatattccaccccagttctcaagtataacctcctctggcttagactacacagaacaggaatccaactttctcctttaactcacttctacaaaggaaaggaagtgacattgaaacttcagggaaactacagaggttaaaaatcacatttctgtcattgccttacattgctggcactgaatcatttgggctatgacctgctttacatcagggaccatttggtacgtgagtttcatatatctcaagcaagctgggtaggacaatgttgtgggcacaacttgacaaggaaaagacaatggggaattacagtctagygcatagcatgctgcaacgtagcttttgcagagctctgtatttggaggttgctaggcacctatgcccatgcataattctttccttatatggtatgtctttccttatgtgctgttctccattttgtacttgtccctgggaagtgatgtagggaagagagattggcaaggtaatgactacaaccttgagcccagagttgtgatattaaatgtcatctcgaaccacctcactagctgcttctctttctacttagagaaatatcaagtcacctatggaagaagccatgagtgattcccattacttctgaggaaaagctattatgaaaccattgttctgggaaaaaggataatatggctttattatggggttggaagagtttggcaaaggctactctttcccatatactttaggctttaaagctcaaaggtatctgggaagctggtgaacaagtctatagagtaagctgaggcacttctgggaaatgatcaatgggctgaagtggtctgacacagtggagagggcccaagggaagaattcccataacaggaaggtaggcagtcttaactaaagacctggcacaagcattaggtgtccaatctgacccagccaagcagactcgggcagca

SEQ ID NO: 71870 - DNA, 1296 bp, Homo sapiens
attttgcaattgtatttttgctttgttgtttcagcacaagggctattagtttgaacacttaactgcactaaagttggaaaaaatagaaagtgtagtcttcacagtgagaacatgttctggcctctcggcaaagctgggtgtaagttaatatgcttgtatgaacacagacatgcagagacaattgattctagaatccctctttacacttattcagcttctaagaaagagagcagtgtcagaatgtccttttggtcttttgatcacgtggaatttttgtgaatatggacatatgaggcttgaggttgaattaattggcattagagagtatacacccatttcagctttaatgtgggagaagaaacatattccaccccagttctcaagtataacctcctctggcttagactacacagaacaggaatccaactttctcctttaactcacttctacaaaggaaaggaagtgacattgaaacttcagggaaactacagaggttaaaaatcacatttctgtcattgccttacattgctggcactgaatcatttgggctatgacctgctttacatcagggaccatttggtacgtgagtttcatatatctcaagcaagctgggtaggacaatgttgtgggcacaacttgacaaggaaaagacaatggggaattacagtctagcgcatagcatgctgcaacrtagcttttgcagagctctgtatttggaggttgctaggcacctatgcccatgcataattctttccttatatggtatgtctttccttatgtgctgttctccattttgtacttgtccctgggaagtgatgtagggaagagagattggcaaggtaatgactacaaccttgagcccagagttgtgatattaaatgtcatctcgaaccacctcactagctgcttctctttctacttagagaaatatcaagtcacctatggaagaagccatgagtgattcccattacttctgaggaaaagctattatgaaaccattgttctgggaaaaaggataatatggctttattatggggttggaagagtttggcaaaggctactctttcccatatactttaggctttaaagctcaaaggtatctgggaagctggtgaacaagtctatagagtaagctgaggcacttctgggaaatgatcaatgggctgaagtggtctgacacagtggagagggcccaagggaagaattcccataacaggaaggtaggcagtcttaactaaagacctggcacaagcattaggtgtccaatctgacccagccaagcagactcgggcagca

SEQ ID NO: 71871 - DNA, 1296 bp, Homo sapiens
attttgcaattgtatttttgctttgttgtttcagcacaagggctattagtttgaacacttaactgcactaaagttggaaaaaatagaaagtgtagtcttcacagtgagaacatgttctggcctctcggcaaagctgggtgtaagttaatatgcttgtatgaacacagacatgcagagacaattgattctagaatccctctttacacttattcagcttctaagaaagagagcagtgtcagaatgtccttttggtcttttgatcacgtggaatttttgtgaatatggacatatgaggcttgaggttgaattaattggcattagagagtatacacccatttcagctttaatgtgggagaagaaacatattccaccccagttctcaagtataacctcctctggcttagactacacagaacaggaatccaactttctcctttaactcacttctacaaaggaaaggaagtgacattgaaacttcagggaaactacagaggttaaaaatcacatttctgtcattgccttacattgctggcactgaatcatttgggctatgacctgctttacatcagggaccatttggtacgtgagtttcatatatctcaagcaagctgggtaggacaatgttgtgggcacaacttgacaaggaaaagacaatggggaattacagtctagcgcatagcatgctgcaacgtagcttttgcagagctctgtatttggaggttgctaggcacctatgcccatgcataattctttccttatatggtatgtctttccttatgtgctgttctccattttgtacttgtccctgggaagtgatgtagggaagagagattggcaaggtaatgactacaaccttgagcccagagttgtgatattaaatgtcatctcgaaccacctcactagctgcttctctttctacttagagaaatatcaagtcacctatggaagaagccatgagtgattcccattacttctgaggaaaagctattatgaaaccattgttctgggaaaaaggataatatggctttattatgrggttggaagagtttggcaaaggctactctttcccatatactttaggctttaaagctcaaaggtatctgggaagctggtgaacaagtctatagagtaagctgaggcacttctgggaaatgatcaatgggctgaagtggtctgacacagtggagagggcccaagggaagaattcccataacaggaaggtaggcagtcttaactaaagacctggcacaagcattaggtgtccaatctgacccagccaagcagactcgggcagca

SEQ ID NO: 71872 - DNA, 1427 bp, Homo sapiens
ctaaatgcccacaggagaaagcaggaaagatctaaaattgacaccctaacatcacaattaaaagaactagagaagcaagagcaaacacattcaaaagctagcagaaggcaagaagtaactaagatcagagcagaactgaaggaaatagagacacaaaaaacccttcaaaaaatcaataaatccaggagctggttttttgaaaagatcaacaaaattgatagaccactagcaagactaataaagaagaaaagagagaagaatcaaacagacgtgataaaaaatgttaaaggggatatcactaccgatcgcacagaaacacaaaccaccatcagagaatattataaacatctctatgcaaattaactagaaaatctagaagaaatggataaattcctggacacatacaccctcccaagactaacccaggaagaagttgaatccctgaatagaccaataacaggctctgaaattgaggcaacaattaatagcctaccaaccaaaaatactccaggatcagacggattcacagccgaattctaccagaggtacaaggaggagctggtaccattccttctgaaacagactgtgttcttaaaacttttgtgaaaaatgcaggattcaatttacttgacttaggcctacactgcatacaaagtgattaaacgcatggatcctaaagtcaaaatgcttgtgttatatcatggttccaatgcttactgagtggccttgaaaaaattattcaccactttgtgatttaatttctcatctgtaagactggggaaaagagcagtactatcattatatgtttatgtaaggattaaataacatctatgttttacatgcttagaatatgtagcatatrttaaatgctagtatgagctattattattacacaataagttacaccttaaaaatatttgtgtcatcttaagtctaatcacagtgaaaaaaagaaacttggcttaacattgcttaatatgaccatgaccagaatgagaattcaaaaagtcatagtagtacggctgtaatattgacaaatttcaaatatgagaaatgttaacaatttagagtattttataattacattcctctagataacatgttcagtcacaaaataaagtaaagcgtatcctttgctctacaccatttgctccaaaagcaggcatactggtctctctatccaattttcctaacattgtaactttctgcttcaaagaacaaagaaattacttgcagacactgtcaaaaattagtataacaatgacatttagtaaaaaatatatttaaaatgttatataacatactatattaagaaatggtatgagagatactaaaaacgaaaatgagctaatattaaaaactattgttattgctatactagaactctaagaacaggaaaacgccaaaaattttgagtttgcccagcc

SEQ ID NO: 71873 - DNA, 693 bp, Homo sapiens
tcctacctcagcctctcaagcagctaggaccayaggcacgtgccaccatgcccagctaatcttctttactttttgtagagatggggcctcactgtgttgtccaggctagtctcaaattcctgggctcaagtgatcctcccaccttggcctcccaaaatgctgggatcacaggtataagccactattccagcctagtatttttgatattctacaatattgtgattgactgtttctcctcctcttgttcctggatgcatggtcttgccactagtaacagcatttcccaacctcccttgcagctacatgtggccatatgaccaagtctgagccaatgggagctgattgtaaaacatctaaaatttccaagtcatctctaacttaaactcaagttggttcctctgaactttggcttttctaatgtttttgtaaactgaatcaaagaaatgagaaagaccagcttcattcatacacaacaggatgatgccaaggagatgaaagaacaacaaactagaagaaatttagttcttgattaaccctactaagaaaagctgctccatcaacctagacaggctgaagtgttaaacgagagagaaataagttcccatattatttaagccattacacttttgccttatttttactacagcattttagcctttactctaacaaataccagtagctaattagcactta

SEQ ID NO: 71874 - DNA, 621 bp, Homo sapiens
catcccccagggcctgaggttggagggcagcagcacaaggttggagggagctgagctgggccagctgcacaggaggtaatctataagtgatattatacacaccaccaccaccmcccccaacccgccccctgaggcctgaaaacatcactagaatttctatttacctgagcttcttacctgagctcttctcagagggatgtggttaaacagaactactttgacaaaccacttggtcaggggcggataaaactccccaacccacaaacacacgtctaagaagtcagagtctggttaccacaaggtcattgtttgctggggcactgatccagccgtcctctttctctgcctttccactcaaataaatgttggacagattttttttttcttttgagacagagtctcgctgtgtagcccaggctggagtgcaatggcacaatcttagctcactgcaacctctgcctcaagcgattctcctgccttagcctccggagtagctgggactacaggcgcgtgccaccatgcctgcctaattttttgtatttttagtagagatggagtttcaccgtgttagccaggatggtctcgatctcctgaccttgtgatcctcccgcctcggtggac

SEQ ID NO: 71875 - DNA, 621 bp, Homo sapiens
catcccccagggcctgaggttggagggcagcagcacaaggttggagggagctgagctgggccagctgcacaggaggtaatctataagtgatattatacacaccaccaccaccacccccaacccgccccctgaggcctgaaaacatcactagaatttctatttacctgagcttcttacctgagctcttctcagagggatgtggttaaacagaactactttgacaaaccacttggtcaggggcggataaaactccccaacccacaaacacacgtctaagaagtcagagtctggttaccacaaggtcattgtttgctggggcactgatccagccgtcctctttctctgcctttccactcaaataaatgttggacagattttttttttcttttgagacagagtctcgctgtgtagcccaggctggagtgcaatggcacaatcttagctcactgcaacctctgcctcaagcgattctcctgcctyagcctccggagtagctgggactacaggcgcgtgccaccatgcctgcctaattttttgtatttttagtagagatggagtttcaccgtgttagccaggatggtctcgatctcctgaccttgtgatcctcccgcctcggtggac

SEQ ID NO: 71876 - DNA, 506 bp, Homo sapiens
tggtactcaagaaactgttatgacctgagaaggagactgggaagtctgggcagtagataagcctatttctcattgtgtacctttttgtactggttgaatttttaagtcatgcacatgttttttttaagtgacaagaacaaattcaaagttaataatatatagaaattattatccctcaagttaggcatttttccaatatagtgtttcacctattgaaatagaaaattttcattagccatttgtagaggtgagctattgctaacagcatgacctttaacaattctatgaaatctggataaagttatctgcagtcaatcatcacatataacaacttaaggtatcatattatggtgaaatatttgttggatctcattttaatcctaatgtttaattcagtaatttggtttataaatgtattcrgattcactgaaatatatcataatagtaacatttataatttgaagcatgtgacatgttttggccaataataaacttagatttttaaa

SEQ ID NO: 71877 - DNA, 506 bp, Homo sapiens
tggtactcaagaaactgttatgacctgagaaggagactgggaagtctgggcagtagataagcctatttctcattgtgtacctttttgtactggttgaatttttaagtcatgcacatgttttttttaagtgacaagaacaaattcaaagttaataatatatagaaattattatccctcaagttaggcatttttccaatatagtgtttcacctattgaaatagaaaattttcattagccatttgtagaggtgagctattgctaacagcatgacctttaacaattctatgaaatctggataaagttatctgcagtcaatcatcacatataacaacttaaggtatcatattatggtgaaatatttgttggatctcattttaatcctaatgtttaattcagtaatttggtttataaatgtattcggattcactgaaatatatcataatagtaacatttataatttgaagcatgtracatgttttggccaataataaacttagatttttaaa

SEQ ID NO: 71878 - DNA, 442 bp, Homo sapiens
ccatcccccaattctaggcagctctctacttaaagatgtacagtagttgttcattgccaactggatgaaattattaatctcaatttggactttccatttcaggtcagctattcacagaaactggcttgtgacaaagtttttactggtccacagtaacatgataaagttagggttgtataaagctaaaattattcaaaattaaaattccaatattattttagctttttgtgataaaatattcttcataaaattgagttgatagttgatggaagaattttaaaaaaattttccttgggaaaagtgagttggcaactttgaggattgatttctttccactatcccacccgtcccacttctctccaacacacacacacacacacacacacacwctctctctctctctctctctctctctctctgtctctgaaaatgtttgctgatc

SEQ ID NO: 71879 - DNA, 442 bp, Homo sapiens
ccatcccccaattctaggcagctctctacttaaagatgtacagtagttgttcattgccaactggatgaaattattaatctcaatttggactttccatttcaggtcagctattcacagaaactggcttgtgacaaagtttttactggtccacagtaacatgataaagttagggttgtataaagctaaaattattcaaaattaaaattccaatattattttagctttttgtgataaaatattcttcataaaattgagttgatagttgatggaagaattttaaaaaaattttccttgggaaaagtgagttggcaactttgaggattgatttctttccactatcccacccgtcccacttctctccaacacacacacacacacacacacacactcwctctctctctctctctctctctctctctgtctctgaaaatgtttgctgatc

SEQ ID NO: 71880 - DNA, 586 bp, Homo sapiens
tgatttatttaaacatactgtggtcttccctgtgtcctgaaacaaaacatgttaacaaatatttatcctgttcttcatgactccgggctattatcataaagaatcatacattataatgaaacagtagtacattgagactgtcacctttttaaactaccgagggttctttgttgggtgctttttattatatatgccttttaaacttttttttttaatttcacacaaaggagtcaggtgcagtggctcacacatgtaatcccagcactttgggaggcagaggtgggcggatcacttgagtcaggarttcaaaaccagcatagccaacatggcaaaaccccgtctctactaaaaatacaaaaattagccaggtgtggtggcacatgcctgtggtcccagctacatgggaggctgaggcaggaaaattgcttgaacccaggaagcagagaacccaggaagcagaggttgcagtgagctgagaccgtgccattgcactccagcctggccaacagagggagactccatctcaaaaaaaaaaaaaaaaaaattcacacaaagaaattgcaaaagtgatacgatgaattccttt

SEQ ID NO: 71881 - DNA, 572 bp, Homo sapiens
gtgtctggtacaaagcaagcattaattaatcttggctgctattaatattatagagctggaatttgttgaagatgataatgtcagaggtgtttgaaccagagtggctccatcttgtatacgggctgagtaaaataagtctgatacctaccgggcagccttcccaggggattaaggcattttaattacaggatgagataggaggtcggcacaagatacaggtcataaagaccttgctgataaaacaggttgcagtaaagaagctggccaaaacccactaaaaccgagatggtggtgagagtgacctctgkttgtcctcactgctcgttatactttaatcatactgcattagaatgctaaaagacactcccaccagtgccatgacagtttgaaaacaccatggcaacatcaggaagctacgctatatgatctaaaaacagggggaatcctcagttctgggaattgcccacccctttcctggaaaactcatgaataagccacaccctgtttagcatataatcaggaaataactgtagaaatggacagccagcagccctcggggatgttctgcctat

SEQ ID NO: 71882 - DNA, 902 bp, Homo sapiens
gtcctacctttgggagctggggtctttgccaacccctgaatataggcactgtgattacttggccaaatgtgatgctttgcccactccgggatctaagtgttaagaaatgggcagcttctgcttcctacttcttgagattctcctcttagcgcccagccactatgctgtgaggaagtagggcagcctcatggagcagctgcccagacatatttccaatcacagccttgtgaggtcccaggtgacagccagcattcaccatcaggtgtgcaagtagtcaagcctgtaggtaattccacacaccagttgtctggtcgagttctcagcagcctttgggccacttaagctgatgccatagggagcagagatgagttgctcccactgtgccctgcctacattgtagattcatgggaaaatgattgcaattgctttcagcttctgaatgtgggtggtctgctgtgtagccattggtaacaggataatgctaagtggatatgggccacctttcctgcactggactgctgacttccgagctactccttaactcttaagtaaataataaaaatctattttgtttaagctgctattttgcctgtcacttacagctgcactgagtctaccagatgcactacaatatctcttacctgcttttcctgtgtctagtcttgctcagtcccaggcctactgccacactactcttcctgaagtgtggcttttcagaatcttcctgatgtgtcttctgtggggtgtcccatttctaaaggaatttaatccaaatcccttagcctgacacccsacagccctcatgatcccagctctacctacctctttatcttcatctctgctacttcttgtattctgatttctcaaatcatggtatttgtacccctgagaggatgggcaat

SEQ ID NO: 71883 - DNA, 770 bp, Homo sapiens
aagtacacttgcctgacctactgtcttcgttaacgaactggcatcaactcctgtgataagcccctggaaccaatattctctttgttttaaaacaacttattgcatactttctttcttttgcctttagaagcttttccttgcctcaacctctttggatatgcttatgattctcatagcctgcacattacagatttgcaaatcttctgtgcaacaccgaacaaactcattatctttggagaatctctctctgttatttggttgacagcatcaacacttgcctgcacttgtcagccccccacaatcatgtgagccaatttcttaaaatgtcatctctttctctctctgatattaattggtatgatatatatattgtgtgtctacttcatataacagtggcactgacattgcatttgtgctacactaatgatttttggagtggtttcccatgcaatgctttctttggattgtttgagtcctaggaggtggcatgagaaatttgagactcaaagcaatactttgtctaaggctacttgtattaaggggcagcctggtcacttctcatctcagcctccatgctccattcttctattttagattagaattcattttatagtctgtcttgtgtaatcarttcaagccttttcatttcaacgtggccattgacccagtatcaagttcttaaatattaatagagctattttgcaatgcagtaaatttaaaaatctatttgcatcatagagttactttgcataaatagaagattttaattt

SEQ ID NO: 71884 - DNA, 770 bp, Homo sapiens
aagtacacttgcctgacctactgtcttcgttaacgaactggcatcaactcctgtgataagcccctggaaccaatattctctttgttttaaaacaacttattgcatactttctttcttttgcctttagaagcttttccttgcctcaacctctttggatatgcttatgattctcatagcctgcacattacagatttgcaaatcttctgtgcaacaccgaacaaactcattatctttggagaatctctctctgttatttggttgacagcatcaacacttgcctgcacttgtcagccccccacaatcatgtgagccaatttcttaaaatgtcatctctttctctctctgatattaattggtatgatatatatattgtgtgtctacttcatataacagtggcactgacattgcatttgtgctacactaatgatttttggagtggtttcccatgcaatgctttctttggattgtttgagtcctaggaggtggcatgagaaatttgagactcaaagcaatactttgtctaaggctacttgtattaaggggcagcctggtcacttctcatctcagcctccatgctccattcttctattttagattagaattcattttatagtctgtcttgtgtaatcaattcaagccttttcatttcaacgtggccattgacccagtatcaagttcttaaatattaatagagctattttgcaatgcagtaaatttaaaaatctatttgcatcatagagttactttgcrtaaatagaagattttaattt

SEQ ID NO: 71885 - DNA, 563 bp, Homo sapiens
tgacaccctgaaggtgtttctgtgtcagattcactcagagacctcatgatgaggaaggaacatggtggcgaatcttaccctggtgatgccaaacacagcagtgactcataaccattccagcactgcctatgaaatggatcaattaaaggacggtgacacacaaagatggctacttccagagggagaccttggaaattcttttatgttaacagtgtaccccacacaagaataggagaaccacattctgtcagtacactggggaagttttttcaaaatatctctggactgtgtagatttctggtaatagaaaatatgatctgccacttcaatctactgaatactgtccgtttttttctatataatggcttttaggaactgttgtgaggcatcctaagtattatctagccatccatccatccatccatccatccatccatccatccatgtatctatctaatctaygtgattatatgtgtagagcttattcatacatatatatatacacacacatacatacacacatagttatatgtatttatacacacatatacatataatgtctt

SEQ ID NO: 71886 - DNA, 884 bp, Homo sapiens
tcaatattattttaaaatactcatttagtgcttgcctttttaataaaatgctgattttcctgattataagtgtaacaggtgatcactgaagaaagtttaggaaaaaactcaaaacttattcagattaatattaaaattactcataatttcaccatccatagataattgttggtatattatcttacagaaatcgtttataaacatttttattattcaatttatatatttatatctgcagaactacatatgtagttttacttaccaccaaaacttgttgcaaaaaaacatttttacatttgcccagttaaaaatcaccattaatcttagtggagaattattttttaattatttaaaataagaatattttcatttttgcatttttctagagagagcatggcataagccttgtaaagttactcctgaaatttaattttcttttcttatttcctactctctagtcctaagagatgagtggttcaagacagagtgggggtaaggcaacagtcagcactttgtctttgctccactctctggttcatctctgaagcctgatttctctacccaggcatgaagatacttgaataagtagccttttccatccttttgccctgatatgaaaactggtatatctcttgaragaagagcctcaaaaaataatctgagataggaacaagtggaaagcagagatagtctcttctttttaattcacccctcctttggtcacctcctgaatataaaaagaaggacccagaacaacatggtgtccacggcaaccatatctaggtattgcagaattttagagaacccatgaaatcctttcaaaggataagcaggggatctaaatcgtgtcagatgtatagcacccagcacagagctgagggcag

SEQ ID NO: 71887 - DNA, 1047 bp, Homo sapiens
attgcttaaaatacatgttcttgaagtttatcccaagagatttttgattcagtatctctgggaagggctccaggaattgccacagttaaacaagctccccaggtcattctgatgtagatggtctgaaggccacactgactaatgctgccttttagaattgggaggtaagtttggattttgtagatcaaatattactaccaagaataaaagaaatacacaaaacctccaaacaactcaaatgatgtaacaacaaagcaaatggctcaaagcaaacaaaacccaacaaaaggttttaaataggtccttagagatacaatgtaatttgtctcagctgcggagacytaaagaggccaactcttagttgacatggaagaatagggacaacattgccaagaaacatggttaatttcagttatggataccaaaccctgggctctggaaagcattaacaattttacccactatgctaatcttccatatatggggcatgctggataaatctattttgctaacgtctcttttacaataatgtacttaattttgttgggtatatattctaatttgtgttttctaattcaagttctaacttttaaagaggcccccacccccactgttttccctcgagcttattaaagggcataatatcactttcctcttgttaagagtaaagattggaagaatttagttatcagaaaatggtggtaggttgatgcttttggtggtggacgcagcagtctgatgaataagcatctttcttgaagaccagggttctgccactaaagatgtatgtgatttctagaaaaataattttacctcattgcatctcagttttctcctttgtaaaatagggatagtggtaagtgaatgatttctgtgatcctctctaatgctaaatagaatgagaatgtgcgaagcctttgttatctcagtaaactttaccacaattcatctgtaacgacaaaatgttattattagaaacatattaaaaagcttgcaagtggcatgaattcaggcactgtaaatgagtgtagtgcagtactgtgaagg

SEQ ID NO: 71888 - DNA, 659 bp, Homo sapiens
tgaaaatacacttcaccaaagaagatatataaatgagaaataagttcaagtaagagagaaatgaatgaattagtcctgagggaaatgaatgaattaaaagcacaatgatatactactctatatctattgtaatacatatgtattagaatggctaaaattcaaacaaaaaaactgacatgcaaagcgctaacaaggattaagagcaactataattcttatacagttggtccccaagttatgatggtttgagttaccatttttcaactttacagtgtgttttcatggtattaaatacatttttgacttacaatatttttgacttatgagagatttttggggatgtaaccccaccgtaagtcaagaagaatctgaacatgcctggtagaatttgaaatagaatagcaactttagaaaacagctttgcaatttattttaaaatgaaatatacatttatcatatgacctagtgttctcatttttagatatttatgcaagcacattgaaaacttatgtttacatacaaatctaaacattcatgtttatagcagttttattcatgtttaacaaaaactggatacaagccacatttcctttaaccagtgattgaatacaaaaactgtggtgcaaccatrcaatggaatactactcagccataaaaag

SEQ ID NO: 71889 - DNA, 2084 bp, Homo sapiens
cttaagcataagagtgtttcattatgtgatatcatgttaactttttctgggaaacagcttaaatcagtcatagacattttatgcatttgaatcctggaattccaatatgttttacctgtggtaatcaggtaagtcataaaacaaaattgtaattttaaaaaatggtattattgtccaaaactgcaattacttttgcaccagcctaacaaataaatgtaaagtctggaatgaatttattgaattatttttaaaaatacacattaatatatgtggcaggttttaaaatattttctcctaaacaaagaataccacattgatacaggagtactgccagcttgatgaaacacagtaacaccagtcaattatctgttttgtaaggagattttccacagaaaattagataacatttacatcaataagttggtattcacaaaggcaacttacagtaaaatataaatgtaatttctttaatttctacaaaatattttaattattttattacacttgataatatccctatgggatacactgaagcaaatactaacttcctgttccccaaaaaaattgttagcaaagacaatgttaaaatcatgattgtaaattgtatctgctatatgcataaccagcctctgaactgtgaatcccatgtctccattcattgctttggcccattttccttaaaaccacaaagtaaggtatgtaaaggtcagaaggaggattagatctctacatgcttgaacattcccaacttaagaaagaaaaaataaaatgccttagaatcctggactcaggccaccaaagtagcattatgccctcgagaaaaatcaatttgcagcttggtgttatgaagagacttactgaatatcaattgggtgggttatgttcmactgaaaagcatcttccaagctagctatccattccatttggttcatactcaattgccaatttcccccttctcttctatgctacctactctctacccatgaacataataggtactcccttccccaccctaccccaccttcaaataaaagaaaggaaaaggaagaaacaaagtaagttaaaattaaattaatttgacttagctactgctagagttactatttcatacacttctttcattttctgccaaatttcttgaaatgtgctttatgtttactgcctcatctgtttcttcttaatcactcattgcctaactcctccccctaccattctagtgtaattttgtactacatggttactaaatcaaatgggacaatcaattggtgatgttttgttttgttttttctcacctcattcaggttgagctttaattcctttcactgggattcatcacttccttataaaatttcattttcttggttgttcagtagaagagtgacaagaggacaccactgctattctccaggttagtcaaaccaaacagacccttatattctatcagctttgatgtttgtgacaggacactggtccaattcaacagttggctctgtagcttctccatagttgtctaaacaaatctgcagggacttttccacttgggtattaaattttgaccccacacacagtatatctaaaattaaaattcccctacatttctctatgtctgtaatagcactgagatgatgctatcaaccattcttaagctttgagtcatttattctttttcctgcatccaagtactgactgtaacactcccattgtcagcaagtgttctcagccttcttcaagtccagggcaatatttccaaatgcaacctgcagccctctgtctgaatgcctatcaatacatcaatcttaaaaatgtaaaagcaaaccaagagtttatgcttcctcctttcctcacttagtattaatgatgtggcctttctcccaattaccaaggttcaagcctgcaaatcaccacactgcattattctgagtaagttgttaataattcttaatctgtttcctcaccttcatgcatccatttataaacacctttatgccttccattggttaggcaaagttcaaccacaaattgaagaagcaatgggtctctctttaattaattacctaactggggctctaaatacataaataaca

SEQ ID NO: 71890 - DNA, 2084 bp, Homo sapiens
cttaagcataagagtgtttcattatgtgatatcatgttaactttttctgggaaacagcttaaatcagtcatagacattttatgcatttgaatcctggaattccaatatgttttacctgtggtaatcaggtaagtcataaaacaaaattgtaattttaaaaaatggtattattgtccaaaactgcaattacttttgcaccagcctaacaaataaatgtaaagtctggaatgaatttattgaattatttttaaaaatacacattaatatatgtggcaggttttaaaatattttctcctaaacaaagaataccacattgatacaggagtactgccagcttgatgaaacacagtaacaccagtcaattatctgttttgtaaggagattttccacagaaaattagataacatttacatcaataagttggtattcacaaaggcaacttacagtaaaatataaatgtaatttctttaatttctacaaaatattttaattattttattacacttgataatatccctatgggatacactgaagcaaatactaacttcctgttccccaaaaaaattgttagcaaagacaatgttaaaatcatgattgtaaattgtatctgctatatgcataaccagcctctgaactgtgaatcccatgtctccattcattgctttggcccattttccttaaaaccacaaagtaaggtatgtaaaggtcagaaggaggattagatctctacatgcttgaacattcccaacttaagaaagaaaaaataaaatgccttagaatcctggactcaggccaccaaagtagcattatgccctcgagaaaaatcaatttgcagcttggtgttatgaagagacttactgaatatcaattgggtgggttatgttcaactgaaaagcatcttccaagctagctatccattccatttggttcatactcaattgccaatttcccccttctcttctatgctacctactctctacccatgaacataataggtactcccttccccaccctaccccaccttcaaataaaagaaaggaaaaggaagaaacaaagtaagttaaaattaaattaatttgacttagctactgctagagttactatttcatacacttctttcattttctgccaaatttcttgaaatgtgctttatgtttactgcctcatctgtttcttcttaatcactcattgcctaactcctccccctaccattctagtgtaattttgtactacatggttactaaatcaaatgggacaatcaattggtgatgttttgttttgttttttctcacctcattcaggttgagctttaattcctttcactgggattcatcacttccttataaaatttcattttcttggttgttcagtagaagagtgacaagaggacaccactgctattctccaggttagtcaaaccaaacagacccttatattctatcagctttgatgtttgtgacaggacactggtccaattcaacagttggctctgtagcttctccatagttgtctaaacaaatctgcagggacttttccacttgggtattaaattttgaccccacacacagtatatctaaaattaaaattcccctacatttctctatgtctktaatagcactgagatgatgctatcaaccattcttaagctttgagtcatttattctttttcctgcatccaagtactgactgtaacactcccattgtcagcaagtgttctcagccttcttcaagtccagggcaatatttccaaatgcaacctgcagccctctgtctgaatgcctatcaatacatcaatcttaaaaatgtaaaagcaaaccaagagtttatgcttcctcctttcctcacttagtattaatgatgtggcctttctcccaattaccaaggttcaagcctgcaaatcaccacactgcattattctgagtaagttgttaataattcttaatctgtttcctcaccttcatgcatccatttataaacacctttatgccttccattggttaggcaaagttcaaccacaaattgaagaagcaatgggtctctctttaattaattacctaactggggctctaaatacataaataaca

SEQ ID NO: 71891 - DNA, 773 bp, Homo sapiens
gaaaacttagccactggctaggcaagtgcttccccactacagctgcatggcaatggctggggataaggactttggttgacagctaaccatctctatcacagtttcccatagagtctttaggatattattgttttccatttctttgtataatgaattttaatatctatagtaattcaaaggtaaatttttatgtctagtttatgaagatttttcaaaaataaaatttgaaacagcttgctactttgagttacaaaaataatgcagagtgtagtatccctttctctattcaaaggggtatgtactggtgaagaccttcatggtaatattttcacttgagaagcttaaggcattagagaacgaaagctgtattgamgcaagaacactgaaagaactcataaataggtttctcactaagaaaatagcagctaaccatagaaaaacaacaaagatattttacatatattatgttatcatgatggatacacattgcagctttgaggttaaaagaatgggctgtgggcccagaatatctaagttcaaatctcacccctactgactctgaatagtcttggttaagttacttaacctctctgcttcagtttcttcacctggaaaatggcgatggcgacagtgcctacctcacagggttattgtgttgattaaataagttaatatacatgaggcacttatcactgtaatggcacatagtaatgtttaatatgtttatatttaatgataattttaaacaccttttgttctccagaaacttccca

SEQ ID NO: 71892 - DNA, 650 bp, Homo sapiens
agccaatctgaaaagactctatactgtagctttccaaatatatgatattctgaaaaaagcaaaactatggaaacaataaaaagatcactggtgccagggccgaggcaggagggagaagtgaataggcagagcacagaccattttcagggcaatgaaactaccctgtatgatgatactgtaatgatagagacatgtaattacacatttgtcaaaacccatagaatgtacatcatcaagagtaaaccctaatgtaaaccatggtctttgcgtgttgatgtgtcagtgtaggtacattgatttttttaacagatayactactccaatgtaggatgttgaaagtagaacttcaggatatataggaactctctactttctgctcagttctgctgtgaacctcaaactactcttaaaaactaaagtctattcaaaatacatatgtatgttcattagaatagtttggaataattctcattaaaatatgctctgtttatttcctcttttcatcctaaaggaaggcagggttctgaagcattttggtgggtagctcagtattttatgcttttataaaagctaatggactttagtttttagagcagtttcaggtttacagcaaagttaaccagaaagtattgagttgccttatgtccctt

SEQ ID NO: 71893 - DNA, 2342 bp, Homo sapiens
cacaattgccaataaatatttgtgaagggggaggctttctgcagagatttcctgtgttttagagcttttgctgcaatgatacttttagtttttcatcttagaaattatttttctttgtaatttgagatggaagtcaatgatgagtatcgtcttaggatgtgcagagcagtactaaattaaaaccaaaaaccaagattctctcatctcatgtgttgttttcagtttgttttttgagcttagcacctcacatcttcttggtctaccttttacttctgctctggcggcagctcactgtggccccacagcatctcwctctagccccaccctgttatggctcacttctgccccaggtgaaggtgccagtggtaagccgattgccttctgcacaggcacaaagcttgaaacgtggaagggtaacacctcctggcccagagcttgtccactgaagacaggagctgaagggtaaatgttaccctaccctctcccatttctccagtgtataatgtgaggcaccttccacacagctccccagatgggcccagagggactgagccccaaccgtccatgacggtggaaatcaactggataaggccccccaggcctggttttcacctccctcactcctgtttcctcatctcaggatctgctttcaagggacacagattaaactcctaccaatggtgactgtttcttttgtccttagcaaataccagacattatccactttttaaagtgttttcagtctggcaggaaataaatgtcaccattttcatctgcatgtgtgattattagtaagtgaaagagaaaacacttttaaaaatcacaagtaaaccacaataaaaaatcagtagtttctcctaagataaaaaccaatactttgttgcctcttcccccaacccagatgaaggtattactttctgattttcacacgacaaatatggtgccaaggaaacaacataccagaagtcttttcctactaccttatagctcttgaaatgttaagacaggaccaggaaatgatgggtattatttgaatttgggcctttgtctatatgtgacggactttcataaactgttagagacggactagatgttaaatatcaccaagttgagtattccggcttagaaaaatggagacactaagacccagtgaagagaagtaatggagagacttgccacctgtgacacagacaagggtagccctggcctggaactcctgactctttggtgcttttcctgctaagccatgttgtcctttcttcagaaattgatcatttggctttcccacaacatcctcacttgtggtatcttataagaccacatttactactgaaataagaaatgttataatttcaccataaaggcatcacaaagaacgattttttaaagaaaaatatccagagacatgatatctttgtaggaaacattattatggtgagctccagagagagctttctgaagggtcccaaactgcaatttattactggaatactgggatcctagttcaaaggtgacataaaatatgaggtcagcatgagtatctaaaatacacaagacaaaactgagagttgctaacacaaaatcaagaccaataaataggccaggcacagtggctcatttctgtaatcccagcactttgggaggccgaggcagcagatcacttgagatcaagagttcaagaccagtttggccaacatggtgaaaccccatctctgggtgtggtggcgcatgcttgtaatcccagctacttggggggctgaggcatgagaacagcttgaacccaggaagcagagattgcagtgagccttgcaagatcccaccactgcattccagcttgggtgacagagtgagactccatctcaaaaaaaaaaaaatcaattaataaaaagtgtcagagatcttaaattttttagaagcctatacctaccagcagcataagggagcctggacatctagatctcacaagactaccttacagagttaacttcgtctctttggatatgttagagatttaccttaagttttcacatgtacagtttttacttattataataaaactatttaaaataatgaaagttaaaagttattgaaggtgattcatatatttaggacaagtgacttttaaatgcataatttaaactcctattatggttagttaacctataataactctgttgagtttgtttcagccatatattatttcagctagagaagagctaatatttgcaaggaatctactaaattctatgcattttagagaatttcaactttatttattgctatcccctgtcctactttgagttcctccaaaaggggaccttcagatgggattccaattcaaa

SEQ ID NO: 71894 - DNA, 689 bp, Homo sapiens
acggagccagcgaaagctaaggcgggacttacccaacagagggtcctggcccagtcacccagtggcacaacccaactgggagatctgagcatctaccaactgtggccaccagtgagatggtgtcattgtctggggtaaataccgggggtttgttgtctcatgccaaggaaatcgagtttgcggacacaagaattgggtttaggagcagaggtttaataggcaaaagaaagagaaagggtaacagtaggagagagaggagtgcgccagtgggacttctgaccgcacgatggagtgcattggattttatagacaggcttgaggaggcagtgtctgattgacacagggcccacagattggttggaccaggtgtgagttttacatagcgtgtggggaagctggccacgccaccctaatcttattatgcaaatagrctttccacttggccggcaccatgttgtctgctgcctaatgcacatgtggttggaaagggaaagggaagatgcagctgccattttgaacatgcctagtcccaggtagccttttcctattgacacagctgccgcattcacccgtgcaagcttctgtgtctgcagctcaattttacaggctgctgtttgttagaaaagaaatgattcaggggctgcttttcattaaaaggaaaccttactgaggacttccttaccctcact

SEQ ID NO: 71895 - DNA, 1319 bp, Homo sapiens
ggcctcggaggattttttgtcacatgaggttactgtagtttcacatcctctaaagcaaagctctgtcgaaactctctattctcacatggcttcagctcaaacaaccaccctactcagctgccttcctaaccctttcaagccgtgaatcaggagacctgggttccagtttcagctcagtctgcgtgccccagagcaatgacggggcctcaacttctttatcatgaaaattaagaggccaaagtacctttcactcaggttcctttcaactctctctcccctatcttaaaaaaaaaaaaaaaacaacagcttatttttcctgttgcttttagaagaaactcttaacctgagactctctaaaaatgaatagagattattktggtttaaaaaataaatggctacacacagcaacctgactgtatctcaaaaatattatggtaaatgaaagaagcttcacatacaaaagagctcatactgtatggtattattaacatggaattcaaaaataggcaaaactaatctacagttttaaaaattagaatagtggttgcctctggctgtgaggtaggagcagggattacctgggaaggggcaagaaagaattttctgagatgaaggttatattttatatccggttaggactgggtcacacaagtaagccttcatcaaaactcacagactgctactcttgagaggatcaatagaggtaataaagcaattatagcaaaatattaattgcaggatccaagttgtgagtaaatgggtataccctgtttaattccttcaactttcctgtaatttgggaatcttcatactaaaatgttagaaaaaaacacgttctaatacatttcaaaattcctgtctcactcattctctcctttcttccatcccctccctctttcttgacatgtgaccttcttttcccattaaatgagtcaatggaaatgggaatatttattgatttgagcagttaagtcaccagtgctctgtgatgactaactactttatcattcattgcccatggctttcaagggaagaggacaagctctgtgcatctttctcaaagaaagcgttcctacctgtaaaagtctgttagaaaggactgcagatttaataagcatctttcaagagctctgtccccattccaactcaccccaaccctccagccccaacacatttgttaaaaattcacattcagagatgcaggaccctcaaccttggacttcccagactccagaactgtaggacataaacctcttgtctttactttaaaaaataataataacattcagtcccttttttgaaggtttttatcaggatat

SEQ ID NO: 71896 - DNA, 1327 bp, Homo sapiens
gcattgtacattccctatgctgtaggtacaattattgtgccctctaaccactatagatgcacaataaactcagagtaataaattaacattcaagacaaatcattaaattcatgttcacaattccccccataaagaaagactgtaagcatctctttaaaggtatgtgacagtaaggttattttggcttaagaccaattttcagtgcacagatcaagaatgttacttattcttttatttgtttgtgttttaattgtggtgaaatatacataraattaatcatgttagccattttcactgttcagttcaatagtgttaagtatatttgcactgttgtacaatgagtctccagaaccttttcatcttgcaaaactaaaattttctatccattaaacaactccttgtttctcccttccccagcccttggcagccaccttctaccttctatttttatgacttcacatactctagatatctcatagaagtgaagtcatacagtatttgtccttctgtgactggcttgtttcacttagcataatgtccttgaagttcatccatgtagtaacttcctttttaaggctgaatagtattctactcatgcaaataccacattttgtctattcattcatccatccgtatacactttgtgtggcttctacttcttgactattgtgaatagctctgctatgaacatgggtgcaccagcaagttgctgttaatgaaaatgattcattctgtagtgttccttccagctcacagtcttacattcctgttatcaagaaaagctaacttaaagtccttcttactcagttatccacatttggaattagcttaacctgttggcctaacagtcatgacccagtgtaaccactcatgtctcagcacagatgacaaaacgcaacttggctaggaggaaataggctcagtggagggctggccttggagaactcatcttaacaaagtggagacaaagttattttgggaggtcatgtaagcagagtgattatcatcatggggtctgggatcaaaatcccagctccagccttcactagctgtgtgaccttgagaaagttacttaacctccctaaacctcagttcctaatctctaaacagaggcagtgatcataatagtatggacatctaggaacatggtgaggagtaaataaaataatccatgttaagaatttagtgtctggcatacagtaagcgcccaacaactgttagcccatattctgtagttacaggtcactgttccaaacccctcaatttacagaggaggctcagcaagttgaaggaacatttactcctgccttcacacgtagccatatgc

SEQ ID NO: 71897 - DNA, 522 bp, Homo sapiens
gaaggaatatggaatggtcagaaattaaaatggcttcaacttccttaatggaaaagaaatacctccaacattctgaaagaaaatgtttccaacctaggccctattgaaatgtcagttaaatatgaggatagaataaaaacatattaaaatataaactgtctcaaaaaaaattcccatgcatcttttttctcagcaagctcctggggaatgtattccctaaaccggagagagtaaatcaaattaaagagaaggatataggaataggaatcatcttatgttgaagagagatgccaggatgataaataggctccagaaaatagagcacattcagctcacattggagccatgtgacttgctgagggctcccctgtgcatgcctctgcctttgtcccttgaacctgacctcatgattcactaggacaaaacaaggcaaaacatcagataagaggatggggccagaagyaacagatccaagccagaagagaggcagagggaattcaaagcataacagaaaacgaaagt

SEQ ID NO: 71898 - DNA, 1088 bp, Homo sapiens
ttcagataataacagcagagttaaaccagactcagcatctttctgagcgtagggctctgtgtaactgcactggtcaaatgctcatcaggcccatctgatttgcaggatgaagtctgaagactgcagtttctccacaccctacatgtcaaagtgccttgtaccacttgacatatcaagtctgcagcccgggtccgacagagcatggcttctttgtcacagcagcttttccatatcttagaaggcctggaggagcagagtggtgaccaccttcttgatgtctgaaatctctcacctccactcaccaccaggctggttctcaagccacacatgaggataacattcattcttgccttagttctgtctttagaggggattcttgtgcccaccttgttctgttctcagtaattagtccttccttctatgcctaagacttccataagcaatacaaagtttttaataagaaaaaaacaagaaagggaaaaggaaaggataaaaacagtaatctcctggaagaaaaattaatatggttaataaataaaaaataaataaatggatggataaatagacgataagtgatgtgtatcaccactgataaggtatatataaattaaacatcatttgtcactgatttgttaaatgttaaaaagattgacaataaaccagcctttaaattaatgcataatttatgatatttggattcctacattgaagacatgaatgttttttcctttactataaagacattcattttatttattcttttatttttttattttattattattattactatactttaagttttagggtacatgggcacaatgcgcacgttacttacatatgtatacatgtgccatgctggtgtgctgcacccattaactcatmatttagcattaggtatatctcctaatgctatccctccctactccccccaccccacaacagtccccagagtgtgatgttccccttcctgtgtccatgtgttctcattgttcaattcccatctatgagtgagaacatgtagtgtttggttttttgtccttgcgatagtttactgagaatgatgatttccaatttcatccatgtcc

SEQ ID NO: 71899 - DNA, 1164 bp, Homo sapiens
tactgttgtattatttaggaaatcatgacaaaggaaagaagtctgtatatgttcaatactgatgcaaccactcattttttaaaaaatacttttgatcaatggttgatgaaatccatggatgcagaacccatgggtacaaggactgactgtattgttcacctaccaggctactttagaagaaagtatactacctgttttctcacatttaataatttcactgtatttgacagacaatatctacattcaatgctgggtattgcgttttaagaaggtcttggaggaaatgaaatgtgatcttagggtgcattcataatagtcatatgaggaagattctggtgacccttgagatttttgaaaagttcacatgcggaagatgtaataggcttatttggcttactgcagaggatcaacagttaaaatgtcatggaaaggtaactttttttctttcatttaaagtctaaaaagttgtcttaaatgcaagctctacacaaacagggaatagtgtatttgtgtgtatgtgtgtgtggtgtgtattttttaaatttccaatgttcagtacatatccacatatgttaaagtgatcaaaaatgtttgttggattaatcaattaattgatggacaactgatacagttttcttgaaaaaaataaaattaaagtagttaacygtgaaatgggctatccatatattccataactccattgtgttacagcataagtgtgccatctcttcataagcatatattcttgtaaaaaacagatgacaagaaaattttaaaacataaacaatctccataaaagattcagaatatctcagatctttgagaatttacattttaataaaatcatgaaaatagcacaatggctaaaaatattttattattcctcgggcaacctgaatttgtcgaattgtaaaactagatggagagtaaaaaattattttaattttattttgtagtaatgtttattattcccgaatgatgtaattgaccaaaatatgatttcatttctcatttacttttattggcttagtagtaactaattctacatcaaagacaaaaacactgaggatacaaaatagtggctacttaggaatatttttggtttcacatgtttttggtttcacatttaggtacctagcatcttttgagatgcacttgtatgca

SEQ ID NO: 71900 - DNA, 533 bp, Homo sapiens
tgcttgttttctaatacactgtccagagtgattgtttaaaactwtaaatcttattttacctctcaatttaaattatctaataatttcccaaggcaggatctcagctcactgcagcgtctgcctcctgggctcaagcaatcctcctacctcaccctccaatcagcaggaaccacaggcacgcaccaccacacccagctaattattatattttttgtggagacggggttttgtcatattggtcaggctggtctcgaacccctgagctcaagcaatctgcccatattggcctcccaaagtactaggattataggtgtgaaccacagtgcacagcacaaatttcttatcattatcttaacagagcctgcaagaaagctccaggtacattgttctctcttgtccccttatgccagccacagtgaccatcttccagttcttctaaagttccaggataactcgggtttcagagccttggaattctctgctgtttgcagatgtgtctccatcccctttctagctaactccttattcacctg

SEQ ID NO: 71901 - DNA, 1066 bp, Homo sapiens
aacctgctaaaatgcttgagacttgtctcatcatttttctggattgacaatcacaagagacacattaaatcataactacaccagaaagtttgagagaaagtggatgagaaaagttagaacagaaaaagtactgagtaaactatattagtagaagacaaaatacattaggagaaaatgtattgtttgagacaaagatatacccaccctgaagctgtatgaacttaacaacatagcctcaaaatataaaaatcaaaactgacagactgaaaaggaaacaatgataaatctacaactacacatttctttcagaaatgtatcaagaagacaaaaacctaatagaagattttaaccaaaaaatttaacaaacttgatttgtagacatatatagaagtctgcactcaataattagagaatactccttctcaaacaaacatgaaacatttagcaaaagttagtcatgtrctaggtcacaaaaccagtctcaataaacagaaagcatcagtaacaatcataccacatttttggacacactgcagtaaaattcaatgatttgtaaccaaagtatttgaactaattagagaattcagtaatgagatatggacttggtggtttatttgggaagttatcccaggaaacagagcaaaggggcaaacagagtgaggcaaggaaggaagcaaggcaaatacaggatgttttattgtgtttgttacctctttgagcaactgtgatactatcctgctttgggatctccaaggaatagtatggactgtgcctcataacttttcatgaagagaacaagagcctggaaaatttatcccttgactctgctgctcattagttcagggttgctcctggtattactcctccacagttgtagtctgtgcctgtgcagccaaggaacttccaggtcttcagggaaaaccctgatgtagaagagcagagattcactgaaaattgcttgaaggggacctggcagcattcatgcaactgtcccctacaggttccctaaaatccagtggcttgagggaatttagcatctgctacaaattgcatccttgaaaaatta

SEQ ID NO: 71902 - DNA, 1185 bp, Homo sapiens
acccagccaagacgagaaaacttgcctacctgatcccagtttatactgctgaccttaaatagcatgagctaaataaatggctgtttcaaagcactgcattttagaatggtctattgtatcacaaaagcttgctgatataggaactaacattgttcattggttcattctttcttttattcaacaaatatttatttctggcctactcaaagccaacccaggtttgacacatttatcctaatcttcagaggtttgttctcattttataaagatgaaatggaagggcagagagataaattgacttgctgaggaccacacaactagtaggagcagagccaggatctgaagctaggaatgttgaaaggctcattaacctgcccccaccaacaatgttatcactaagaaggtaggttatgaaaaagttgatgttctctgggagcaatggaatattttaggcccaaattgtcaaacttatgctctattatgacattgaagccatcatggatcacttgtttatgtactggaacagacttaagactaaattttgagaaaaagtctgacttcttctgagaataccacatagccacctccaagtagttgttgaatacaaggccattgaaagctggttagactatkttattatcacaaaaatactacccttaccatagactcactatctaaagtatatttatgtcaataaattaagtagaatagcttcacttcctgtcctcatccaaaaatgcaaactctgcccagatagcaacattgattctactcttaatgaagctcattaaaagatggaatatttatatatctaagtaggatgtttcaggaaaagtaatccaagtactgcacggtttagactttattttagaatcatgttcaaattcccctgtccatttggaaaaggatggggattagtctaaccaacagtgttccattgggtcataaacctgatgcatggaatgtattttacctaattactgcaggaaatgctgagagctagagatctacagaactcgaagccaaagttgcagttgaagccaagacaatatggtccagaaacagatactgaaatatgagaattacgtagagaaaccagaggagggagatagtgcatcaagagatcaagtagaggttaaaagtaaccctagcatttaaatgttgcccacagctaacatttttttt

SEQ ID NO: 71903 - DNA, 726 bp, Homo sapiens
gtaacagaatttgtattacttggacttgcacaatccttggaaatgcagtttttcctttttctcttcttctctttattctatgtgggaattatcctgggaaacctcttcattgtgttcacagtgatctttgatcctcacttacactcccccatgtatattctgctggccaacctatcgctcattgacttgagcctttcatctaccacagttcctaggttgatctacgatctttttactgattgtaaagttatttccttccataattgtatgatacaaaagttctttatccatgttacgggaggagttgaaatggtgctgctgatagtcatggaatatgataggtacactgcgatctgcaagcctctccactatccaactattatgaatcccaaaatgtgcatgtttttggtagcagcagcttgggtcattggggtgattcatgctatgtctcagtttgtttttgtcataaattaaccttctgtggccctaataatgtggggagcttttattgtgattttcctcgggttattaaacttgcatgcrtggacacttacgggctagaatttgtggtcactgccaacagtggattcatatcgatgggcaccttctttttcttaattgtatcatacatttttattctggtcactgtccaacgacattcctcaaatgatttatccaaagcattcttcacttcgtaggctcacatcaccgtagtggttttgtttt

SEQ ID NO: 71904 - DNA, 726 bp, Homo sapiens
gtaacagaatttgtattacttggacttgcacaatccttggaaatgcagtttttcctttttctcttcttctctttattctatgtgggaattatcctgggaaacctcttcattgtgttcacagtgatctttgatcctcacttacactcccccatgtatattctgctggccaacctatcgctcattgacttgagcctttcatctaccacagttcctaggttgatctacgatctttttactgattgtaaagttatttccttccataattgtatgatacaaaagttctttatccatgttacgggaggagttgaaatggtgctgctgatagtcatggaatatgataggtacactgcgatctgcaagcctctccactatccaactattatgaatcccaaaatgtgcatgtttttggtagcagcagcttgggtcattggggtgattcatgctatgtctcagtttgtttttgtcataaattaaccttctgtggccctaataatgtggggagcttttattgtgattttcctcgggttattaaacttgcatgcatggacacttacgggctagaatttgtggtcactgccaacagtggattcatatcgatgggcaccttctttttcttaattgtatcatacatttttattctggtcactgtccaacgacattcctcaaatgatttatccaaagcattcttcacttcgtmggctcacatcaccgtagtggttttgtttt

SEQ ID NO: 71905 - DNA, 670 bp, Homo sapiens
aatcatataatttacttatatgatgaataaggaagatgaataaattcacagtctaatatatacacgtattaaagaaatatctgcttctttaccaagtctatttttatcacagaagaacctaaatctgaaaagaacaaatttggcatcttttccacagcccccaattcttgaggatgataaatccagagtcatgggtggtcgaggaatcttggctgtgtgctaatgatggcaggagctgtccaggtaacacagggagaccccgaacacgctgagaaatacctggagcaccagagaggtgagtcaactgctgaggggtctgcataatttattacaactttttttatagtcctttatagagtcctcaattgtatttggaattcatgggacatggcttccaaacacctttttctttttctttttytttttttttttttttttgagacggagtctcgctctgtcacccaggctggagtacactggcgtgaccttgactcgctgcaacctccacctcccgggttcaagtgattctcctgcctcaggctcccgagtagctgggattacaggtgctcaccaccacgcccagctaattttgggatttttagtagtgacaggtttcaccatattggccaggatggtctcgatctcttgacctcgtgatctgaccacctca

SEQ ID NO: 71906 - DNA, 758 bp, Homo sapiens
acatcctcgtggatcttcctggctctccttacaaggggttccttccaaacccaagcgccacaatccttaggcagattgctctgacacagaagactggtgagttctagacttgatgtgtttcatgggaaacaggaagacatttaggggaggctgtagatacacagccgctctgtttagggaaggctgtcgatacaccgctgctctgaccatcatggcgtctggtccatgctcagattctggagtgttagggtcttcgggcacatggtggatgagcgttttgcttcgtgtactcatttatttctgaaaataatgcagccccttgtagggctttctggctaattgagtggtgccatcattcatgcaattgcgcaattcacacaccaggctgccactttggcccctgcgtcaccttcaccaccacccaatgtgtcctgctcatcactgaggtttgtcatttttactytgagtctgtccattgtcatcatctccaccatcaccccttttgttttcattgccacccttgcctggggtgagtgaagacgctcttctctggcttccacccttccaaatgcccttaacccacagatgggaagaaaatgaggtggggggaaggggactttcttgcttcctcatagttctcccccatcctgtaaaggagcctgtgcttcccgactcccagggcccatgcagcatgtcaagaacaatattggacaagcttgtcagtgagggtccaggtggttccctgccactacgatgca

SEQ ID NO: 71907 - DNA, 744 bp, Homo sapiens
actgcccagtgccccaatctggagtccaccatcctgggtctagctggggacatccttgaatcagcctctgggaatcactgaaccaacatgagtcacttgctactgtgagatctcagaacacatggatcaggacagagggcagggctgtttccccaaggaaatccaaatgctttacaggaaggggagtggatgctggcccggcccaggcgaggatgaggagtaactgagctgcagaccattgtttagccctccttccacctgggagactggctgctggttctcattgcttctgtgggtctccaggtttctatcattacacagattagcacacggttccatgatcatggacccgttcagtacacaatgaaatcatttgcaaagcaccttggggtctgttagagaagggaatggatgtctgaggtatgctaagcctaatctccatcttctcaaagctccactgccactgtcccgtaagggtgggcagattcctccccattctataaaataacagctaccatttcctgagggcatactgagtgctgacaggcacatcaacatcagaccatcaccttcttatacctcaraatagtctgcagggtgactcagaagctcctggctggtaagtggcagatccagagatgaaacccagatctaactggacccaagacagaaatttctagaacagaagccacaaacgtgttagctaagtctggttatgtcaagtggaatatttctggctttggg

SEQ ID NO: 71908 - DNA, 1154 bp, Homo sapiens
tgtggtgactttttccatctctggtctctatcttatctcttgtgatgaactcaggtctataaagcatttgggcactgcctggcacataggatatgtccagaaaacactagctggtattaaaacagaggaaacatgggaactgagggtggtcagtgacatcacattgtatttcctttatggtgtccttctgagtacagaaccaaacatttcttaggcgtacaatttcctgcctccaaattaatgttatttctaaaaagtagcccgttccactcctacaaatctttgcccaaatatgtccttttcagggatgacatccttagccactgtttaaaatagcaaatttctttccaaactctgccgtccctggaatctctaccctgctttatttttctccttagcagacatgcatttctctgtttaatctgtctacttgctaattgtctcactgccctccccctccccactggagagtgaatgaaggcttaaggttttgtctgcttggtctctcctgggtcctgagtaccagtggccttacgtggcatttggtagattacatgcttaatgaaaagtgagtgaatgggctgggtgtggtgggtcacacctgtaatcctggctactcaggaggctgagacaggaggatcgcttgagcccaggaggtcraggctgcagtagggtatgagcgggccactgcacttcagcctgggcaacagagcgagaccttctgtctaaaaatatttatctatattgagtgaataaatgaatgaatggattattttagtttggcctcaatctttatagaaactcaattcaacaaacatttgagcacctgtttgttcagggccacgtgctggttgcaacctggaaggaaaagctgggcaaggcggagatccagtgctcaggaagctgagtccatgccaagatgtgataattgtataaagaactacaataggcataggtacagatctgtaaaatatgaaaacaggaaaacacatggagtcttggagggtagggaagtcttgatgagtaagattgggtctgagataaacctaaaagagggtcaagattttgacggagggctggaagggaggaacgataggaaactgaccttttttcagatctcttcttgtgcgtggcctggggttaagtgctttaca

SEQ ID NO: 71909 - DNA, 1065 bp, Homo sapiens
ctattggctatgttttgtttattacctactttttccatttaatagtatcttggagattatttggtaccagcacatgtagctcaacctcctaatactgcatgacggataatatgccatcacatggtgtcatttaatatattcattcctatttatagacattgaagttagatccatgtcttactattacacatgacttagtaatgaatgttcctgcatgtatatttggtctgcttgagcaaggatattgggagggaggatttccagcagcagaagtggtggaacaaaggcactgtgtacacctttgaaacaattaacttcaccaaaattactaaactgtcctctagaatggttaaaccaatttcctctctwccattcacacgtgagaatgcctgtggccccccagaaattatctccagcagcagcaacagagaggactggaatgccattgacaggtcccacaagtcagcaatcagcacgccattttttaaaatttatgttgctattgtatcgtaaggttcttctgaagcgaccacttcataacactgtgtagtccaatccctaagctgggcaatttttttttcccctttcaatacatcacattgattttctgtatgactttatctgcttaatacaaagtgggattgaacagttatttgtctggatttgatcattccttattaaacatttatgatttagctttcaccgcggcatcttcttgtaaggtgtttcttatttttatcattttccgtaaaggtaggattgtgttgacagccctgtaataaatgtctcttggaagagatgtgttgctgagaggtggggagggggtgggggctctgtgcatggaatggggggaaaagcttcagggaagggcagtgcaaattgtttctggactgatgccatcttttaataatagtagttaatagactgggtacaatggctgacgcccgtaatcccagtgctttgagaggccgaggccggtgtatcgcctgagtccaggagttagagaccagcctgggcaaacagcctgaggcaaaacctcatctctacaaaaaatacaaaaaatca

SEQ ID NO: 71910 - DNA, 1065 bp, Homo sapiens
ctattggctatgttttgtttattacctactttttccatttaatagtatcttggagattatttggtaccagcacatgtagctcaacctcctaatactgcatgacggataatatgccatcacatggtgtcatttaatatattcattcctatttatagacattgaagttagatccatgtcttactattacacatgacttagtaatgaatgttcctgcatgtatatttggtctgcttgagcaaggatattgggagggaggatttccagcagcagaagtggtggaacaaaggcactgtgtacacctttgaaacaattaacttcaccaaaattactaaactgtcctctagaatggttaaaccaatttcctctctaccattcacacgtgagaatgcctgtggccccccagaaattatctccagcagcagcaacagagaggactggaatgccattgacaggtcccacaagtcagcaatcagcacgccattttttaaaatttatgttgctattgtatcgtaaggttcttctgaagcgaccacttcataacactgtgtagtccaatccctaagctgggcaatttttttttcccctttcaatacatcacattgattttctgtatgactttatctgcttaatacaaagtgggattgaacagttatttgtctggatttgatcattccttattaaacatttatgatttagctttcaccgcggcatcttcttgtaaggtgtttcttatttttatcattttccgtaaaggtaggattgtgttgacagccctgtaataaatgtctcttggaagagatgtgttgctgagaggtggggagggggtgggggctctgtgcatggaatggggggaaaagcttcagggaagggcagtgcaaattgtttctggactgatgccatcttttaataatagtagttaatagactgggtacaatggctgacgcccgtaatcccagygctttgagaggccgaggccggtgtatcgcctgagtccaggagttagagaccagcctgggcaaacagcctgaggcaaaacctcatctctacaaaaaatacaaaaaatca

SEQ ID NO: 71911 - DNA, 1580 bp, Homo sapiens
attcattatgtgatgtaaagtgaaaaattagaagtacatttaagagtgacatatgagaaaatcattaaataatgcagaaaggggtaattaagattcataccaaaatgaacgtagccattatagacgatacagatttaggtttgttgacaagtccagtaaattgttaatgacaaaagttggttacaaaaggatatgtcttatgtaatatactctttatttgaatacactgtaaaatatgtaagtatatacatcagcatctctagagaaccactttggataatggcattttaggtaaccttaatattaaaaaggttgaccatctatattttgttattttctatattgttatttttcttttatgagaaggaaatgaaaggaaagcaataggagagaaagaagagcaaggaaaggaaaggaaaaagaaaagaatactgtgagatttatggagggagtgaaattttctctctctccctcttacacacacacacacacacacacacaccagttagagacagatgttttgtggcattggtttcataactttattatcctttgttaaatcaccattctcaattagtgaatgacagttattgggtgcattatgaaaaaatacccgggtgttctatgccaaattttaaccagaattctacatgctaatttgtttagaaaaaaatgaatacatgtgaatgaattttgagttagggaatataaatgataactggatggcattttacagaatccttgggtgtcccagttatttagaacagtgagtcctacactgaaaacaataggaaaacactcttataagccataccttcattttgccaattaaattttattattaaataattttttcctatgttttctaaaagagataagactgaatgaaacaatcatcctaaagagaaaagctagaattgtgtagtggcatcaggcttactagtaactctaaatactactatgtcgtggcgattaacctgtttatagaggatcctatcttttgttcaagacttatcaggagttggttctaacattcagttagtttgccctgaaatattgaattcatgctcagagcagtgagaaaagagtgtattcaaataagttgaaagagaaaacatttagtgttttgttttgtttgtttgtttgttttgcttttttagaaaacattaaagaatcaggaatcctcctaagggagagtaccttaagagttggttgctatccttgctggatatcttggctttaacactaataagtgggtaaccttttcaaacagataatgtagaaaatcagatagaatgtgtgtctcctgacttcagtgattgaagattctctctgccctaaggaactaagggaaatcgtaacttttctgagaccaaaaacacaaagagacaataatacttaaaattaatttcaccagtgccttgttaactgatgtatcatatgcatggatttttctttttttcttttttttttttgacttttattttagkttcgggggtacatgtgaaggtttgttacataggtaaactcatgtcctgggggttcgttgtacagattatttcatcccccaggtagcgccc

SEQ ID NO: 71912 - DNA, 1580 bp, Homo sapiens
attcattatgtgatgtaaagtgaaaaattagaagtacatttaagagtgacatatgagaaaatcattaaataatgcagaaaggggtaattaagattcataccaaaatgaacgtagccattatagacgatacagatttaggtttgttgacaagtccagtaaattgttaatgacaaaagttggttacaaaaggatatgtcttatgtaatatactctttatttgaatacactgtaaaatatgtaagtatatacatcagcatctctagagaaccactttggataatggcattttaggtaaccttaatattaaaaaggttgaccatctatattttgttattttctatattgttatttttcttttatgagaaggaaatgaaaggaaagcaataggagagaaagaagagcaaggaaaggaaaggaaaaagaaaagaatactgtgagatttatggagggagtgaaattttctctctctccctcttacacacacacacacacacacacacaccagttagagacagatgttttgtggcattggtttcataactttattatcctttgttaaatcaccattctcaattagtgaatgacagttattgggtgcattatgaaaaaatacccgggtgttctatgccaaattttaaccagaattctacatgctaatttgtttagaaaaaaatgaatacatgtgaatgaattttgagttagggaatataaatgataactggatggcattttacagaatccttgggtgtcccagttatttagaacagtgagtcctacactgaaaacaataggaaaacactcttataagccataccttcattttgccaattaaattttattattaaataattttttcctatgttttctaaaagagataagactgaatgaaacaatcatcctaaagagaaaagctagaattgtgtagtggcatcaggcttactagtaactctaaatactactatgtcgtggcgattaacctgtttatagaggatcctatcttttgttcaagacttatcaggagttggttctaacattcagttagtttgccctgaaatattgaattcatgctcagagcagtgagaaaagagtgtattcaaataagttgaaagagaaaacatttagtgttttgttttgtttgtttgtttgttttgcttttttagaaaacattaaagaatcaggaatcctcctaagggagagtaccttaagagttggttgctatccttgctggatatcttggctttaacactaataagtgggtaaccttttcaaacagataatgtagaaaatcagatagaatgtgtgtctcctgacttcagtgattgaagattctctctgccctaaggaactaagggaaatcgtaacttttctgagaccaaaaacacaaagagacaataatacttaaaattaatttcaccagtgccttgttaactgatgtatcatatgcatggatttttctttttttcttttttttttttgacttttattttagtttcgggggtacaygtgaaggtttgttacataggtaaactcatgtcctgggggttcgttgtacagattatttcatcccccaggtagcgccc

SEQ ID NO: 71913 - DNA, 1085 bp, Homo sapiens
tgatccactggtgctataatayactatattaaacagaatctatcagtctgatagaacattaaaagatatttcttttaaaggtggatataaaggtgcaactaaatgccaatttagggatggtacttttcagagttggggctctgtgctttaacatgttatactttgaaccaatggacattgtaagatattgggtcctagaatatacaggtttgtaaaccaagggcagagggtgagagtggctcctctcactaaaactcccttggagaatttgagcttcctggacctacagcattaagctctgctggagtagggagaatgcttcttctgggtacatagtaagcattccaataagaataaagttttagtagctccctgtcattttggcttccttgtgtatgtaggttggcagacaaagaaataagttattatactggcagttgtaattgaccttcattatcatgaggaaatagaaatattgctatacctttatcaaccatagatgatgacaattgtaaattggaaattgcagcaattacagcctgacagggccatggtaatcatgggtctttggaagtgaactagactagcagaagcactggataaacatgaggggaatatagaacaggttgtagaagaggaagatgaagaatgtcatcctgggaacaagtgtaatgacaggacccattaactcttgttcctttaacactcttgtgtttgaagaattaatgatggagtgaactcacatagagcataaactcctccacgcatggaaagatgtggactgtttctagtgctgttggtgtcttgcacgtacccctctccacttaatattcccaagagtttggattgttctataagctcctgagaatctctggctgaggacttttctttgaatatagaaaaagctaaactcacaaggtggggaaacctagaattgctgtagagaaaatgccctagagcagctctagaccagtaaagaaatgcacagcttctttgtttcttaagtgggacaactacaagtcatagaatttatacagtctcttgatggccacagcaagaatgtgcccttgatgtccactgtagta

SEQ ID NO: 71914 - DNA, 1085 bp, Homo sapiens
tgatccactggtgctataatatactatattaaacagaatctatcagtctgatagaacattaaaagatatttcttttaaaggtggatataaaggtgcaactaartgccaatttagggatggtacttttcagagttggggctctgtgctttaacatgttatactttgaaccaatggacattgtaagatattgggtcctagaatatacaggtttgtaaaccaagggcagagggtgagagtggctcctctcactaaaactcccttggagaatttgagcttcctggacctacagcattaagctctgctggagtagggagaatgcttcttctgggtacatagtaagcattccaataagaataaagttttagtagctccctgtcattttggcttccttgtgtatgtaggttggcagacaaagaaataagttattatactggcagttgtaattgaccttcattatcatgaggaaatagaaatattgctatacctttatcaaccatagatgatgacaattgtaaattggaaattgcagcaattacagcctgacagggccatggtaatcatgggtctttggaagtgaactagactagcagaagcactggataaacatgaggggaatatagaacaggttgtagaagaggaagatgaagaatgtcatcctgggaacaagtgtaatgacaggacccattaactcttgttcctttaacactcttgtgtttgaagaattaatgatggagtgaactcacatagagcataaactcctccacgcatggaaagatgtggactgtttctagtgctgttggtgtcttgcacgtacccctctccacttaatattcccaagagtttggattgttctataagctcctgagaatctctggctgaggacttttctttgaatatagaaaaagctaaactcacaaggtggggaaacctagaattgctgtagagaaaatgccctagagcagctctagaccagtaaagaaatgcacagcttctttgtttcttaagtgggacaactacaagtcatagaatttatacagtctcttgatggccacagcaagaatgtgcccttgatgtccactgtagta

SEQ ID NO: 71915 - DNA, 1085 bp, Homo sapiens
tgatccactggtgctataatatactatattaaacagaatctatcagtctgatagaacattaaaagatatttcttttaaaggtggatataaaggtgcaactaaatgccaatttagggatggtacttttcagagttggggctctgtgctttaacatgttatactttgaaccaatggacattgtaagatattgggtcctagaatatacaggtttgtaaaccaagggcagagggtgagagtggctcctctcactaaaactcccttggagaatttgagcttcctggacctacagcattaagctctgctggagtagggagaatgcttcttctgggtacatagtaagcattccaataagaataaagttttagtagctccctgtcattttggcttccttgtgtatgtaggttggcagacaaagaaataagttattatactggcagttgtaattgaccttcattatcatgaggaaatagaaatattgctatacctttatcaaccatagatgatgacaattgtaaattggaaattgcagcaattacagcctgacagggccatggtaatcatgggtctttggaagtgaactagactagcagaagcactggataaacatgaggggaatatagaacaggttgtagaagaggaagatgaagaatgtcatcctgggaacaagtgtaatgacaggacccattaactcttgttcctttaacactcttgtgtttgaagaattaatgatggagtgaactcacatagagcataaactcctccacgcatggaaagatgtggactgtttctagtgctgttggtgtcttgcacgtacccctctccacttaatattcccaagagtttggattgttctataagctcctgagaatctctggctgaggacttttctttgaatatagaaaaagctaaactcacaaggtggggaaacctagaattgctgtagagaaaatgccctagagcagctctagaccagtaaagaaatgcacagcttctttgtttcttaagtgggacaactacaagtcatagaatttatacagtctcttgatggccacagcaaraatgtgcccttgatgtccactgtagta

SEQ ID NO: 71916 - DNA, 969 bp, Homo sapiens
taacataccacagaatcaatctgcatactgattacttctgctctggtcaaattcttgctttcaggatcaggaggctttctccccacaccaaactgggcctgaggaaatagtgtcttgtcttcctgtcacccctcccgtagttgcatrtctaatgagacaaggggtgtctcaggtgaagcaggacagggaggatgccagcacttgggtgggagaggcttgaggagtgcctgttgggggatgtgttggggaaggatgacttttcacatatggctcattgtgtcgggatgatttcgttgttaaataagcacctacaggatgatttcacattccatacttctaagtttttataatttaaattctttccgccaggctgggtttttttttttttccaaactttaaatctgtggctagaattggtttgatttacataatcctgcccctgagatttagccccacccctgagagccccctcagagccacccacagccaggacacctctgctggcctccccttccccagccttccaacttgtggcaggcccctggctctggcctccccctatatgggaatgagccagctgcaccgctgctgacagtggctgggataatcctccctgagctgttccaaggattagtcctgctgccctgtgcccagctcccacacaacggggtttcggggctgtggaccctgtgccaggaaaggaagggcgcagctcctgcaatgcggagcagccagggcagtgggcaccaggctttagcctccctttctcaccctacagagggcaggcccttcagctccattctcctccaaggctgcagagggggcaggaattgggggtgacaggagagctgtaaggtctccagtgggtcattctgggcccagagatgggtgctgaagctcccacgcctgcctgtgaaaatggagtcctctctcacctgggagagccaggtgctgccccgagaaggatgc

SEQ ID NO: 71917 - DNA, 969 bp, Homo sapiens
taacataccacagaatcaatctgcatactgattacttctgctctggtcaaattcttgctttcaggatcaggaggctttctccccacaccaaactgggcctgaggaaatagtgtcttgtcttcctgtcacccctcccgtagttgcatgtctaatgagacaaggggtgtctcaggtgaagcaggacagggaggatgccagcacttgggtgggagaggcttgaggagtgcctgttgggggatgtgttggggaaggatgacttttcacatatggctcattgtgtcgggatgatttcgttgttaaataagcacctacaggatgatttcacattccatacttctaagtttttataatttaaattctttccgccaggctgggtttttttttttttccaaactttraatctgtggctagaattggtttgatttacataatcctgcccctgagatttagccccacccctgagagccccctcagagccacccacagccaggacacctctgctggcctccccttccccagccttccaacttgtggcaggcccctggctctggcctccccctatatgggaatgagccagctgcaccgctgctgacagtggctgggataatcctccctgagctgttccaaggattagtcctgctgccctgtgcccagctcccacacaacggggtttcggggctgtggaccctgtgccaggaaaggaagggcgcagctcctgcaatgcggagcagccagggcagtgggcaccaggctttagcctccctttctcaccctacagagggcaggcccttcagctccattctcctccaaggctgcagagggggcaggaattgggggtgacaggagagctgtaaggtctccagtgggtcattctgggcccagagatgggtgctgaagctcccacgcctgcctgtgaaaatggagtcctctctcacctgggagagccaggtgctgccccgagaaggatgc

SEQ ID NO: 71918 - DNA, 525 bp, Homo sapiens
gccactgtgtcctagaggctggaatgggaacacatagggcgagattgattgttaattgctagcatgaaccgcgtgggcttctcagggtctagagtggagagaaatcggtaagaattggtggcaygcctgtcagaactccccagaccaagctaagcaaaaattaaccaatcagtagagcagccttcggagtaagggctaaaatgatgtcctcagggcctggttttgctttccttccatgtcagtttgcttctttgggtctggctgcattcccagacaggccatgctctcgtggtagcaaggtgacatgacacagggtcaggtccagcaggaaagaatgctgtcctgtgtccccacttcctccagaagccacactcactcatcccacctggcttggtcctcatgtctatcccagaatccattaatggggccaggggactatgacacaccacttggcttagactgaggagctctgtgggcagccccacctgaagctctgggactaagcctgcgagagagatggattcc

SEQ ID NO: 71919 - DNA, 525 bp, Homo sapiens
gccactgtgtcctagaggctggaatgggaacacatagggcgagattgattgttaattgctagcatgaaccgcgtgggcttctcagggtctagagtggagagaaatcggtaagaattggtggcacgcctgtcagaactccccagaccaagctaagcaaaarttaaccaatcagtagagcagccttcggagtaagggctaaaatgatgtcctcagggcctggttttgctttccttccatgtcagtttgcttctttgggtctggctgcattcccagacaggccatgctctcgtggtagcaaggtgacatgacacagggtcaggtccagcaggaaagaatgctgtcctgtgtccccacttcctccagaagccacactcactcatcccacctggcttggtcctcatgtctatcccagaatccattaatggggccaggggactatgacacaccacttggcttagactgaggagctctgtgggcagccccacctgaagctctgggactaagcctgcgagagagatggattcc

SEQ ID NO: 71920 - DNA, 525 bp, Homo sapiens
gccactgtgtcctagaggctggaatgggaacacatagggcgagattgattgttaattgctagcatgaaccgcgtgggcttctcagggtctagagtggagagaaatcggtaagaattggtggcacgcctgtcagaactccccagaccaagctaagcaaaaattaaccaatcagtagagcagccttcggagtaagggctaaaatgatgtcctcagggcctggttttgctttccttccatgtcagtttgcttctttgggtctggctgcattcccagacaggccatgctctcgtggtagcaaggtgacatgacacagggtcaggtccagcaggaaagaatgctgtcctgtgtccccacttcctccagaagccacactcacycatcccacctggcttggtcctcatgtctatcccagaatccattaatggggccaggggactatgacacaccacttggcttagactgaggagctctgtgggcagccccacctgaagctctgggactaagcctgcgagagagatggattcc

SEQ ID NO: 71921 - DNA, 757 bp, Homo sapiens
taagtttcctgagtttttggatatgacaacaagcagcgggggcccagcttactgagaagagtgaattacagttttttcaagatccagaatatccacatcagaaaagctcatggccggcaagtgtgatatcaacacacgttgatatcacagcatcaaagtaaaaactatgtaattttcaacatccaaataaagccttctttgaaaagcaccgattttcacatgagaatggtggacagatttccacatcctggcccgagatttctcaccgatcctgttgctgttgtctcttcccaggccaacctgtttctgcctggcctcttcctccaaggccaagaggggtcctgccaaagtccaggtcagagagtgtcctccctctgctcctgtctcattcagagtcaaagccaaaatcactggagtggcccacatcactgccccccattgcttctctgaccatatcttctttcgtgcttctttatgtctctccagacacactgggtgtcaagagtgctgtcaccccagggcccttgcacagctgattccctctrtaacccttggttcacatgttgccttctcagtcagaactcctcccacatactcacctttggcctcaagctctcccagtcctcctccccctactgtgtttttcttctgtccttagtatttctcaccctctaaggttatatataatctgcctctctcctgcttggagtggaattctatgagggcaggatctttgttttgttcatgaatggatccc

SEQ ID NO: 71922 - DNA, 757 bp, Homo sapiens
taagtttcctgagtttttggatatgacaacaagcagcgggggcccagcttactgagaagagtgaattacagttttttcaagatccagaatatccacatcagaaaagctcatggccggcaagtgtgatatcaacacacgttgatatcacagcatcaaagtaaaaactatgtaattttcaacatccaaataaagccttctttgaaaagcaccgattttcacatgagaatggtggacagatttccacatcctggcccgagatttctcaccgatcctgttgctgttgtctcttcccaggccaacctgtttctgcctggcctcttcctccaaggccaagaggggtcctgccaaagtccaggtcagagagtgtcctccctctgctcctgtctcattcagagtcaaagccaaaatcactggagtggcccacatcactgccccccattgcttctctgaccatatcttctttcgtgcttctttatgtctctccagacacactgggtgtcaagagtgctgtcaccccagggcccttgcacagctgattccctctawaacccttggttcacatgttgccttctcagtcagaactcctcccacatactcacctttggcctcaagctctcccagtcctcctccccctactgtgtttttcttctgtccttagtatttctcaccctctaaggttatatataatctgcctctctcctgcttggagtggaattctatgagggcaggatctttgttttgttcatgaatggatccc

SEQ ID NO: 71923 - DNA, 757 bp, Homo sapiens
taagtttcctgagtttttggatatgacaacaagcagcgggggcccagcttactgagaagagtgaattacagttttttcaagatccagaatatccacatcagaaaagctcatggccggcaagtgtgatatcaacacacgttgatatcacagcatcaaagtaaaaactatgtaattttcaacatccaaataaagccttctttgaaaagcaccgattttcacatgagaatggtggacagatttccacatcctggcccgagatttctcaccgatcctgttgctgttgtctcttcccaggccaacctgtttctgcctggcctcttcctccaaggccaagaggggtcctgccaaagtccaggtcagagagtgtcctccctctgctcctgtctcattcagagtcaaagccaaaatcactggagtggcccacatcactgccccccattgcttctctgaccatatcttctttcgtgcttctttatgtctctccagacacactgggtgtcaagagtgctgtcaccccagggcccttgcacagctgattccctctatwacccttggttcacatgttgccttctcagtcagaactcctcccacatactcacctttggcctcaagctctcccagtcctcctccccctactgtgtttttcttctgtccttagtatttctcaccctctaaggttatatataatctgcctctctcctgcttggagtggaattctatgagggcaggatctttgttttgttcatgaatggatccc

SEQ ID NO: 71924 - DNA, 757 bp, Homo sapiens
taagtttcctgagtttttggatatgacaacaagcagcgggggcccagcttactgagaagagtgaattacagttttttcaagatccagaatatccacatcagaaaagctcatggccggcaagtgtgatatcaacacacgttgatatcacagcatcaaagtaaaaactatgtaattttcaacatccaaataaagccttctttgaaaagcaccgattttcacatgagaatggtggacagatttccacatcctggcccgagatttctcaccgatcctgttgctgttgtctcttcccaggccaacctgtttctgcctggcctcttcctccaaggccaagaggggtcctgccaaagtccaggtcagagagtgtcctccctctgctcctgtctcattcagagtcaaagccaaaatcactggagtggcccacatcactgccccccattgcttctctgaccatatcttctttcgtgcttctttatgtctctccagacacactgggtgtcaagagtgctgtcaccccagggcccttgcacagctgattccctctatawcccttggttcacatgttgccttctcagtcagaactcctcccacatactcacctttggcctcaagctctcccagtcctcctccccctactgtgtttttcttctgtccttagtatttctcaccctctaaggttatatataatctgcctctctcctgcttggagtggaattctatgagggcaggatctttgttttgttcatgaatggatccc

SEQ ID NO: 71925 - DNA, 665 bp, Homo sapiens
tttgtacgcattgtctttgcaaataacaaattattccaaaatttaacagcttgataacatttatttttcagcttctgaggtcaggaaaccaagcatggcctagctgggtgctctggctcgaggactctcacaaggctgcaatcaaggtatactggcaggagctgaatgcattgcaaggctcaactgggggaagatctgcttccaagttcacaaacatggctattggcaggcctccagtccttgctggctgttggctggagacatcctttccttgccatatgagcctcttcagagggcagctcttgacagagcagctggcttccttcagagcaagtgagggagagagcaagagagggcactcaagatagaagccacagtttttcatagcctaatcctggaagtgacacctcatcaccattgctgtattatcctcattagaggcaagtccctaggtccagtccaggcttaggaagagggggtcgcacaagggtaccaacagcggaaggcagggatcaytgaggacctttttaaatggtttttacatatgtttattgaaaacaagatgttgtagagaggatttttttcctaattgtgcagactgtatagctgagtccatgaaagtgtgagtaaactaaagacaactttatagctttatggtagagccg

SEQ ID NO: 71926 - DNA, 688 bp, Homo sapiens
ttgaatgacaaatatgaatcagagactgtgccaaatgctgtacacaccttttcttatttaattctcaccacaactctctgaggcacactcaattgttatccccaggtgagggctgaggaaccccaggctatgaaaggtagcaggacttcttacttacaaaacatttctggggcttgaagtcctgaatccacgttgtgtaccacctctcaacaattatgactgtaggagctaaacttttcctttgccctcttgaagtctcactgaaaaaccaactcacaaatggcagattaataagagaaaaggcrtttctcaaggagctaaaagtagaactgacactctatcgagccatcctactacagggtatcttctcaaagaaaaagaagttatgatatcagaaagacacctgtatgcacacatttatcacagcacaattcacaactacaaaaacatggaaccaacctaagtgtccagcaaccgagtagataaagaaaatgtggtatatctccaccacagaatactaatcagccataaaaagaacaaaataatgtattttgcagcaacttggatggaactggaggccattattctaaatgaagtaactcagggatggaaaaccaaatactgtatgttctcacaagtggaagctaaactatgggtatgcaaaggcatatagagtggtataaagcag

SEQ ID NO: 71927 - DNA, 688 bp, Homo sapiens
ttgaatgacaaatatgaatcagagactgtgccaaatgctgtacacaccttttcttatttaattctcaccacaactctctgaggcacactcaattgttatccccaggtgagggctgaggaaccccaggctatgaaaggtagcaggacttcttacttacaaaacatttctggggcttgaagtcctgaatccacgttgtgtaccacctctcaacaattatgactgtaggagctaaacttttcctttgccctcttgaagtctcactgaaaaaccaactcacaaatggcagattaataagagaaaaggcatttctcaaggagctaaaagtagaactgacactctatcgagccatcctactacagggtatcttctcaaagaaaaagaagttatgatatcagaaagacacctgtatgcacacatttatcacascacaattcacaactacaaaaacatggaaccaacctaagtgtccagcaaccgagtagataaagaaaatgtggtatatctccaccacagaatactaatcagccataaaaagaacaaaataatgtattttgcagcaacttggatggaactggaggccattattctaaatgaagtaactcagggatggaaaaccaaatactgtatgttctcacaagtggaagctaaactatgggtatgcaaaggcatatagagtggtataaagcag

SEQ ID NO: 71928 - DNA, 731 bp, Homo sapiens
ggacctggagacaggaggcagaattttcaagtctaaactccatcatttaccaggtgcgggaactcaggaaagccactgacacaccctcagtctgtttgcttattccatttggccaggactggggcagagacctcattcctggtgatgcctggtgctcactcagtgccttactgagggtggcctggtactcaggaagaagcctcttgtgtagctgcatgtaaacagcttccaccagtgtgctttacagatcagaccctaagcaagcctccttccttcctgtccaggagggcctctcattaacaaattctagagtctaagcttaaagtcagtgcctgaccatcaggaaggctgaagccctcgtgccccagcagcattcctgtggtcgctggtggaattgtttattccattttggatatgaaaagagaaagctttatgtgcctcattttccaggaatgtctcatttagattagctgtttgtatgttgttggtccagccacctccaccccaccccccaaaaaactacaaattacatagatatgtgaataaaacagccaaaatttgaccrttggcatcgatgctgagcaccatcactcactttgcttaaggatagggtatcttttaaaatctcgtattggcttcagctcagttccctgaaaatatagaggagctacagaaccccctagggctctaggagtgggactaagcaggaaactggggaaaggactttgaag

SEQ ID NO: 71929 - DNA, 2167 bp, Homo sapiens
aatcaatttcaaggttgtgccctcatctcctagattcgaaaatcacacagatgatccaagttcatgagaatagcagacatgaacaaacctacttcctacactttacagatggggatactgaggctttgggttcaagcaggtcctcaaatattaattttgctaataagaaaagcaaacaaaatgaggatttatttctgggccagatgctatgccaaggatcagggcagctgccaacacttgcccatttgtaagggacctgggacagtacacatggcttggtgagcagagtgtaggccggatttcagcccccgtttgccgcccagccaggttctcttaggcagtgtgtgacaggcacaactgtacatggcagccctactcagcactctccttatgaagaagacactatttgtagcatcaatttagagacaagaaaaatggggattagagaaagtaatttgcccaactttatgtaactataacatacaagtctctagagtttgtgatcttagaaaacagaataacacaatcgttatctgcctcactccattttgtttttggagcagccaaatattttattggtttagggttacttggcaaaaaaaaaaaaaaattgggtttctaggaatggttaataacatattaactaacacaatgtcaaagatctagttgtatgtttagaagcacaaaatcatgatgggcagatctaggggagacatttcatccagtttcacagcctcctaccccacaccaagaatttgagaagtgatttgcccaaggtctcacctggagtcaggggctgagccaacgctggaacccaggccctgacactgaggccagtggttcccattccacctggccaagtatggatgcccttccagctttgtgctgtgtctggagacagggtaggcagaacagggaaaggaaggtccaaggcagcccctctagagtccaagtccttaaccaaaagctcaggaccagggcttggaaggaaaaaggctgaaacaagaaccactgtatgggcccttgccaacttactgccctgctccgtccctgagatgaaaaggccacctcattccacaaccgtattctaggttttcataggcaagaacccagccacagctctctgcacagcaatgcattcttactgttacataagggaaggagtgctctaccaagggaagctcccacattgtcttctcccatcagcccttaaacagacccattaccccgataaaaaccaaatggcctgtaatgccctactgcrcaatgcaccatgcctctaagcctttgcccgtgctgtcacctctgcctgtccccacttcctcctgatggcattcttggcttgcctaggtcctagggatcccccaagactcagcacgggaagtaccccttctaggaaggctactctaatacctcccaccttgtgctctcaacacatgaactcctgaactaaatgtctttccttatgggctcccaaaatgctttcctttctctctcattgaatgagatattgtgactgtttctttcccctcatggcttgtaaaggacagggaccattttatattatattaacactaggaatcatatagcccttgtgcactgcacactgtataatagatgctcaataaacatgatgaacgaatgaatgaatgaatggggaatgaatgagtaaatgaatggggaatgcttattaagcacatgaagagtagatgtggtaagttgtaaagtgctgccccactgccaaggatagccacagccaacagtgggtgcttaataaaacttagtttgaatacaactaaaaggccagccaggacccccagatggctgagggcatcctgatggtgcctccagccatctggactgtgaacaccattaagcacatccatcaattcagcagcatctctgggcctcagcccagaaggagttcatgcacccacagcctatggtcctgcaagaataatgatgagggaggaagagtaataaagagaggacggtggaataactaagcagccaccaggacatttaccggagccagggggagcccctggaacctcagacaggacctggagaaacgcatctgcagaaatcaggagggcttgtcagaaaccaatggcacacacagaagtcaaggttagaagggactgtttttctcccgatgacttccagg

SEQ ID NO: 71930 - DNA, 2167 bp, Homo sapiens
aatcaatttcaaggttgtgccctcatctcctagattcgaaaatcacacagatgatccaagttcatgagaatagcagacatgaacaaacctacttcctacactttacagatggggatactgaggctttgggttcaagcaggtcctcaaatattaattttgctaataagaaaagcaaacaaaatgaggatttatttctgggccagatgctatgccaaggatcagggcagctgccaacacttgcccatttgtaagggacctgggacagtacacatggcttggtgagcagagtgtaggccggatttcagcccccgtttgccgcccagccaggttctcttaggcagtgtgtgacaggcacaactgtacatggcagccctactcagcactctccttatgaagaagacactatttgtagcatcaatttagagacaagaaaaatggggattagagaaagtaatttgcccaactttatgtaactataacatacaagtctctagagtttgtgatcttagaaaacagaataacacaatcgttatctgcctcactccattttgtttttggagcagccaaatattttattggtttagggttacttggcaaaaaaaaaaaaaaattgggtttctaggaatggttaataacatattaactaacacaatgtcaaagatctagttgtatgtttagaagcacaaaatcatgatgggcagatctaggggagacatttcatccagtttcacagcctcctaccccacaccaagaatttgagaagtgatttgcccaaggtctcacctggagtcaggggctgagccaacgctggaacccaggccctgacactgaggccagtggttcccattccacctggccaagtatggatgcccttccagctttgtgctgtgtctggagacagggtaggcagaacagggaaaggaaggtccaaggcagcccctctagagtccaagtccttaaccaaaagctcaggaccagggcttggaaggaaaaaggctgaaacaagaaccactgtatgggcccttgccaacttactgccctgctccgtccctgagatgaaaaggccacctcattccacaaccgtattctaggttttcataggcaagaacccagccacagctctctgcacagcaatgcattcttactgttacataagggaaggagtgctctaccaagggaagctcccacattgtcttctcccatcagcccttaaacagacccattaccccgataaaaaccaaatggcctgtaatgccctactgcacaatgcaccatgcctctaagcctttgcccgtgctgtcacctctgcctgtccccacttcctcctgatggcattcttggcttgcctaggtcctagggatcccccaagactcagcacgggaagtaccccttctaggaaggctactctaatacctcccaccttgtgctctcaacacatgaactcctgaactaaatgtctttccttatgggctcccaaaatgctttcctttctcwctcattgaatgagatattgtgactgtttctttcccctcatggcttgtaaaggacagggaccattttatattatattaacactaggaatcatatagcccttgtgcactgcacactgtataatagatgctcaataaacatgatgaacgaatgaatgaatgaatggggaatgaatgagtaaatgaatggggaatgcttattaagcacatgaagagtagatgtggtaagttgtaaagtgctgccccactgccaaggatagccacagccaacagtgggtgcttaataaaacttagtttgaatacaactaaaaggccagccaggacccccagatggctgagggcatcctgatggtgcctccagccatctggactgtgaacaccattaagcacatccatcaattcagcagcatctctgggcctcagcccagaaggagttcatgcacccacagcctatggtcctgcaagaataatgatgagggaggaagagtaataaagagaggacggtggaataactaagcagccaccaggacatttaccggagccagggggagcccctggaacctcagacaggacctggagaaacgcatctgcagaaatcaggagggcttgtcagaaaccaatggcacacacagaagtcaaggttagaagggactgtttttctcccgatgacttccagg

SEQ ID NO: 71931 - DNA, 2167 bp, Homo sapiens
aatcaatttcaaggttgtgccctcatctcctagattcgaaaatcacacagatgatccaagttcatgagaatagcagacatgaacaaacctacttcctacactttacagatggggatactgaggctttgggttcaagcaggtcctcaaatattaattttgctaataagaaaagcaaacaaaatgaggatttatttctgggccagatgctatgccaaggatcagggcagctgccaacacttgcccatttgtaagggacctgggacagtacacatggcttggtgagcagagtgtaggccggatttcagcccccgtttgccgcccagccaggttctcttaggcagtgtgtgacaggcacaactgtacatggcagccctactcagcactctccttatgaagaagacactatttgtagcatcaatttagagacaagaaaaatggggattagagaaagtaatttgcccaactttatgtaactataacatacaagtctctagagtttgtgatcttagaaaacagaataacacaatcgttatctgcctcactccattttgtttttggagcagccaaatattttattggtttagggttacttggcaaaaaaaaaaaaaaattgggtttctaggaatggttaataacatattaactaacacaatgtcaaagatctagttgtatgtttagaagcacaaaatcatgatgggcagatctaggggagacatttcatccagtttcacagcctcctaccccacaccaagaatttgagaagtgatttgcccaaggtctcacctggagtcaggggctgagccaacgctggaacccaggccctgacactgaggccagtggttcccattccacctggccaagtatggatgcccttccagctttgtgctgtgtctggagacagggtaggcagaacagggaaaggaaggtccaaggcagcccctctagagtccaagtccttaaccaaaagctcaggaccagggcttggaaggaaaaaggctgaaacaagaaccactgtatgggcccttgccaacttactgccctgctccgtccctgagatgaaaaggccacctcattccacaaccgtattctaggttttcataggcaagaacccagccacagctctctgcacagcaatgcattcttactgttacataagggaaggagtgctctaccaagggaagctcccacattgtcttctcccatcagcccttaaacagacccattaccccgataaaaaccaaatggcctgtaatgccctactgcacaatgcaccatgcctctaagcctttgcccgtgctgtcacctctgcctgtccccacttcctcctgatggcattcttggcttgcctaggtcctagggatcccccaagactcagcacgggaagtaccccttctaggaaggctactctaatacctcccaccttgtgctctcaacacatgaactcctgaactaaatgtctttccttatgggctcccaaaatgctttcctttctctctcattgaatgagatattgtgactgtttctttcccctcatggcttgtaaaggacagggaccattttatattatattaacactaggaatcatatagcccttgtgcactgcacactgtataatagatgctcaataaacatgatgaacgaatgaatgaatgaatggggaatgaatgagtaaatgaatggggaatgcttattaagcacatgaagagtagatgtggtmagttgtaaagtgctgccccactgccaaggatagccacagccaacagtgggtgcttaataaaacttagtttgaatacaactaaaaggccagccaggacccccagatggctgagggcatcctgatggtgcctccagccatctggactgtgaacaccattaagcacatccatcaattcagcagcatctctgggcctcagcccagaaggagttcatgcacccacagcctatggtcctgcaagaataatgatgagggaggaagagtaataaagagaggacggtggaataactaagcagccaccaggacatttaccggagccagggggagcccctggaacctcagacaggacctggagaaacgcatctgcagaaatcaggagggcttgtcagaaaccaatggcacacacagaagtcaaggttagaagggactgtttttctcccgatgacttccagg

SEQ ID NO: 71932 - DNA, 2167 bp, Homo sapiens
aatcaatttcaaggttgtgccctcatctcctagattcgaaaatcacacagatgatccaagttcatgagaatagcagacatgaacaaacctacttcctacactttacagatggggatactgaggctttgggttcaagcaggtcctcaaatattaattttgctaataagaaaagcaaacaaaatgaggatttatttctgggccagatgctatgccaaggatcagggcagctgccaacacttgcccatttgtaagggacctgggacagtacacatggcttggtgagcagagtgtaggccggatttcagcccccgtttgccgcccagccaggttctcttaggcagtgtgtgacaggcacaactgtacatggcagccctactcagcactctccttatgaagaagacactatttgtagcatcaatttagagacaagaaaaatggggattagagaaagtaatttgcccaactttatgtaactataacatacaagtctctagagtttgtgatcttagaaaacagaataacacaatcgttatctgcctcactccattttgtttttggagcagccaaatattttattggtttagggttacttggcaaaaaaaaaaaaaaattgggtttctaggaatggttaataacatattaactaacacaatgtcaaagatctagttgtatgtttagaagcacaaaatcatgatgggcagatctaggggagacatttcatccagtttcacagcctcctaccccacaccaagaatttgagaagtgatttgcccaaggtctcacctggagtcaggggctgagccaacgctggaacccaggccctgacactgaggccagtggttcccattccacctggccaagtatggatgcccttccagctttgtgctgtgtctggagacagggtaggcagaacagggaaaggaaggtccaaggcagcccctctagagtccaagtccttaaccaaaagctcaggaccagggcttggaaggaaaaaggctgaaacaagaaccactgtatgggcccttgccaacttactgccctgctccgtccctgagatgaaaaggccacctcattccacaaccgtattctaggttttcataggcaagaacccagccacagctctctgcacagcaatgcattcttactgttacataagggaaggagtgctctaccaagggaagctcccacattgtcttctcccatcagcccttaaacagacccattaccccgataaaaaccaaatggcctgtaatgccctactgcacaatgcaccatgcctctaagcctttgcccgtgctgtcacctctgcctgtccccacttcctcctgatggcattcttggcttgcctaggtcctagggatcccccaagactcagcacgggaagtaccccttctaggaaggctactctaatacctcccaccttgtgctctcaacacatgaactcctgaactaaatgtctttccttatgggctcccaaaatgctttcctttctctctcattgaatgagatattgtgactgtttctttcccctcatggcttgtaaaggacagggaccattttatattatattaacactaggaatcatatagcccttgtgcactgcacactgtataatagatgctcaataaacatgatgaacgaatgaatgaatgaatggggaatgaatgagtaaatgaatggggaatgcttattaagcacatgaagagtagatgtggtaagttgtaaagtgctgccccactgccaaggatagccacagccaacagtgggtgcttaataaaacttagtttgaatacaactaaaaggccagccaggacccccagatggctgagggcatcctgatggtgcctccagccatctggactgtgaacaccattaagcacatccatcaattcagcagcatctctgggcctcagcccagaaggagttcatgcacccacrgcctatggtcctgcaagaataatgatgagggaggaagagtaataaagagaggacggtggaataactaagcagccaccaggacatttaccggagccagggggagcccctggaacctcagacaggacctggagaaacgcatctgcagaaatcaggagggcttgtcagaaaccaatggcacacacagaagtcaaggttagaagggactgtttttctcccgatgacttccagg

SEQ ID NO: 71933 - DNA, 769 bp, Homo sapiens
tatttcatattctcagtgcacaatcgacctgcttaagtactgccattaatattcacaatgtggctgttacaaagagaagcatgttgagagagccattcrcatttcaagtttttcaaggaaaaaaactagacattgcttagtaaagaccctattggtaacacataacagggcctccttcaaataggctggaggaggggaaagaaaaatcactgtgatgacatactcctaactctgtgacaggctgatagccagacctcagctagtgctgaaatgagaaatctgtgagaaattaggaacccagggggttaggaatacctctccatctttgcttttttctaaatacagacagttcccagcttatgatggtttgacttaagatggttgcaaaggcaatacacatttggtagaaaccatatttcaggtacccatgcaaccattctgtttttcacttttagtatagttttcaataaattacatgagctattcaatattttattataaaataggctttgtgttaaatagatgattttgcccaaatgtaagctaatctaagtgttctgagcacactgaaggcacgctaagttatgatgttcagtaggttaggtgtattaaatgtatttgtgacttagaatattttcaacatcatgcaactctatgatgggtttattgggacatcgaggaacatctgtagcccaatgcccttcacttctctccctctctttctacagaactgcttccatcgctcccatttactcatacacaaaacggc

SEQ ID NO: 71934 - DNA, 994 bp, Homo sapiens
cgctgtttctttccttatgctstttctttccaacataatacagatgtattctactagctgacagacttttaaagtagaggccacttttaaaagcctgggctcccatgagaaggaaatctgcaggtataagatgggtttgtcagtcagcagaggcatgctattgagaaaaggaggcaacctggggagggggtgttagaagagagcttgggattcagttcttctaaccaggagagctgacaagtaacaaaatgagactccttctgttgtctgttgcagtagacaaagcaagatgcttagttaacagcagcaacccagtgcctgtaattttcaagtccttggaggcacaccatgtcacccaaggtaagccaggggacacaggagggaagcaagagaagccagggagaatctatttcctgtgtcccctgtaggtgtttgactcacctaaagttaacactaatagaacatttgctcagaaatgtcatcgctgaaataaacgtgttaaatttaaacttgactgccccaattcatctgttatgcaattgaactggaaacagctcagacttaaaaggcatctccaagtttttctcagccaacaagacttaggccactttgttttctcagatttttcagccttgtccaatttttggataaaaatcctttttgaaaacttcagcagccatattattttcttctccagtcatcaacttataacgtaaagacaaagctgtggggaaaatctaaagttgcgtcaaatttttattttctagccagctacagctctagtctaaagctctttcttttggggagaaaatcccatttgcacatttcctcttagttgggtggacttacccatatatacttgggtgacattcaggaggctactttgtgttttggctgtgtattctaatttttcttccggtactatatacagcaagagaaggggatgttgttcagctcttgttctacctagaacccaactgcacttttgcaagag

SEQ ID NO: 71935 - DNA, 994 bp, Homo sapiens
cgctgtttctttccttatgctgtttctttccaacataatacagatgtattctactagctgacagacttttaaagtagaggccacttttaaaagcctgggctcccaygagaaggaaatctgcaggtataagatgggtttgtcagtcagcagaggcatgctattgagaaaaggaggcaacctggggagggggtgttagaagagagcttgggattcagttcttctaaccaggagagctgacaagtaacaaaatgagactccttctgttgtctgttgcagtagacaaagcaagatgcttagttaacagcagcaacccagtgcctgtaattttcaagtccttggaggcacaccatgtcacccaaggtaagccaggggacacaggagggaagcaagagaagccagggagaatctatttcctgtgtcccctgtaggtgtttgactcacctaaagttaacactaatagaacatttgctcagaaatgtcatcgctgaaataaacgtgttaaatttaaacttgactgccccaattcatctgttatgcaattgaactggaaacagctcagacttaaaaggcatctccaagtttttctcagccaacaagacttaggccactttgttttctcagatttttcagccttgtccaatttttggataaaaatcctttttgaaaacttcagcagccatattattttcttctccagtcatcaacttataacgtaaagacaaagctgtggggaaaatctaaagttgcgtcaaatttttattttctagccagctacagctctagtctaaagctctttcttttggggagaaaatcccatttgcacatttcctcttagttgggtggacttacccatatatacttgggtgacattcaggaggctactttgtgttttggctgtgtattctaatttttcttccggtactatatacagcaagagaaggggatgttgttcagctcttgttctacctagaacccaactgcacttttgcaagag

SEQ ID NO: 71936 - DNA, 994 bp, Homo sapiens
cgctgtttctttccttatgctgtttctttccaacataatacagatgtattctactagctgacagacttttaaagtagaggccacttttaaaagcctgggctcccatgagaaggaaatctgcaggtataagatgggtttgtcagtcagcagaggcatgctattgagaaaaggaggcaacctggggagggggtgttagaagagagcttgggattcagttcttctaaccaggagagctgacaagtaacaaaatgagactccttctgttgtctgttgcagtagacaaagcaagatgcttagttaacagcagcaacccagtgcctgtaattttcaagtccttggaggcacaccatgtcacccaaggtaagccaggggacacaggagggaagcaagagaagccagggagaatctatttcctgtgtcccctgtaggtgtttgactcacctaaagttaacactaatagaacatttgctcagaaatgtcatcgctgaaataaacgtgttaaatttaaacttgactgccccaattcatctgttatgcaattgaactggaaacagctcagacttaaaaggcatctccaagtttttctcagccaacaagacttaggccactttgttttctcagattkttcagccttgtccaatttttggataaaaatcctttttgaaaacttcagcagccatattattttcttctccagtcatcaacttataacgtaaagacaaagctgtggggaaaatctaaagttgcgtcaaatttttattttctagccagctacagctctagtctaaagctctttcttttggggagaaaatcccatttgcacatttcctcttagttgggtggacttacccatatatacttgggtgacattcaggaggctactttgtgttttggctgtgtattctaatttttcttccggtactatatacagcaagagaaggggatgttgttcagctcttgttctacctagaacccaactgcacttttgcaagag

SEQ ID NO: 71937 - DNA, 994 bp, Homo sapiens
cgctgtttctttccttatgctgtttctttccaacataatacagatgtattctactagctgacagacttttaaagtagaggccacttttaaaagcctgggctcccatgagaaggaaatctgcaggtataagatgggtttgtcagtcagcagaggcatgctattgagaaaaggaggcaacctggggagggggtgttagaagagagcttgggattcagttcttctaaccaggagagctgacaagtaacaaaatgagactccttctgttgtctgttgcagtagacaaagcaagatgcttagttaacagcagcaacccagtgcctgtaattttcaagtccttggaggcacaccatgtcacccaaggtaagccaggggacacaggagggaagcaagagaagccagggagaatctatttcctgtgtcccctgtaggtgtttgactcacctaaagttaacactaatagaacatttgctcagaaatgtcatcgctgaaataaacgtgttaaatttaaacttgactgccccaattcatctgttatgcaattgaactggaaacagctcagacttaaaaggcatctccaagtttttctcagccaacaagacttaggccactttgttttctcagatttttcagccttgtccaatttttggmtaaaaatcctttttgaaaacttcagcagccatattattttcttctccagtcatcaacttataacgtaaagacaaagctgtggggaaaatctaaagttgcgtcaaatttttattttctagccagctacagctctagtctaaagctctttcttttggggagaaaatcccatttgcacatttcctcttagttgggtggacttacccatatatacttgggtgacattcaggaggctactttgtgttttggctgtgtattctaatttttcttccggtactatatacagcaagagaaggggatgttgttcagctcttgttctacctagaacccaactgcacttttgcaagag

SEQ ID NO: 71938 - DNA, 994 bp, Homo sapiens
cgctgtttctttccttatgctgtttctttccaacataatacagatgtattctactagctgacagacttttaaagtagaggccacttttaaaagcctgggctcccatgagaaggaaatctgcaggtataagatgggtttgtcagtcagcagaggcatgctattgagaaaaggaggcaacctggggagggggtgttagaagagagcttgggattcagttcttctaaccaggagagctgacaagtaacaaaatgagactccttctgttgtctgttgcagtagacaaagcaagatgcttagttaacagcagcaacccagtgcctgtaattttcaagtccttggaggcacaccatgtcacccaaggtaagccaggggacacaggagggaagcaagagaagccagggagaatctatttcctgtgtcccctgtaggtgtttgactcacctaaagttaacactaatagaacatttgctcagaaatgtcatcgctgaaataaacgtgttaaatttaaacttgactgccccaattcatctgttatgcaattgaactggaaacagctcagacttaaaaggcatctccaagtttttctcagccaacaagacttaggccactttgttttctcagatttttcagccttgtccaatttttggataaaaatcctttttgaaaacttcagcagccatattattttcttctccagtcatcaacttataacgtaaagacaaagctgtggggaaaatctaaagttgcgtcaaatttttattttctagccagctacagctctagtctaaagctctttcttttggggagaaaatcccatttgcacatttcctcttagttgggtggacttacccatatatacttgggtgacattcaggaggctactttgtgttttggctgtgtattckaatttttcttccggtactatatacagcaagagaaggggatgttgttcagctcttgttctacctagaacccaactgcacttttgcaagag

SEQ ID NO: 71939 - DNA, 613 bp, Homo sapiens
tcacaaaaagaggtttgttttggcagttgtgcacaaacctgctgcgaggcagctggtgccctggtaaaaggtggcagagcaaatgcagaaccacacaggtgccgggtacctcctttctgtggtcaaagaaaataatcatcaccctgcaaaagggttggacaaatataaataggagaaaattgaaatccaagatagttgagaagattataagtgtatcctactgatttaaacgagttcacacctatgaaactagatgaattatttctcacagaagacmcggagaaaatggtgattagaatctctgcaccagtttctgtgatttttttgagacatcctgaagatgagaggtgagtagacagcagatgggcagggccagcatggtttttgtctggttatttatttctgtggaataagttcctagaaataggatgtctctctgggtcaaaaggtatgtacactttcacttttttttttttttttttttgagacatagtgtcactctgtcacccaggctggagtgcaatggcactatctccgatccctggaacttctgcctcccaggttcaagcgctcctcctgcctcagcttccccagtagctgggattacaggtac

SEQ ID NO: 71940 - DNA, 662 bp, Homo sapiens
tctgcaaaacagatgaaattaactactgtaacagacaaatagagagtgtagttctcagcgcaaatgtgttaccatagcagtcatgcttaaacacagctgatagctccaagtcaagcctcagccacctgccaataccaatgactttctctctcactgagcctccctgctcctggttgctgctatctacctctgagaagggtgaggacggtgcagagacacccactgggcaaggaggttatgggtgaggaacaggctgagtccctgatgccccagatggaacagatgctgatatcacaaagtgtgtttccacgactgggtatcccaacaaagctggacaccattgtgggctgcaggaatacctgttacggggcatccaggcctggagagcagacagcaatggagctaagaaaaggtagcaattccctccgggctgaggatactcccagtaaaaggaatggttgygattgtgggccctgctgtgtcaggaagtagaatcagatggaagaagtttgtttgggatgacatgaattggggacttaactgtgtaaacatagactttgcagtcatttgaaggagcaaatatttatttgtgtgtcttctatatggctctggcatcacagagacctagatttgaatctgggttcaggcacctagcagttcca

SEQ ID NO: 71941 - DNA, 894 bp, Homo sapiens
catttggtttctccagtctttgaccttgaactcattacatacgtgtagaaaaatttccaaatcaaatgcataacatgaacaatgcccctaggtatgcaaatacttgttcagtggatggatagatggatggatggtttagtgactgtatcagaataatattgttagataaatgacatcatcagcaccaagatctgggagagttcttgagatttccccaaaaccacaatgttctcacttcgattgcctctctcctccaccccagcccccagcatagagctactgattgccttttgctaattgtaggagcttctaagtgctgtttccacatctggtctcactgccctccaatctgtccacacgcaggcctgctatgtcttggggtcaattacatggcagtccttccgcaaggtgcccagagccctctccaacacagtcccaactcactcttccagcctcatcctccttcactcccttatgtacaggtcacatttcacccaaaccagcctcccctctgtttcccaagtttcctttgaactttctcactcctgtgctgttctttgctctgttctgtgtctggaatgcctggggaatcccacgtcattgatggcaagggcctcttgaactattacctattttttcactttcattccaaaccatcttcttcataagaatgtctctagtcctgctattttctgaatctctgtggccttctctgatatcattcataatcgccagtaatccatctatttgccccatttccaccttcstgcccaacacgcacactgtattgtgaactcctgcaaggcagctttctatacatttttcccccagtactttgcacacggtgggcccttagctatagttggtgagttgatcgctcctgttaagatccat

SEQ ID NO: 71942 - DNA, 1640 bp, Homo sapiens
tgttggcgtctatacagatgcactgagaatctgatcagatgaatacactcgggaccttacatttcaagttcctgccagcttaaaactataaaaacttgagacaacctcataatgcctctgtctagggatgccagatgaaatataagatgccagttcagtttgaatttcagataaatggatacattttttttagcataaggatgtcctaaatgatttttagttttagtgtaagtgcgtgccagatgatctggggtttctttggaattcagattgaactgggtgtcctgtatttttatttgctaaatcccacagccctactctggttagattttggtcccatactgactaagttataacctctctgagcctcagtttccttctctccgagtgagatttgtagtaataactgattgcttcattatgaatattaaataactgaatgtgaagtgcttcatacaatgcagcgcatggcgtattttatgctctccataaatgttacctgtcgttatcatgaacactatttatttgataaataaaaataacaatattaagtattaataacgtatttatctttttcctatctcctcctgttctttatgccaaatgtctttcttcctttctcctcctgcctctttttctcctgcttcctttcatttttcaccgcacactgggtctatactaacagcattcacgtgattttgtaaactgcagcatctccatctactttcctctctgcagaggggcaggatggctaagtggccatgagctggttcaaagtcccaaatctgtgatctcagccatgctctttaacctctctgtgccttcgtttcctcagatgaaatgacagtgatgttacctgtcagattaagtgaactgatagaagaagagcacttaaatagtatccagcacattatcaatcttattgctaataacactattgtgttagtttgggcttcagaaatgatccagtgtgtgctcatttcagtcaggtcgcttgagccaagcaggatcctgggtcaacccagagtgagtaaatggatggsagtccttgctttggttttcatagctccactctggccagggggactcggtgaaaaccaaaacagctttggcgaaatgagcccatgggtgattttagtgtttttaaacaaatgggaatatttttcttgtctcttgcagacgggttctaactgtgtcttaccatttgcctgagcagagcctcccagcaggtcaatcatgaatgcacagtgtttcttgagaacttagatgatcaatttctctcatggtcactgccaccatgaattcattcattgtcactgcctgtgtggattccccctggaactagggcggggcaggcagagacacatctcttcgtgtcctgctccacatctcctcatcagcaactctctacccctggaccatgaggcttctggtcaggcacacacacaggcttgggaccccagccctgaaccaagccagtttagggaggccaggctggatagcacggctgattgaccagtgcagctgaggatttcacagcagatgaagtcccatatgaagaaaagcttcaggaaggctgtttctattggacaccccttgtactaccctgtaagtggctagttgtgtcccttacttaaagc

SEQ ID NO: 71943 - DNA, 917 bp, Homo sapiens
tgacttccaggatgggaggcaggtgaaccacagggtgaccaagtcccacccccacctgcagctgggtccccgccacctgctcaccttcagagagacatcggctaggatgtgatgaggcaactgcgagtacatgagtcccaggcccacgatggcctccagctcgcccaggttggctgcgtgctccaggtggaagacagccgactcctggtcccactcctcgcccttctcgcagaagcgcccaccctcgtggtagcgcaccatggccagatggacctgccacacagactacggtgtcggcctggctgtctggcgggccraagccgcacccaagaccgcccagccagcctgcgggaggaagtgattagcggaggagaggctggagctggggggctccaggttagtgcagacagggctccaaaatgggcatcgccgataccttccccaaaatggacttcccgattttcttttcgaggtccagagcattaagcctttgcacttccagggccacggccgaagccctcggcaggtggaggcgggaggagttgaggagattccacttctctacacatacctgaagggaaagaaccggccagggaagcgaggggctgggggtggacgcagcatcacagctgtcagcagcccctactacacaggagcctggctggagggagatggggagtgaaccctcacgatgtcaaagtttattggcaaaacatggctccaatttttttttttttttgagacagagtctcactctattgcccaggttggagtgcaatggcacaatctcggctcactgcaacctccacctcccaggttcaagcgattcttctgcctcagcttcccgagtagctgggacgacaggtgcataccaccatgcccggctaatacagctccaattttaatcattcaaattc

SEQ ID NO: 71944 - DNA, 917 bp, Homo sapiens
tgacttccaggatgggaggcaggtgaaccacagggtgaccaagtcccacccccacctgcagctgggtccccgccacctgctcaccttcagagagacatcggctaggatgtgatgaggcaactgcgagtacatgagtcccaggcccacgatggcctccagctcgcccaggttggctgcgtgctccaggtggaagacagccgactcctggtcccactcctcgcccttctcgcagaagcgcccaccctcgtggtagcgcaccatggccagatggacctgccacacagactacggtgtcggcctggctgtctggcgggccaaagccgcacccaagaccgcccagccagcctgcgggaggaagtgattagcggaggagaggctggagctggggggctccaggttagtgcagacagggctccaaaatgggcatcgccgataccttccccaaaatggacttcccgattttcttttcgaggtccagagcattaagcctttgcacttccagggccacggccgaagccctcggcaggtggaggcgggaggagttgaggagattccacttctctacacatacctgaagggaaagaaccggccagggaagcgaggggctgggggtggacgcagcatcacagctgtcagcagcccctactacacaggagcctggctggagggagatggggagtgaaccctcacgatgtcaaagtttattggcaaaacatggctccaatttttttttttttttgagacagagtctcactctattgcccaggttggagtgcaatggcacaatctcggctcactgcaacctccacctcccaggttcaagcrattcttctgcctcagcttcccgagtagctgggacgacaggtgcataccaccatgcccggctaatacagctccaattttaatcattcaaattc

SEQ ID NO: 71945 - DNA, 722 bp, Homo sapiens
aagcatcagagcagcctttgggcagccttggtgtgggtgaggctgagcgcttgctctttgtcaagcattcagcgtacttgatctcatttcaagcactctttccccaaatatttatagagcaccagctgtgagccaaacacacttctagaggctgaagataaaatgctgaacaagatagaggaggcctcagctttatacaccaaaggagaaagaaagacgataaccaagtgcccccataaatatgcaagcaagagggtttctggtagcaactccatatcactgagaaaataaaagcagtgtgataaagcatggtggtaagtgcgtgtgggagtattagawaggtgatcacagaaggcttcactgaggaggtgtcacttgagctgagatgggaatgatgggtaggaaccagctggagacggatctgcaggaagagggaggggaagtcagctagcaaagggctggtgggaatgggggaacagaggaggccagagtggctggagagtagggaggaaaagtggagggtgggacctgggtgcagggccatgtgtgctgtgctgtggtgtttgggctttatagtaagtgttatggcaaacttgggaacgctgacctaattagtatgtatgtgtatgcaagtttttctttaatagactttattttttagggcatttttagtggacagtaaaattgagcagaaggaacagatgtttcctctaattcccctg

SEQ ID NO: 71946 - DNA, 722 bp, Homo sapiens
aagcatcagagcagcctttgggcagccttggtgtgggtgaggctgagcgcttgctctttgtcaagcattcagcgtacttgatctcatttcaagcactctttccccaaatatttatagagcaccagctgtgagccaaacacacttctagaggctgaagataaaatgctgaacaagatagaggaggcctcagctttatacaccaaaggagaaagaaagacgataaccaagtgcccccataaatatgcaagcaagagggtttctggtagcaactccatatcactgagaaaataaaagcagtgtgataaagcatggtggtaagtgcgtgtgggagtattagaaaggtgatcacagaaggcttcactgaggaggtgtcacttgagctgagatgggaatgatgggtaggaaccagctggagacggatctgcaggaagagggaggggaagtcagctagcaaagggctggtgggaatgggggaacagaggaggccagagtggctggagagtagggagkaaaagtggagggtgggacctgggtgcagggccatgtgtgctgtgctgtggtgtttgggctttatagtaagtgttatggcaaacttgggaacgctgacctaattagtatgtatgtgtatgcaagtttttctttaatagactttattttttagggcatttttagtggacagtaaaattgagcagaaggaacagatgtttcctctaattcccctg

SEQ ID NO: 71947 - DNA, 1118 bp, Homo sapiens
tggggccaccgccttcatcaggctctcaaattgaccttgacatccactgactttaagagccctaagccttgtctgcttttattcttttttttttttttttgagatggagtctctctgttgcccaggctggagtgcagtggtgcgatctcagctcactgcaacctccacctcttgggttcaagtgattctcctgcctgagcctcccaagtagctgggattacaggtgcctgtcaccacacccagctcatttttgtacttttagtagagacagggtttcaccatgttgtccaggctggtctcgaactcctggcctcaagtgaactcctcggcctctcaaagtgctgggattagaggtgtgagccactgtacctggcctactttcattctttatatatatgcacactccygaggaagactgatgtcatgaagcaaactccaggactgaaaatctcaggggtagagtgctgtttctatgatgtggcatttttacaggctctctttcatccctttcttcttgctcgccctccctccccacctcccatcctgacccccgctgaaacacacagtcacgggacaggtcctcaagcaggtacaactcaaaatgctagagcaatggagcagcaggattgtgagggagaaacacagcttataaactgtctcccaacccaggcaggtgccagtgaaatgtttgacagctcaggagatggatcggcaatacgggttgggcaacacttccagggcagaactgaagccatccttcctgggaacggcctcatagatagcctgcaaacgcttgtcagcccagcctccaaacgctgtcccttgccatctcggtttcctcatggctccactccaggcctccaggcctctgggggctctgtattgagctggagtcagcctagggaggctcagacccctgaacactagacccaaaggaagacctcaggcagaggaaatgccatgaaagaaatcgcagcgggagagatgacttagcaagggtttccaacacatgcttctctggttccttgaggtgcacttaaactactattttaataaaatacttaatacaattttacaaagaccacacgcattgtgttttccatatgccagagactgtg

SEQ ID NO: 71948 - DNA, 1118 bp, Homo sapiens
tggggccaccgccttcatcaggctctcaaattgaccttgacatccactgactttaagagccctaagccttgtctgcttttattcttttttttttttttttgagatggagtctctctgttgcccaggctggagtgcagtggtgcgatctcagctcactgcaacctccacctcttgggttcaagtgattctcctgcctgagcctcccaagtagctgggattacaggtgcctgtcaccacacccagctcatttttgtacttttagtagagacagggtttcaccatgttgtccaggctggtctcgaactcctggcctcaagtgaactcctcggcctctcaaagtgctgggattagaggtgtgagccactgtacctggcctactttcattctttatatatatgcacactcccgaggaagactgatgtcatgaagcaaactccaggactgaaaatctcaggggtagagtgctgtttctatgatgtggcatttttacaggctctctttcatccctttcttcttgctcgccctccctccccacctcccatcctgacccccgctgaaacacacagtcacgggacaggtcctcaagcaggtacaactcaaaatgctagagcaatggagcagcaggattgtgagggagaaacacagcttataaactgtctcccaacccaggcaggtgccagtgaaatgtttgacagctcaggagatggatcggcaatacgggttgggcaacacttycagggcagaactgaagccatccttcctgggaacggcctcatagatagcctgcaaacgcttgtcagcccagcctccaaacgctgtcccttgccatctcggtttcctcatggctccactccaggcctccaggcctctgggggctctgtattgagctggagtcagcctagggaggctcagacccctgaacactagacccaaaggaagacctcaggcagaggaaatgccatgaaagaaatcgcagcgggagagatgacttagcaagggtttccaacacatgcttctctggttccttgaggtgcacttaaactactattttaataaaatacttaatacaattttacaaagaccacacgcattgtgttttccatatgccagagactgtg

SEQ ID NO: 71949 - DNA, 554 bp, Homo sapiens
attcatgagaaacccattcccatgatccagtcacctcccacccagcctcacctccaacactgggaattacaattcaacataaggccaggcrtggtggctcatacctaaaatctcagcactttgggaggctgaggccagtagatcactagaggtcaggagtttgagaccagcctggccaacatggtgaaaccccgtttctactaagaatacaaaaattagctggacacggtggggggtgcctgtaatcccagctactcaggaggctgaggcaagagaatcacttgaacccgggggggcagatgttgcagcaagtcaagatcgagccactgcactccagcctgggcaacagagcaaaactctgtctcaaaacaaaacaaaacaaaacccaacaaaaaaaacttcaaaaaacaattcaacatgagatttggtggggacatggatccaaaccatatcagtgaatggtccttaagttaataatgatggggttattgcttagtaaaggaagcgacaaagttgtgctaacaagagagattagatttccttccataaaacta

SEQ ID NO: 71950 - DNA, 554 bp, Homo sapiens
attcatgagaaacccattcccatgatccagtcacctcccacccagcctcacctccaacactgggaattacaattcaacataaggccaggcatggtggctcatacctaaaatctcagcactttgggaggctgaggccagtagatcactagaggtcaggagtttgagaccagcctggccaacatggtgaaaccccgtttctactaagaatacaaaaattagctggacacggtggggggtgcctgtaatcccagctactcaggaggctgaggcaagagaatcacttgaaccygggggggcagatgttgcagcaagtcaagatcgagccactgcactccagcctgggcaacagagcaaaactctgtctcaaaacaaaacaaaacaaaacccaacaaaaaaaacttcaaaaaacaattcaacatgagatttggtggggacatggatccaaaccatatcagtgaatggtccttaagttaataatgatggggttattgcttagtaaaggaagcgacaaagttgtgctaacaagagagattagatttccttccataaaacta

SEQ ID NO: 71951 - DNA, 554 bp, Homo sapiens
attcatgagaaacccattcccatgatccagtcacctcccacccagcctcacctccaacactgggaattacaattcaacataaggccaggcatggtggctcatacctaaaatctcagcactttgggaggctgaggccagtagatcactagaggtcaggagtttgagaccagcctggccaacatggtgaaaccccgtttctactaagaatacaaaaattagctggacacggtggggggtgcctgtaatcccagctactcaggaggctgaggcaagagaatcacttgaacccgggggggcagatgttgcagcaagtcragatcgagccactgcactccagcctgggcaacagagcaaaactctgtctcaaaacaaaacaaaacaaaacccaacaaaaaaaacttcaaaaaacaattcaacatgagatttggtggggacatggatccaaaccatatcagtgaatggtccttaagttaataatgatggggttattgcttagtaaaggaagcgacaaagttgtgctaacaagagagattagatttccttccataaaacta

SEQ ID NO: 71952 - DNA, 707 bp, Homo sapiens
gtagcctgaatgtctgtgtcatggtcaagctccaggtcttttccagcgccacattttccagcacaacaactagattagtaagtgttcgcttatgaggatgtactaggagcgtagctaccgagcgcttcctgcataccacgtgcagttatacacacctcacatgtaagaatttaaacccccacggtgacgctaggaggtatgcacggttacttccattataaggtgaggaggctgtggcataccatgttctgtgccatgtcctcagataccattataccagrtgccattccttaagcccctgagtaccaatcccactccctctccatcacacacagccactatggaatacactcacatcagcgtcagttggccccactcactgtggggcagaatttccctggtctgatgcctggcatctgcccagaaggcactgcagcataggggacagtggggtcagactccactgtaggaatctacatctccctgacacactgtgaggccttgcaagggctactggcacatcagcgagcctccattttccttcatattcaagatggaatcaagcttgtcttcctggcgggttggtgaagatggcactaaatgagaagggaacagggtaggcaccaaatggttgctgctgccgaatttgggaccggggtgctggtggtcatctgagtgccagctctgcctgaccttgatccagtaca

SEQ ID NO: 71953 - DNA, 955 bp, Homo sapiens
tatacatatgtgtatgtatatatagtaaatataccatctatagtaataaggtttcacaaagaagagaaaatggaaatgtagagatataaaggaaatcatctttgtattactagtctttttattgccaaaaaaattttatttgcaaaacaaatataggctcatggtaaaaattttagcaactgagataagcaaaactaagaaagatgtaaatcccactagccagataccactactcctaagacccaggtcagacagcgaggcatcactgttaagagcatgggcgctatggttggacaactctatcacttactagctgtgtgtcctggagccagctacttagtccctcaccacctctgtttcttcatctatataatgggtcagtaatcccamccacatgaagttattgttagacttaaataagctgacccatgtaaagtgcttggaaagtccctggcacaaagcaagtgctcaataaatattatctgtgactctattattatcatcatcatgatcataattattaccgcaactgccactagcattcccttccaaggtattttctcagccagcagcagcaaatcggtttgggattgtatgtcaagccctgtgaaaaagaagggtttggcacacagggcttcatacaaagaggggttttgaagctgacctggccattgccaagtcattaccgtgcttgtgagaagggggcagcgagcctgccacatgtttgcatgtggaccctcacggtgctatacacatacctacctactataaagatttacttcgtatgtgttgtcatcttgtcatgctgtgttcatcatggcttttaatgtctacgtagcattccattatcacttttgatcaacagttccctgattgattttttatttttctatagtaaacattgaaggagaaaatataattgtcgctaaatatttcagccaaataagtctgagct

SEQ ID NO: 71954 - DNA, 955 bp, Homo sapiens
tatacatatgtgtatgtatatatagtaaatataccatctatagtaataaggtttcacaaagaagagaaaatggaaatgtagagatataaaggaaatcatctttgtattactagtctttttattgccaaaaaaattttatttgcaaaacaaatataggctcatggtaaaaattttagcaactgagataagcaaaactaagaaagatgtaaatcccactagccagataccactactcctaagacccaggtcagacagcgaggcatcactgttaagagcatgggcgctatggttggacaactctatcacttactagctgtgtgtcctggagccagctacttagtccctcaccacctctgtttcttcatctatataatgggtcagtaatcccacccacatgaagttattgttagacttaaataagctgacccatgtaaagtgcttggaaaktccctggcacaaagcaagtgctcaataaatattatctgtgactctattattatcatcatcatgatcataattattaccgcaactgccactagcattcccttccaaggtattttctcagccagcagcagcaaatcggtttgggattgtatgtcaagccctgtgaaaaagaagggtttggcacacagggcttcatacaaagaggggttttgaagctgacctggccattgccaagtcattaccgtgcttgtgagaagggggcagcgagcctgccacatgtttgcatgtggaccctcacggtgctatacacatacctacctactataaagatttacttcgtatgtgttgtcatcttgtcatgctgtgttcatcatggcttttaatgtctacgtagcattccattatcacttttgatcaacagttccctgattgattttttatttttctatagtaaacattgaaggagaaaatataattgtcgctaaatatttcagccaaataagtctgagct

SEQ ID NO: 71955 - DNA, 955 bp, Homo sapiens
tatacatatgtgtatgtatatatagtaaatataccatctatagtaataaggtttcacaaagaagagaaaatggaaatgtagagatataaaggaaatcatctttgtattactagtctttttattgccaaaaaaattttatttgcaaaacaaatataggctcatggtaaaaattttagcaactgagataagcaaaactaagaaagatgtaaatcccactagccagataccactactcctaagacccaggtcagacagcgaggcatcactgttaagagcatgggcgctatggttggacaactctatcacttactagctgtgtgtcctggagccagctacttagtccctcaccacctctgtttcttcatctatataatgggtcagtaatcccacccacatgaagttattgttagacttaaataagctgacccatgtaaagtgcttggaaagtccctggcacaaagcaagtgctcaataaatattatctgtgactctattattatcatcatcatgatcataattattaccgcaactgccactagcattcccttccaaggtattttctcagccagcagcagcaaatckgtttgggattgtatgtcaagccctgtgaaaaagaagggtttggcacacagggcttcatacaaagaggggttttgaagctgacctggccattgccaagtcattaccgtgcttgtgagaagggggcagcgagcctgccacatgtttgcatgtggaccctcacggtgctatacacatacctacctactataaagatttacttcgtatgtgttgtcatcttgtcatgctgtgttcatcatggcttttaatgtctacgtagcattccattatcacttttgatcaacagttccctgattgattttttatttttctatagtaaacattgaaggagaaaatataattgtcgctaaatatttcagccaaataagtctgagct

SEQ ID NO: 71956 - DNA, 955 bp, Homo sapiens
tatacatatgtgtatgtatatatagtaaatataccatctatagtaataaggtttcacaaagaagagaaaatggaaatgtagagatataaaggaaatcatctttgtattactagtctttttattgccaaaaaaattttatttgcaaaacaaatataggctcatggtaaaaattttagcaactgagataagcaaaactaagaaagatgtaaatcccactagccagataccactactcctaagacccaggtcagacagcgaggcatcactgttaagagcatgggcgctatggttggacaactctatcacttactagctgtgtgtcctggagccagctacttagtccctcaccacctctgtttcttcatctatataatgggtcagtaatcccacccacatgaagttattgttagacttaaataagctgacccatgtaaagtgcttggaaagtccctggcacaaagcaagtgctcaataaatattatctgtgactctattattatcatcatcatgatcataattattaccgcaactgccactagcattcccttccaaggtattttctcagccagcagcagcaaatcggtttgggattgtatgtcaagccctgtgaaaaagaagggtttggcacacagggcttcatacaaagaggggttttgaagctgacctggccattgccaagtcattaccgtgcttgtgagaagggggcagcgagcctgccacatgtttgcatgtggaccctcacggtgctatacacatacctacctactataaagatttacttcgtatgtgttgtcatcttgtcatgctgtgttcatcatggcttttaatgtctacgtagcattccattatcacttttgatcaacagttccctgattkattttttatttttctatagtaaacattgaaggagaaaatataattgtcgctaaatatttcagccaaataagtctgagct

SEQ ID NO: 71957 - DNA, 581 bp, Homo sapiens
ttgaaccactaccaatcactcctggatcaacaggaaacttgctacctgatgagttgccttttttcttttttctttttttttttttttttttttttttttgctttttccatccccatgattgttccaacagaaggagaaaagatgtaataaacctttaccgggcaccgtctgcgtccaggcactctactcggccctgggggtgcagagcacaccaccccagccttaggcatgaaaaacactgtgtaccgagaagcccagcccctggaatccagcatgctggtgctacattccagctctgtctcttattaactgggccgcttttgataagttgctaagcctctctgattcttggttacctcaaccttaaaacaaggatgatacccacttcatcaggttgtcatgagtcacaaaaataaatgtagtgatgctcttaaagggtttagcaccaagctgggcccaaggaagcattctgtgtgtctrttgaccaacttttacctaccctgacaccaaggagcttagagtttagtggagatggcagagccgtcagggcccgtgttaggctcccaaaggcatttttacca

SEQ ID NO: 71958 - DNA, 581 bp, Homo sapiens
ttgaaccactaccaatcactcctggatcaacaggaaacttgctacctgatgagttgccttttttcttttttctttttttttttttttttttttttttttgctttttccatccccatgattgttccaacagaaggagaaaagatgtaataaacctttaccgggcaccgtctgcgtccaggcactctactcggccctgggggtgcagagcacaccaccccagccttaggcatgaaaaacactgtgtaccgagaagcccagcccctggaatccagcatgctggtgctacattccagctctgtctcttattaactgggccgcttttgataagttgctaagcctctctgattcttggttacctcaaccttaaaacaaggatgatacccacttcatcaggttgtcatgagtcacaaaaataaatgtagtgatgctcttaaagggtttagcaccaagctgggcccaaggaagcattctgtgtgtctgttgaccaacttttacctaycctgacaccaaggagcttagagtttagtggagatggcagagccgtcagggcccgtgttaggctcccaaaggcatttttacca

SEQ ID NO: 71959 - DNA, 699 bp, Homo sapiens
agacatggggtcctagcgggggctacacacaggggagagggtccagcggcagcaggtggggtgggagaactacacccactgcaaaaccacaaccatctcaaaaaccacaaccaccgcaaaacccacagtcacaaccaccgcaaaaatcgcaaccacaacaaaaaccacgaccaccacaaaaccacaacccccgccagaagcacgccctccctacagcattttcacttagcaccctcccccaacaacctccacccgcagcctccgttgaacccaaaacagaggayctcaatccccagcatggcccgggttccacaggacaggccagggctcagatgtttctcatagagaggacttgggtctccggttggctcctcccagattccctcgctggcaaccccaaccaccttcaggtgtgtctgccacggggcacccccaggtgtgcctcattactgccgtcaggggcgttcaccaggtgcggtggtctgtccttgcactgctagaaaatacccacgaccgggcgtggtggctcacgcctgtaatcccaacactgtgggaggccaaggcggggcgttgggggtagggggatcatgaggttaagagctcgagaccaacctggccaacatggtgaaaccccgtctctactaaaagtataaaaattagccaggcatggtggcacataactgtaatcccagctactca

SEQ ID NO: 71960 - DNA, 704 bp, Homo sapiens
acaggcacccacgtccatgcctggctaatttttgtatttttagtagagacgggtttcaccatgttggccaggctggtctcgaattcctgacctcaggtgatctgcccgcctcggcttcccaaagttctgggattacaggcatgagccactgggtccaaccagcatcagacttccacctgttgtttatgagagagaaagcaagggcccagccacatctgagatcagtgacttgagaggtctttgggaacagcttgaagttccagtttaatttttggtagttgtgtgatgcgcatccgttagttgagctagagctgcttctcagaattttaaggccagagacttctctggcacctgtggggaattttaataaacaaagtacttgtccctaaagaatcttttgtaaatgactttttgcagtgtaaaaatctgtgtaccgtgaagtgttttctttctagcttccctttasgtagttcaactgggcatctgttaaatctcagtgaaaattatttcaaaagcagatcctgggggaaacggaaagttcatttaggaatactcatagatagaaaatctcccgactgggcccggttgtttacacctgtaatcccagcgctttgggaggccaaggtgggaggcttgcataaacccatgagtttgaggttacagtgaacgatgattgcaccactgcactccagcttaggcaacaa

SEQ ID NO: 71961 - DNA, 658 bp, Homo sapiens
attctctatctgctctgaccatggccctgggtctcagggagattggttcggagtagagttgaggggcaggctgaacgtctagctgcctttctcagttctgacgcaagccctcaggaactcaggtgggcaggctcccattcttatgactcttggctgccccagcttcttcattgtctgacccttgggcacagctctgccttcatcaagctcctggagaagctgagtggaggaaaggaccttgggatctgcaggctcggggagggcacmtggactgcacggggagggcacctggactgcacagggaggtagggagggtccctttgcagggatgtcccaagagccatgagccaagtcctggtggacaaagaaatagtcccagcctaggtggtggccccacaggggtggtgagcagaggcatgctcagcggctagcgtctaggagagtaccctgcattggcagagtgtgagtgtgcagtatggtgaagcatttccctgagctctctgggtattgtctaacttttaccattccttgattatggtgcccccactcttttccttgggacctggcacacctgccccacttgtccctgcagggacagagttagatgcctgctgcctggcctgattcttatcccctgcagttaggagccacttgccca

SEQ ID NO: 71962 - DNA, 658 bp, Homo sapiens
attctctatctgctctgaccatggccctgggtctcagggagattggttcggagtagagttgaggggcaggctgaacgtctagctgcctttctcagttctgacgcaagccctcaggaactcaggtgggcaggctcccattcttatgactcttggctgccccagcttcttcattgtctgacccttgggcacagctctgccttcatcaagctcctggagaagctgagtggaggaaaggaccttgggatctgcaggctcggggagggcacctggactgcacggggagggcacytggactgcacagggaggtagggagggtccctttgcagggatgtcccaagagccatgagccaagtcctggtggacaaagaaatagtcccagcctaggtggtggccccacaggggtggtgagcagaggcatgctcagcggctagcgtctaggagagtaccctgcattggcagagtgtgagtgtgcagtatggtgaagcatttccctgagctctctgggtattgtctaacttttaccattccttgattatggtgcccccactcttttccttgggacctggcacacctgccccacttgtccctgcagggacagagttagatgcctgctgcctggcctgattcttatcccctgcagttaggagccacttgccca

SEQ ID NO: 71963 - DNA, 658 bp, Homo sapiens
attctctatctgctctgaccatggccctgggtctcagggagattggttcggagtagagttgaggggcaggctgaacgtctagctgcctttctcagttctgacgcaagccctcaggaactcaggtgggcaggctcccattcttatgactcttggctgccccagcttcttcattgtctgacccttgggcacagctctgccttcatcaagctcctggagaagctgagtggaggaaaggaccttgggatctgcaggctcggggagggcacctggactgcacggggagggcacctggactgcacagggaggtagggagggtccctttgcagggatgtcccaagagccatgagccaagtcytggtggacaaagaaatagtcccagcctaggtggtggccccacaggggtggtgagcagaggcatgctcagcggctagcgtctaggagagtaccctgcattggcagagtgtgagtgtgcagtatggtgaagcatttccctgagctctctgggtattgtctaacttttaccattccttgattatggtgcccccactcttttccttgggacctggcacacctgccccacttgtccctgcagggacagagttagatgcctgctgcctggcctgattcttatcccctgcagttaggagccacttgccca

SEQ ID NO: 71964 - DNA, 658 bp, Homo sapiens
attctctatctgctctgaccatggccctgggtctcagggagattggttcggagtagagttgaggggcaggctgaacgtctagctgcctttctcagttctgacgcaagccctcaggaactcaggtgggcaggctcccattcttatgactcttggctgccccagcttcttcattgtctgacccttgggcacagctctgccttcatcaagctcctggagaagctgagtggaggaaaggaccttgggatctgcaggctcggggagggcacctggactgcacggggagggcacctggactgcacagggaggtagggagggtccctttgcagggatgtcccaagagccatgagccaagtcctggtggacaaagaaatagtcccagcytaggtggtggccccacaggggtggtgagcagaggcatgctcagcggctagcgtctaggagagtaccctgcattggcagagtgtgagtgtgcagtatggtgaagcatttccctgagctctctgggtattgtctaacttttaccattccttgattatggtgcccccactcttttccttgggacctggcacacctgccccacttgtccctgcagggacagagttagatgcctgctgcctggcctgattcttatcccctgcagttaggagccacttgccca

SEQ ID NO: 71965 - DNA, 916 bp, Homo sapiens
tttgggaggccgaaacgggtggatcatgaggtcaggagttcaagaccagcctggccaagatggtgaaaccccatctctactaaaaatacaaaaattagccagacgtgttggcaggtgcctggactcccagctactcgagaggctgaggcagaagaattgcttcaacctgggaggcgaaggttgcagtgagccaagaatgcgccactgcactccagcctgggcaacagaggaagacttcatctcaaaaaaacaaaaaaaaaaaacaaaaaaaaaaaaaacaaaacaaaaaacaaagaaaaaaacatagggtcaccaaggcgttcaaaatgaaccttaaacagaggtattaatacttaaatattacaatttccacttaggaaaaaaaaatcatattattgctaggccagcacactcaaaagcaataatgtcatgaaaacacatgcccttgtgtgatttggcagaacaggctgctccctgaacacaatgggcctttttattaagtggatcccttcatcccyggcattttatacaaacaaaacaaaagagagagaaaaagaaacaaacacgacactagtaacagtcttcagtttgaacttcatcacagagaattagaagacctaaaagatatgttagaaaagtaaaagacattatttaaccaaaatgaaagcaagatggactgagaggaacagaactatattgcaatgctgcctcttttgtttaattatatcaaagggcaacagagccctctagtggaaaaaaataaaaatatataaagatggttctgcttttagattaaaggaaatatgtacaacacccccgggcatggtggctagtgtctgtaatcctagcactttgggaggccaaggtgggcggatcacttgagttcaggagttcaagaccagcttggccaacatgg

SEQ ID NO: 71966 - DNA, 948 bp, Homo sapiens
gttttccataggtctcttagattctgttcatttttttctttttatcatattttttcctttttatcatattcagggatcttgggtgatcctagccaaccagctttcccagggatgaattttccacttcagttcagtttgggccaaaggtgagtcttagataccgtctgatgttcaagcagtttattctggcagcgcttgtacataatggaaagtgggagcaggttagtggtacgggccagatacagtcaaggggtcaggtgacggactgaccaggaaggtctgtgtctggagaccattcccagagttttgggaattactcccctttcttacacatgtattcactttacactcattaacagatgtttctttcataaaggaagttaaactattcttgtaaggataaggtttgttttaaggtttatgagggttacatctgtgctgaggtggtcttgtcacctagaaatctctgggctagggttagtagtccccaggtcaggtcgtgycataccactaagtgacacatgatgtaggccccatgagatgtttgagtggaccttagagctatcattaatcttatagccatgatgtgtctcttgtatgtactacgctttctgtttcttgaatacatatgctcaatctatctctacattcactgaatatttcttctctctgctcaaatctgctgttgaagtcctctagtgaattcatttcagttgttgtactttgcaactccagaatgtttatttcattccttttaataatttatatctctttattgatgacctctatttgttgagacatcattctcctatttttcattaattgtttgtacattgtttcctttagctctttgagcgtattaaagatagctgatttaaaatccatgtttagttgatccaatatcattgcttcctcaggggcagtttctattaatttctcctgtgaatg

SEQ ID NO: 71967 - DNA, 948 bp, Homo sapiens
gttttccataggtctcttagattctgttcatttttttctttttatcatattttttcctttttatcatattcagggatcttgggtgatcctagccaaccagctttcccagggatgaattttccacttcagttcagtttgggccaaaggtgagtcttagataccgtctgatgttcaagcagtttattctggcagcgcttgtacataatggaaagtgggagcaggttagtggtacgggccagatacagtcaaggggtcaggtgacggactgaccaggaaggtctgtgtctggagaccattcccagagttttgggaattactcccctttcttacacatgtattcactttacactcattaacagatgtttctttcataaaggaagttaaactattcttgtaaggataaggtttgttttaaggtttatgagggttacatctgtgctgaggtggtcttgtcacctagaaatctctgggctagggttagtagtccccaggtcaggtcgtgccataccactaagtgacacatgatgtaggccccatgagatgtttgagtggaccttagagctatcattaatcttayagccatgatgtgtctcttgtatgtactacgctttctgtttcttgaatacatatgctcaatctatctctacattcactgaatatttcttctctctgctcaaatctgctgttgaagtcctctagtgaattcatttcagttgttgtactttgcaactccagaatgtttatttcattccttttaataatttatatctctttattgatgacctctatttgttgagacatcattctcctatttttcattaattgtttgtacattgtttcctttagctctttgagcgtattaaagatagctgatttaaaatccatgtttagttgatccaatatcattgcttcctcaggggcagtttctattaatttctcctgtgaatg

SEQ ID NO: 71968 - DNA, 948 bp, Homo sapiens
gttttccataggtctcttagattctgttcatttttttctttttatcatattttttcctttttatcatattcagggatcttgggtgatcctagccaaccagctttcccagggatgaattttccacttcagttcagtttgggccaaaggtgagtcttagataccgtctgatgttcaagcagtttattctggcagcgcttgtacataatggaaagtgggagcaggttagtggtacgggccagatacagtcaaggggtcaggtgacggactgaccaggaaggtctgtgtctggagaccattcccagagttttgggaattactcccctttcttacacatgtattcactttacactcattaacagatgtttctttcataaaggaagttaaactattcttgtaaggataaggtttgttttaaggtttatgagggttacatctgtgctgaggtggtcttgtcacctagaaatctctgggctagggttagtagtccccaggtcaggtcgtgccataccactaagtgacacatgatgtaggccccatgagatgtttgagtggaccttagagctatcattaatcttatagccatgatgtgtctcttgtatgtactaygctttctgtttcttgaatacatatgctcaatctatctctacattcactgaatatttcttctctctgctcaaatctgctgttgaagtcctctagtgaattcatttcagttgttgtactttgcaactccagaatgtttatttcattccttttaataatttatatctctttattgatgacctctatttgttgagacatcattctcctatttttcattaattgtttgtacattgtttcctttagctctttgagcgtattaaagatagctgatttaaaatccatgtttagttgatccaatatcattgcttcctcaggggcagtttctattaatttctcctgtgaatg

SEQ ID NO: 71969 - DNA, 697 bp, Homo sapiens
aactctttggtcatgattctcctatcgggtcataaaataaataaacgaaaggtcagcatcattgagtcatttaatcaaaacaacagtggaagcttgtatcaaggccgctctggtttttttgttttgttttgttttgtttttttttttttttgagtcagagtcttgttctgtcgcccaggctggagtgcagtggctcgatctcagctcactgcaagctccgcctcctgggttcatgccattctcctgcctcagcctcccacgtagctgggactacaggcgcctgccgccatgcctggctaattttttgtatttttagtagagacggggtttcaccatgttagccaggatggtctcgatctcctgacctcgtgatctgcccgcttcggcctccaaaagggctgggataacaggcgtgggccaccgcgcccggctgaggcctctctgtttaccatatctcaagcactcactgtttcatttgtctaggcaactctctacccctctgcagccatcaggcagagacaggttttgcagtgacttgaaatgctcaggtcttctattgagggccagcccccaattccttctattactgtagccyattgatatggaaaaatccgccagtattggtcactataataatttatacattgtcccaaagaagttattattgttataaaatgtttatttttcatttttgcta

SEQ ID NO: 71970 - DNA, 1002 bp, Homo sapiens
aacatttagaacatttccatcaactcaaaacattttcttatgtccctttgcaggcagtttcttcacaagcctcaggcaatcaagattttttctccatagacatatgactttgagactgtcatatgaatagaactatacagaagtggtctttcatagcctcttttgttcaatacagygagtatggagattccccaaatattggtacataatgttgcaagcatcaacatttcttttatgtttattggtaatgatctgtgttatgtatatagcccaatttatttgtctatgagccagctgatggacgcttgagttgttttcagtttttggctattgtgaaaaatgctactataactattatgtacatgtgttagtttgaacatgttttccttattgggaggtaaatacctagaattgctggaacataaggtgggtgtacagaacttaggtcattgatttttttattcttaagatgatcagacataacctttaaaatgttaaaggtataagtttccctctaaacacagcataagctgcagctctcacattttgataatatacgcatttattttcatttcatttgacttattttctaatgtctcaagtgaaatcttcatttacctatttgtttgattttcaagtatttgcaattttttaaaatttcacatttttattgagtgttaatttattttttggtcagacaacatttagcatttaaatctttttatatttaatgacacttttctctcccagtctatgaactaccatgattaaaattccaggtgtacttgcaaataatatgtatttttgtggctggatagcatattctataagggttaattagattgtatgtggactgtattgttcaagtctgtatatccttactgatttttcaattttatttggtctattaattattgtgagtgaagtgttaaaatatcaaactgcaattatatattttttatttctgtttttaattctgttagtttttgctttgtgtgtttt

SEQ ID NO: 71971 - DNA, 1002 bp, Homo sapiens
aacatttagaacatttccatcaactcaaaacattttcttatgtccctttgcaggcagtttcttcacaagcctcaggcaatcaagattttttctccatagacatatgactttgagactgtcatatgaatagaactatacagaagtggtctttcatagcctcttttgttcaatacagcgagtatggagattccccaaatattggtacataatgttgcaagcatcaacatttcttttatgtttattggtaatgatctgtgttatgtatatagcccaatttatttgtctatgagccagctgatggacgcttgagttgttttcagtttttggctattgtgaaaaatgctactataactattatgtacatgtgttagtttgaacatgttttccttattgggaggtaaatacctagaattgctggaacataaggtgggtgtacagaacttaggtcattgatttttttattcttaagatgatcagacataacctttaaaatgttaaaggtataagtttccctctaaacacagcataagctgcagctctcacattttgataatatacgcatttattttcatttcatttgacttattttctaatgtctcaagtgaaatcttcatttacctatttgtttgattttcaagtatttgcaattttttaaaatttcacatttttattgagtgttaatttattttttggtcagacaacatttagcatttaaatctttttatatttaatgacacttttctctcccagtctatgaactaccatgattaaaattccaggtgtacttgcaaataatatgtatttttgtggctggatagcatattctataarggttaattagattgtatgtggactgtattgttcaagtctgtatatccttactgatttttcaattttatttggtctattaattattgtgagtgaagtgttaaaatatcaaactgcaattatatattttttatttctgtttttaattctgttagtttttgctttgtgtgtttt

SEQ ID NO: 71972 - DNA, 1237 bp, Homo sapiens
tttattagatataaattgctcattatatggtgttttactaaggcagcctgaatgaactaatacactcgttctcagatctaaatgtttattgtgacattccaggacttaactttggttcaaatctaaactttagagactatattagctcaaaattattcagtagttttcaaaaaattccataaagaggttcccatcgacttacctaaatccatctcctgcttattcccaggaaattctcaccatttcaggtaggctaatgtcagtctcaaaacacattcagctgactctaatctctgaatcctccagcatcttggcagctgctttatttatcagatgcacctgagtttagatcctgactcaaccacttcccagcactgttgtctttatttaacctcttaatcctgttttcttacatacaaaacaaggttgtttacatgcttgctactctaactatgatcttcactccaggattatcagaattatgtaagagcttgttagaaacacagaatatcaaactcaaccccagaacttctgaatcataatctgaattttaacaagaatcacaaatgattctcayggatattaaaattagagaagcattgttttatataactctatctaataatgcaaagaaaagtgcttataattattcctagcagatactaagcactcattaaacactgttatgcttattaactcagtaaactgagttaattaactgagtaaatattaactggtcataatccttagaacatcaaggtagacagaactgaataatttggataataagagcaatgtctatagcattataatttccactgtcaaaaatgaaaacttcacaaacgtcatcaataactgatctttaataaagacactaaatggacttgaaaaaaattagtatgcactaatgttttagagaacaagacactgaggcttagtgatattacatattcaagaaagtagaaaattctacaaggtcttcctatccacgtacaagtatttcccccaccaaattcagccttctgaaatgaaattccaagtagatgctgttcctgctaaatgttgtttaatgattcattaaatgcaacagataaaaaccaaaattttgtgatcacctgttactctagtttgaatatttgtgtcccttctgccaagttcatatgttgaaatcctaacctccaagatgttgtactaggtgaggcctttgggaggtaattagatgaggatggaggacaca

SEQ ID NO: 71973 - DNA, 801 bp, Homo sapiens
gttttcctttgtctctgcataacttagtgttcagtcaatgacttggttgatgttgtgcttaaacaccttgagcctgaaggcttacattatctgcagtagatctgtccacaggttggtgatatggtttggctgtgtccctgccccaaatctcatcttgaattgtratccccataatccccacgtgtcaagggagagatcaggtggaggtaactgaatcatggggttccttctccttcctgccgttttgtgaagaagatgtcttccttccccttcaacttccaccatgattataagtttcctgaggcctccccagccatgctgaattgtgaatcaattagacctctttcctttctaaattagccaggcttgggcagttctttatagcagagtgagaatggactcatacagttggggagtgtgtttaaagccctccaattttcagatcttcctttgctttcacttcccagtgggctccttggtttcccctgggcagaagcagttttctagacaaccagggaccaggggcaatctgttatcgatcttctatgcctctctcatggacctctgactgctttgctgctcagcccagctgaggcctcagcctctggccaccaaagctgtgagcgttctctgcctgttttcagatcacccctgttagctgaccaagccttggatttttatcccccgacctccgaatctgctccatctggtggcccaggcactggttttcaaagccaactccatgctggcaaagctgtattttctgctgatcaagaagggtggggagatgggagaggatcc

SEQ ID NO: 71974 - DNA, 801 bp, Homo sapiens
gttttcctttgtctctgcataacttagtgttcagtcaatgacttggttgatgttgtgcttaaacaccttgagcctgaaggcttacattatctgcagtagatctgtccacaggttggtgatatggtttggctgtgtccctgccccaaatctcatcttgaattgtgatccccataatccccacgtgtcaagggaragatcaggtggaggtaactgaatcatggggttccttctccttcctgccgttttgtgaagaagatgtcttccttccccttcaacttccaccatgattataagtttcctgaggcctccccagccatgctgaattgtgaatcaattagacctctttcctttctaaattagccaggcttgggcagttctttatagcagagtgagaatggactcatacagttggggagtgtgtttaaagccctccaattttcagatcttcctttgctttcacttcccagtgggctccttggtttcccctgggcagaagcagttttctagacaaccagggaccaggggcaatctgttatcgatcttctatgcctctctcatggacctctgactgctttgctgctcagcccagctgaggcctcagcctctggccaccaaagctgtgagcgttctctgcctgttttcagatcacccctgttagctgaccaagccttggatttttatcccccgacctccgaatctgctccatctggtggcccaggcactggttttcaaagccaactccatgctggcaaagctgtattttctgctgatcaagaagggtggggagatgggagaggatcc

SEQ ID NO: 71975 - DNA, 755 bp, Homo sapiens
atatggtaacttcctgacattgccatggcatttgtaaactgtcacggtgctggtgggagtatagcaatgaggacaaccacaggtcattctcggtgccatcttggttttggtgggttttagccgtcttctttactgcaacctgttttatcagtaaggtctttatgacttgtgtcttgtgccaacctcctatgccatcctatgacttagaatatcttaaccatctgggaatgcagcccagtaggtctcagcctcattttacacagcccctattcaagatgcagttgctctggttcacacgcctctgacagtttcatagtgagaagacattccatattattttcctcctaccctttgttcaactatccaaatcaaacctgtgccagtctggactcttctcgtgacctattcatgactaccctggcttcaggagcagaaraacccaaaggtgcaaatggcatcataggcctcatccttctcctctcttgaggctctttctgtgttggtggcatccccatactcctggctgctgcctgatgatctgccctggttgatgacctgggtcatgcacccatccccaagctaacccctgtgttcgtgggatgaacgatggttattcacaggtcttgggaaaagcaatcaaccctggatctggaaggggcaaggccagcccagcccaactgcaaggaaggaaagtggggaggagtgtctcccctgagaaagtcatgatgtcatgacccaaataaggggtggctgtg

SEQ ID NO: 71976 - DNA, 677 bp, Homo sapiens
agaaaggaaaagaaaagaaaaaagaaaggagaagaaaaagtaaaggactaacgtgagataggcttcagggttttgaaacaagacctcccagggaaactgagagcagcagggaacacacagcaaggggaacagtgcccagacttctatgccccgtgcttgttaaaccctatttccaggtactcagcagggaagcaaaaagttgacatcagaactcactgacaatgagtaatggatatgtctttttcagagtgtgcgctcagatatcctcaattattcctcttaagaaaatcttgagttaaggatcattctaggaatttttataaaaagaggaccctggagtggsaagactctctgggactaaccaaccaccatgccctgggctcagcttcccttggagactcaggtcacactcaggtggctttggggaacctgggctgggctggtccttgctgcccctccttgactttgctgcttatgtctggtttgggccaatattaaattcagtttgcattcagggaggatctgcaaggtcagctagtgggttcatgatgtggggcaagatgaggaggaatgaacccaggctgagctcaaagaaataccaaattgcataacaaagatgagggctgggagccctgatatatcactgaaacaagggcagtgctggcagagaacaggga

SEQ ID NO: 71977 - DNA, 677 bp, Homo sapiens
agaaaggaaaagaaaagaaaaaagaaaggagaagaaaaagtaaaggactaacgtgagataggcttcagggttttgaaacaagacctcccagggaaactgagagcagcagggaacacacagcaaggggaacagtgcccagacttctatgccccgtgcttgttaaaccctatttccaggtactcagcagggaagcaaaaagttgacatcagaactcactgacaatgagtaatggatatgtctttttcagagtgtgcgctcagatatcctcaattattcctcttaagaaaatcttgagttaaggatcattctaggaatttttataaaaagaggaccctggagtggcaagactctctgggactaaccaaccaccatgccctgggctcagcttcccttggagactcaggtcacactcaggtggctttggggaacctgggctgggctggtccttgctgcccctccttgactttgctgcttatgtctggtttgggccaatattaaattcagtttgcattcagggaggatctgcaaggtcagctagtgggttcatgatgtggggcaagatgaggaggaatgaacccaggctgagctcaaagaaataccaaattgcataacaaagatgagggctgggagccctgatatatcactgaaacaagggcagtgctggcasagaacaggga

SEQ ID NO: 71978 - DNA, 695 bp, Homo sapiens
gtaagtcctcaatcaatggcaactactatgacagctgtcataaccatagcgagagaaagttgcactgaaaaggaactgttatgcttcagtcataattgtatatacatacacattgtacctatgtattcatacgtacattgtatcattaaatccaagctatacattgtatatatgttcagatatacattgtatcactgaaacccccagctacctaggacctaggaagtagttttcacatatatatacattgtatacctatttcatatgtacattgtatcactgaaccccccagctaccctacgatctaggaagtagttttcatatatatacattgtatagctatctcatttgtacattgtattactgaacaccctcccttccccccagctattgtatgagctaggaagtgcattttcctagatcccatcttatagataaggaaatggaggctcagagagattaagcaatttccacaaagtgaaatactaggactcaaatacagaagcatcttcaaaagccctgctctctcccaccccccacccccactcccatagctgaccaccttcactccatcctccagacacccccacrccacctctagaagaggcagtcagggcacctaaaatatggcccccatccaatcagccatcagcaaaaggcactgggaaactgtcagctgttattaacttttgaag

SEQ ID NO: 71979 - DNA, 503 bp, Homo sapiens
  misc_feature (1)...(503): n = A,T,C or G
atatatataactatatatataaaaaacacccacacgtacactcattaattaattaatctactatatctgattttacttttctctgttcctttctaatgtgatcattctaatgtrtctgtacaaaataatcaagtttgttagaattgtgtttaaacaaagagtaaataaacacagaatgagtgttggaggcataaataaagcccatgtgttttactatgcaggtttgttgtgtgttcgggcactcaaagactttccatgcctccttcttaaatgagttctggatcaccgagacacctggagagtggacagtgaataaatcggatgtctgtacagcacacatgggcgataaaacaggactcagtgcagagatgaaaatgacatctcacaatcacaacagttagagaccagtttacagccaaagagaactccttttcccagggtggaactgaggctgtcgatcgatgctgcagattctcaattccactgnngctgcagggcgtttt

SEQ ID NO: 71980 - DNA, 503 bp, Homo sapiens
  misc_feature (1)...(503): n = A,T,C or G
atatatataactatatatataaaaaacacccacacgtacactcattaattaattaatctactatatctgattttacttttctctgttcctttctaatgtgatcattctaatgtgtctgtacaaaataatcaagtttgttagaattgtgtttaaacaaagagtaaataaacacagaatgagtgttgsaggcataaataaagcccatgtgttttactatgcaggtttgttgtgtgttcgggcactcaaagactttccatgcctccttcttaaatgagttctggatcaccgagacacctggagagtggacagtgaataaatcggatgtctgtacagcacacatgggcgataaaacaggactcagtgcagagatgaaaatgacatctcacaatcacaacagttagagaccagtttacagccaaagagaactccttttcccagggtggaactgaggctgtcgatcgatgctgcagattctcaattccactgnngctgcagggcgtttt

SEQ ID NO: 71981 - DNA, 598 bp, Homo sapiens
gcctacaaactgttttacagttttccttcttctccaaggtgcagtgaaagcgaaggaacgctgctggacatggtgagacatggaggactttgtragggataacctttggttccctgattttttgacatgaatctaacgctctgcaccttcctccttcttcttgacagtgacattcataaaggccagaagctcggtgtttttgtttctgttgtctgtattctgtattctgttccactagtccatctgtccatccttgtaccaatacttcactgtcttcacattacagtaactttttagtcttggttcctggtaggataagtcggaggtttgttgttcttcaagatcaccttggatattctaggtcctttacatttccatataacattttagaaacagcttgccatttttccacccacaaaaaccatgctgggatttggttgagatgactttgacaccacacatcagtttgggaagaaccaacaactttataatactgagtcttccaatgcatatacatagtatatccctccatttagttacattttgttagacttatttctaagtatttgatgctttttgatgctatcataaattatat

SEQ ID NO: 71982 - DNA, 575 bp, Homo sapiens
caccaggtgagcacccttgggagggagacgcatagcctgactggggtgctaatgggtccccggcactgggttctccacatgaacagttgtgtgaatccaggaggctcagatcacgtgccacagcgccacctactggcctgtgaacaacaacagcatcctgttgtaaagtcggcaaacaatcatttaaaaattttcaggccrggcgcggtggctcacgcctgtaatcccagcactttgggaggctgaggtgggcagatcataaggtcaggagatcgagaccatcctggccaacatggtgaaaccccgtatctactaaaaatacaaaaaattagctgggcgtggtggcgtgtgcctgtaatcccagctactcgggaggctgaggtgggagaatcccttgaaccagggagtcagaggttgcagtgagccgagatcacgccactacactccagcctggcgacaaagcaagactctatctcaaaaagaaaaaaaaaatcaaacatttaaaatccttaaatctttttttctttttgagacagagtttcactcttggttgcccaggctggagtgcaatggca

SEQ ID NO: 71983 - DNA, 1710 bp, Homo sapiens
tctcctgcctcagcctcctgagtagctgggattacaggcatgcaccaccatgccccgctaatttttgtatgtttagtagagactgggtttcaccatattggtcaggctggtctcgaactccaaaccttgtgatccgcccgcctctgagatcagaactgagatcacgccactgcattccaacctgggcaacaagagctaactctgtctcaaaaaaaaaaaaaaaagtttttaaagacagggtctcgctatgttgcccatgctggtcttgaattcctggggtcaagtgatgcttctgctttagcctcccaaggagctggaatcatgggtgcccaccaccatgctcggctactattttcttcaaaattcaaatattctagcttaacagtacctattagataaataaatggcaattttctggaacattctttttttggttttgttttggttttttttttttttttttttttttgaaacggagtctccctctgtcgcccaggctggagtgcagtggcgcaatctcggctcactgccagctccgcttcccgagttcacgccattctcctgcctcagcctgccgagtagctacgactacaggtgcctgctaccacgcccggctaatttttctgtagttttagtagagacggggtttcaccgtgttagccaggatggtctcgatctcctgacctcgtgatccacccgcctcggcctcccaaagtgctgggattacaggcttgagccgtggcacccggcccaggaacttctcttatatctagaagccaggcttggtgactctacttgctcaccagatgatcctacacctgccacctccgatggatccactgcctctgtgcctgcctgtactgctgatgctccagtggataactcagcatcccagcctaggcccaatgccactgaagatggacctgccccctggagacccaggagttctaccactcagctgtccccagaagtgcccagaccctcattcttatccaggacctaggagccctaccccctggccttccgtcatcagccgtaaatgatgatttactgctgttaccatcatcactgcatttagtraccaagggccttccaaggtgccagctctggaacgaaggatgcctttgggaggtgatgacactcaggtacacgggtgctcaacagattgcttcctcctatcctcagatggtctttgcatgcatgcagccattggcactcccattgtacgcaaggaaaccagcccagggtcacacagctggtcagcagcaacacagctggtctcaaatctaaggtgcctggccatgcctccatgagggaccgcctgcaagggaggttgatcctggctttggggagcctttcctgggctgcacgagtaacctccaatgtttgaggccccaaactctgctcacatcttcctttccctgtctctgcttgggctatgatcacggtgactctagcaacccttcatggacattatagtactctctgccattcacttttggtctaatctgacttcaacccccacttacttggtctctccttttacaaccaacacaaccgaaatccgagggcttctttttttttgagacagagtctcattccattctgtcacccaggctggagtgcaatggcacgatctcggctcactgcaacctccacctcctgggttcaagggattgtcctgcctcagcctcctgagtagctgggatt

SEQ ID NO: 71984 - DNA, 827 bp, Homo sapiens
aagggcactttgaatttccaagcaaataataattttgaattagcttttaatcattgacttctagcacagttatatgatcagaaacatgctgtgtgatttgattgctctcaaatatattgagatttgctggaacaaaataagtcaggttaatttttgtaaatgtaccatgcatgcttaaaatgaatgtatctacatttgttcctgagatacaggttgatggacggatggctacatggatgtgatggagatggtttactatcgggaccttccgcatcctgctgatgttttgttgcttaggatatgaatggctgagcggaggctgtaaaacctggcactctgcttgggtatgargttcttcctgccatcctgccatcatttgttttttatgttttgtcgccaaaagtgaccttgaggaaccctgggagctcaggaaggaaggagagcccagaagcagggacagggagctggttggggaggaccagaaatcaggtttgtgaaggttccagagaggacctgtccttgcgaggagtgtgggagactgagatgggggaggggtcattggaatgatgcgggcgctacttggcattgtccattgtgaggcaccaccggggtcatcagggattggtggagagggagtataaagccccagggttgctaagggagggcccagaccgaagaaggtttggtggatagcagaacctttttgtctccctctaattgctcctaagcctcacgctcccttgccccacgtgtcctgttgcttccctgatcttctccgtgacctgtagctaaaccttccaccagcgcttgagaacttaatttgaacc

SEQ ID NO: 71985 - DNA, 827 bp, Homo sapiens
aagggcactttgaatttccaagcaaataataattttgaattagcttttaatcattgacttctagcacagttatatgatcagaaacatgctgtgtgatttgattgctctcaaatatattgagatttgctggaacaaaataagtcaggttaatttttgtaaatgtaccatgcatgcttaaaatgaatgtatctacatttgttcctgagatacaggttgatggacggatggctacatggatgtgatggagatggtttactatcgggaccttccgcatcctgctgatgttttgttgcttaggatatgaatggctgagcggaggctgtaaaacctggcactctgcttgggtatgaagttcttcctgccatcctgccatcatttgttttttatgttttgtcgccaaaagtgaccttgaggaaccctgggagctcaggaaggaaggagagcccagaagcagggacagggagctggttggggagsaccagaaatcaggtttgtgaaggttccagagaggacctgtccttgcgaggagtgtgggagactgagatgggggaggggtcattggaatgatgcgggcgctacttggcattgtccattgtgaggcaccaccggggtcatcagggattggtggagagggagtataaagccccagggttgctaagggagggcccagaccgaagaaggtttggtggatagcagaacctttttgtctccctctaattgctcctaagcctcacgctcccttgccccacgtgtcctgttgcttccctgatcttctccgtgacctgtagctaaaccttccaccagcgcttgagaacttaatttgaacc

SEQ ID NO: 71986 - DNA, 827 bp, Homo sapiens
aagggcactttgaatttccaagcaaataataattttgaattagcttttaatcattgacttctagcacagttatatgatcagaaacatgctgtgtgatttgattgctctcaaatatattgagatttgctggaacaaaataagtcaggttaatttttgtaaatgtaccatgcatgcttaaaatgaatgtatctacatttgttcctgagatacaggttgatggacggatggctacatggatgtgatggagatggtttactatcgggaccttccgcatcctgctgatgttttgttgcttaggatatgaatggctgagcggaggctgtaaaacctggcactctgcttgggtatgaagttcttcctgccatcctgccatcatttgttttttatgttttgtcgccaaaagtgaccttgaggaaccctgggagctcaggaaggaaggagagcccagaagcagggacagggagctggttggggaggaccagaaatcaggtttgtgaaggttccagagaggacctgtccttgcgaggagtgtgggagactgagatgggggaggggtcattggaatgatgcgggcgctacttggcattgtccaytgtgaggcaccaccggggtcatcagggattggtggagagggagtataaagccccagggttgctaagggagggcccagaccgaagaaggtttggtggatagcagaacctttttgtctccctctaattgctcctaagcctcacgctcccttgccccacgtgtcctgttgcttccctgatcttctccgtgacctgtagctaaaccttccaccagcgcttgagaacttaatttgaacc

SEQ ID NO: 71987 - DNA, 827 bp, Homo sapiens
aagggcactttgaatttccaagcaaataataattttgaattagcttttaatcattgacttctagcacagttatatgatcagaaacatgctgtgtgatttgattgctctcaaatatattgagatttgctggaacaaaataagtcaggttaatttttgtaaatgtaccatgcatgcttaaaatgaatgtatctacatttgttcctgagatacaggttgatggacggatggctacatggatgtgatggagatggtttactatcgggaccttccgcatcctgctgatgttttgttgcttaggatatgaatggctgagcggaggctgtaaaacctggcactctgcttgggtatgaagttcttcctgccatcctgccatcatttgttttttatgttttgtcgccaaaagtgaccttgaggaaccctgggagctcaggaaggaaggagagcccagaagcagggacagggagctggttggggaggaccagaaatcaggtttgtgaaggttccagagaggacctgtccttgcgaggagtgtgggagactgagatgggggaggggtcattggaatgatgcgggcgctacttggcattgtccattgtgaggcaccaccggrgtcatcagggattggtggagagggagtataaagccccagggttgctaagggagggcccagaccgaagaaggtttggtggatagcagaacctttttgtctccctctaattgctcctaagcctcacgctcccttgccccacgtgtcctgttgcttccctgatcttctccgtgacctgtagctaaaccttccaccagcgcttgagaacttaatttgaacc

SEQ ID NO: 71988 - DNA, 808 bp, Homo sapiens
tcttgcctcggcctcccaaaagtgctgggattacaagcgtgagccatgcgcctggcccaaagctcttttttgatctcttatcatatggccttccttaccccacaagaggcttcctctatgctgagcttaaggtttatcactatatatatatatatatatatatatatatatatatatatatatatatatatatgcacgttctgaaccacagaacataaaaccattttaaagtgtactgaattatacatcacaagggtgggcaaccaatacctctatatttacatgttttaaaatctgtacacctgggattgtatggcaggtcttttgcaatttgatttttgcatcaatgctgcttacaaggttcatctatgttgatgcgcatagctgccagcttgtgcatttcactgccaaatcgtataccattgtgtgactactttacaatygacgcattctcctggcgatcactgggctgtgaaggtgttcagaacatgccactcaaaatatgccactctggcctattgactattttgagttaaaggcacctgtggcctggtgaggtggctcatgcctgtagtcccagcactttggggggccgaggtgggagaattgcttgagtttgagacgagcctggccaacatggtgagaccctgtcattaaaaagaacaaaaaaattatctgggcttggtgatatgtgctcaggaggctgaatgtgaagatcagttgagcataggaagttgaggctgcagtgacctatgattgcaccactgcactcaagcctaggagacagagtaagaacctgtctctaaaa

SEQ ID NO: 71989 - DNA, 2130 bp, Homo sapiens
taattagcaagccacatgtaggcgattgaaactggatgctcatctcccactttatacagaaatcaactcaagatggaccaaggccttaaatataagacatgaaactataaaaatgctagaaataacatcagaaaaacccttctagccattggcttaggcaaagacttcttgaccaagaatccaaaagcaaatgcaacaaaaacaaagataaacaggtgggacttaattaaactaaagagcttctgtacagcaaaaggaacaatcagcagagtaaacagacaacccacagagtgggagaaaattttcatagtctgtacatctgacaaaggactaatatctaaaaagatatttttaataataatataacaacatagaaaagtgtcagtgtaataaaacttgataagtggccaaaggtaaaagttatctatataccattttaatgcttacattaacaaatgcatagatttaacagactgaaaaaatatattacctctgaaaatagctttatttgcrttttggtctagttgcaccttttgttcttaaactcttttctgaattttgatttatgaacaagcattctatttgaacaacaatcaataaaagttcaaaaagtatgatgaagaaaaaaattgcaattttccagaatagcaaaatctgttgtatttgtcaggtagggctttaaaatttttgtttcaacttatcccagactatttttgaactataattgaatatatataaatgttattaataaaagtaaacacccaaataactgatatgttttatgtgtccccctagacttaatttgtacaaaaagaaaaatttatagaattgaagtgatgaccatctatataaatcagtttgagatcccgtgggcttatctgcatatctgtgtgtgtacacacaacaaacagagatcttgtggaaaacactgaaaaaaaaacagttatttctttaaaattgtctttttagaattgcttaggttgttttgtaatttactgtttgcagttcatattttttctaattattgttaagtggaacagtataaattgatttcattttcccttgcaagaatgtttgccttgctatccaggaaatggtatttttctgttgaacctaagtattaccttacaactggatcctgaacgtcttaacaggtacccatacattgatggataggttgattgatgaggtctgctctagtctgaaggcaaaggttgagattactgccagtcttgctgctgtcagtgagtatccccaaccaacgttatccctttgtaagacatcagctgtcactggagcccaggcagcagtagacaaaagcagctgataagcatcccccaatcctgataaggttttctagacacccagaaacttcccctcacatactgaagtactttctctagacagatgagaaagctgttttaaaggtccacagtctgacctgtagctcaaattatttgagcccagatttaaaccattttaggaatgcacgagacatttggacccacgggcttcccgggacaatagcctgaagcaaaattagcagtagcacagagtccaggtaaagggattctgctttattgtggggatggagtgagtctgttaagacactcgtttgtcaaataagaataatcacatttcctgcatagggttgctataagaatttcattttaaaaaaattaaaagagaaacatctatacaaatttcttttatatatatatatatatatatataattatattttaagttctagggtacatgtgcacaataaaacatgtagcaaataataagtgttccagaaatatgagccattatttaggcagaagcacaactttggccttgctgagaatagatctaccttttcagaatttcagaaaatttccatggagtaatgactaaactcagagagataacacccatattctagttttttttttttaaataggtatttattttcttatcttgcttatagagtggtaatgaacaagaaataagtgaagaatgtattggataaaaattctccatagttagaattattttaaaaataaataaattgagaaatgtcacttttctgcagaaaattcttcaaacaccaaaaatccttaacagagagcctatagggccttcacc

SEQ ID NO: 71990 - DNA, 207 bp, Homo sapiens
agcctcctgagtagctgggactataagcatgcgccaccatgcctggctaatttttgtatttattatttatttgtatttatttgtattaatttttgtattatattagctcaatatttaatgctttccctaataatttgatttttttccaaatcataattatacaatatgtagaaaacatcaatttttttcaccaaatcygatagggat

SEQ ID NO: 71991 - DNA, 752 bp, Homo sapiens
tggatcccagatcctgccatgtcacgtccgcttcttaatttagtccccgctccttgrtctgagcacttaggttccacctgtggctgcacacttggttcttctgggcatgctcagaagttgaaggttacgtgaccttcaactcgaggggtccatggcaactgaaaaacaactcacaaccttgttacataaaagttgaggtggattggtcttgcatgattatggcagcacagagccagcaggaaagagctcatcagaccccaggcccatgtgtctccagaatccaccttcttttccccttaccaactacccagagtgagagcccactgttgtcggggagtctgagtgcaggctcatccctccactcctcattccattgccacaaagaccctctgagctggagcatgcagctctgccttccagataaggacactgaagctctgaggggctgcagggacagagccaagctttgcctccaggtcagtctggctggagtccagtgctctttctctacaaccagcccattccttttctctaaactttcccatattttatgccctaaggcagacagcacagggagaggagtatttcagggatatatctggcgaagatttaaaggcaggtgctgatcataaacctcgagcatttgcgttggtggggctgaggactccaagcagagatgcagaggctgggctggattagctgtgagaggcatctatttgctccaggctggggccatgtgaatatttatgcct

SEQ ID NO: 71992 - DNA, 630 bp, Homo sapiens
tagaccttgaagagagtattcagttccatgcaaaccagttggttctcatggaacaacagggagaccaatgagaatgagaacatggacccaactcctatctgtgagatgtgttccagcaccatgaggccttgtgaatgcttagtgaagtgcttaggagaaattgtattctttctcatgtgaaactgaataatcatagtgcattccatacatgatacaaggccctagagatctaaatagataccagtgaggaaaatattttatatttatatctatatatgtgtrtatatatatatatatgtgtatatatatacacacacacacaaacacatatattatatgtgaaagataattacatatgatgtgagattaatatatagtatatatttatttataaatataagcctagaaagagagagatgtgtctcccatgagagtttcacttctggaaaacaaaaatataaaatatttttgttttctttctggaaaacacaaacataaaaaattaactgctggctaggggtcagtattgactcccttcacacaatgagaacagcccaatccctgaatatattggcaggagttattcctcaaccctatacattatgtaagtatatatgtgcgtaactccag

SEQ ID NO: 71993 - DNA, 654 bp, Homo sapiens
tatgtccccatgtcctgaatccttcccagatacaacggaggctgacccctgaccaggtgaagcctcatacaggtcaagtgtgtgatgaattctcgatttccaaataaattaacctcaaactccccatatacatggaatgatgacacaaaaggaaccacactgagaccacaaaataaaagtctggtgtttgtgcctggtcttgcacagaaatctgttccctctggggtttgcatgagtaggtggtttttaaaggtaatacaaagccatagttaccaccaggattttcatagtcccatagaggaaaaagtcctgtaatgttgtatcttcttagtgctttgtgccttggaatgtttttctctccctcctggccaaaacttttctacaaagtatcccggatctactctctttctctggtagaatttgaatcgatttcataggaatttacaggacccctaggagccaggtgctggtttgagtttgctggaaccaagacacagagattaaacataaggcttctgcttcaaaacastcgcaaaatcatgagagaaataggtaagtaagaagacagtgacaaaagggtggcatgaggaagccttgtgatggaaatgccgtgtatcttgactgtggaaatgctgattgtgatcacaggaattg

SEQ ID NO: 71994 - DNA, 2715 bp, Homo sapiens
gcatataatgtgattagtatcaaggctggagctgtggctgccagtggtcttgatccaagacccctccggctctgaaaacaaatgattctgtggtttgatattggtaggtaatgagtggctttttttctactgaaaaagagagtgtccttttrtgaccatttaaaaaacaatagatggcacatttcgttaataccctgtaatgtgtaaagtatcaggtgcactgctggcactcaggaaattactggatagtgaagataaatcagcattaaatcactctaataaaagtcccatttaataaaaagttatcagcaaaatctgtagtaacactaaaaaggatacaaagtttctgcatctgtaagataggaatagcccctcaaaggcatgtgtagaggactaaatatggtaatgtatgtaaagcacctggattaaatatgataatgtatgtaaagcacctggcacagggtaaacactctgccatgcttggccttggacaatattatatggaataaaaatttgaccttgacaccttgcaagccttggtttgttttagaatcactttgccgttatgatattggacgtttccctcctacactttaagtttttcaagattggaaaactaagaaaaacatacaacgttagtttatagctgccctcctctgaaaaaaaaaaatagcactcctcctgaaaaataaataaagttgtgcttagggagttttgtggtcaaacaatttaggaaaattaagggtcagagaaagttaaacatttaatcttgctatcatccgcctcagaggctttgtatactaacatgcatgacgaccctccgtggggaaggaccagctcaggtggtatatggtatctttcaaacttccaagaacatggaaccagttttttaatcaatcgcctgatggaattcacattgtatggggcacttttgaaaaatggttgcctaaagtactggtccttttttttttttttttttttttttttttagtaccacaggactcttttattaatctctccccatgaaaccattatctgaaaaattcatttgtcattctttgtattcattttattaatcagaaaagcaagagcagtgatacaattccattgatgtatactcagaagataagaaaaccttatgagggtaaccctataggtttttacagtggggtaaaggtcattattcccattaatagtgggagtggctcatgagtacctttactgtgttcataggctccctgtgggatttcaggaccccggtttaggactctctgttcttgtagaaaatccaggatcactgattaaattgacccagacatttgtgatggaatgagccttccaaggaaagcagaggtagtataagaatgtgttaatttcctagggtcttggccagggattctttggatataaaaactatgctttcaggtttctgttcctttgttataggtatgaaggtatctattaaggatataaaatagaagctggctagcgggaaaaattggggatgaaggtacattctctttgtcccacgttcctcccttttctctttttgcacatctgctttgttctacctccagaaagcaggcaggccttctctactgtgcagtacaaattattcccaccatcacccctgggtcccaccctaaacatgccagttcctttgaaaccctcagcagaggttggctagagtctctaagctccaattctcagaaaagatagctgattggctcctcttggtcaggtgttcatctcttgtccagtcagcagtagctaagagtgagtcctcatggccccttgcctgcttcattagattttctgaaaatggggttataggaattgtcagaaaagatagctgactgtctcctcttagtcaggtgtatatctcttgttcaatcagcagtagccaagggtgggccttcatggtcagctgcctgcttttctgataatggggtcatggcattgggtaaggcttgggcaatgaccacttcacaataggggagagggaaacttgtactgagattcatgtgcacccctttagaagagaggagtgagtaggattggggcataaacgggtctctgaatctaaagactggtttgtgggactttaaaaacattgatgccgtgcctcagaccacatgaatcaagaacctttagtggccgttggggctcagacatcagtattaaaaaaaaaaaaaaaaattcccagtgattctgatgtacaattaggattgagaactcctagtagaagaaccccagggacacagttatctactgaaacccagaaagggaagaagctgctggtgaatttcccatattttactctgagttttacaactcagcatgtctgaggtccagtttaaaatggaaagggatgaacagttgctttgcatttcccctgcttcatctgcccttcctagttcttcattaacatcaatgctattctttataagcaagcccaaggcagtcaggtaaggtgcccagggaaagtgagttgaagttggtgtctagaagcctcagtttgaagccagacttagccactaaagcagccatgtgacctgggtaggtcacattcccccgattgccctgctgagtctcactcttctcttttggaaaatgggtcaatggagctatggtcagaggtcttccatgggtctcacgaaatcagtgaagtgatcagttcatcccagagccagcacttgaactaagagaggtgca

SEQ ID NO: 71995 - DNA, 1343 bp, Homo sapiens
ccctagattcaatctgtagggtgatggtctttaactctctgggttagtagaaatcaggactgctaggaggaggagactcagcttcccttccagggcacttttttagatgctgsaagatgacccacattggtgtcaggcttcggacagacaaaatggaaccaacggggatcattttcaagtgagtgtctatccgaaagggaggtttccacactgaggacatggccagtgtaattgaagctgggcttcactggccatgccaagggccaggcagagaatcgattcagttcagtctcttgctgaaaccacacaagttcttcaccttgaatttgacattaatgacctgcagttgttgaggaacgtacagctctagcttgccttcacagacagtatcttgtggctttcttaaaggatagtggctgtgctgcagggtgttctatcccagcctggagtggagctgatgttaggtgttctgaccttgtatcatttccccagctggaaacaaggcattcttcatagcgtcgacctcatggggctgttctgctcaatgagctgatgtatcactcagcactctgcactatgttgggcacgccatgactgctcaggaaatgccactggacactcttgcagttgttcctgttgctcgtcaccatcatcctttgaaacagatcccattaactatatgtatgcactttgcatacattagctcatttaatccttgcaactatccttcaaaggaggtaatgatatccttgttttacagatgaagaaaccaggctggaaaagtgtttgtctggagtaagggggagagtaacgatgtcttaaaaaaataataatacatgctaatgtagaagatgtcatcatcccagaggtgcacagaataactagctagtgaatatccttcttttattttttgggtaagtgtgtgtagaggcttaaggagcagaggcaagaagagaagacttaccctctctgccatgcttcaggttaccttctggtgtgtctgccactctctctgggactcagggtctttttctatgtagtgtcttgccatgagtccatgagtatggtgggtaggtatctgctgggcaggtattcaatgggcattgcctccctggggaagtctgcagggaagctctgaagaaggcagaaggaacagagctccatggatccatccacaaaataaaacaagggttttcagaaaaacacaagactcttcatcatcaatgccatctatgcagccatggagtaactaatggtcatcaacggtatcatgctagaacactttcttgtagaattgtttcatagtgtatctttaaatccagagattgaagaccaactaacca

SEQ ID NO: 71996 - DNA, 1640 bp, Homo sapiens
cctcccacctcagccccccaggtagctaggactacaggcgtgcaccaccacacctggctaattttttatattattttgtagagatggagttttgccatgttgcccaggctggtcttgaattcttgggctcaagaaatccacctgccttggcctcccaaagtactgggattataggcatgagccactctgccaggcctctatttttagtggttgatagctagtctcagtgtagctttactcgttttttctgaggaaacattgctctacgcaccagattctttgttttttgcttttcttttctttcttttcttttttttttttttttggtcacaggatcttgctatattcccctggctggagtgcagcggtacaatcagagctcactgcagcctcaaactcctgggctcaagtgatcctcccactcagcctcccgactatctgggactacagatgcatgccaccatgcctggctaacctttgtattttttggagagaaggggtctcactgcattgtctaggctggacttgaattcttggtctcaagtaatcctcctgccttgccctcccaaagtgctgggattacaggtgtgagcagtcatgcctggtctcctttaatttctttttttttttttttttttttgagacggagtctcactctttcgcccaggctggagtgcagtggcacaattgtatttttagtagagacggggtttcaccatgttagccaggatggtctcgatctcctgacctcgtgatctgcctgccttggcctcccaaagtgctgggattacaggcgtgagccaccgtgcccggctggcctcctttaatttcttaaccataaatatcctccccccacttttattatggacattctgaagcacataaaaatagggagcatagtataataaatttgtacatatttaacactcagcttctataattagaagcaaacggcccatctggtttcatctaggcctctttgctatcctttcatctctaactggcttattttaaagcaaattctagatgacattctgctgagcatttctgccagaattacacctctctttgctaatgtgaaaaaatgcccatgataactgtaaaataagtgtgtcctatttaggtgtctaaacactttaatgtcacagtattaaggccttaaaatatagcttagatatatttttctaaattaaaagactttattttttagatatacagaaaattgagcagaaaacaatgagttcccatataccttcttcatcccaacagtttccccctcattaacatattgtgttagtgtggtacatttattacaaaggagtgaatattgatatattattattaactaatttcatagtttactttgtgttatgtattctatggactttaacatgtgtaatgacatgtatcccctatwaccagtatcatacaggatagtttcacttccctaaaaatcttttatgttctacccactccttcctcattccctctccccactcctccctccctccatcttaagcccatggcaacccctgatctttttactgtctccatcattttgctttttccagaatgccatgtagttggagtcatatagtatgtagccttttcaattggcttctttcacttaccagtatgca

SEQ ID NO: 71997 - DNA, 773 bp, Homo sapiens
ggtcttaacctggcccttgttccagacaggtgggcggacaggtaagcagagccggtgctcccagggcaggcgagggagccatgtggtcaggcctcaggaccctgggccccaccgggagatgtgctcctgggctggaaggaagcagaagagagcagggctcgatggcagcccaggcagtcccaagatggcagccctgttgcactcggtctggaagtgcccatggccgtggtccctgtggcgctccaggccttcctagcagaggctgctgggagctggtgccatgctaggtttcacctccgcctccaccacagttcatggggctcccgggaacaccaaggaacccaacaggttcccaggcagcagctttcatgacaggagagggtccttggagaaatcccctgcagagctgtagctctagtccttcctgcgtggccttgctgtatgaagctgggcccgtcgttgcccctctgggctcaggagcccacaggtacaaggccatcaacagggcatcctctatggccccgtgtgcccagacccactctgaacctgccacctagatacccttgcaggctggaccgggtcagcagcacccccagggtcagagatcagagaaggggagcctcaggaagtccctcaccaaactggcagatgtaacggtttcgggttttgcagcgctggttgttccagttgaaggcagctgaagcctgcagctccacgcagttgccaaacctgcaggccakggtgtggtggtcaggaggcaagagtgaagtcag

SEQ ID NO: 71998 - DNA, 1896 bp, Homo sapiens
ggacacaaactctcacgcatgcaggccttaattgaaaactaaaacaattagcttttaatacttgtgaaataacggactgaagcacatttacaggatgactgggaagcaacagtcataggctgtttcttttttaataacattgaattgtgttcacagttaagctcattaacaacacgaaagcagaacagagcaggacactggaatgccatttcactgattatttttgaacagtccttgctgcttattctatgctcaaaaccaaaccaaaacaaaaccgcaaactaggctggaagcggtggctcacgcctgtaatcccagcactttgggaggccaaggcgggcagatcacctgaggtcaagggttggagaccagtctggcaaacatggggaagctccctctctagtaaaaatgctaaaaaaaaaaaaaaaaaaaaaaaaaagaaaagaaaaagaaaatatagcctagcatggtggcacacatttgtaatcccagctactcggaaggcaggagaatcacttgaacccgggaggcggaggttgcaatgagctgagattgtgccattgcactccagtctggacgacagagccagactctgtctcaaaacaaaacaaaacaatacacaaactggagaacaaacttcctggaaataggtgcttgtgtgtgttttactgtttaacgaccagatgttggtaacacaaggttgtgccctgagaggcttttgagatccaccaggaaagcacagggatttggccacagtctgcaagttggtcaatctgtctgtgaggtggtttgttgatgtcggtatggctcctcatccccaaagtgctccaaaccagatctttgagccctcagctagccagcccgttcccacaatggctccttatgttgaaattttccctccacatccatgaacggcagtgtgagggatggggacccttgttggaactctatgcatggtccttgcactgccctactcaaaatgcatccagggttcctccaactcctcagcatggagtctaaagccctccaagaaaatggcccccagcaccttcctagcttcatttttagccactctctcccgccagtcacacccagccacactcgtctgcctgtgttggtttcgtgactcctctgcacaaaggttcccctatgttgaattctctttttcctcttctggcaagttcctactctgtgaagtccccagctaagaggatttgccccctccctggttgcctgtagtcctctgatggtttctcgctacatctattatagtctctgtgtgggaacttttcacttcactagaatatcttgagagcagagcaaatctcagctcagacatctgccatgtcgtaggtgcccaacaatctctgctgaatgaactataaacaaacaagacggaccggtgcacccaactgtggggagagtgccgtcactgcataagcaaaagagatgctggcgcaggaacaaggaattctgtgagtggtttcattattattctcatccagcctgcagagttcagtagacaatgtgaccaagggacaacatgggaaagttcattttattaccwtctgagttttcaaaaatgatattggtaaaaatgctaatcatctaaagaatattttattttattttattttgagacagggtcttgctctttcacccaggctggagtgcagtggcacgatctctgatctcagctcactgcaacctccgcctcccaggttcaagcgattttcctgcctcagcctcccaagtagctgggattataggtgcaaggcaccacgcccggctagttttttgttttttgttttttttttgttctgggatatgtgtcagaatgtcaggttttttacataggtatatatgtgccatagtggtttgctgcacctatcaacc

SEQ ID NO: 71999 - DNA, 691 bp, Homo sapiens
ccacacaactattgacataaaaatacaaaaagaagaaaaattaaaataaaaaataaaaataccttttatttttttttctttattctgagagcaatacatactccttgtagaaaatttggaaaatataggccgggcgcagtggctcacgctcgtaatcccagcactttgggaggctgagacaggtggatcatgagatcaggagattgagaccatcctggctaacacagtgaaaccccatctctactaaaaatacaaaaaattagcagggcgtggtggcgggctcctgtaatcccagctagtcrggaggctgaggcaggagaatcgcttgaaccagggaggcagaggttgcagtgagccgagattgtgccaatgcactccactccagcctgggcgacagagtgacactccgtctcaaaaacaaaaacaaaaaaaaaagaaaaaatttggaaaatataaaaatgtcaatgaaataacattttttaaaagaggggggcgttggaaatgttaaaatatttggggtgttttcttgcatttgaattaaaatttcagcttagatgaaactattaatacctgtgttagtgttaatcactttggtcttctgtttcttcaactgtaaaataggaatgatattttagctcctagcatgaaggagaaataaataaaaacaacttgttcaaaatatttgatgcat

SEQ ID NO: 72000 - DNA, 1775 bp, Homo sapiens
ttcttctctgggattgatgactgcaatttgtctttctggggcttccactgccgcttggacaggcagcagctggacctgagaagccctcctgatgctttcaagtcagcagattgcttctgggctggccacgcttcagtgccttcccgttaaataccgtattgattttaggactttcttacttccatgcagctcaggacccgtagttggctgggataggaaagtggggaggaaaggtataatggggagagttgctcagcaggtttgcacacacagccgtaagctatctgatgctactgatttattttatttatttaacaaatgtaataagacatggcctctggtttgacagaggactcagtgggaggagagacctcagggtgaatctgtggatatgagggttaaatttacggaaaacacacaaagaagttgcattaagaaggaacaacatgggattcaatttataggaaacaaaagaataggttgcaccaagaaggaacaaggcatcaaccagatgaaactcccttctcctctgcaggacaccactgcctccctgctatttcatcagctcccacctagaggactgaagtcatcttcatgcatccctccctatggccctgtatttcccctcctacctctatttcttcaggcaattgccaggcatccttttaaaaaattgtagtaaaatacatgtactataaaatgtaccatttcaaccattttaaagtgtaccrttcagtgacattaaatatattctaaacattttgtggccatcactactaatttcataacttagaactctaattcatcaccccgaaaaggaagcctcgcacccattaagcagttactccccatacttccccttccctgttcctgaaaaccactaatctgctttctgtctctgtagatttgcctgttccagacatttcatataaatggaattatacagtatgtggtcttttgagtctgactttttcacttagcataatgtgtttagtgttcatccatagtgtagcatgtaaaggatatggagaaattagaacccccatacatgatgataggaatgtaaaatggttcagtcacatgtgggaatgtttggaaattccttaataagtcaaacatctaattaccacatgaccccgcaattctactattagttatgtactcaaaagaattgaatcagatagcaaaacaagtgtacaccaatgttcatggcagcactattcatcatagctaaaaggtggaaacaacccacatatctatcaattgatgaatggatgaaaaaaatgtagcatatccagggattcctttgaacaaatcatatcactttcctgctcaaactcttcagtggctttcccttccattttatgttaaataggattggaccatccatggctacaaggtctcaggtcaggcagcccactcaacctttccaacgtgatctcacactattcctcccttttctcattatcctctcgccttgatactcaatttcttaaaactttcaaaccctgtcctgactcagggtctttggcgatggtgtgtcctcagttttcgtattactcacatgtatctaaactatcacctctgttatttttctatttccatgccctgtgaatgtcccttcaaaacacttcatattgttaatcacttgtttattttttcaatttttcaatgcctgttttcccaagctctctgtgaatggaaaactatgtctgtgtttccattacagaagacacagtgcctggagccgagctgggtacttagtagttgctcaa

SEQ ID NO: 72001 - DNA, 1775 bp, Homo sapiens
ttcttctctgggattgatgactgcaatttgtctttctggggcttccactgccgcttggacaggcagcagctggacctgagaagccctcctgatgctttcaagtcagcagattgcttctgggctggccacgcttcagtgccttcccgttaaataccgtattgattttaggactttcttacttccatgcagctcaggacccgtagttggctgggataggaaagtggggaggaaaggtataatggggagagttgctcagcaggtttgcacacacagccgtaagctatctgatgctactgatttattttatttatttaacaaatgtaataagacatggcctctggtttgacagaggactcagtgggaggagagacctcagggtgaatctgtggatatgagggttaaatttacggaaaacacacaaagaagttgcattaagaaggaacaacatgggattcaatttataggaaacaaaagaataggttgcaccaagaaggaacaaggcatcaaccagatgaaactcccttctcctctgcaggacaccactgcctccctgctatttcatcagctcccacctagaggactgaagtcatcttcatgcatccctccctatggccctgtatttcccctcctacctctatttcttcaggcaattgccaggcatccttttaaaaaattgtagtaaaatacatgtactataaaatgtaccatttcaaccattttaaagtgtaccgttcagtgacattaaatatattctaaacattttgtggccatcactactaatttcataacttagarctctaattcatcaccccgaaaaggaagcctcgcacccattaagcagttactccccatacttccccttccctgttcctgaaaaccactaatctgctttctgtctctgtagatttgcctgttccagacatttcatataaatggaattatacagtatgtggtcttttgagtctgactttttcacttagcataatgtgtttagtgttcatccatagtgtagcatgtaaaggatatggagaaattagaacccccatacatgatgataggaatgtaaaatggttcagtcacatgtgggaatgtttggaaattccttaataagtcaaacatctaattaccacatgaccccgcaattctactattagttatgtactcaaaagaattgaatcagatagcaaaacaagtgtacaccaatgttcatggcagcactattcatcatagctaaaaggtggaaacaacccacatatctatcaattgatgaatggatgaaaaaaatgtagcatatccagggattcctttgaacaaatcatatcactttcctgctcaaactcttcagtggctttcccttccattttatgttaaataggattggaccatccatggctacaaggtctcaggtcaggcagcccactcaacctttccaacgtgatctcacactattcctcccttttctcattatcctctcgccttgatactcaatttcttaaaactttcaaaccctgtcctgactcagggtctttggcgatggtgtgtcctcagttttcgtattactcacatgtatctaaactatcacctctgttatttttctatttccatgccctgtgaatgtcccttcaaaacacttcatattgttaatcacttgtttattttttcaatttttcaatgcctgttttcccaagctctctgtgaatggaaaactatgtctgtgtttccattacagaagacacagtgcctggagccgagctgggtacttagtagttgctcaa

SEQ ID NO: 72002 - DNA, 601 bp, Homo sapiens
tctttttggtaaacatttgaattggctcaggcactatgccaagggctttgcaaatatttattcatataatcaatcctcacaataatatggaggaataaattctagcatttccatttgacaaatgaggaggcaagatttcagcatttaagtcatttgcccaagatcccacaagtagtgtttggggggatcctacacttgaactcagaaagtttcactctaaaatccataatcttgaactctacactgtggagtgcacagttatgacttcagagaagggggagctcagcatgaggtagagctagtaaaggctgtacatgaacggagtgagcatcttgtggaaaatgtagacttgagttaagctcacatgtgaagaaaagccagtgtagtctgaatcctcagcggggtgaaggtgtgaattcaggactctactggttcagttgagagctatttattcagcatctgcaaagcatggcaagccartcttacacaaatgctgattataaggtaatgagcaaggggagacgtggctttcccctgcccagagctcccaagctagtgagagcttcaaacaagtcaataaatgattcctacaggagccatt

SEQ ID NO: 72003 - DNA, 1302 bp, Homo sapiens
agcctattatctgccattattctcctggaggtagatacttcacgtatccgagagctcaggtctgctgaaaaccactttgaaaaggattcagtctagatatgctaagatgaataagactcactgcatcattctgtccacacctgcctaagaaggacatgcttctaggtttcaggcaggataatgatcttagtcctgaaaccacattatatcaggatagggcttgtcagaagttctttaagaccatgatttcattaagctttcttatacctgtaatagagaaacatcttgcttcctttacagatgggcaaaatgaggcttagaaaaacgtgatgcttctgcagaggaagtagggggtgggagtttatagtgcatcctcattcctagcttacctggcaacacaagctcagcttctctccctgaatcgtttaaaaatctccacaatcagccaaaagatttatattttcttattaccttagcagcttcttccgaataaatctttttttcccagcacaaggaatgaatttaaaggaatatactaaatttctaaaaaatgggcttgcaaagcaagattctgctttgaccctaatatctcccttagattccctyctgcacacatacacccttatcaaacatgattcaccttctctgggaacaggctgagattggagtcatggccaaaggcaggaatggaggtgtgggcattttcatagtatataatgagcaaatgaatgatgactatgaggaattttgggtgtcagaccaccagttaccaatagttttcaaagagtagaagaatttgaggagaaggtgatttttaatataattacatgcagaaatatgttttgaggaatgaatttttaaaattgcggtcattgatgtttttgcatttctcttccattagagagaataaaaacaatctaattaaaattatagcctcatgctagatcatcttattagctccatgagatttcatacataggctcactgaacatctggaattccagaacatcatccattgccaactttaaaatagatacctaaatacatatagatacatgcatatgatgggcacacactgctttttttaaaagttggaatacattttttacatgaacttgatctcaaaggaatgacatagaaaagctaaaatggtaagcttcttgattcaaaatcacatccaattcacatgaaaaataacttatttgaaaaaatgcacggttttttttctcctgatgagagtgcacaatcactttgagaaatttgggaatagcggcaaaaagtaaagaaaacataaagcacaca

SEQ ID NO: 72004 - DNA, 1605 bp, Homo sapiens
tacttcactggggacccccactgctgatgtgaaccattcacaggcctagaattccacctctgctctgcgcttgagtaccagatgcgtttctggaccatgaacctcatcctctgtatggcagcccatttgcagtggagcaggctaggaatctatgcaatacagaaaccagcgtaactgagggatgacaaaagtgaaggtaatttaaaaatactttaatcatattagaaaaagagctataaactgcaatgtaaagtgctcatacttttgggccaggcattttgcttttgggagtttatcctacaaagactttcatatatgtacgtgaagatgtacattcaagcatttttattgctgtaatgtttataaaagggaaaaccaggaaccaccatcaaaatgtccatttatgtgaagttggtcaaatggtgggacatctataaaacagaacacaatacaaagccattaaagggaatgaagtagcatattgtttggcattatggatcagaagggaaatccgttatattggaccatggaagcaccttgggtttacttagtggaaataaaatgtgctaagttaatgaaattgggagaatgtgggccattcaagggacacatctgaaggcagagctgagataaagagaaggagattacagaatttttatgttcttaggctgcagggtccaaggactctgttgggtttcactagttggagctggcgggggctgatctgataggctctgcttctagctgccctcgttacagcttatgttaaagatctgaagataagacaaaccacatgcaggttcctcaaacgctctctaggagcggagctctggctttctgggaggatcccacttagaggaagagctgggtagtacgtaaagcgtgggtaggtggctgtacagtggacaagtggacaggaaacttggggggctctccaggatgctgttgacatgtttgacattatgattaacgtaagtaaactatgaatttgcagtactacctgtctcattcattctatttggtaggaaacctggactgagtgatggaagaacccattctcctgactgcttctgcaaactgacttggattactaaacattatggagtttctctgccctttattgccaccaagaaaggccaagatcacccaaagcaggtagcataagctgaagggggaacaataaaaataacatcaacaaagacattactatgtagcaggtgctgggttaaactctctgcatgtgttttatcatttgatcctcaccaaagactaaagaaatagagtattattaatagttctccctttttacagacaaggaaaaagatacaaatcgtgagacagatggcaatatactgaagagagtgtgatcacacgtttgtaaataaaaaagtagaacttgatatatacgaagggaaagaacatagtcctctctcaggtgtgtggagagatctgttaaattttttttttcttttttttttttttttttattatactctaagttwtagggtacatgtgcacattgtgcaggttagttacatatgtatacatgtgccatgctggtgcgctgcacccactaatgtgtcatctagcattaggtatatctcc

SEQ ID NO: 72005 - DNA, 1537 bp, Homo sapiens
tgacattaaaaacaatagtctgtcattcacagtgtttagtccacaactgagcaaagatttctttttttcctaagtcacaggacccaaattcacagtggcattgaagtaactaattaatctcacacagctggtaacacagattcatcttcatattttgggttggggttatcctatttttgttcccatcgttaagtttatattgaatattacaatgtgctctgagtttttattttgaaataggttgaaaagaaattataaagataaacaaaaatcccccagtgaacattccatgaaacaccagctccataagccatataaggtagcctagaaaaaaaagcccccaggccaaagaagaatgagaaaccccacagaccatacctaaccctgttagagaaacacaaagcattttaaagttaatcagaaatcctgcagttaaataaaccatttaaaagtaatcaattcagtgtttcccacatctacttgaccctgaagtatatttttttcattcctatccccaccccggtggtgtaatttttgtgactaatttcttggaagtgaattagaattgtttggaactaattagaactggtgttcttgaaatgccagtttggaaccatggcaagagtgagcagtctgtattagcagctagaggaaccctgccatgggaagtcagagaatggagcaaatcaagctcccgtggactttgctgttttgaggttggaatcctgagtgcccaagacaccacagggagaaagggggacgtctacctcctgagtgagccatgcagggggatgccgaggtgaagaggctgatgtggcttggttctgcatccccacccaaatctcatgttgaattataattcccagtgttgtagttggggcctggtgggaggtgactggatcacgggagtgctttctaatrgtttagcacccacccccctagtgctgtctcatgataaaattctcatgagatctggttgcttaaaagtgtgtggcaccttcccctttgctctctctctcctactcttccatgtgaagatgtgctggcttcctcttttgccttctgccatgactgaatgtttcctgaggtctccccagccaggatccctgtacagcttgcagaatcatgagccaattaaacctcttttctttgtaaattacccagtcttaggtagttctttatagcagtgtgagaatgaactaatacagaggccattggggaactcgggggttgagaggatccatctgtctcaagccaccctgggtagccttgagattcctccagagagcagtggggcaactgcaggtccctatataggtttttttctccaaacaccctggaggttggaagcattgatggcagatgaggaaagcacagcatcacagttaggactgcagcttttgaatcacaggaacctggttcacttcctgtttctgccactttttctgtccatgaccttggagcttgttctctggattctctgagcatcacagtaagctcatttgtaaaatggtaaagccaggctcacacagtcaaa

SEQ ID NO: 72006 - DNA, 672 bp, Homo sapiens
catgggaccttgctggtgaggacatgtggctggcagtgctgaaggatgccactggcagggaatgttgcgaattcttgctgttctatggcaaggagttcacagatattgctaagcaagcaaatgcagtacctttgccaaggaaatcacagtctcctggaggtcatctcttccactgactgattctgcagacacatccctcactcatcagtttgttctccatatccccagcccacagcctctccagcaaagaagcggtctgytgcagaggaaggtgggctgttcagtaaagtagaaaatgattgtcaaggaacactttggagctactggttggctgtcatcctgagcatagatgaactttatgtctaaagtgctgctctgggggtcaaagaggaactaggaactcagtgggattctgcctactcatgaacctagaagctatcccaaggggatcagagtagagatccctgaaaagcagcagcctgtcttcttgacggtctatgggggacaccttgtttgacctcataatgtcactcactgtcccagagacatggtggccaggacacttggctcaggaacaatgtagcaatggagtggtactacagataaatgatcctgtattgagggattaataccctttacatcactcatatggctgtttctttacaatgagct

SEQ ID NO: 72007 - DNA, 633 bp, Homo sapiens
gccactgtgcccagcctatctcttaatctccattactttctagggcaaatgatacaaacttggtcttctcttcagggctcatgcagttatttccctaatcaacttatcccataaatcacatgacctatttcagagaccaaataattacaaataaaagattccccccaaaccatagattcttgttggcaatgagcatcagttgagctcagattcrgtaaaaagtaaaaatgaaaaaagatccatagctatagatttctgttagccttttttctatggtttttggtaaccactgtccaaaataccaataatgtaagtataaacccttcccaatgcaaaaagaccagtcttttttgtttcgaaagccaatttctacctggtgggatttttttttttttaaacaaaatctaaagtcttcttctcttttaaatatttctgacttggaaaactggtaggtagaatagctgctggcagcccaaatgctcaaaatcacttcttcattctttcaatggttgctttgttcatttaaaacactaacaaccactgcaaaccatgatggagtgcccactgtgttccatgtgctgaggttacagaaatgatgaagcctgaaggccttgaaatgcctataatcatgca

SEQ ID NO: 72008 - DNA, 633 bp, Homo sapiens
gccactgtgcccagcctatctcttaatctccattactttctagggcaaatgatacaaacttggtcttctcttcagggctcatgcagttatttccctaatcaacttatcccataaatcacatgacctatttcagagaccaaataattacaaataaaagattccccccaaaccatagattcttgttggcaatgagcatcagttgagctcagattcggtaaaaagtaaaaatgaaaaaagatccatagctatagatttctgttagccttttttctatggtttttggtaacsactgtccaaaataccaataatgtaagtataaacccttcccaatgcaaaaagaccagtcttttttgtttcgaaagccaatttctacctggtgggatttttttttttttaaacaaaatctaaagtcttcttctcttttaaatatttctgacttggaaaactggtaggtagaatagctgctggcagcccaaatgctcaaaatcacttcttcattctttcaatggttgctttgttcatttaaaacactaacaaccactgcaaaccatgatggagtgcccactgtgttccatgtgctgaggttacagaaatgatgaagcctgaaggccttgaaatgcctataatcatgca

SEQ ID NO: 72009 - DNA, 560 bp, Homo sapiens
ggggaagcagactgcctgcctggtggaggcatcctggactctctggggcggtgaacaaggcagctggggacagaccctgggaggaagctgagcttggagtcgagactcgggctctcctgagaggggtggagagaagcgaggtcagagctggcccagctcctgctgctgcagttgtctttttttctcagcgtttgggggcaggagaaccagggctggtgagggatttccgaggccacgggcggcacgtgactggcgctggtgctacctgggctgggttatccttgcatcctgctttcatccagcagctgtgtctgctttggggcctctgggctccacccctgggtaacgctgcagaggacgtggtcaggaaagggcaggtttccctcctcgccaaggaaggtggtagagaggtgttcagactcrccttccctccctgggcccagcagcggccgtgggcgtcacagcaggagcctgcctcacagggccgtcgcttcctctccgctgccccatgctgctggccccagcacttggcttggtggctcggccagcgggtggcctga

SEQ ID NO: 72010 - DNA, 560 bp, Homo sapiens
ggggaagcagactgcctgcctggtggaggcatcctggactctctggggcggtgaacaaggcagctggggacagaccctgggaggaagctgagcttggagtcgagactcgggctctcctgagaggggtggagagaagcgaggtcagagctggcccagctcctgctgctgcagttgtctttttttctcagcgtttgggggcaggagaaccagggctggtgagggatttccgaggccacgggcggcacgtgactggcgctggtgctacctgggctgggttatccttgcatcctgctttcatccagcagctgtgtctgctttggggcctctgggctccacccctgggtaacgctgcagaggacgtggtcaggaaagggcaggtttccctcctcgccaaggaaggtggtagagaggtgttcagactcaccttccctccctgggcccagcagcggccgtgggcgtcacagcaggagcctgcctcacagggccgtcgcttcctctccgctgccccatgctgctggccccagcacttggyttggtggctcggccagcgggtggcctga

SEQ ID NO: 72011 - DNA, 1744 bp, Homo sapiens
aaagcaggaggattccaaggaaggctgagatgaaagaacaagtcctatgagctgaaccaagtctgaacagcaccttaaattatggagacctcatcttttggtcccagtcttccaggtctgacccttcagtgtccaaataaccaccaaaacctgcctggcggggacacgtgggcagcaacatggagtgatagtgtgcagcatgctagacactggagggcagatgctgggtgataagtctttaggctcagcctgtcacacatgcgcattctcagagctccccagacagcaccccactgcttttggcccactggtgtccagccaaaaataggctggccaggcatggcggctcatgcttgcaatcccagtgctttgggaggctgtggtgggagaactgtgtgaacccaggagttcgaggctgcagtgagctataatcacgccactctactgcagcctggatgacagaacgagaccctgtctaaaaaaaaaggttaaaaatttttttgtttgagacagagtcttgctctcgttgcccaggcaggagtacagtggtgcaatcttggctcactacaacctccgcctctcgggttcaagcgattctcctgcctcagcctcccgagtagctgcgactataggcgtgtgccaccacacctggcaaattttttttttttttgtatttttaatagagacggggtttcaccatgttagccaggatagtctcaatctcctggccttgtgatccacctgccttggcctcccaaagtgctgggattacatgcatgagccaagccaatgtgcccggccaaaaattaaagttttttttaaagctgattacagaaccttctatccattgcatgatgctggacgatcatttcacctctcaaggtaatgtaatttctgtaaaggtcctaacatttccaaaatgctacgaataaagtaattttctcttaggaaaaaaataatttcccctgagcccactgttacctacaacaaagaatccttcccyaaatccatcaagagcagcactgaaagtgacttttcttctagcattgtcactcatgctcaatacattgtcactcatgctcaatacattggattcatttttttcctgactctcctcttgataagcaacccattaaacctgagctagaagtagccaagagaaggagacaccccaggtgttggtctgcagtttccacttaactgccgtgtgcctcagtttcgttgactgagtcatctcagccacaggctcagtccttttacttggtagttacgcagcacaaaaacctagagagtcagagctgagttgggtccatttttattgtggatcagggcttagaggataagcaccggtcagcattgttggctgcaccatctgccatccttctctgtgagccacctctgtgagagagtctaaattcagcccaagaaatcaggatcaagaaggggtaaaaagccgtggaccacatggccactcctgctgtatctacacctaccagtcactgaacacctgcccaagtgtgacggcttccatgcaggagacccaagtggctctgctagggagaatgacttatttacctaaggcttttttatttctcaaaagtggggggaaaaagggctggtttctagaaacagatgtggaattgaagaatgtcccagggagctaagttttaaggactaatcacaaacttgtttctccaacaacatcctgaatccattccttgcaccatcacacatttttcatgca

SEQ ID NO: 72012 - DNA, 1744 bp, Homo sapiens
aaagcaggaggattccaaggaaggctgagatgaaagaacaagtcctatgagctgaaccaagtctgaacagcaccttaaattatggagacctcatcttttggtcccagtcttccaggtctgacccttcagtgtccaaataaccaccaaaacctgcctggcggggacacgtgggcagcaacatggagtgatagtgtgcagcatgctagacactggagggcagatgctgggtgataagtctttaggctcagcctgtcacacatgcgcattctcagagctccccagacagcaccccactgcttttggcccactggtgtccagccaaaaataggctggccaggcatggcggctcatgcttgcaatcccagtgctttgggaggctgtggtgggagaactgtgtgaacccaggagttcgaggctgcagtgagctataatcacgccactctactgcagcctggatgacagaacgagaccctgtctaaaaaaaaaggttaaaaatttttttgtttgagacagagtcttgctctcgttgcccaggcaggagtacagtggtgcaatcttggctcactacaacctccgcctctcgggttcaagcgattctcctgcctcagcctcccgagtagctgcgactataggcgtgtgccaccacacctggcaaattttttttttttttgtatttttaatagagacggggtttcaccatgttagccaggatagtctcaatctcctggccttgtgatccacctgccttggcctcccaaagtgctgggattacatgcatgagccaagccaatgtgcccggccaaaaattaaagttttttttaaagctgattacagaaccttctatccattgcatgatgctggacgatcatttcacctctcaaggtaatgtaatttctgtaaaggtcctaacatttccaaaatgctacgaataaagtaattttctcttaggaaaaaaataatttcccctgagcccactgttacctacaacaaagaatccttccctaaatccatcaagagcagcactgaaagtgacttttcttctagcattgtcactcatgctcaatacattgtcactcatgctcaatacattggattcrtttttttcctgactctcctcttgataagcaacccattaaacctgagctagaagtagccaagagaaggagacaccccaggtgttggtctgcagtttccacttaactgccgtgtgcctcagtttcgttgactgagtcatctcagccacaggctcagtccttttacttggtagttacgcagcacaaaaacctagagagtcagagctgagttgggtccatttttattgtggatcagggcttagaggataagcaccggtcagcattgttggctgcaccatctgccatccttctctgtgagccacctctgtgagagagtctaaattcagcccaagaaatcaggatcaagaaggggtaaaaagccgtggaccacatggccactcctgctgtatctacacctaccagtcactgaacacctgcccaagtgtgacggcttccatgcaggagacccaagtggctctgctagggagaatgacttatttacctaaggcttttttatttctcaaaagtggggggaaaaagggctggtttctagaaacagatgtggaattgaagaatgtcccagggagctaagttttaaggactaatcacaaacttgtttctccaacaacatcctgaatccattccttgcaccatcacacatttttcatgca

SEQ ID NO: 72013 - DNA, 711 bp, Homo sapiens
atccccaaactggaatctggctgaccccaagagccggtgcttcctgtagcataatcccatgtaacagctggcaaactttctgcaaggggccaggcaggaaatatttgatctctgtgggccacacraactacacacacagctttgccacggcagcctgaaagcagccgtagacaacgtggaaatgaacgagcatgactctgtctcaataaaactttctttctaaaagcaggcatcaggcaggattgggtctcagggctgtggttgccaatccctgctctataacatccaggactggctgcggaggggagctgggatctaggacacactggcaatagcagaacctcgaaagcctgaggcttgttcgtgccaaaaacaaaagccacagccagaaccccagctgcaggtgggcagggcagctccctcttgaagggctgcgtgtgaggacatgaatgaattcacgaaagcacttcgcccagccagctgccccataagtgttctctattatcatccacaaagagctccttgcggaggcccccgacaaaaggaatcgctgatgatccgaggcccccgacaaaaggaatcgctgatgatcgtgtctgtaacaggagggagcttccctgctcagtctccaaaccccttcctcggtgaatactccaagattctaaaataaaacaccccacgtttgcattttaacgtggtctggagcttgag

SEQ ID NO: 72014 - DNA, 949 bp, Homo sapiens
tgcagtaccaatttttttatccaaagctattctctcacaccctttcattctttcatattttttttcttttgaggacaaaaattgatttgaattttaattttttaaaaatagattgatcatagtgacaatggagaaaaaataaaacaatcatgcgtattctgatatttctaatagggaaaacttggaaaatgagtccactgatgaataatccaatggatacagaattcttaatcgttaataacccattaaaagggtaatgtcacaatcaaaatgtttctatacagatttataaaactcacaggacaatgttgatatttaaatattcttattaaatgtagtatttaataagaatataatataaattataaattcttattaacattcttaagtattcytgtattctcttagatttttagcaaaagaaaaattgttgctaagaaggcattttattcataattctattagacaatgatgtttgcttttccactggccagacagaaaatccatcaaacaacaataaaaaaagcagggagcattaacaatgcacttaagaataaaggaattaccaatatgtttaagatgtgtccctgccctcaaacagtgcacattttataacaccagctggtttctaaacataggcagggagccatggctcacacttctaaccccaacattttgggaagctgaggtgggagaatcacttgagcccaggagtttgagaccagcctggacaacataaggagaccccatgactacaaaatttttttaaacataaaaaataaaaattagctaagggggtggtgcacacctgtggtcccagctactcgagaggcagaggtgggaggatcacttgagcctaggagttcgaggctgcagtgagcctgggttagagggtgagaccctgtgtcaataaatgaataagtaaatatagataaatattaattatgca

SEQ ID NO: 72015 - DNA, 1171 bp, Homo sapiens
attccttctgaagatgggctggatcttttatccctggatcttcactgtctagcttctggatttcccaaatgatttaatgatattattcattaagatgtgagaataaacacctttttaaaaaaacacatcagcacacactctgtataaatcaacatctgtcattgtaagagttcccacggctggstgcggtggcgcatgcctgtaatcccagcactttgggaggccaaggtgggcagatcacgaggtcaggagttcgagaccagcctggccaatgtggtgaaacccccgtctctactaacaatacaaaaattagccaggtgtggtggcacgcgcctgtagtcccacccagctactcgggaggctgaggcagaagaatcacttgaaaccgggaggtggaggttgcagttagccaagatggcgccactgcactccagcctgggtgacaaagcaagaccccgtctcaaaaaaaaaaaaaaaaaaaagagttcccacaaggccatcacctctaagcaaatgtttcctccttgatctcttttatatttgcccagcaatcatcacaaaacttctctgcacccaggcacagagtgtggctgctaacatcccattatgtaaaacaaatacaggaggctccctagaatgccctaagtcatgtcccccagtggccagaaacaagcaccaccatgccctagcacctacctcctctggaaaagatttcaatgaagggaggaattggttccactcttttcttttctttttttttcttttgagacggagccttgctctgtcgcccaggctggagtgcaatggtgcaatctcggctcactgcaacctccgccccccaggtgcaagtgattctcctgtctcagcctcctgagtagttgggattacaggcacaccatgcccggctaatttttgtatttttagtagagacagggtttcaccatgttggtcaggatggtcttgaactcctgacctcaggtgatccgcccgcctcggcctcccaaagtgctaggattacaggcatcagccaccatgcccggcctggttccactctttaggtggcaaaaaacaaagatgcaagagcaagtcacacagccaattagttttcttttccagatctgccttcaaataagggtttcataacttccttgaaaaagatctctccgcacct

SEQ ID NO: 72016 - DNA, 991 bp, Homo sapiens
aaactctctcctcatatggtagatcttaaatgttctcaccacaaaaaaataagtatatgaggtgaggaatatgttaattagcatgatgtaataattgtacaatgtacacatatagcaaaacatcatgttgtacaacttaaataaatacagtttttatgtcagttaaaccttaataaattgaaagaaaaaaaggctgaataacacaaactgaaagaaaaactataaatgccagtgaatataccacttttttaaagatataataaaagagatttgataactaaattatcttattttcctttcactttagtatatcacttaaaattatgtaagtaaatatacatttactataatacagttttagaaattatatattaaaaagttattttggaaaattctatgtacctaaaatatttctgacagattttttttctattcagaatgctttctcccaaaaaagattctgtgtattctattactacaattgcatttatattttctgtttcgagacagtcttctcattctgttgctcaggttggaatgcaatagcataatcttgactcactgcaacccccagctcctgggctcaagtgatcctcccacctcagcctcctgagtatctgggactacaagtatgtgccaccacacccagctagtttttgtattttttgtagagacagggtcttactatattgcccaggctggtcttgaactcctaggcttgagcaatccacccaccttggccttccaaagtgctgggattatgggtatgagccactgtgtcagcctacaattgttttctttatggaaaacatacttcaactgatatatatatatatatatatatatatatatatatttatatatacayatacacatatatatatacacacacatatatatatacacacacacataaatatataaattatatttaataatatataaatcatatataatttatatataatatataaatatatattacatatat

SEQ ID NO: 72017 - DNA, 848 bp, Homo sapiens
ttcagaggacaggttcctgtcagcctctttggattcacgtcccagctctacaactttcagcctgggtgatctggagcaagttactaaatcrttatgtgtttttattgcttcacctataaaatggcacctgcttcatagagtgggcacaagtattaaattagattttatacgtaagcattcagcacagtgcctggtaaactgtcaaaaaatggtggccgtttacattttttctgcataaaagttttgaaggacttcagttaattcagaacataaaagtgggtcatgaaataaaagtagctctatacttggaaggcaagaaaatttgaatctaattctattttttctacttgatagctaatttctttgggggagccattgaacatatttgagcatttcttagtttaaagcaagcttgacagagggcggatccaataagttcttcatggcttcccacataggtctagaagaaacctatgttttatttgaattgtgtttgtggtcatcattttggaaagctagttgacaagtgttaaagtatatcatagagacgaactcaagtgggttcctctctatgatatacttggattatgatacaatgggttaacatgatttgaaagttacagatgagcactgaggaaatggattgtaacagaagattcagggtgtttgtaattttcaagactgacttttgctttaatacttcacagaacctcttatccttattgacaacatgcttaatggtatcttaatactttcttgaaaagatacagtctgcctttctgtgtgagagggttatcaggaatggaattatgccagggagctgtcattcaaaaacctcttctgatcca

SEQ ID NO: 72018 - DNA, 1161 bp, Homo sapiens
attaaaagggaccatcaattggcatacagttccaggcttaaaaaaattaaaagctatatccagggacttatttcgatagttcctgagtcttactctgctattattgtgcaggttctatatactctttagtacagatatactaaatcccatttataygtaattcactgctgtactttagatcaaaagtcaaggaaagattaataacagccatcaacaatattaatgttgttcttgaaaaatgcagtcttaaagagcatatgaaatatctttaagactaacggaaaagaagcatgcagcttaggaaaaaatagagcagatataagtcccactactataaaatcatcaatgcgatttagaagaaaagtcattcccacatttgaagtgctaacgaatactaatctttattagcgctaatttagtttttgattgtgttatgtatacttgtttttaatgtactagaattaaccagtattaactccagacaatgtaattataagccaagtgacttggttcatttcaaacttttaaaaaattatctttttttccagctaaacagaacattttagctagcagaactcaaagactaaatattagccagaaattttttagcctacgtgaaatcattagcaaaggatagtaaaccatgcgcatacatttatacctgtatatgtatatgtgtgtgtatatatatatgtgtatatatatatatatgtgtatacatacacacacacatatacatatacacacacatatacaggtacatatatatgtatatacacacacacacatatacaggtatatatatatatgtgtgtgtgtgtgtgtatatatatatatatatgcccatatacggtatatatacacacacacacacacacacacacacacatatatggtacacacacacacacacacacacgtaatgcaaattagtgcattatacctgagttgtttaaatcattagattgcactttttccccccacaacactttcttaagaagtagaggaaatatcagtgttgaaaaggaaattgaagtcagaatcaattcccagagcttttttcctctgctgtcttagaagaacatgtgctcataatagaggctatatttgctagaaatatcaatcgaaatattgactatagagatggctcctaagaggtgt

SEQ ID NO: 72019 - DNA, 1161 bp, Homo sapiens
attaaaagggaccatcaattggcatacagttccaggcttaaaaaaattaaaagctatatccagggacttatttcgatagttcctgagtcttactctgctattattgtgcaggttctatatactctttagtacagatatactaaatcccatttatatgtaattcactgctgtactttagatcaaaagtcaaggaaagattaataacagccatcaacaatattaatgttgttcttgaaaaatgcagtcttaaagagcatatgaaatatctttaagactaacggaaaagaagcatgcagcttaggaaaaaatagagcakatataagtcccactactataaaatcatcaatgcgatttagaagaaaagtcattcccacatttgaagtgctaacgaatactaatctttattagcgctaatttagtttttgattgtgttatgtatacttgtttttaatgtactagaattaaccagtattaactccagacaatgtaattataagccaagtgacttggttcatttcaaacttttaaaaaattatctttttttccagctaaacagaacattttagctagcagaactcaaagactaaatattagccagaaattttttagcctacgtgaaatcattagcaaaggatagtaaaccatgcgcatacatttatacctgtatatgtatatgtgtgtgtatatatatatgtgtatatatatatatatgtgtatacatacacacacacatatacatatacacacacatatacaggtacatatatatgtatatacacacacacacatatacaggtatatatatatatgtgtgtgtgtgtgtgtatatatatatatatatgcccatatacggtatatatacacacacacacacacacacacacacacatatatggtacacacacacacacacacacacgtaatgcaaattagtgcattatacctgagttgtttaaatcattagattgcactttttccccccacaacactttcttaagaagtagaggaaatatcagtgttgaaaaggaaattgaagtcagaatcaattcccagagcttttttcctctgctgtcttagaagaacatgtgctcataatagaggctatatttgctagaaatatcaatcgaaatattgactatagagatggctcctaagaggtgt

SEQ ID NO: 72020 - DNA, 1161 bp, Homo sapiens
attaaaagggaccatcaattggcatacagttccaggcttaaaaaaattaaaagctatatccagggacttatttcgatagttcctgagtcttactctgctattattgtgcaggttctatatactctttagtacagatatactaaatcccatttatatgtaattcactgctgtactttagatcaaaagtcaaggaaagattaataacagccatcaacaatattaatgttgttcttgaaaaatgcagtcttaaagagcatatgaaatatctttaagactaacggaaaagaagcatgcagcttaggaaaaaatagagcagatataagtcccactactataaaatcatcaatgcratttagaagaaaagtcattcccacatttgaagtgctaacgaatactaatctttattagcgctaatttagtttttgattgtgttatgtatacttgtttttaatgtactagaattaaccagtattaactccagacaatgtaattataagccaagtgacttggttcatttcaaacttttaaaaaattatctttttttccagctaaacagaacattttagctagcagaactcaaagactaaatattagccagaaattttttagcctacgtgaaatcattagcaaaggatagtaaaccatgcgcatacatttatacctgtatatgtatatgtgtgtgtatatatatatgtgtatatatatatatatgtgtatacatacacacacacatatacatatacacacacatatacaggtacatatatatgtatatacacacacacacatatacaggtatatatatatatgtgtgtgtgtgtgtgtatatatatatatatatgcccatatacggtatatatacacacacacacacacacacacacacacatatatggtacacacacacacacacacacacgtaatgcaaattagtgcattatacctgagttgtttaaatcattagattgcactttttccccccacaacactttcttaagaagtagaggaaatatcagtgttgaaaaggaaattgaagtcagaatcaattcccagagcttttttcctctgctgtcttagaagaacatgtgctcataatagaggctatatttgctagaaatatcaatcgaaatattgactatagagatggctcctaagaggtgt

SEQ ID NO: 72021 - DNA, 1161 bp, Homo sapiens
attaaaagggaccatcaattggcatacagttccaggcttaaaaaaattaaaagctatatccagggacttatttcgatagttcctgagtcttactctgctattattgtgcaggttctatatactctttagtacagatatactaaatcccatttatatgtaattcactgctgtactttagatcaaaagtcaaggaaagattaataacagccatcaacaatattaatgttgttcttgaaaaatgcagtcttaaagagcatatgaaatatctttaagactaacggaaaagaagcatgcagcttaggaaaaaatagagcagatataagtcccactactataaaatcatcaatgcgrtttagaagaaaagtcattcccacatttgaagtgctaacgaatactaatctttattagcgctaatttagtttttgattgtgttatgtatacttgtttttaatgtactagaattaaccagtattaactccagacaatgtaattataagccaagtgacttggttcatttcaaacttttaaaaaattatctttttttccagctaaacagaacattttagctagcagaactcaaagactaaatattagccagaaattttttagcctacgtgaaatcattagcaaaggatagtaaaccatgcgcatacatttatacctgtatatgtatatgtgtgtgtatatatatatgtgtatatatatatatatgtgtatacatacacacacacatatacatatacacacacatatacaggtacatatatatgtatatacacacacacacatatacaggtatatatatatatgtgtgtgtgtgtgtgtatatatatatatatatgcccatatacggtatatatacacacacacacacacacacacacacacatatatggtacacacacacacacacacacacgtaatgcaaattagtgcattatacctgagttgtttaaatcattagattgcactttttccccccacaacactttcttaagaagtagaggaaatatcagtgttgaaaaggaaattgaagtcagaatcaattcccagagcttttttcctctgctgtcttagaagaacatgtgctcataatagaggctatatttgctagaaatatcaatcgaaatattgactatagagatggctcctaagaggtgt

SEQ ID NO: 72022 - DNA, 1161 bp, Homo sapiens
attaaaagggaccatcaattggcatacagttccaggcttaaaaaaattaaaagctatatccagggacttatttcgatagttcctgagtcttactctgctattattgtgcaggttctatatactctttagtacagatatactaaatcccatttatatgtaattcactgctgtactttagatcaaaagtcaaggaaagattaataacagccatcaacaatattaatgttgttcttgaaaaatgcagtcttaaagagcatatgaaatatctttaagactaacggaaaagaagcatgcagcttaggaaaaaatagagcagatataagtcccactactataaaatcatcaatgcgatttagaagaaaagtcattcccacatttgaagtgctaacgaatactaatctttattagcgctaatttagtttttgattgtgttatgtatacttgtttttaatgtactagaattaaccagtattaactccagacaatgtaattataagccaagtgacttggttcatttcaaacttttaaaaaattatctttttttccagctaaacagaacattttagctagcagaactcaaagactaaatattagccagaaattttttagcctacgtgaaatcattagcaaaggatagtaaaccatgcgcatacatttatacctgtatatgtatatgtgtgtgtatatatatatgtgtatatatatatatatgtgtatacatacacacacacatatacatatacacacacatatacaggtacatatatatgtatatacacacacacacatatacaggtatatatatatatgtgtgtgtgtgtgtgtatatatatatatatatgcccatatacggtatatatacacacacacacacacacacacacacayatatatggtacacacacacacacacacacacgtaatgcaaattagtgcattatacctgagttgtttaaatcattagattgcactttttccccccacaacactttcttaagaagtagaggaaatatcagtgttgaaaaggaaattgaagtcagaatcaattcccagagcttttttcctctgctgtcttagaagaacatgtgctcataatagaggctatatttgctagaaatatcaatcgaaatattgactatagagatggctcctaagaggtgt

SEQ ID NO: 72023 - DNA, 1161 bp, Homo sapiens
attaaaagggaccatcaattggcatacagttccaggcttaaaaaaattaaaagctatatccagggacttatttcgatagttcctgagtcttactctgctattattgtgcaggttctatatactctttagtacagatatactaaatcccatttatatgtaattcactgctgtactttagatcaaaagtcaaggaaagattaataacagccatcaacaatattaatgttgttcttgaaaaatgcagtcttaaagagcatatgaaatatctttaagactaacggaaaagaagcatgcagcttaggaaaaaatagagcagatataagtcccactactataaaatcatcaatgcgatttagaagaaaagtcattcccacatttgaagtgctaacgaatactaatctttattagcgctaatttagtttttgattgtgttatgtatacttgtttttaatgtactagaattaaccagtattaactccagacaatgtaattataagccaagtgacttggttcatttcaaacttttaaaaaattatctttttttccagctaaacagaacattttagctagcagaactcaaagactaaatattagccagaaattttttagcctacgtgaaatcattagcaaaggatagtaaaccatgcgcatacatttatacctgtatatgtatatgtgtgtgtatatatatatgtgtatatatatatatatgtgtatacatacacacacacatatacatatacacacacatatacaggtacatatatatgtatatacacacacacacatatacaggtatatatatatatgtgtgtgtgtgtgtgtatatatatatatatatgcccatatacggtatatatacacacacacacacacacacacacacacatatatggtayacacacacacacacacacacgtaatgcaaattagtgcattatacctgagttgtttaaatcattagattgcactttttccccccacaacactttcttaagaagtagaggaaatatcagtgttgaaaaggaaattgaagtcagaatcaattcccagagcttttttcctctgctgtcttagaagaacatgtgctcataatagaggctatatttgctagaaatatcaatcgaaatattgactatagagatggctcctaagaggtgt

SEQ ID NO: 72024 - DNA, 686 bp, Homo sapiens
agaccatcctggctaacacggtggaaccccatctctactaaaaatatgaaaaattagccgggcgtggtggcaggtgcctgtagtcccagctacttgggaggctgaggcaggagaatggcatgaacccggaaggcagagcttgcagtgagccgagatcacgccactgcactccagcctggatgacagagcgagactccatctcaaaaaaaaaaaaaaaaaaagatttgcttcatttgcttcattggaatcacctttttaagtgcaatcagagagtaagggtggggtatggttgatggaggtacagtcttagaggtctgcccctaaagaagaaagtctaacacgtcagcaataaaaagcacggagatggaaaaagaaccagccagaattagctgggtgaaaccatggtcacrggcatttttcctgtaatccaatacttacctctattgctctgacctcatcttttttttttttgttttgagagatagggtcttgctatgttgccctggctggtcttggactcctgacctcaacaaatcctcttcttctgcctcccaaagtgttaggattacaaccataagccacctcacctggccctcatccttcttaatacccatcagccaccaacttctggtcactatttggtcattcaaaccaactctgctacccagcctaggattactcataaa

SEQ ID NO: 72025 - DNA, 686 bp, Homo sapiens
agaccatcctggctaacacggtggaaccccatctctactaaaaatatgaaaaattagccgggcgtggtggcaggtgcctgtagtcccagctacttgggaggctgaggcaggagaatggcatgaacccggaaggcagagcttgcagtgagccgagatcacgccactgcactccagcctggatgacagagcgagactccatctcaaaaaaaaaaaaaaaaaaagatttgcttcatttgcttcattggaatcacctttttaagtgcaatcagagagtaagggtggggtatggttgatggaggtacagtcttagaggtctgcccctaaagaagaaagtctaacacgtcagcaataaaaagcacggagatggaaaaagaaccagccagaattagctgggtgaaaccatggtcacaggcatttttcctgtaatccaatacttacctctattgctctgacctcatcttttttttttttgttttgagagatagggtcttgctatgttgccctggctggtcttggactcctgacctcaasaaatcctcttcttctgcctcccaaagtgttaggattacaaccataagccacctcacctggccctcatccttcttaatacccatcagccaccaacttctggtcactatttggtcattcaaaccaactctgctacccagcctaggattactcataaa

SEQ ID NO: 72026 - DNA, 652 bp, Homo sapiens
ttagcaacctcaacatacaattttttccctccttattaagtcaagaactttcacattttcacttaaaagaagtactttactgcttctcattggcatattcaaattgccagcatcactattcttgtgctttgaggctgttattaagtaaaataagggttgctcagcacaagcatgaccatgccttgacagtggatctgataaccacaaaggttactaagtgactaatgagccggtagtgtacacagtggggatatgctgggcaacgtgatgattcctatcccagacaagtcagagcagagaggcacaagattctatcacactactcagaatgatgcataattgaaaccttgtaaattgtttgtttctggaattttccacataatatttttggacagagattgactttgggtaactgaaaycatggaaatgtagataagggtggactcctgtattcacacccaatgcctgatgttcaaatgttcatccccttgagaaaacaaattacctcagaaaacacattcctctggcactccactggcagcctgggttgggagctcaggttcttgcctctgctacagttcttggtgatgtctaatccagcattcaaaggtctcttctgctggcccaggaatcttgtgtccacctatgaatt

SEQ ID NO: 72027 - DNA, 1084 bp, Homo sapiens
aaatataattttgtaatcttgtaattagtgaaaaaagatccaaggctggtaaatcaacatcttcatgtagtataaaatcaataatacacagaaacaaaattaatgaatacattttaatgaagtatatcaaataattgtaactgggaaattaataatagtacttgaattttaaattgtgattgtctttcaagaagtccaaaatatgttacaaccctgaagcccagctctttaccatcatgggaccaggcatgaacccttccatctatactcttgatgttgccatggggttggatctatgtagtatctgttcagggatgcaaccttcacaatcatctggcaactgttattaggtttcccaactttaacttccttgttccatctcgtagtacaattaggaatctcttgaaagtgacaccaggaagtgcattgttgcatgcaaaaggagacaattaagttactttctcttccagaaaagtgagttctaagagttagaaaggacttggataaatggtttatatggagagggaattccttcagaaaggaaaaagtgattttttttctatattagcattgtaggttagaaatgtctaatggaacgaacacgtcctacatcttgaatttttctaaattgcatggagcagaaaatggatttcaacctactttttatatgaaaattagtttgttgttggatttaagttttgttttktttttttttcttttctgaattggaagttactatgaccaggatgaaggcaagagctaaaatattttccctgacttccaaggaatggtgttcaggcagttatattcctggaaagttctttcttgccctggagaaactagttttactgttgttaagatttggttatctaagtctctatttctgtctgtctttctaaccatccatcaaagactattgtgaaagaagagaacttttgaagaaaggagtaaaaagggacatggtagggaggcagtgaagactaaaaaggaagggagaaagagaggccattccaaatgtcctgaaatagcagagtggtctgagtgtgggccactggccaggagctgccagggaaaggccaaagaa

SEQ ID NO: 72028 - DNA, 1261 bp, Homo sapiens
aatcacctggaaggtataatacactaaaggccgggccctgtccatgccatttctgaatctgtacgctggcgtggagcctgggaatctgcattgctaacaaggttccccaggtgctcgcactcggagaagccctgtgggcgattaagcttattgcttcacgagacactgagaaacagctcctgcctcgaagcccaccatcgagcttgaagactgtcgggtgaacagrtgagtccaactgggagtaattagtttccaacagaggaagctcaggtgccctgtgggagcacacaggggcagcaccagcctcaggtcaagggaaaagcagcccgagacaaacttccggtgccacagaaagccagatggtttcatggaggccacccagcccccgtcacccatcatgactctgcttgcacagtttgagcaatgccattggttttgcccgtgtgaccaactcttaggcatctccatagggccacagggcaggcccccagctgtcggcattgcctggtcttatgatctcaggctcccagcaccctcactgcccagcagcctgttccatagcagcatctcccaccttctccctgacttctagaggggagcaccccatgagcttagctgtgcctgccctctcaccagcatggtcacattcctgctttcgtagacgaatgaatcttccgggccttcccatgggcgttctgcctcacagggcttgtccacacaactgcccacctctgagccttttaacgcctctttccaccatcttatagcagcgccagcacctctcctttgcttagtgtgctctgccttctgcctgcttctaggagccatccggcagcacggtggcccattccctagggtcctgagcaaggcattaagtcctgtatcctaggagagtcctcccgaactgatacccccacctttctccagcttcatgggctttccccttggttcagctctctcagcacccagttctcatcacgtgtgccccgtccctgcaagcgctttttggctccattctgcagctcccttggtacaaggtccttttcctctcttaccaggcctggtgccatcatggccaggactggaaaggagagagatgctggggttaatgtcctgcaggagggaagcctccgtctcctgtgaggaaggtactctcgccccggtgggaagagtggggccacttctgtgcactccgggcttacgggctcgggggatttgaggttttgggagtacatcaacccagatgtctgcatctcatgca

SEQ ID NO: 72029 - DNA, 1261 bp, Homo sapiens
aatcacctggaaggtataatacactaaaggccgggccctgtccatgccatttctgaatctgtacgctggcgtggagcctgggaatctgcattgctaacaaggttccccaggtgctcgcactcggagaagccctgtgggcgattaagcttattgcttcacgagacactgagaaacagctcctgcctcgaagcccaccatcgagcttgaagactgtcgggtgaacagatgagtccaactgggagtaattagtttccaacagaggaagctcaggtgccctgtgggagcacacaggggcagcaccagcctcaggtcaagggaaaagcagcccgagacaaacttccggtgccacagaaagccagatggtttcatggaggccacccagcccccgtcacccatcatgactctgcttgcacagtttgagcaatgccattggttttgccygtgtgaccaactcttaggcatctccatagggccacagggcaggcccccagctgtcggcattgcctggtcttatgatctcaggctcccagcaccctcactgcccagcagcctgttccatagcagcatctcccaccttctccctgacttctagaggggagcaccccatgagcttagctgtgcctgccctctcaccagcatggtcacattcctgctttcgtagacgaatgaatcttccgggccttcccatgggcgttctgcctcacagggcttgtccacacaactgcccacctctgagccttttaacgcctctttccaccatcttatagcagcgccagcacctctcctttgcttagtgtgctctgccttctgcctgcttctaggagccatccggcagcacggtggcccattccctagggtcctgagcaaggcattaagtcctgtatcctaggagagtcctcccgaactgatacccccacctttctccagcttcatgggctttccccttggttcagctctctcagcacccagttctcatcacgtgtgccccgtccctgcaagcgctttttggctccattctgcagctcccttggtacaaggtccttttcctctcttaccaggcctggtgccatcatggccaggactggaaaggagagagatgctggggttaatgtcctgcaggagggaagcctccgtctcctgtgaggaaggtactctcgccccggtgggaagagtggggccacttctgtgcactccgggcttacgggctcgggggatttgaggttttgggagtacatcaacccagatgtctgcatctcatgca

SEQ ID NO: 72030 - DNA, 1032 bp, Homo sapiens
tcttctttgttcaagggtgaattcctttagagaaccagaatctgcaaaaatctttgtctttggaactggaaattaacaatttaacttaaaaaacatcattgggacagtttaaccagggtggtgrtggggttctaattattttttttcaaatgaaagtaaaaatggtggccagaagttaagccaagtattagattcaaagagaaggataaaataaaatttatttttattttatggcaaaataaaatttatttttattttatggcaaaataaaattaggagaatagaggacatagtgtgttaaacaatatagcttagtaaacattgcttaagactgaagctgttagaagaaccttacagaaacctgcaacatgtgcttagagataaaaaaagtaattcacgtttttgagtgttgtccactaagcactattttatgtattttgcatataatgtcccatttaattttcaaactatttgagatgttgtaggaaatagaggtaccaagagtcaaagtcaattgtttatagttccaagtctacctttagtgcagcactgtttagtacaactatctgtgactatggaaatgtttttaatctgtactgtcccatatggcagttacaaaacccatgtaactatgtaactaatgagtacatgaatgtggttactgtaactgagaaaatgccacatttagctggtggcttccagattggacaacctagctctggagctgaagcatgtaaccataatgccataccaccaacttttgccggatagtcttgcagtactaggtagtgcaatctccatatttgtaataacacttgaaagctaaaaaaggagctagccattaaaagatgccagaaaacaacactctgggcctaggaaacacaagataaagatgaacaaattagacatatatttttagtgttctcttggaatttagtggatttgaggaaagattgaaatgggatgaagctggagaggttagcgaaaaattgtacacccagaagtttagctatctggaaagtggagagaatg

SEQ ID NO: 72031 - DNA, 1032 bp, Homo sapiens
tcttctttgttcaagggtgaattcctttagagaaccagaatctgcaaaaatctttgtctttggaactggaaattaacaatttaacttaaaaaacatcattgggacagtttaaccagggtggtggtggggttctaattattttttttcaaatgaaagtaaaaatggtggccagaagttaagccaagtattagattcaaagagaaggataaaataaaatttatttttattttatggcaaaataaaatttatttttattttatggcaaaataaaattaggagaatagaggacatagtgtgttaaacaatatagcttagtaaacattgcttaagactgaagctgttagaagaaccttacagaaacctgcaacatgtgcttagagataaaaawagtaattcacgtttttgagtgttgtccactaagcactattttatgtattttgcatataatgtcccatttaattttcaaactatttgagatgttgtaggaaatagaggtaccaagagtcaaagtcaattgtttatagttccaagtctacctttagtgcagcactgtttagtacaactatctgtgactatggaaatgtttttaatctgtactgtcccatatggcagttacaaaacccatgtaactatgtaactaatgagtacatgaatgtggttactgtaactgagaaaatgccacatttagctggtggcttccagattggacaacctagctctggagctgaagcatgtaaccataatgccataccaccaacttttgccggatagtcttgcagtactaggtagtgcaatctccatatttgtaataacacttgaaagctaaaaaaggagctagccattaaaagatgccagaaaacaacactctgggcctaggaaacacaagataaagatgaacaaattagacatatatttttagtgttctcttggaatttagtggatttgaggaaagattgaaatgggatgaagctggagaggttagcgaaaaattgtacacccagaagtttagctatctggaaagtggagagaatg

SEQ ID NO: 72032 - DNA, 2029 bp, Homo sapiens
actccaaataggagtgcttgagctctggaaaatcaaaggacaatctttgtcttttcattatttttatttatttttttaaagaaatgtctaccatcttcccagttgactgcatctacttgaaagatgtgcttctggaataagctagaatgtgttctaattccaggtctcctcttacccaaggaacactaattcttaactaattcatcttctattaaaaaaaatcctccattgtaaaggaagaatattgatatgagactcaacaatagtttttgaagattatataagacaatttataaaagatacatatcattatacctgccatgatactgataaaatattagtttgaggcacaacacattcatccagcaaacttctctatctttccaaagtgcttgtcgccttcttccatttgtgagagactaagaatattctctggcttgtgattgagtcaaaaagtctttcagacatgaaaatatttaattaaaattgagaatgtttgcaaacctgtgtgtatagtcccatgtgtataagagtggatggtaaggggagtggtcggtattgaggaaaggaaacaaagaaacagagatacataaagttttcaccatgctttaaaagttgaatacatagagcaaagaagtttgactactaaatgatgaagttctgacctttcacaactggtagtataattcaaatacaacatggtacctgattacgaagactggaacagtcgttggggccatacccaagccacccatggaggacaccgaattgacagcatgtggataaacaaggaatgttttttatttagctgagtgcctgaagtctgaaatmcagtaaaaaaaaaaaaaaaaaaaaaaaaaaattaagaattcccatggattcggtctctgatttaggaacatatttctgacagaggccatcatcaccaaccattgcatggttgactttacatctgccttgacaatttttctgtcacttaaattagagaaatttaggatacatgcaaaaatagttgctcttgattcgctaaaagtactcttgtgtgcctagagggaccttctgaaatgtctgtttacgatgtactactccaagcataagaagttttcaaatgcagaggtgaccagccataaaaactatgcatgttaataattcaaaagatatatctgtaaaaactgttctttctttacctctcacacccttgctatgtatgcttccagattatcgtaatacaacatattgttatacaataatatgataataattacctgatgaattttctatgtataaaaaagaacggaggtaaattccacttaatgaaaagcatatctcttcatgcagggtcgaagagattaaatgacaggcccttgatgaagtacctggcatataacagataagtaattaataatagttatctctgaaatgttctatcgctcaccacatccatggattctgcagcaacactgtcacctttgcagtccttcattttctctaacacaaaagaaaggtaataggtcctgtttcacagtgatactgaagaatttgattgaaaagacatcaagtgcctagtatagagccttgcctatagtagtactcaatatattttttaatttctcaatttgacataatgctgactctttaaataagagtaacaatgagaaattagtatacagaaaatatatatagatattgcttccagttataaacactaatctagaatacttgattcagaaagtgttgcttgtcaaccaccatttatttaagaagccataaattcctattaaagctaatttaaaactgacagtgtttctattcctggaaaaataagctcaagcatcattgtggtgatactgagggtatgcatttgtatttacatactatagataactgtaatttttgtcactaagttactaacatttaaacagattcccgaagcagccaggcacttagtagtagccacaacatcagccatttacaattgttcagaaaatagcacaaattgaaactgttcaaatcattcatgggttgtgtt

SEQ ID NO: 72033 - DNA, 2041 bp, Homo sapiens
tatttatggggtacactgtgatatttcaatacatgtataccatgtgtagtgatcaaatcagggtagttagcatatttagtatctcaaaacttcattatttcttaatgttggaaacattcaaattygccttttctagctatttgaaaatacgcaataaattgctgtgactcatagtcaccccacagtgtttttctgcctatttgcatgggttgggaagtgatctgaactgactcgattgaatctacaagtttgtgggtcaaacttgatcctgatcctatcagatgccccttttgcccggcctggtgccctcaccctgattccagctgaagggaaagttctgtgtgagccctggctcacttggctatgacagcttctcatcccactcaggagtcttgctatcttttcttgggtttcttaggtgccaaagctgtgtcacaactcagaattgtgacgtggctaacactctctgagacaattttaaaaaagcaggaaataagagccaaagacaaatgcttccttttccacttgtcaattctgagagagcttctttctttcttccaaaggctctagcagggtctggctccagcggcccgcacgcttacccacttaacagaacacacttctattgccttctttcttgcctgcttccctccccacatccccctgttcctgttccctcgtatttcctcccaaaccaagtttttatatacaattctccattttcacactctgcttttggtgtgtaccatgttgagaaactggttgaggttacttgatctcaactggtctaagagacccctttctcatttttcagatctagagtgagacttcttagattatgagtaaagctttttgctttcttttgctagtttaccaagcaatccatagggtagttttatacactgatgcataatgtcaccctgaactttttcctgattgtctaaaatactcaaccaagagtatatctaaaggtaaaattcccagtcatatttcttaacatagatagacatgtctatattttatctgctggttttctactttccaacatgatgagctaccattctgctccccccatcatgccatattattttttcataattaattgttcatattgtaatatagaaaaaggggtagtgaggccgggcgcggtgggtcacgcctgtaatcctagcactttgggaggccgaggtgggtggatcacctgaggttgggagttcaagaccagcctgaccagcatggtgaaaccccgtcactactaaaaatacaaaaattagccgggcatggtggtgcatgcttgtaatcccagctactcaggaggctgaggcaggagaataggttgaaccaaggagacagaggttgcagtgagccgagatcacaccatcgcactccagcctgagtgacaacagggaaactccttctcaaaaaaagaaagaaaaagaaaaggaggtagtgatctagtcagtcccgggagaaataacatcctatagccataacaaatatagtaactatatcaaagaaggacagttagaaaaaaattgtgattggaataaacctagggtctttggctctggggatagtatcgagggagagaatgtattatctttctttctaaactagaacgcctttctcctgtggtttttttaaacagggaaaaatgtgttgccatcaaatcaaattctgaactgagcaacagagacgttagacaaaacttacaaagattggttagggagaactttatactgcctgccttaacttttgattgtgtcatcagtttaatgttatgtgctttcacaggaaataggaaagctgagagatgcaaaaaaaaaaaaaaaaggattgccgtttagatgtaacactaaacttttagaacctgtagttatattcttcagtagtttctaactcataagggaataatattatcttgcattttccagtttgctaaagcaaattaactacattgttgactttctgtggtctccgtttgaatgggaaaagcaataaaatgaaataatggtaataatcatagttgccggaaggtttt

SEQ ID NO: 72034 - DNA, 2041 bp, Homo sapiens
tatttatggggtacactgtgatatttcaatacatgtataccatgtgtagtgatcaaatcagggtagttagcatatttagtatctcaaaacttcattatttcttaatgttggaaacattcaaattcgccttttctagctatttgaaaatacgcaataaattgctgtgactcatagtcaccccacagtgtttttctgcctatttgcatgggttgggaagtgatctgaactgactcgattgaatctacaagtttgtgggtcaaacttgatcctgatcctatcagatgccccttttgcccggcctggtgccctcaccctgattccagctgaagggaaagttctgtgtgagccctggctcacttggctatgacagcttctcatcccactcaggagtcttgctatcttttcttgggtttcttaggtgccaaagctgtgtcacaactcagaattgtgacgtggctaacactctctgagacaattttaaaaaagcaggaaataagagccaaagacaaatgcttccttttccacttgtcaattctgagagagcttctttctttcttccaaaggytctagcagggtctggctccagcggcccgcacgcttacccacttaacagaacacacttctattgccttctttcttgcctgcttccctccccacatccccctgttcctgttccctcgtatttcctcccaaaccaagtttttatatacaattctccattttcacactctgcttttggtgtgtaccatgttgagaaactggttgaggttacttgatctcaactggtctaagagacccctttctcatttttcagatctagagtgagacttcttagattatgagtaaagctttttgctttcttttgctagtttaccaagcaatccatagggtagttttatacactgatgcataatgtcaccctgaactttttcctgattgtctaaaatactcaaccaagagtatatctaaaggtaaaattcccagtcatatttcttaacatagatagacatgtctatattttatctgctggttttctactttccaacatgatgagctaccattctgctccccccatcatgccatattattttttcataattaattgttcatattgtaatatagaaaaaggggtagtgaggccgggcgcggtgggtcacgcctgtaatcctagcactttgggaggccgaggtgggtggatcacctgaggttgggagttcaagaccagcctgaccagcatggtgaaaccccgtcactactaaaaatacaaaaattagccgggcatggtggtgcatgcttgtaatcccagctactcaggaggctgaggcaggagaataggttgaaccaaggagacagaggttgcagtgagccgagatcacaccatcgcactccagcctgagtgacaacagggaaactccttctcaaaaaaagaaagaaaaagaaaaggaggtagtgatctagtcagtcccgggagaaataacatcctatagccataacaaatatagtaactatatcaaagaaggacagttagaaaaaaattgtgattggaataaacctagggtctttggctctggggatagtatcgagggagagaatgtattatctttctttctaaactagaacgcctttctcctgtggtttttttaaacagggaaaaatgtgttgccatcaaatcaaattctgaactgagcaacagagacgttagacaaaacttacaaagattggttagggagaactttatactgcctgccttaacttttgattgtgtcatcagtttaatgttatgtgctttcacaggaaataggaaagctgagagatgcaaaaaaaaaaaaaaaaggattgccgtttagatgtaacactaaacttttagaacctgtagttatattcttcagtagtttctaactcataagggaataatattatcttgcattttccagtttgctaaagcaaattaactacattgttgactttctgtggtctccgtttgaatgggaaaagcaataaaatgaaataatggtaataatcatagttgccggaaggtttt

SEQ ID NO: 72035 - DNA, 2041 bp, Homo sapiens
tatttatggggtacactgtgatatttcaatacatgtataccatgtgtagtgatcaaatcagggtagttagcatatttagtatctcaaaacttcattatttcttaatgttggaaacattcaaattcgccttttctagctatttgaaaatacgcaataaattgctgtgactcatagtcaccccacagtgtttttctgcctatttgcatgggttgggaagtgatctgaactgactcgattgaatctacaagtttgtgggtcaaacttgatcctgatcctatcagatgccccttttgcccggcctggtgccctcaccctgattccagctgaagggaaagttctgtgtgagccctggctcacttggctatgacagcttctcatcccactcaggagtcttgctatcttttcttgggtttcttaggtgccaaagctgtgtcacaactcagaattgtgacgtggctaacactctctgagacaattttaaaaaagcaggaaataagagccaaagacaaatgcttccttttccacttgtcaattctgagagagcttctttctttcttccaaaggctctagcagggtctggctccagcggcccgcacgcttacccacttaacagaacacacttctattgccttctttcttgcctgcttccctccccacatccccctgttcctgttycctcgtatttcctcccaaaccaagtttttatatacaattctccattttcacactctgcttttggtgtgtaccatgttgagaaactggttgaggttacttgatctcaactggtctaagagacccctttctcatttttcagatctagagtgagacttcttagattatgagtaaagctttttgctttcttttgctagtttaccaagcaatccatagggtagttttatacactgatgcataatgtcaccctgaactttttcctgattgtctaaaatactcaaccaagagtatatctaaaggtaaaattcccagtcatatttcttaacatagatagacatgtctatattttatctgctggttttctactttccaacatgatgagctaccattctgctccccccatcatgccatattattttttcataattaattgttcatattgtaatatagaaaaaggggtagtgaggccgggcgcggtgggtcacgcctgtaatcctagcactttgggaggccgaggtgggtggatcacctgaggttgggagttcaagaccagcctgaccagcatggtgaaaccccgtcactactaaaaatacaaaaattagccgggcatggtggtgcatgcttgtaatcccagctactcaggaggctgaggcaggagaataggttgaaccaaggagacagaggttgcagtgagccgagatcacaccatcgcactccagcctgagtgacaacagggaaactccttctcaaaaaaagaaagaaaaagaaaaggaggtagtgatctagtcagtcccgggagaaataacatcctatagccataacaaatatagtaactatatcaaagaaggacagttagaaaaaaattgtgattggaataaacctagggtctttggctctggggatagtatcgagggagagaatgtattatctttctttctaaactagaacgcctttctcctgtggtttttttaaacagggaaaaatgtgttgccatcaaatcaaattctgaactgagcaacagagacgttagacaaaacttacaaagattggttagggagaactttatactgcctgccttaacttttgattgtgtcatcagtttaatgttatgtgctttcacaggaaataggaaagctgagagatgcaaaaaaaaaaaaaaaaggattgccgtttagatgtaacactaaacttttagaacctgtagttatattcttcagtagtttctaactcataagggaataatattatcttgcattttccagtttgctaaagcaaattaactacattgttgactttctgtggtctccgtttgaatgggaaaagcaataaaatgaaataatggtaataatcatagttgccggaaggtttt

SEQ ID NO: 72036 - DNA, 1027 bp, Homo sapiens
aaacccaactcccttatttctaacttgcccagcccaatattaaaatgcatcaccaaaccctcctgctgtctgcggagaagccagcatgaaactcaagctgagcagaaaacagatccagcatggagataaggcagctgcagtttcacttttaggttgggccaactgagaattttggggactttccttgctgtgaatgtggaattaaattgcttttttatttttattttttatttttcgagatggagtctcgctctgtcgccaggtacagtggcgtgatctcggctcactgcaacctctgcctcctgggttcaagcgatttgcctgcctcagcctcctgagtagctgggactacaggcaactgccaccacacctggctaatttttgtatttttggtagagacagggtttctccatgttggccaggatggtctcgatctcctgacctcatgatccgtccgcctcggcctcccaaagtgctgggattacaggcgtgagccactgcgcctggctgctttttaatttttttggaaaggtaggggggatttggtcwatgattaatccatctggagtttggtaacggatccagcaggtatgtaaggcattttagttatttgattctaaatgaaatcccaaaattgtaggggcaattaatcatgaacctgagggctcctgagttgtctttgcttgtttgcctcaagacaggtgacctgtctccttttttttttttctttaagtatttctagacatgtcatgattttcagatatttaacactttttaaaagatttgttttcctctcatgggaaatttccctgtcacagttggatctagtttctctttctatcttgtgcctggtttttagttaatcttctcctatgtgtcaaataatcgaagacccttcagttatttattgattgggaacccttcacttactggtatgcatttagttttacatatgtgagatcgtttagtgtttcacatcacccctactataattttatatcggccaggcacggtggctcatgcctgt

SEQ ID NO: 72037 - DNA, 1027 bp, Homo sapiens
aaacccaactcccttatttctaacttgcccagcccaatattaaaatgcatcaccaaaccctcctgctgtctgcggagaagccagcatgaaactcaagctgagcagaaaacagatccagcatggagataaggcagctgcagtttcacttttaggttgggccaactgagaattttggggactttccttgctgtgaatgtggaattaaattgcttttttatttttattttttatttttcgagatggagtctcgctctgtcgccaggtacagtggcgtgatctcggctcactgcaacctctgcctcctgggttcaagcgatttgcctgcctcagcctcctgagtagctgggactacaggcaactgccaccacacctggctaatttttgtatttttggtagagacagggtttctccatgttggccaggatggtctcgatctcctgacctcatgatccgtccgcctcggcctcccaaagtgctgggattacaggcgtgagccactgcgcctggctgctttttaatttttttggaaaggtaggggggatttggtcaatgattaatccatctggagtttggtaacggatccagcaggtatgtaaggcattttagttatttgattctaaatgaaatcccaaaattgtaggggcaattaatcatgaacctgagggctcctgagttgtctttgcttgtttgcctcaagacaggtgacctgtctccttttttttttttctttargtatttctagacatgtcatgattttcagatatttaacactttttaaaagatttgttttcctctcatgggaaatttccctgtcacagttggatctagtttctctttctatcttgtgcctggtttttagttaatcttctcctatgtgtcaaataatcgaagacccttcagttatttattgattgggaacccttcacttactggtatgcatttagttttacatatgtgagatcgtttagtgtttcacatcacccctactataattttatatcggccaggcacggtggctcatgcctgt

SEQ ID NO: 72038 - DNA, 643 bp, Homo sapiens
agtttcagttttctccatatggctacccagttttcccagcaccatttattaaatagggatcatttccccatcgcttgtttttgtcaggtttgttgaagatcagatggttgtagatgtgtggtgttatttctgaggcctctgttctgttccattggtctatataactgttttggtaccagtaycatgctgtttttgttacctgtagccttatagtataatttgaagtcaggtagctataatgccttcagctttgttctttttgcttagcgactgtcttggctatacgggctgtttcttagtttcacactgaagtttcaaggtagttttttctagtctctgtgaagaaagtcaatggtagcttgatgggaatagctatggactgttataaattgctttggccagtatggcccattttaaccatatggtattcttcctatccatgagcatgggtatttatttattataaaagtaactttcattttctcagttttactgtaggtacaactgaaatatttttaaaggtatatgttttaaggtgcaccacttcatggtttggatattgtgttagtcccagtctcacactgctataaagaaatgcctgagcactgagtaatttgaaacaaaaaaatagatgcttaatggg

SEQ ID NO: 72039 - DNA, 665 bp, Homo sapiens
ttcccatctcccgcctttgcctggggtgccctcatcccaccttttatttccctacaaggtccaatgcaaatgtcaccacctctgcaagtacccccgtgactcctccagagaaggtcagttgctgccccttcttgggtcctaccctctttttttccccccattactagggtgttcttaggtgagtaattatgaattaacgagggcattgttttcttctgtcttcctctagactgtgagctccaaagacatcatcattgtggtcagtatctgtcattcctgcctgccttgcctccaggtctgcttccttctgtaatggcacctgtggtctccagtcctcaccatggcccccagtgatgcttggctcctggtctccacacccttktgttgttccctcccacactgaccagggctgagttgtgtgactaacaggacattacagaagtgaggcaatgcagcagggtgtgtgacttcccaggggacagcaacaagggccctctagcttctgccctgttcccttttgggctggttgctcaggcgaagccaaccgccatgttgtcaggacactcaagtagccccatgaagaggcccatgtggagaggtgttgaaaccttcagccaacagccagcaccagctggccagctgtgagactaagccaccttggaaac

SEQ ID NO: 72040 - DNA, 596 bp, Homo sapiens
ttatgtaggccttgagcaagttacctctatatttccctcaggcaaaaaacaaagacattacccytttcccaaaggaaattaagaaaaaaagaagtaaaagcatttttgaaaaaatacatttttcatcatctaaatgtaaactcttctttgctgaaaccagaaaaagttttttgtttggtttattctactaattaagttctgaagcataattggtttccatgcatagagtcttcatctcaaatcaagaggttcacatttggggcaatttgtttaaagccatcaaccaagttagctatccaatagttcccctgatggttaacagcttagattctttagaggtaaaaattatacttcctatttctattactggcactgtcggtacacttgtcaacctaaatgctaaatctctaaacctctctgatggcatttccctaatcaactggggtaccattttcatgtggtaaatgttttatatccatagaaactgaactaacatcaatattacaacatcattttaaaaaatctttcaggccaggagcagtggttcacactcgtaatcccagccctttgggaggcaaggcaggtagaccatctga

SEQ ID NO: 72041 - DNA, 692 bp, Homo sapiens
cttgaacccaagaggcagaggttgcagtgagcctgggcaacagagtgagactccatctcaaaaaaaaaaaaaraagagaaaaaagaaatatctacttatttgcaaagtatgaacgttatttgaatcctgatttaaaaaaaaacttgtattaatacaagtatcatttataaatactaaagaacacgaccatatatttgattaaattgagaacatattatgttgtggaaatacacacatacatatatatgttccttttctttagtaggacatgatgaaaactttacagatgatatgatgtctgggatttgtttcaaataatgatgcaagagagaggtggccatccggaaaacaccaggttatattcaacctgagaaagctgatttaaaacagaaacaaaaacaagatctttgttattgctgaagacggacaatgggtatgttggatttcttatactactgtttctacctcagacttggctcatcctttggtgctgtgcagcccttgagcaggcttgaccctctctgtgcctcagggaggttcacctgctgttcttattcccaccagctcccacctgcctggcactttcccttttggaacctcaggttctgcttctgtaggatttgggaaatctgagcccagtttcataataaaaagtcagaaaacaggtcagtcgcagtgggtgactttggtaa

SEQ ID NO: 72042 - DNA, 692 bp, Homo sapiens
cttgaacccaagaggcagaggttgcagtgagcctgggcaacagagtgagactccatctcaaaaaaaaaaaaaaawgagaaaaaagaaatatctacttatttgcaaagtatgaacgttatttgaatcctgatttaaaaaaaaacttgtattaatacaagtatcatttataaatactaaagaacacgaccatatatttgattaaattgagaacatattatgttgtggaaatacacacatacatatatatgttccttttctttagtaggacatgatgaaaactttacagatgatatgatgtctgggatttgtttcaaataatgatgcaagagagaggtggccatccggaaaacaccaggttatattcaacctgagaaagctgatttaaaacagaaacaaaaacaagatctttgttattgctgaagacggacaatgggtatgttggatttcttatactactgtttctacctcagacttggctcatcctttggtgctgtgcagcccttgagcaggcttgaccctctctgtgcctcagggaggttcacctgctgttcttattcccaccagctcccacctgcctggcactttcccttttggaacctcaggttctgcttctgtaggatttgggaaatctgagcccagtttcataataaaaagtcagaaaacaggtcagtcgcagtgggtgactttggtaa

SEQ ID NO: 72043 - DNA, 692 bp, Homo sapiens
cttgaacccaagaggcagaggttgcagtgagcctgggcaacagagtgagactccatctcaaaaaaaaaaaaaaaagmgaaaaaagaaatatctacttatttgcaaagtatgaacgttatttgaatcctgatttaaaaaaaaacttgtattaatacaagtatcatttataaatactaaagaacacgaccatatatttgattaaattgagaacatattatgttgtggaaatacacacatacatatatatgttccttttctttagtaggacatgatgaaaactttacagatgatatgatgtctgggatttgtttcaaataatgatgcaagagagaggtggccatccggaaaacaccaggttatattcaacctgagaaagctgatttaaaacagaaacaaaaacaagatctttgttattgctgaagacggacaatgggtatgttggatttcttatactactgtttctacctcagacttggctcatcctttggtgctgtgcagcccttgagcaggcttgaccctctctgtgcctcagggaggttcacctgctgttcttattcccaccagctcccacctgcctggcactttcccttttggaacctcaggttctgcttctgtaggatttgggaaatctgagcccagtttcataataaaaagtcagaaaacaggtcagtcgcagtgggtgactttggtaa

SEQ ID NO: 72044 - DNA, 692 bp, Homo sapiens
cttgaacccaagaggcagaggttgcagtgagcctgggcaacagagtgagactccatctcaaaaaaaaaaaaaaaagakaaaaaagaaatatctacttatttgcaaagtatgaacgttatttgaatcctgatttaaaaaaaaacttgtattaatacaagtatcatttataaatactaaagaacacgaccatatatttgattaaattgagaacatattatgttgtggaaatacacacatacatatatatgttccttttctttagtaggacatgatgaaaactttacagatgatatgatgtctgggatttgtttcaaataatgatgcaagagagaggtggccatccggaaaacaccaggttatattcaacctgagaaagctgatttaaaacagaaacaaaaacaagatctttgttattgctgaagacggacaatgggtatgttggatttcttatactactgtttctacctcagacttggctcatcctttggtgctgtgcagcccttgagcaggcttgaccctctctgtgcctcagggaggttcacctgctgttcttattcccaccagctcccacctgcctggcactttcccttttggaacctcaggttctgcttctgtaggatttgggaaatctgagcccagtttcataataaaaagtcagaaaacaggtcagtcgcagtgggtgactttggtaa

SEQ ID NO: 72045 - DNA, 692 bp, Homo sapiens
cttgaacccaagaggcagaggttgcagtgagcctgggcaacagagtgagactccatctcaaaaaaaaaaaaaaaagagaaaaaagaaatatctacttatttgcaaagtatgaacgktatttgaatcctgatttaaaaaaaaacttgtattaatacaagtatcatttataaatactaaagaacacgaccatatatttgattaaattgagaacatattatgttgtggaaatacacacatacatatatatgttccttttctttagtaggacatgatgaaaactttacagatgatatgatgtctgggatttgtttcaaataatgatgcaagagagaggtggccatccggaaaacaccaggttatattcaacctgagaaagctgatttaaaacagaaacaaaaacaagatctttgttattgctgaagacggacaatgggtatgttggatttcttatactactgtttctacctcagacttggctcatcctttggtgctgtgcagcccttgagcaggcttgaccctctctgtgcctcagggaggttcacctgctgttcttattcccaccagctcccacctgcctggcactttcccttttggaacctcaggttctgcttctgtaggatttgggaaatctgagcccagtttcataataaaaagtcagaaaacaggtcagtcgcagtgggtgactttggtaa

SEQ ID NO: 72046 - DNA, 1467 bp, Homo sapiens
acacttgggtttttttaattttattttattcacttccttatcaaattatcatccttctttgggaagataaaacaactacattttctgaaagattttaatttctcatttacaccactgtttgtatttaaatgcatcagaggctgagcacagtggctcttgcctgtaacctcagcactttgggagtccaaggcaggcagattacgaagtcaggagttygagattagcctggccaatatggtgaaactcccgtctctactaaaaatacaaaaataatctgggcatggtggtgggtgcctgtagtcccagctactcatgaggctgaggcaggagaatcacttgaacccaggaggcagaggtggcagtgagccgagatcactccactgcactccagcctgggcgacagagcaagactctgtcaaaaaaaaaaaaaaaagcattagagatccatggaaaggtatagcatgttgcatgcgtgcgcacacacacacacacacacacacacagagcacccagagggtttcaaatggaaaattcttttttgaatcatgggatatgaagcttgcagaacatcagacaaggccttgtattccttgttccttttctcctctctagactagagataattgttcttgccttacctcctccaggaaggcttgggagtgggggaagaggttggtgccacaaattacaggggatccagcacttttttaaactggataattctatgtgcatatgaaggattagaattaaggtgacttaatccatagttttaagggcacaccttgtttgtgctaatcctccatgtactgaagcaagaagcatgacatctttaagacatttaagaagtatttacaggtactatggtggggctgtaagatataatctttcagatcttagagataaatccacattttatagcatcactttctcaccactgatgttatttatttatttatttatttatttaaatatgttgatctcttcttcatgacctcatttaataacgccctccttggggaaaacctccccaattgttcaaggtagagtcttttttttgatccacgtcccatgcttatttcatgtccctgtaacagcacttataactggcctgtaatggatattttcaagtctgtctcttctgctaattccctgaaatgcacaggttatttaagccaatctgcaccatcctattcctaactatgcaactagaatgttaatgtatgcataatacaccctcttcaatggtgacacccagagatatcggtaaaagccaaattctaacatcatctttcaattcatctgctcagctgaatagcattcagagctaattcttgactctgaattaatttcttttaatatccctttccctggtttcatttcacttggaccacttccaccattttgacctggtccttctccttgactatgattcgaatcctactcccaagcaagtgacgttctagttaa

SEQ ID NO: 72047 - DNA, 1467 bp, Homo sapiens
acacttgggtttttttaattttattttattcacttccttatcaaattatcatccttctttgggaagataaaacaactacattttctgaaagattttaatttctcatttacaccactgtttgtatttaaatgcatcagaggctgagcacagtggctcttgcctgtaacctcagcactttgggagtccaaggcaggcagattacgaagtcaggagttcgagattagcctggccaatatggtgaaactcccgtctctactaaaaatacaaaaataatctgggcatggtggtgggtgcctgtagtcccagctactcatgaggctgaggcaggagaatcacttgaacccaggaggcagaggtggcagtgagccgagatcactccactgcactccagcctgggcgacagagcaagactctgtcaaaaaaaaaaaaaaaagcattagagatccatggaaaggtatagcatgttgcatgcgtgcgcacacacacacacacacacacacacagagcacccagagggtttcaaatggaaaattcttttttgaatcatgggatatgaagcttgcagaacatcagacaaggccttgtattccttgttccttttctcctctctagactagagataattgttcttgccttacctcctccaggaaggcttgggagtgggggaagaggttggtgccacaaattacaggggatccagcacttttttaaactggataattctatgtgcatatgaaggattagaattaaggtgacttaatccatagttttaagggcacaccttgtttgtgctaatcctccatgtactgaagcaagaagcatgacatctttaagacatttaagaagtatttacaggtactatggtggggctgtaagatataatctttcagatcttagagataaatccacattttatagcatcactttctcaccacygatgttatttatttatttatttatttatttaaatatgttgatctcttcttcatgacctcatttaataacgccctccttggggaaaacctccccaattgttcaaggtagagtcttttttttgatccacgtcccatgcttatttcatgtccctgtaacagcacttataactggcctgtaatggatattttcaagtctgtctcttctgctaattccctgaaatgcacaggttatttaagccaatctgcaccatcctattcctaactatgcaactagaatgttaatgtatgcataatacaccctcttcaatggtgacacccagagatatcggtaaaagccaaattctaacatcatctttcaattcatctgctcagctgaatagcattcagagctaattcttgactctgaattaatttcttttaatatccctttccctggtttcatttcacttggaccacttccaccattttgacctggtccttctccttgactatgattcgaatcctactcccaagcaagtgacgttctagttaa

SEQ ID NO: 72048 - DNA, 1467 bp, Homo sapiens
acacttgggtttttttaattttattttattcacttccttatcaaattatcatccttctttgggaagataaaacaactacattttctgaaagattttaatttctcatttacaccactgtttgtatttaaatgcatcagaggctgagcacagtggctcttgcctgtaacctcagcactttgggagtccaaggcaggcagattacgaagtcaggagttcgagattagcctggccaatatggtgaaactcccgtctctactaaaaatacaaaaataatctgggcatggtggtgggtgcctgtagtcccagctactcatgaggctgaggcaggagaatcacttgaacccaggaggcagaggtggcagtgagccgagatcactccactgcactccagcctgggcgacagagcaagactctgtcaaaaaaaaaaaaaaaagcattagagatccatggaaaggtatagcatgttgcatgcgtgcgcacacacacacacacacacacacacagagcacccagagggtttcaaatggaaaattcttttttgaatcatgggatatgaagcttgcagaacatcagacaaggccttgtattccttgttccttttctcctctctagactagagataattgttcttgccttacctcctccaggaaggcttgggagtgggggaagaggttggtgccacaaattacaggggatccagcacttttttaaactggataattctatgtgcatatgaaggattagaattaaggtgacttaatccatagttttaagggcacaccttgtttgtgctaatcctccatgtactgaagcaagaagcatgacatctttaagacatttaagaagtatttacaggtactatggtggggctgtaagatataatctttcagatcttagagataaatccacattttatagcatcactttctcaccactgatgttatttatttatttatttatttatttaaatatgttgatctcttcttcatgacctcatttaataaygccctccttggggaaaacctccccaattgttcaaggtagagtcttttttttgatccacgtcccatgcttatttcatgtccctgtaacagcacttataactggcctgtaatggatattttcaagtctgtctcttctgctaattccctgaaatgcacaggttatttaagccaatctgcaccatcctattcctaactatgcaactagaatgttaatgtatgcataatacaccctcttcaatggtgacacccagagatatcggtaaaagccaaattctaacatcatctttcaattcatctgctcagctgaatagcattcagagctaattcttgactctgaattaatttcttttaatatccctttccctggtttcatttcacttggaccacttccaccattttgacctggtccttctccttgactatgattcgaatcctactcccaagcaagtgacgttctagttaa

SEQ ID NO: 72049 - DNA, 669 bp, Homo sapiens
ggggttctrtatttgtcaggcttctctctcacacacttcactctggcccttactctttctctgtccaccttggcttccttctcaggcaggccatccctgcacctgcaggcttactttctctcagcttagtggaaagggagtaccattctctctgtggttacaacaaaaggtcctagactgagtctcactggactagcttgagtcacctgccccaccctaaagcaatcactgtggctgtgagcacaaaatattctcctcactggccagacctgggcgcatgcacaccctatcttctggacttagaggggtggtatttcaggatgtgagtaacagaagaggaaagaaactctgggcagaaaaaaatctacagatgtccactacatttgtctacagttgtttccttggtaactggcagcttttactactctcccccataatttgaagtcatcaaattcttagaaatgccagaaacagcctcagtctaaaagacaggtccccgtcctgcacagattcctgtttagacagtatctggacagaaaatttaacagaatatcttctgcttttcatctcttaactttttctgatgaccaaaaaagttccatctttctagaaatatgtaacaaataacatgaaatgccccggggatgacaccccctgagaaaacttctg

SEQ ID NO: 72050 - DNA, 699 bp, Homo sapiens
tccccacttggcttcccaaagtgctaggattacaggtgtaagtgaccatgccgggacaagaacatgagacttctcttaccatttttttatatctargtggaatagcatagtattatgtgtcagtgttgaattattttaaaatattatgcactgaaacatggtaataatctgggtcagtttctatcttgacctaggtttaaacatattagctaacatgaggggcccaaaattaataatgattccataccatctccttgtttatttattcattgagacagagttttgatctctcacaaaggttggagtgcagtagcaccatcttggctcactacaacctccacctcctgtgttcaagtgattctcctgccttagcctcctgagtagctaggattacgcccaccaccacaaccagctaacttttgtatttttagtacagataaagtttcaccaggttggccaggttggtcttgaactcctgatctcaagtgatccgcggccttggcctcccaaagtgttgtcattataggcgtgagccactgcctccagccaccatctcctttcattaaaaatatgtgagctgaaaataatttgagggcagttattttcatatagtcattttatcaaacggattatattaatgactagtattaatatttattttatctaaaattatgtctgatttttctaaattctctgact

SEQ ID NO: 72051 - DNA, 699 bp, Homo sapiens
tccccacttggcttcccaaagtgctaggattacaggtgtaagtgaccatgccgggacaagaacatgagacttctcttaccatttttttatatctaagtggaatagcatagtattatgtgtcagtgttgaattattttaaaatattatgcactgaaacatggtaataatctgggtcagtttctatcttgacctaggtttaaacatattagctaacatgaggggcccaaaattaataatgattccataccatctccttgtttatttattcattgagacagagttttgatctctcacaaaggttggagtgcagtagcaccatcttggctcactasaacctccacctcctgtgttcaagtgattctcctgccttagcctcctgagtagctaggattacgcccaccaccacaaccagctaacttttgtatttttagtacagataaagtttcaccaggttggccaggttggtcttgaactcctgatctcaagtgatccgcggccttggcctcccaaagtgttgtcattataggcgtgagccactgcctccagccaccatctcctttcattaaaaatatgtgagctgaaaataatttgagggcagttattttcatatagtcattttatcaaacggattatattaatgactagtattaatatttattttatctaaaattatgtctgatttttctaaattctctgact

SEQ ID NO: 72052 - DNA, 1870 bp, Homo sapiens
ggtttggatgttttatcccctccaaatctcatattaaaatgtgacctgtattgttggatgtgaggcctagtgggaggtattaggtcatgggggcaaatccctcatgaatggtttggttccctcccttgggtaataagtggtaaagagtttacaggagatctagttgtttaagagtgtggcaccttccctctctctctcttgctccctctcttgccctatgacatgctggctccccttcaaattctgccatgattgtaatcttcctgaggccctcaccacaagcagatgctgacactatgcattgtgtacaatctgcagaaccaagggccaaataaatctattttctttataaatgacccagtcttagttatttgttttacaacaacacaaacacactaacacactggtgaaaatcaacttaaatacttaaatacagataatataaatttaaaatgcaatctaagagttgtaaaatttatattttcccttcaaaaattagcattctaaattatctccttactatttgttttgctttatacacttccaacttcctatgctcaagttttcagaagacattgaagaacatcacatcattagagagaagaaaaggaaaaattggctacaaaaattaaccatacagtgtattgaattaatagagttttgctgaacaatttttgttaatggagtttatatttttaggtataaatatttttctacatgatatatttagacaaagttttttttttaaatataggatatttgcagcaaacggtccaaaggatcccaattattaaacaaaacacaaatataaattgattacagtatatcaaatatgccttaataattaggtagctataaaaagtagagttacaagattgagaggtactttgtcttctgtgaaggctttaaaaacatgaagctacatttcccaccatcaaagatttatgtgtaagagatttgtcttcattttgttttaattagatgaaacgatttgcccatggggcatctaaactcagaatgagtttgacatcacaacacagtttatattctctcaggaaaaatgaaaggaaactaaaggattttatttttcagacatcaaatcacaaaacaaaacagtccaattttctttgggttctcagttgtacatttatgtcttcagggttttaaaaaaccacaccrttttgcatgcttaaaaataaaagattcggttcaagagttcatctttgtaacatcttttcaatttttctttaaatctctaggtctaaaactttgctaaataaaaaatatttagcgagaaacaagtttacatgtgttgcttgctgaaagaaactgctaaagggaatgcattaagatatggaacacaattatgcaaagtaaatactcagttgaacatgccagatgtttcctaaatttaaattgttaaatggccatcgtggaagaatcattttagttttaaattctgtaataagcaaaataactttcttacatagaaacatttgttcctttgtgtatgaaccaaatcaaatatcatataaaaattatacataagatatgaatctgaatcatatataatgtagcttatccaaacatattttagatgaaactgtcagtattttttatattatcaacatagaactgttttaagataaatcatttattcatttttcatctcaatcaatatttttataagagatgacataagttagatgattcagctaatctacactgaaagcagtggataagtcaattacaatttttgctcaaatatggaaaaaatctgactgattataatcaaaatcattaactgtcatttacttttcctgaaagctctttatttaatataaaatctagacataaagaaactaattta

SEQ ID NO: 72053 - DNA, 1870 bp, Homo sapiens
ggtttggatgttttatcccctccaaatctcatattaaaatgtgacctgtattgttggatgtgaggcctagtgggaggtattaggtcatgggggcaaatccctcatgaatggtttggttccctcccttgggtaataagtggtaaagagtttacaggagatctagttgtttaagagtgtggcaccttccctctctctctcttgctccctctcttgccctatgacatgctggctccccttcaaattctgccatgattgtaatcttcctgaggccctcaccacaagcagatgctgacactatgcattgtgtacaatctgcagaaccaagggccaaataaatctattttctttataaatgacccagtcttagttatttgttttacaacaacacaaacacactaacacactggtgaaaatcaacttaaatacttaaatacagataatataaatttaaaatgcaatctaagagttgtaaaatttatattttcccttcaaaaattagcattctaaattatctccttactatttgttttgctttatacacttccaacttcctatgctcaagttttcagaagacattgaagaacatcacatcattagagagaagaaaaggaaaaattggctacaaaaattaaccatacagtgtattgaattaatagagttttgctgaacaatttttgttaatggagtttatatttttaggtataaatatttttctacatgatatatttagacaaagttttttttttaaatataggatatttgcagcaaacggtccaaaggatcccaattattaaacaaaacacaaatataaattgattacagtatatcaaatatgccttaataattaggtagctataaaaagtagagttacaagattgagaggtactttgtcttctgtgaaggctttaaaaacatgaagctacatttcccaccatcaaagatttatgtgtaagagatttgtcttcattttgttttaattagatgaaacgatttgcccatggggcatctaaactcagaatgagtttgacatcacaacacagtttatattctctcaggaaaaatgaaaggaaactaaaggattttatttttcagacatcaaatcacaaaacaaaacagtccaattttctttgggttctcagttgtacatttatgtcttcagggttttaaaaaaccacaccgttttgcatgcttaaaaataaaagattcggttcaagagttcatctttgtaacatctttkcaatttttctttaaatctctaggtctaaaactttgctaaataaaaaatatttagcgagaaacaagtttacatgtgttgcttgctgaaagaaactgctaaagggaatgcattaagatatggaacacaattatgcaaagtaaatactcagttgaacatgccagatgtttcctaaatttaaattgttaaatggccatcgtggaagaatcattttagttttaaattctgtaataagcaaaataactttcttacatagaaacatttgttcctttgtgtatgaaccaaatcaaatatcatataaaaattatacataagatatgaatctgaatcatatataatgtagcttatccaaacatattttagatgaaactgtcagtattttttatattatcaacatagaactgttttaagataaatcatttattcatttttcatctcaatcaatatttttataagagatgacataagttagatgattcagctaatctacactgaaagcagtggataagtcaattacaatttttgctcaaatatggaaaaaatctgactgattataatcaaaatcattaactgtcatttacttttcctgaaagctctttatttaatataaaatctagacataaagaaactaattta

SEQ ID NO: 72054 - DNA, 558 bp, Homo sapiens
tattattaaggaaacaaaggatcaaatacctttcattcatctgatatgatcctttaaaacacattccaccaataagtcctatttggaacagctgaaaatcttttaataaaactttttaaagatgaactcatggcttagtgtaaatttcacaagcttaattaggtcaagtggaaggaactcagatgagtagttgcccaatcagagcccattatttgtaagtcatcagccccctccatgaccttaaaactccactctgacctaattattgcaaacctatacacaacaaagtgaaaggattaattttcattcatcaacctctcaatcccagattttcaaagaaaaaaacctgtgtaaggaatacttaccaaaaccagacaggaaaattagagcctgcatacttaagagtcaaatttgttccactacagccaggtcrcatacagttacatcatttggttcttcatacactctagaactgaccaggacagagtttagcatagaaaaactgtaagaaataggttctgaaacatagaaattgcaaagttcaaaaggctatgaaaa

SEQ ID NO: 72055 - DNA, 732 bp, Homo sapiens
aaacaaagggtgcctttgcatgtggggattttaattttgatgaaaaagagaaacatgtcttttggctcttttcatgtgtcctaatagggaaactcttgggtctaaatgtagaggtacaggagctgtgttcatctccagcaaaaaaaacagagctggcctgttgagcctgggaacagggtttgcatctgcctgaaatttatgagcaagcacagcccatttttcttgtacttcttcatctcaaagaaaacttattaacaaccaaggagaaggtgtagttcatctctgttgcaggatctccctggaatactcttctagccaccttttgtttttgcagtaaaaggaggaatgagcattgaatgaagacgaggatgaagactgaccatctaaaacatctgttagtgatagtttgggttttattttgggaaaattcagtgttttcacaaaaaccaaatggttttgtgggtctggcgctggactgagtgttgggaatgtggattctggtctctgttttgtcattaacagagtgcccagttttgggagcatcccttacatctactgtctgcctcrtatttactgcctgaaatagaggattacttctgtttgctttcaagggatattataatttaatttttattttatttattgttggagacaaggtcttcttctgttgcccaaactggagtgcactggtgcaattatagctcacggcagcctcgacctcctggccttaag

SEQ ID NO: 72056 - DNA, 1454 bp, Homo sapiens
cacataaaggagagggagctttccctaatggaacagatcaaggaatttatcctggaaagaaacaccatgaatgtaccgactgtgggaaaacctttctctggaagacacagcttactgagcatcagagaattcacactggggagaaaccctttgaatgcaatgtatgtggaaaggcttcaggcatagctcatctcttggtcagcatgagaatgctcataccggagagaaaccctatcagtgtagtctctgtgggaaagccttccagcgcagctcctcccttgttcaacaccagcgaattcacactggagagaaaccctatcgatgtaatctatgtgggaggtcctttaggcatggcacatccctcactcaacacgaggtcacacacagtggagagaagcccttccagtgtaaggaatgtgggaaagcctttagtcgatgttcttcccttgtccaacatgagaggactcatactggagagaaaccttttgaatgtagcatatgtgggagggcttttggtcagagcccatccctttataaacatatgaggattcataagagaggcaaaccttaccaaagcagtaactacagcatagatttcaagcacagcacatctctcactcargatgaaagcactcttaccgaagtgaaatcctaccattgtaatgactgtggggaagactttagtcacattacagactttactgaccatcagaggatccatactgcagagaacccctatgattgtgagcaggcttttagtcagcaagctatttctcatcctggagagaaaccctatcaatgtaatgtatgtgggaaagctttcaaaaggagtacaagtttcatagagcatcacagaattcatactggagagaaaccctatgaatgtaatgagtgtggagaagcctttagtcgacgctcatcgcttactcaacatgagagaacccacactggagagaaaccctatgaatgtattgactgtgggaaagcctttagtcaaagttcatctctcattcagcatgagagaactcatactggagagaagccctatgaatgtaatgaatgtgggagagccttccgaaaaaaaaccaacctgcatgatcatcagagaattcatactggagaaaaaccctattcttgtaaggaatgtgggaaaaacttcagccgaagttcagctcttactaaacaccagagaattcatactcgaaataaactctaggaaccgtgaaattaaggaatttgcagaatgctttagctaaaatgttctgattcaggatcagaggattcttagagagcttgggaatgtaatgaattacgtgtgtgtttatacgttgtgtgtggagaaaactgccagtagacagattttttttttttaacataaagacacattctcagatctgattacagactagtgtaaaaacagctacatgtatgtagctggttggggatgatatgcc

SEQ ID NO: 72057 - DNA, 725 bp, Homo sapiens
tttctgtgtcggctactctaatagaagcctgtgatctgtctggtctgaactgggctctgtcatgagcgtcacagagttattaggagccccaaagccttcctgacctccgccatcccataacgtagggtgggaactctgccagccgggctcccagggctggagccatgctacatccacggggctctggcagggaagcagagtcatagcctctgccaaatgaggttaatgagaatctgctccaggctccaggggttttgaggcttaattaatacttgcaaggcccttggtgattgtgaaatcaaaggttctgtgaatgtgtacaacgctggccttattaacaccagtgcattacgcaggagaaagawgctagccttcttatcactcacttagctccctggaggggctggtcccacggagtccaggccagactgccactggctcttgtggcccttgtcttgctttccaggccactcctagggtcgggagctccagggcagccaccctgagtggcaggggtggccggactcttagtggacagcgagtagaagacctccactttggggatctggagaggcaacagggcagaccccctgcagcagtcttggtgattgtgcctccagacctaaagaaggactcccagtgaggatgcctgtcaccttcccagatggccggtccttcctatattagatgtgcctccttggactaagcaccaccaggctctctgg

SEQ ID NO: 72058 - DNA, 1352 bp, Homo sapiens
tgcatgaacccaggaggcagagcttgcagtgagccgagatcaaaccactgcactccagtctgggcgacagagcgagactccatctcaaaaaaaaaaaaaaagaataaaacatggccagcttcacagtgagatccctgaagacagatctgtgcctgtggatcacgggtcccagcaccaagccggtgtcgctgaggaaccgaatgcccaggaaagaggggccccgggtgtgggtgctcctctgggtgtgagtgctcccctgggtgtgggtgctcctcaccaacagctaacgtgtggggccttcctgtgccccagccaaggtgacacgaacaccccaagttttcacccctcaggcacccatgagatggcccctgcccgggaagcagccacaggctggcactgttggcccagatcgaccctggccaaccccgtccatctggagtcagccccatctggcggtgtcactgacaacagagtcaaccagccccaaattctccccaacagatgacttctcagtgagcctggaattccaaacattgagtagcagaacaaagcagatgacaaatgatgtgtgccagagaggattcctcgggggagactgggctcggccaagaggccttgtgagataaaggaggggagaaatgaggacactgaagatttacagagacgattccttcatagccctgccccacggaatgctcgggtccccaggccaataggcttctgttccagatgccagcagggagtgccgattcttcccaggtggtcaggagcccctgctgcccggggcctcacctggcttcatcagcaaggcaggcacatggcggggggactgacccctgtccaggagctgcctgcagggaggagcggcctggggactttcttttgaaacaagatgaaaactctgatgaaatgaatcagttaacagagagaaaaatggcaatgggtatatggcaaggagtaaatatcctccatatagaaagagctcttataaatcaatgaggaaaaaacaaatccatttaaaattttaaaataatatacactggcaatcagccaaagaaaaaatgcaaacagctgtccatcctaactcacaatccatgacaccagcttgctcgaggcacaggccamctgccaggcggcagggatttacaagtgtggcaacaccctgctgtcagggtgaggaggcgggcacacccacacggggtcggcagatggaaatggatgcagctttttaggagcttcttggacatccgcctggcttttaaatgtgcttattcttgattctgtaattccacttccaggaacttattctaaataactaatagatacatatgcaaagatggataagtgaagac

SEQ ID NO: 72059 - DNA, 1453 bp, Homo sapiens
acgggatcccttgtcaaccagtctcaagaatttcagcagcagccccagcgccgggccttcccaagtcagatcccacaccagaaggccggggccctgcaggacccgagcttggcggcatccctctccttcccaagtctaggcacctggaagggggcgaggaagggcagagccgcccccccgcacatcccttcacacccttcccagggccaagggggaacattacagcttctgcgtgaattcctgttttcctcccttcctgtgagtcaggcacgattgcttgcactgcgtccggccgccccaggctttatctgatgggaacgaggcctggcctagggcctgagaagctgcaatgggaaagacaaacacgggcggtgcggccctctgctctgtgacgagagcactgcccccttggtgcagggacgctgtgtccagcctccccatcggagacactctgaggggaccctggaggccgtccagctccagaagagcgcgcccagctccccacgggctgcgtccaagctggtcccctcaggcactcctggtggatgatccacaggctgtgccacggtcagccctggtccgcgctgcaagatgggaggtgggaactggcttagcccggctccggctctggttcccctccctggcttcatcctcagcgttaattctttgcgccgttctgagctaaaggtcttctccctgcccctcaagatcacacaaggtcacacaagtttcttggcccttacgaagtctggctgctgcagacgttaaaccccatcccatctataatataggaagctgacagttcttaaatccttcagctcactcaagagggaggccacgacccacctgcctgcatgctaagctttccatgggggctttactagaaaaacgcagcgatctcagaagatcaaagaagttggtgctacgttcacaaccacctcctcggggactgctgagacccagcggcttttgtacacagggcttctcctctgggttcagaagtccatggcccttccaatcacccagcgcctgcagcccacacaaaagccagtgagctcatcccaataggaaaaagataacttcatcgtttaaaaaagcacttaaacagcaaaagttcctgtggaaaccacatgtggaaaacccactgacaaacaggccaaatccctaaaccaaggttcaaatttcaggggcttcagayggggctgcgggcgagagagcagggtattagggctgaacgtccaccagcaaccaagaaggcggctgcacggcgctcaccaaagcgctcgcgcacaggaggcactcatgggcttcccgcatcctctacgtccccatcggggtcctgaaacagtcctgcctccaggcacctcggcaccgccaggccagcccatcacggccccaaaacatctgccttcccctggtgggagagtgggagagtcatggggctgaggttttg

SEQ ID NO: 72060 - DNA, 1453 bp, Homo sapiens
acgggatcccttgtcaaccagtctcaagaatttcagcagcagccccagcgccgggccttcccaagtcagatcccacaccagaaggccggggccctgcaggacccgagcttggcggcatccctctccttcccaagtctaggcacctggaagggggcgaggaagggcagagccgcccccccgcacatcccttcacacccttcccagggccaagggggaacattacagcttctgcgtgaattcctgttttcctcccttcctgtgagtcaggcacgattgcttgcactgcgtccggccgccccaggctttatctgatgggaacgaggcctggcctagggcctgagaagctgcaatgggaaagacaaacacgggcggtgcggccctctgctctgtgacgagagcactgcccccttggtgcagggacgctgtgtccagcctccccatcggagacactctgaggggaccctggaggccgtccagctccagaagagcgcgcccagctccccacgggctgcgtccaagctggtcccctcaggcactcctggtggatgatccacaggctgtgccacggtcagccctggtccgcgctgcaagatgggaggtgggaactggcttagcccggctccggctctggttcccctccctggcttcatcctcagcgttaattctttgcgccgttctgagctaaaggtcttctccctgcccctcaagatcacacaaggtcacacaagtttcttggcccttacgaagtctggctgctgcagacgttaaaccccatcccatctataatataggaagctgacagttcttaaatccttcagctcactcaagagggaggccacgacccacctgcctgcatgctaagctttccatgggggctttactagaaaaacgcagcgatctcagaagatcaaagaagttggtgctacgttcacaaccacctcctcggggactgctgagacccagcggcttttgtacacagggcttctcctctgggttcagaagtccatggcccttccaatcacccagcgcctgcagcccacacaaaagccagtgagctcatcccaataggaaaaagataacttcatcgtttaaaaaagcacttaaacagcaaaagttcctgtggaaaccacatgtggaaaacccactgacaaacaggccaaatccctaaaccaaggttcaaatttcaggggcttcagatggggctgcgggcgagagagcagggtattagggctgaacgtccaccagcaaccaagaaggcggctgcacggcgctcaccaaagcgctcgcgcacaggaggcactcatgggcttcccgcatcctctacgtccccatcggggtcctgaaacagtyctgcctccaggcacctcggcaccgccaggccagcccatcacggccccaaaacatctgccttcccctggtgggagagtgggagagtcatggggctgaggttttg

SEQ ID NO: 72061 - DNA, 1453 bp, Homo sapiens
acgggatcccttgtcaaccagtctcaagaatttcagcagcagccccagcgccgggccttcccaagtcagatcccacaccagaaggccggggccctgcaggacccgagcttggcggcatccctctccttcccaagtctaggcacctggaagggggcgaggaagggcagagccgcccccccgcacatcccttcacacccttcccagggccaagggggaacattacagcttctgcgtgaattcctgttttcctcccttcctgtgagtcaggcacgattgcttgcactgcgtccggccgccccaggctttatctgatgggaacgaggcctggcctagggcctgagaagctgcaatgggaaagacaaacacgggcggtgcggccctctgctctgtgacgagagcactgcccccttggtgcagggacgctgtgtccagcctccccatcggagacactctgaggggaccctggaggccgtccagctccagaagagcgcgcccagctccccacgggctgcgtccaagctggtcccctcaggcactcctggtggatgatccacaggctgtgccacggtcagccctggtccgcgctgcaagatgggaggtgggaactggcttagcccggctccggctctggttcccctccctggcttcatcctcagcgttaattctttgcgccgttctgagctaaaggtcttctccctgcccctcaagatcacacaaggtcacacaagtttcttggcccttacgaagtctggctgctgcagacgttaaaccccatcccatctataatataggaagctgacagttcttaaatccttcagctcactcaagagggaggccacgacccacctgcctgcatgctaagctttccatgggggctttactagaaaaacgcagcgatctcagaagatcaaagaagttggtgctacgttcacaaccacctcctcggggactgctgagacccagcggcttttgtacacagggcttctcctctgggttcagaagtccatggcccttccaatcacccagcgcctgcagcccacacaaaagccagtgagctcatcccaataggaaaaagataacttcatcgtttaaaaaagcacttaaacagcaaaagttcctgtggaaaccacatgtggaaaacccactgacaaacaggccaaatccctaaaccaaggttcaaatttcaggggcttcagatggggctgcgggcgagagagcagggtattagggctgaacgtccaccagcaaccaagaaggcggctgcacggcgctcaccaaagcgctcgcgcacaggaggcactcatgggcttcccgcatcctctacgtccccatcggggtcctgaaacagtcctgcctccaggcacctcggcacmgccaggccagcccatcacggccccaaaacatctgccttcccctggtgggagagtgggagagtcatggggctgaggttttg

SEQ ID NO: 72062 - DNA, 704 bp, Homo sapiens
ctagcggtgctggccaagtggcctgaaagaagtgggaaacagaacggcaggggcttcccagaatctctcctggtccacgggtgtcacgatcccactctgcccagttcccaggatgcccagaaaaacagagacaaggcctggggcaccctagcagctctatgtggcttatggggcatctccagctgctctatgaggttacggggcacctacggctgctctatggggttacggggcgcctcccgctgctctatggggttacggggcacctcctgctgctctatggggttatggggcagctcyggctgctctatggggttatgagacacctctggccactctgtggggttcatggggcacctccagctgctctctggggcttatgagggacttctttaagattctatttcaaaacccacacttgctatggattgagttgtgtccgagtcctacccccgacctgtgtgagtgtcgcttggttggaaatgggctctttgcagatgtaattagtcaagatgaggtcgtgctggagtagggtgggccctaaatccaatgaccattgtctttataaagcgagagacacagagatacacacacacacagggagagacacagagcagaggccatgtgaggatgaggtgggactggagtggcatggccacaagccaaggacacctggagccaccaggagctggaagaggcaggaa

SEQ ID NO: 72063 - DNA, 663 bp, Homo sapiens
ttaaaaactgataattctctgctggcctcccctttaaatcttgcaattatattccgagcaaaatacttgaacagccaagtcagaggagtgccccaaaactccgcttcagcgaggcgtaatagaagggtctggggctgttgaaagggacagattggagataacattcaggtggaaggaaatmtactgattactttggttagaaatggaggtaaaccaccacatatagagggtagcggagcctgtgcttctgagcaaactggtagaaccactctcttccctttcctgcaccacctcccccaaccagcataaccctcttcctattttggagaatttttatagaggaaagtgacagttttcttccaagaggtggcatctctctggaaaccatcctggtggacaaagcgataatgatgagaggcccccatgaaagagaaaatgctggcatcaggaatggagaccatgaggtctggtctttcagggacagtttcccccatcggtggcagccccagagcgcctggctttgactgcatcacgtgagctggaaagtttccttctatgcaaatctgcattattagtagaagggccttgaataagctgctgaacctctctgaaccacattcagacacttacaaaacgagggagtcggccgggcacgctggctca

SEQ ID NO: 72064 - DNA, 1208 bp, Homo sapiens
tatatatattttatttgtttaagagacagggtcttactctgttgcactcactgtaacctggaactcctgggatcaagcaatcctcctgcctcagcctcccaagtagctaggactgcaggtgcacaatgccatgcctggctaatttataattttttttgtagaggtggtatcttgctatgttgtcaaggctggccatgaactcctggcctaaagtgatcctcccaccttggtttcccaaagtgctgagattataggcaataatagccactgtgcccaacctgaattactatattcttgaagttaaacacacccacaatcttcagatgtttcctttggtttgtttttcagttcttttattttcagtacccaatagatgaaaagtatcaaccagaagtttatcataaactctggaaaactttgaacagaggaagagataacatacctagtttatcctgtatatgccaaggttataacctttttaacttcttaacttctcatacgtgtgtatgtgtgtgtgtgttacacacacatatgtatgtatatgtatatgagagagagaacagctttgatgttttcatgtgttattaatctattaggttggtacaaaagtaattgcagtttttgctattacttttaataattcctgtttggctgaattttaagactagtggggccaggtgtggtggctcacacctgtaatcccagcactttgggaagccgaggcaggtggatcacctgaggtcaggagttcgagaccagcctgatcaacattgtgaaaccccatctctactaaaagtacaagaattagctgggtgtggtggcaggtgcctgtaatcccagctattcaggggtctgaggcaggagaatcacttgaacctgggaagcagaggttgcagtgagccgagatcatgccattgtacttcagcctgggcgacagagcgagtgagattccgtatcaaaaacaaaacaaaacaaaacaaactagtggaaaaagctgaatggaaaacacaatctatcaaagtagcttgctttttcagcatagagcatgctccaggtgtatgtartctgtggagtcacacctgagtttgaatcccagcactaccactgactgtgtgaacttagggaagtgacttcacctctgcgtctttgtttccttacccacttcctagggttgcagtgtcatcatataagatcatatatgtaaatgc

SEQ ID NO: 72065 - DNA, 1208 bp, Homo sapiens
tatatatattttatttgtttaagagacagggtcttactctgttgcactcactgtaacctggaactcctgggatcaagcaatcctcctgcctcagcctcccaagtagctaggactgcaggtgcacaatgccatgcctggctaatttataattttttttgtagaggtggtatcttgctatgttgtcaaggctggccatgaactcctggcctaaagtgatcctcccaccttggtttcccaaagtgctgagattataggcaataatagccactgtgcccaacctgaattactatattcttgaagttaaacacacccacaatcttcagatgtttcctttggtttgtttttcagttcttttattttcagtacccaatagatgaaaagtatcaaccagaagtttatcataaactctggaaaactttgaacagaggaagagataacatacctagtttatcctgtatatgccaaggttataacctttttaacttcttaacttctcatacgtgtgtatgtgtgtgtgtgttacacacacatatgtatgtatatgtatatgagagagagaacagctttgatgttttcatgtgttattaatctattaggttggtacaaaagtaattgcagtttttgctattacttttaataattcctgtttggctgaattttaagactagtggggccaggtgtggtggctcacacctgtaatcccagcactttgggaagccgaggcaggtggatcacctgaggtcaggagttcgagaccagcctgatcaacattgtgaaaccccatctctactaaaagtacaagaattagctgggtgtggtggcaggtgcctgtaatcccagctattcaggggtctgaggcaggagaatcacttgaacctgggaagcagaggttgcagtgagccgagatcatgccattgtacttcagcctgggcgacagagcgagtgagattccgtatcaaaaacaaaacaaaacaaaacaaactagtggaaaaagctgaatggaaaacacaatctatcaaagtagcttgctttttcagcatagagcatgctccaggtgtatgtagtctgtggagtcacacctgagtttgaatcccagcactaccactgactgtgtgaacttagggaagtgacttcacctctgygtctttgtttccttacccacttcctagggttgcagtgtcatcatataagatcatatatgtaaatgc

SEQ ID NO: 72066 - DNA, 1208 bp, Homo sapiens
tatatatattttatttgtttaagagacagggtcttactctgttgcactcactgtaacctggaactcctgggatcaagcaatcctcctgcctcagcctcccaagtagctaggactgcaggtgcacaatgccatgcctggctaatttataattttttttgtagaggtggtatcttgctatgttgtcaaggctggccatgaactcctggcctaaagtgatcctcccaccttggtttcccaaagtgctgagattataggcaataatagccactgtgcccaacctgaattactatattcttgaagttaaacacacccacaatcttcagatgtttcctttggtttgtttttcagttcttttattttcagtacccaatagatgaaaagtatcaaccagaagtttatcataaactctggaaaactttgaacagaggaagagataacatacctagtttatcctgtatatgccaaggttataacctttttaacttcttaacttctcatacgtgtgtatgtgtgtgtgtgttacacacacatatgtatgtatatgtatatgagagagagaacagctttgatgttttcatgtgttattaatctattaggttggtacaaaagtaattgcagtttttgctattacttttaataattcctgtttggctgaattttaagactagtggggccaggtgtggtggctcacacctgtaatcccagcactttgggaagccgaggcaggtggatcacctgaggtcaggagttcgagaccagcctgatcaacattgtgaaaccccatctctactaaaagtacaagaattagctgggtgtggtggcaggtgcctgtaatcccagctattcaggggtctgaggcaggagaatcacttgaacctgggaagcagaggttgcagtgagccgagatcatgccattgtacttcagcctgggcgacagagcgagtgagattccgtatcaaaaacaaaacaaaacaaaacaaactagtggaaaaagctgaatggaaaacacaatctatcaaagtagcttgctttttcagcatagagcatgctccaggtgtatgtagtctgtggagtcacacctgagtttgaatcccagcactaccactgactgtgtgaacttagggaagtgacttcacctctgcrtctttgtttccttacccacttcctagggttgcagtgtcatcatataagatcatatatgtaaatgc

SEQ ID NO: 72067 - DNA, 554 bp, Homo sapiens
gtcttattatatttgggacctgaaagctggtagcttsttgggattataggcatgagtcacacagcctgaccccacttgctcttgcacaatagtttaaggctgccaaagtgagaaatttttaggagctcgataaacctggaggcttatctttctctctttcctagtctgtaaataaacagagcaaggtgaagccagcatcataatgtgacattccaagctttacatagtcacttaggtaacaatctattaaaattttatatttatagctaaaacatcttttttagctccatatgtttgatttgttaaaactattataccttgcttttgaagaaacaaaatgcctaacctccatgttttggttaaataagcttaaatatttgttgttttgggtgatattttgttggcaatgtttgttgtttctcttagtacaatgtgacaaaaagtaatccacttcaatattcatgactaattcttaaattagatatggttctgtctaatgacttcacaaatactagccttccttagtctggattttaaaaattattatggtaaaa

SEQ ID NO: 72068 - DNA, 397 bp, Homo sapiens
ccaggcctgacaggctaggctggtctgagccagatgtccagaccccagtgccctaagtccttttgtgtcccttaagtcccctcacagcttggaaagatcctgggatggacccaaggctcccagcgctggccagatggctgtccctccctggtggtggccctcaggctgcctgkagggctgcctctgcctggggctgggcggaacggaaggtgttaggcccaaagccgctgggccagcgctcagaggctcagccccggcctttcaggggaccagacctggcagacccacagctgagtccaggggcattttgtggtgactgaggcaggagggtgccgtggccaggccccggagggtcagagctgcagaccgggccatgggggctccttgttttttagga

SEQ ID NO: 72069 - DNA, 397 bp, Homo sapiens
ccaggcctgacaggctaggctggtctgagccagatgtccagaccccagtgccctaagtccttttgtgtcccttaagtcccctcacagcttggaaagatcctgggatggacccaaggctcccagcgctggccagatggctgtccctccctggtggtggccctcaggctgcctggmgggctgcctctgcctggggctgggcggaacggaaggtgttaggcccaaagccgctgggccagcgctcagaggctcagccccggcctttcaggggaccagacctggcagacccacagctgagtccaggggcattttgtggtgactgaggcaggagggtgccgtggccaggccccggagggtcagagctgcagaccgggccatgggggctccttgttttttagga

SEQ ID NO: 72070 - DNA, 397 bp, Homo sapiens
ccaggcctgacaggctaggctggtctgagccagatgtccagaccccagtgccctaagtccttttgtgtcccttaagtcccctcacagcttggaaagatcctgggatggacccaaggctcccagcgctggccagatggctgtccctccctggtggtggccctcaggctgcctggarggctgcctctgcctggggctgggcggaacggaaggtgttaggcccaaagccgctgggccagcgctcagaggctcagccccggcctttcaggggaccagacctggcagacccacagctgagtccaggggcattttgtggtgactgaggcaggagggtgccgtggccaggccccggagggtcagagctgcagaccgggccatgggggctccttgttttttagga

SEQ ID NO: 72071 - DNA, 1002 bp, Homo sapiens
tgcatcatctggtatctgatacttaaaataaaaatggcattaatttttactccaatcattgttttgtagtttaggtgacttatataagtaatgtttcaagcctcaaacccattcaygccagaagatttcccagcacagaattaagagagcagatctcattgctgccaggagaattatgacagttcttccctctggccgcaagtacggagtgatttaaaaatgtgagacactttctttggctgcaaatctgactggtttccattttaatgagaaagtccacatttctgatcttacattttttcttgtaaagacagacttaggtgcttttctcctctatgtttttgtggcataatttttcataaggaaagtatatttatgatatttacattaatataattaatgtatattttatattagtagcatattaacagtgtaataaaaaataaaaacaaactctagtatccagaggatcacatgctgaccagaccccgtgtagaaagtgccgaagagcatcaaggaaatggaaacgttggaattccatccgtgcttgtggctttccttaaacttttgttatggaaaatttcaaatataccccgaagtggagattggcttaaatcagccccacgtgcccatcactcggctccagtcattatccagtgtggttcctctgatcttcaccacccactcccgctccaaaaaagaggatttggaaacaagtcccagctagacattgcacatgttccatatgctgttctaaaagagcaagcctcttgaaaaacagccccaaggctgccgttacccaggatatcataaacccgcaagacggcctttatctcgtgagctccgggtcagtgtccccaccccggggctgtggctgggtcctggaagtccccatttcccggaggctctggggctggtgttgcagcctcctcgtggctcacagagtcccggagaacacgccctgtcctcaacccaccttttctttgcctagcacccctgctg

SEQ ID NO: 72072 - DNA, 985 bp, Homo sapiens
tttcaggtccttttataggtggttcacatattttatgtttaatattcagttcaagcctatggttgatattagtgttaacattttacaataagaactctgaagattaaagtkataactaccacagagctagccaatggtaaaacaggattcaattcaaattgatctgtataaaattgagttcttcttaatgacatttcactgagcaattttttgtggatgcctttaaactcttgtagcatcatgatgaagcagagaaaagaatatcttctgaggaatgctatatagcatagtagcatagtatagggaagggaagtagactttgaagccagatcccctgggttaaaatcctggctccattatttacagctgtgtcattgtgtttaagtcagtaaactgctctttgcctcagtttcctgatttataaaatagaagcaatgatagtaggtacctctttgggttattatgagaatcaaatgaacagtggtgagcacagtacaggaggagctgtatgtgtttgtttgctctcacaccttaccccaggcactccctgggcaagaaactacctcaccattgagttttaagaagaatataatgtgtagactaaagaaacaaaatgcaacaccctagatcctgctatatacacgtatgcattcagtttaacaagaagcagtggaacatgtctattctgtctttttttggaattctagtctgatggtttacttacaaggatagaaggataaatttagagatgagactacatatatatatatatgtattatatatacatatgcataaatatgtttggtctgtgatttttgagtaggtatatggttttcaaccatcactgtctgcacatgaaataacacagaacttaagcattatacaaccctaattgtgaattgggaaaggaggggaatttttttttctttttcaaaatactctccttatgtctctgagtttctgaaaatcttaagtaattttcccc

SEQ ID NO: 72073 - DNA, 843 bp, Homo sapiens
cagaaaaggaaaaccctagtgggggtcttccccagggcctctgctatcaaggagcgaggaattactgttctcctggtcttccaggtaggaaccgcatccatggggcaggagccaggatggctttctggaataagcaggggagggcataaccagacattggtcactttaaatcttctgcttgagtttcttctttcaccaagtcttgcattgccaggggcagaaagctgggagaaaaagatgtaccttcatggtacagcaaaaggcacgcccaacgtgcggctcgaacccacgaccstgagattaagagtctcatgctctatcgactgagctagccgggcttccttataggatcttttccatatctacaaatgggccgagtggcctaagggtggtggaaacaaagggaggtaatgaatcaccccgggaaaccagggcgcgcttggggtcccccacaacagactcagttcgccaccgacgtccccgctagtgcaggatttccctcaccaccccgcaatctcccataaatgggggtgacctgccagagtctccttcgtcaccgcgccggcatatatctgtgttctcccagtccgtgccctcctctgaaaaggccttctttcagaaagagaaaaaacattctcagactgcgactgcacgcacttaaagagtcaatgacaaccttggcaacccttttttttttttttttttttttttttgaggccacttgagttacagggacaggagagttctgctgtgtatgggccatccttgcagctgcagacagaaagcccaaagctcactgggactcacagaagccctcgcaggtgctgctccgcactgtaacct

SEQ ID NO: 72074 - DNA, 843 bp, Homo sapiens
cagaaaaggaaaaccctagtgggggtcttccccagggcctctgctatcaaggagcgaggaattactgttctcctggtcttccaggtaggaaccgcatccatggggcaggagccaggatggctttctggaataagcaggggagggcataaccagacattggtcactttaaatcttctgcttgagtttcttctttcaccaagtcttgcattgccaggggcagaaagctgggagaaaaagatgtaccttcatggtacagcaaaaggcacgcccaacgtgcggctcgaacccacgaccctgarattaagagtctcatgctctatcgactgagctagccgggcttccttataggatcttttccatatctacaaatgggccgagtggcctaagggtggtggaaacaaagggaggtaatgaatcaccccgggaaaccagggcgcgcttggggtcccccacaacagactcagttcgccaccgacgtccccgctagtgcaggatttccctcaccaccccgcaatctcccataaatgggggtgacctgccagagtctccttcgtcaccgcgccggcatatatctgtgttctcccagtccgtgccctcctctgaaaaggccttctttcagaaagagaaaaaacattctcagactgcgactgcacgcacttaaagagtcaatgacaaccttggcaacccttttttttttttttttttttttttttgaggccacttgagttacagggacaggagagttctgctgtgtatgggccatccttgcagctgcagacagaaagcccaaagctcactgggactcacagaagccctcgcaggtgctgctccgcactgtaacct

SEQ ID NO: 72075 - DNA, 662 bp, Homo sapiens
catcaatccatccatcagtccacccatttgtccatgtatccattccctttctgttctatctgcttgtttctagttcttcacaattatcaggcgagttatttccatgtggccaagaacagtggctcttgccagctccaggttattcgtaccaacataaaggaaatttctctctcccatcatctgtatatcaattctagtgaggaaactagactggtccttcttgaatcacatacccacttcagctaagtcactgtgttcagaaaaacagggtactctaataggtaagctcaggtcagatgtccactcctgtgactgaagaagggtaaaagagtggactactaagggcaggaaaaacaaactaaccacagtagctatcacattccatcccaccccactgcccactgacatgggtacaactccaagttaaagcctctaagrctgctgaaaatgtggtatggacagggatcagtcccactttccgtattcagaattctattattctgcctattcagttttttccagtgtggctacctcatttcctaccatactgatctatttgttgggtccatctttagcagagaggaagcaggaggtaaagaaaataccgcagtgttttcaaaatgcaaaacatagttatatctacatagtcagccaacatcaac

SEQ ID NO: 72076 - DNA, 569 bp, Homo sapiens
ccagaggacaacaggggtatggttcccagagggatagaaaacggatgcgggcagaaataacagcagmtgtttttggcctcgagcagatgctaagtggaggggctgggttgcacctggggttgtggaccactaagcccccatggcctgtggcctgtctatatcccagagtgcctgcagggactggtaaacagcaggcccttcattcattcatgcctgctgcatgagtttcctgttgctgtgctctgcacacctgcttattgggagaccctgtttttctagctcatccttctggagggtcacccattccctggcctctccccctccagaaatgaagtctcacttctgtgggtgaatctctttctgtctcccttcatcttttgcagcaaacctcagtctgaagtgaaacatcaggaaataattcagccttttgtttcatggacacatacacagagtctgtaggttctggacacattccttagatgagtggtagtggtgggcaaggctgcaggcatctgtatcatatctttggggcctggaggccaagcagcagcttccactggatgcttccc

SEQ ID NO: 72077 - DNA, 817 bp, Homo sapiens
tagagtcccagcctggccaacatggtgaaaccccattactactaaaagtacaaaaattagctgggcgtggtggcagaagcctgtaatcccagctatgttgggaggctgaggcacaagaattacttgaactcagaaggcggaggttgcaatgagctgagatcgtgccactgcattccagcctgggcgacagagtgagactctgtcttaaaaaaaaaaaaaaaaagatgatagagtccacacatgagcatatgagctccagacctggacatcatgggttcaaatccaggttccatcacttaccagtcgtaataccttgggctggttatgtcacctgtgtatgcctcacttcctcagctacaaaatgaggacaataatagtacctacctccatgaggagttaggaggactaaatgagcttatacatgtaaaatgcctggaacatagcattcattaatattaaggattgtttttcatattgctcccattgtagggatatgatggggaaaggcactctaggcagagggaacagcatgaagaaaggcatgtgcttcccatggggaggatgcgcctactgagtcagcccgggtctttagccaggagtgccagaatccaaatatggctgcctaagacagtgggaatgtgctgggggtgcgtgcgtgtgtgtgtgcgcgcgcatgcagggtggtggtgtggttggtgagggcatagggattcacaggmtcaacccaaggaaaaagcagaactggtcaagttcaagtttgacataaatcaaggagccatacctagatatggagcctgggctggagaaataatgtccc

SEQ ID NO: 72078 - DNA, 730 bp, Homo sapiens
tgcttttatggcgtttacaaccaagtaaaggagattgagtcatggaatgtagagttaaaaggaattgcaaagatcttctggtccagctgtctatctaatgcttaaatccgttttcaaacagctccgttgagttctgtccacctgtgcttgatggcttccagtgctgagggtcaccgtctcccaggatgacctctgtggacagctccagctattcaaaagttcctctttacactaaattgagtccacatctgactgcccatgacttccaccagtcagtcctagatttccttccccggcccccatggggtcacacagaacaaatttgtggcctctttcrtgccctagtgcttaaacatgtaaaaggagacctcatctccttccgaaaacttctctgagccatcaccccaaaacctgcaactctttctcaggcgtcaaagttctgagtcctttcaccctttaacagggattaaaatgtaaaattgttttataaaatttggaagctgagacaggagaatcgcttgaacctagggagcagaggttgcagtgagccagggttgcaccactgcactccagcctgggtgacagaggaagactccatctctcaaaaaaaaaaaaaaattctagctgttgtaaagccattcttataggtgttgcccattgtgttctttatgacccttgtagagagattcagaaggtcattcttgtatcagatgtcctgagatgtttactg

SEQ ID NO: 72079 - DNA, 913 bp, Homo sapiens
caaagattactgtaaaaaatgccattatttggaaccagagactatggtagtgtttacacttaggagaaaatgaacacaaatgttaaattgtgaatgttattcctaatggggcaaattatggagttatttagtctctgaaagagacagcatggtcagtaaatctcttgacatgtcccacttatgcaataattaactctgctcctcgttggtgtcttaatgaaaaataatatgttccaaagagagaagtaaggcagaagctattaaaaatccaggaaaagaaaattcagattgggtacttttgtgacttcttggccattcttataaacttttggctgggaaggaatttggaacagtgttatgtgggagtttcacttatccatccattctttgcagtgtataatttagtaggtttaaacttattctctttcttctgtcactatcagtttcttttcacaggaagggaagtaggtccttctgtcagtaatttggcaaaagtgctgaaaagcccattattcctgttggagagaaagcaaaccacccctggtatgtgaggacctggcaggcttcatagagagagatgagtccaagcaagcagcttcragtgagagataggtttttattctccaagagacactgagcatcagacagtcttgttttttttagagaagggtctcactctatcgcccaggctggagtgcagcagtgcgatcatagctcataacagccttcagcttctgggcccaagtgatcctcccactgaagcctctcaagtagctaggactacaggcacatgccaccatgcctggctaatttatttttgtttatttattatttttgtagagatggagtctcacaatgttgcccaggctggtctccaactcctgggctcaagcaatcctcccatcttgacctc

SEQ ID NO: 72080 - DNA, 617 bp, Homo sapiens
ctagtctaggactgagtgcttcctgcctcctcactgcctctgacttctctggggggttgatttaacacggccacgggggcttatttccataaccccagcctctgccacaggagccgctatagggttgagctttacatcctctcagtgggctcgtgaccccgtcatccacaccttcccttttatcgggtccctttcatgtggtgtctcatcgactcctcaccatagccctaacggatggacatcgctattcattcccattctacagatgcagaaactgagcttcagggaagctgaggagctcamcctgggtcatacggccagcaagtggcacagtcaagatccgaacccaggtcaggctgtgtccacagggtatcttggacagggctaaccttccaccacattgtctcttcatataatgttgaaatctggcttctctttcaatagctgccccaacgcggccggagcactgggactaaggcagacgtgagcgctagtatcgcagtcaccagcactgctacagcgccttcccttttagtgcctcctgtcaacgctgagaggtagtcacaagtatccccatggcagatgtgggaggactgaggcccatgaggtccagggct

SEQ ID NO: 72081 - DNA, 1320 bp, Homo sapiens
gaattttttgagattgtaaatatcaaaggagttagattgtgttctgacatggttgtagactttcacctggattattgatattctacctctaataaatttttaataggctgtatgagtttttttttttaatggacttaagaaaacagttttaggtgttcaggaaaatagaggagaaactacagcgttcgcatatactccacacaccccactcccagtttttccagctatgaacatcttttattaggatggtacatttgataaaccaacattacattcttattaactaaagtttagtttacattaggctttattccttctcttatacattctgtggattttgccaaatgcataataacatgtatccaccactacagtatcgtccagaatagcttcactgccctaaaaatcctctgggttccccttattcacccctccccaccaaccctgacagtcactgatctttcttttcagttttgccttttccagaatatcatatagcttggatcatacagtaatgtaattttttcagactggcttctttcatgtactatgcatataagattcctccatatctttttttttttttcttttttaagacaatctcagtcttcgcccaggctggagtgcragggcacaatcacagctcaccacagcctcaacctctcaggctcaggatcctcccatctcagcctctcaggtagcaggactacaggtgcgcatcaccttgcctggttaattttttgtatttttgtagagacaaggttttgccatgttgcccaggctggtctcaaactcctgggctcaagcaatcttcccatcttggcctcccaaagtgctgggattacaggtgtgagccattgtgtctggactcctccaggtctttttgcagcttgttagcttttttttttttttttttttttcaataaatgcccgtgcttattacaagatagaaacatgaagaattccttaggtactgtttttttttttttttttttttttgagacagagtctaaccctgtcacccaggctggagtgcagtggtgtgatctctgctcactgcaacctctgcctcccgggttcaagcgattctcccgcctcagcctcctgagtagctgggattacagatgtgtgccaccacacccagctaatttatttatttatttattttgagtttttatttttgtttgtttgtttaagatggggcctgccctgtcacccaggctggcgtacaggggcgtgaacgtggcttactgcagcctcaacctcccaaactcaagcaatcctcccatgtcatcctcctgagtagctggtactacaggc

SEQ ID NO: 72082 - DNA, 1320 bp, Homo sapiens
gaattttttgagattgtaaatatcaaaggagttagattgtgttctgacatggttgtagactttcacctggattattgatattctacctctaataaatttttaataggctgtatgagtttttttttttaatggacttaagaaaacagttttaggtgttcaggaaaatagaggagaaactacagcgttcgcatatactccacacaccccactcccagtttttccagctatgaacatcttttattaggatggtacatttgataaaccaacattacattcttattaactaaagtttagtttacattaggctttattccttctcttatacattctgtggattttgccaaatgcataataacatgtatccaccactacagtatcgtccagaatagcttcactgccctaaaaatcctctgggttccccttattcacccctccccaccaaccctgacagtcactgatctttcttttcagttttgccttttccagaatatcatatagcttggatcatacagtaatgtaattttttcagactggcttctttcatgtactatgcatataagattcctccatatctttttttttttttcttttttaagacaatctcagtcttcgcccaggctggagtgcaagggcacaatcacagctcaccacagcctcaacctctcaggctcaggatcctcccatctcagcctctcaggtagcaggactacaggtgcgcatcaccttgcctggttaattttttgtatttttgtagagacaaggttttgccatgttgcccaggctggtctcaaactcctgggctcaagcaatcttcccatcttggcctcccaaagtgctgggattacaggtgtgagccattgtgtctggactcctccaggtctttttgcagcttgttagcttttttttttttttttttttttcaataaatgcccgtgcttattacaagatagaaacatgaagaattccttaggkactgtttttttttttttttttttttttgagacagagtctaaccctgtcacccaggctggagtgcagtggtgtgatctctgctcactgcaacctctgcctcccgggttcaagcgattctcccgcctcagcctcctgagtagctgggattacagatgtgtgccaccacacccagctaatttatttatttatttattttgagtttttatttttgtttgtttgtttaagatggggcctgccctgtcacccaggctggcgtacaggggcgtgaacgtggcttactgcagcctcaacctcccaaactcaagcaatcctcccatgtcatcctcctgagtagctggtactacaggc

SEQ ID NO: 72083 - DNA, 592 bp, Homo sapiens
gtcctggagacttgatgagactcttctagcaggcacaggtgaagaaaggagaggtgaagtcagctgttacttgaagtagtcagtagtcactggctttcagaaagcagtcaagattgtttcgttaacagctgcaaaataggaggggcaggaaagtagaattctaggaatgctggtggaggggtccagacacacctgcttccagtcccagctcccctccccatcagctgtgtggcttcaggcaagttgactgaatccagtggtccagagaactctcacaaagcccgagcctgggaagcacagtgcctgttcctcagtaaatcccttgggatctttgtcgtggcctattcactccatttttgcacagtattccaacaagcctaacaggtttctaccyaccccaccccatcccataagtgacaaattaggtgtcagcagctgacagcaaggaccagtagcggtgacatagggggcaaagaacttgcagaaactatgaaactaggcacaagagctagcacgcagcaggctggggacgttagagtgtggagcaggaagattcctcatgtccatgggccctcactgtggtgatgctgtt

SEQ ID NO: 72084 - DNA, 694 bp, Homo sapiens
tttgttgttgttgttttgttttcagaaactcgttgcttcctaaagattggtcatttctgagcaccagaaatccatttgccaacatatggattggatcttgccagtcttatccccccagtcctcagtggctatggttggctaaggttggcactctccgaagtgcccccttcctgatcctggaatytatgatgtaaggattgtgagatggggaggttatcttgggttgtccagaaagtccctcagtgcaatcacaagggtccttgatttcagacaggagggaggagtgatgcagccacaggccgaggagagcaggcaacaaggatcggattctgcctgggtctccagaggcttcagccagcacaggcctcacacagcgcagcccattactctgcattcatctactccttgccttttgccgtctctgtgctgaccaagttgttgctggagcatgccagacctgtttcccacctcgaagctgtggcctgcactgagcagtgcccccacctctgcccccaccgtttacacttccaaccacccaacactcaagatgggttgtgtttttaaactgtggcacacagtaggcatttaaatatggccacaaggtgccttggcatctttgtgacttaattaggactcgatctgttctaaccattttctcctttcatgaggtaggatcaggttcttcactggaggg

SEQ ID NO: 72085 - DNA, 694 bp, Homo sapiens
tttgttgttgttgttttgttttcagaaactcgttgcttcctaaagattggtcatttctgagcaccagaaatccatttgccaacatatggattggatcttgccagtcttatccccccagtcctcagtggctatggttggctaaggttggcactctccgaagtgcccccttcctgatcctggaatctatgatgtaaggattgtgagatggggaggttatcttgggttgtccagaaagtccctcagtgcaatcacaagggtccttgatttcagacaggagggaggagtgatgcagccacaggccgaggagagcaggcaacaaggatcggattctgcctgggtctccagaggcttcagccagcacaggcctcacacagcgcagcccattactctgcattcatctactccttgccttttgccgtctctgtgctgaccaagttgttgctggagcatgccagacctgtttcccacctcgaagctgtggcctgcactgagcagtgcccccacctctgcccccaccgtttacacttccaaccacccaacactcaagatgggttgtgtttttaaactgtggcacacagtaggcatttaaatatggccacaaggtgccttggcatctttgtgacttaattaggactcgatytgttctaaccattttctcctttcatgaggtaggatcaggttcttcactggaggg

SEQ ID NO: 72086 - DNA, 1313 bp, Homo sapiens
ccttctaaggtgttctttttagtcctgtgtctgacacattggcagggatggctggaaggctgggctcagctgggacggttgctcagagcacctctctgcggccacttcagcatggcagcctccatgggtagtgagacttctgaaatgacaggtcagtgccttgtgagtaaggtaggagctgcatggctttttgtgacccagcctgaaaagtcacatagtgtcatgtctgctgtgtctaagcagtcagaagcctgcccactctcaaagggaggggacccaggctccacttctcagtgggaggaatgtcaaagaacctgtggtcatgttaaagttgctgctgctgcttctacaatttccatcctctttggtcctttttgatggctcctaataacccacatctcatcataaaccacaagactttgccagaagccaaggaaagagcagccctccaaattgcacctttgttcccagttcccaccagagtccctggagattttatccattcgtgatatcttctttctcttggttcttccagtcttaggggtggagcttccagtaatgtatttgtgtttccagagagctcaaaacacagctgaaaatatgcctgttggcatagggaatgttcatgctacatttggtaagtgaagaaagcaaaggaaaaatcaagtggaagaatatagatcaaggtgctaagtggttatctctgaatggaagatttagaggtaatttctattttgcttttgcatatatgtatttttcttttttatatgaagcccaactatcacatggaaattaagcgtgtaggctctgaagtcagactccttgggtttaaatctccattccttcaatttccagctttctaaccttgggcaagttacttagattttgtaaaactcagtttcctcatctctaaaatggggataatgatagatcamtagtttttacctcaaagggctgttttaaggattaaataaaattatgtatgtaaatactttgcataatttttggcataaaataagcagtcagggttagggattatttttagtggtttcattaataagttttaaaagagataaatgagttttgtttctaatatcttgataatggcacttcgtgtgaatgaatctgtgtgttttaccagaaacaccaactcggttttattgctggaaatatctcataatttgctttcacaccttttaagagctattttctcgagacatactcggcttttatgaagattttgaaaatctagggcagtgattttccttagaggggagcaagaaggtcaccaggaaagtctgctgtcctcccgt

SEQ ID NO: 72087 - DNA, 1313 bp, Homo sapiens
ccttctaaggtgttctttttagtcctgtgtctgacacattggcagggatggctggaaggctgggctcagctgggacggttgctcagagcacctctctgcggccacttcagcatggcagcctccatgggtagtgagacttctgaaatgacaggtcagtgccttgtgagtaaggtaggagctgcatggctttttgtgacccagcctgaaaagtcacatagtgtcatgtctgctgtgtctaagcagtcagaagcctgcccactctcaaagggaggggacccaggctccacttctcagtgggaggaatgtcaaagaacctgtggtcatgttaaagttgctgctgctgcttctacaatttccatcctctttggtcctttttgatggctcctaataacccacatctcatcataaaccacaagactttgccagaagccaaggaaagagcagccctccaaattgcacctttgttcccagttcccaccagagtccctggagattttatccattcgtgatatcttctttctcttggttcttccagtcttaggggtggagcttccagtaatgtatttgtgtttccagagagctcaaaacacagctgaaaatatgcctgttggcatagggaatgttcatgctacatttggtaagtgaagaaagcaaaggaaaaatcaagtggaagaatatagatcaaggtgctaagtggttatctctgaatggaagatttagaggtaatttctattttgcttttgcatatatgtatttttcttttttatatgaagcccaactatcacatggaaattaagcgtgtaggctctgaagtcagactccttgggtttaaatctccattccttcaatttccagctttctaaccttgggcaagttacttagattttgtaaaactcagtttcctcatctctaaaatggggataatgatagatcaatagtttttacctcaaagggctgttttaaggattaaataaaattatgtatgtaaatactttgcataatttttggcataaaataagcagtcagggttagggattatttttagtggtttcattaatamgttttaaaagagataaatgagttttgtttctaatatcttgataatggcacttcgtgtgaatgaatctgtgtgttttaccagaaacaccaactcggttttattgctggaaatatctcataatttgctttcacaccttttaagagctattttctcgagacatactcggcttttatgaagattttgaaaatctagggcagtgattttccttagaggggagcaagaaggtcaccaggaaagtctgctgtcctcccgt

SEQ ID NO: 72088 - DNA, 1313 bp, Homo sapiens
ccttctaaggtgttctttttagtcctgtgtctgacacattggcagggatggctggaaggctgggctcagctgggacggttgctcagagcacctctctgcggccacttcagcatggcagcctccatgggtagtgagacttctgaaatgacaggtcagtgccttgtgagtaaggtaggagctgcatggctttttgtgacccagcctgaaaagtcacatagtgtcatgtctgctgtgtctaagcagtcagaagcctgcccactctcaaagggaggggacccaggctccacttctcagtgggaggaatgtcaaagaacctgtggtcatgttaaagttgctgctgctgcttctacaatttccatcctctttggtcctttttgatggctcctaataacccacatctcatcataaaccacaagactttgccagaagccaaggaaagagcagccctccaaattgcacctttgttcccagttcccaccagagtccctggagattttatccattcgtgatatcttctttctcttggttcttccagtcttaggggtggagcttccagtaatgtatttgtgtttccagagagctcaaaacacagctgaaaatatgcctgttggcatagggaatgttcatgctacatttggtaagtgaagaaagcaaaggaaaaatcaagtggaagaatatagatcaaggtgctaagtggttatctctgaatggaagatttagaggtaatttctattttgcttttgcatatatgtatttttcttttttatatgaagcccaactatcacatggaaattaagcgtgtaggctctgaagtcagactccttgggtttaaatctccattccttcaatttccagctttctaaccttgggcaagttacttagattttgtaaaactcagtttcctcatctctaaaatggggataatgatagatcaatagtttttacctcaaagggctgttttaaggattaaataaaattatgtatgtaaatactttgcataatttttggcataaaataagcagtcagggttagggattatttttagtggtttcattaataagttttaaaagagataaatgagtyttgtttctaatatcttgataatggcacttcgtgtgaatgaatctgtgtgttttaccagaaacaccaactcggttttattgctggaaatatctcataatttgctttcacaccttttaagagctattttctcgagacatactcggcttttatgaagattttgaaaatctagggcagtgattttccttagaggggagcaagaaggtcaccaggaaagtctgctgtcctcccgt

SEQ ID NO: 72089 - DNA, 632 bp, Homo sapiens
tttgggaggctgaggtaggagaatcccctgagctcaggagttggacacctgcctgggcaacacggtgaaaccccatcgctacaaaaaatacaaaaattagccaggcatggtggtgcatgcctgtagtcccagctactcagcaggctgaggtgggaggattgcttgagtgtggggaggtcgaggctgcagtgagccatgatcatgccactgcacaggtgacagagtgagattctgtctcaaaaagactaaaccaaactagctatgtgtagatggtgagtgcccagtgatctgcagatgctgcagaaggggtttgggggtgagtgtgcatctggttgctaagggccgtctgagggtcctcatccctgagacacacytgaggagccctttgtgtttctgcttttacactctgggctcttgccgtggtctgagcttgcaatgccacaagacacacagagagaagctgggcctccaggcccctgaatgagccatgcaggagcagagcgctgagtcttggctccctgtaatgtcaccataacatgaccacaatgcaggagactgacagtgacagggagaccccagaagaagttgagcttccgtctgggaaatcagaagagagtgtcaagacaaggccg

SEQ ID NO: 72090 - DNA, 677 bp, Homo sapiens
gatcccactaattatgacagaaatgatgatacatttaaatgacttggatgttttataggtatgatctcgtgaaaycttgagagaaactgaatgacgaatgaaactattgttcctgtttcacacagaagaaaactgaggttaaaaggggtaaagtaattttgcatggcatgaagtagaaattcaaagtacaggaatttgaacttggttctgtccttttctgaagcccttgaccactatagactcaaacatcaccttgtttttccactcattcaacacttttttttttaaattatctaataggttggcactcatcatgagcccctgttctcattctgcaaatggtgaagctctctattgtcctgaccccacagttcctgtcccatgaccagggccagctcaccaaggagctgcagcagcatgtaaagtcagtgacatgcccatgcgagtacctgaggaaggtgagtgagtgcagacagatggggcctggtgcccttgagcagttcccgggtctcagctgccacacatctcatagccggtgatgctgggggaagcttacgcagtcacagtactggcttcttcctctttttctttccatacaagtggcttagggatggggtagagtagttgacttatttggatgaaaaccactatcttctgtcagaaactcaaaaggaatc

SEQ ID NO: 72091 - DNA, 677 bp, Homo sapiens
gatcccactaattatgacagaaatgatgatacatttaaatgacttggatgttttataggtatgatctcgtgaaatcttgagagaaactgaatgacgaatgaaactattgttcctgtttcacacagaagaaaactgaggttaaaaggggtaaagtaattttgcatggcatgaagtagaaattcaaagtacaggaatttgaacttggttctgtccttttctgaagcccttgaccactatagactcaaacatcaccttgtttttccactcattcaacactttttttttwaaattatctaataggttggcactcatcatgagcccctgttctcattctgcaaatggtgaagctctctattgtcctgaccccacagttcctgtcccatgaccagggccagctcaccaaggagctgcagcagcatgtaaagtcagtgacatgcccatgcgagtacctgaggaaggtgagtgagtgcagacagatggggcctggtgcccttgagcagttcccgggtctcagctgccacacatctcatagccggtgatgctgggggaagcttacgcagtcacagtactggcttcttcctctttttctttccatacaagtggcttagggatggggtagagtagttgacttatttggatgaaaaccactatcttctgtcagaaactcaaaaggaatc

SEQ ID NO: 72092 - DNA, 645 bp, Homo sapiens
gatcccatttcagaacaacaacagtctgggcttcaaagttcctccaactgtctgcccctttcattccctcaacaatgtcaccaaagctggagaaggaagttggctggaatccaagcgtcatactgagccggtaggtgccagatatgcaggtggccagatctgcttagaagcattttaatcttgacaggtccaggtatcacagcctctccccagacctttaaagataatcttgctgaagtttctgctgcagaagaaactcctctgccatgccttctccaaggtctccctccccaccccaccagtgagccaagactccctagtgctgtaatcaagtgaaaaggacttaggggctggacccggtggctcacacctgtaatcccagcactttgggaggccaaggcaggcagatcacctgaggtcaggagttcgagaccagcctggcccacatggcgaaactgcatctctactaaaaatacaaaaatgagccaggcattgtggyacatgcctgtaatcccagctactcaggaggctgaggcaggagaatcgcttgaacctgggaggcagaggttgcagtgaatcgagatcatgccactgcacacagcccagacaacagagcgagattccataaaaaaaaaaaaaaaaaaa

SEQ ID NO: 72093 - DNA, 743 bp, Homo sapiens
atccaggaggtggagtttgcagtgagctgagatcgcactgctgcacaccagcctgggtgacagagtaatgcttggtctcaaaaataagaagaataagaagtgttataggtctgggactatgtacttatccttaaccccagcagtattagctactaacatccaatgaggaagacctggctgggcacagtggctcatgcatataatcctagcattttgagagactgaagcgggaggattgcttgagaccaggagttcaagaccaacgtggccaacatagcaagaccccatctcaaaaaaaaaaaaaaaaaaaagagctaggaygtttccttaccttatcaatataaaggattttgaaagacatcaatggatggaccattataatgattaactgtctcttattctagatcatgctctggagaaatgttagcttggaaacccatcccaccagcctcaacatgagcacacatcagcttacaatcacagtgaacgtcacttccttggagaaatccttgatagtgagcatagatcctgacagtccccttttaatgacactctacctggggttccagtatcagcctaactgcactcacttccacctgaacatcacccttccaaaggataaggtgtggcaaaaaggtaaaacccaatcagctgtcagaaacttactttgatttctttttgcctaggatgtagtgcagtggcaccatcattgttgactgcagcctcaaactgtcaggctcagg

SEQ ID NO: 72094 - DNA, 743 bp, Homo sapiens
atccaggaggtggagtttgcagtgagctgagatcgcactgctgcacaccagcctgggtgacagagtaatgcttggtctcaaaaataagaagaataagaagtgttataggtctgggactatgtacttatccttaaccccagcagtattagctactaacatccaatgaggaagacctggctgggcacagtggctcatgcatataatcctagcattttgagagactgaagcgggaggattgcttgagaccaggagttcaagaccaacgtggccaacatagcaagaccccatctcaaaaaaaaaaaaaaaaaaaagagctaggacgtttccttaccttatcaatataaaggattttgaaagacatcaatggatggaccattataatgattaactgtctcttattctagatcatgctctggagaaatgttagcttggaaacccatcccaccagcctcaacatgagcacacatcagcttacaatcacagtgaacgtcacttccttggagaaatccytgatagtgagcatagatcctgacagtccccttttaatgacactctacctggggttccagtatcagcctaactgcactcacttccacctgaacatcacccttccaaaggataaggtgtggcaaaaaggtaaaacccaatcagctgtcagaaacttactttgatttctttttgcctaggatgtagtgcagtggcaccatcattgttgactgcagcctcaaactgtcaggctcagg

SEQ ID NO: 72095 - DNA, 743 bp, Homo sapiens
atccaggaggtggagtttgcagtgagctgagatcgcactgctgcacaccagcctgggtgacagagtaatgcttggtctcaaaaataagaagaataagaagtgttataggtctgggactatgtacttatccttaaccccagcagtattagctactaacatccaatgaggaagacctggctgggcacagtggctcatgcatataatcctagcattttgagagactgaagcgggaggattgcttgagaccaggagttcaagaccaacgtggccaacatagcaagaccccatctcaaaaaaaaaaaaaaaaaaaagagctaggacgtttccttaccttatcaatataaaggattttgaaagacatcaatggatggaccattataatgattaactgtctcttattctagatcatgctctggagaaatgttagcttggaaacccatcccaccagcctcaacatgagcacacatcagcttacaatcacagtgaacgtcacttccttggagaaatccttgatagtgagcatagatcctgacagtccccttttaatgacactctacctggggttccagtatcagcckaactgcactcacttccacctgaacatcacccttccaaaggataaggtgtggcaaaaaggtaaaacccaatcagctgtcagaaacttactttgatttctttttgcctaggatgtagtgcagtggcaccatcattgttgactgcagcctcaaactgtcaggctcagg

SEQ ID NO: 72096 - DNA, 743 bp, Homo sapiens
atccaggaggtggagtttgcagtgagctgagatcgcactgctgcacaccagcctgggtgacagagtaatgcttggtctcaaaaataagaagaataagaagtgttataggtctgggactatgtacttatccttaaccccagcagtattagctactaacatccaatgaggaagacctggctgggcacagtggctcatgcatataatcctagcattttgagagactgaagcgggaggattgcttgagaccaggagttcaagaccaacgtggccaacatagcaagaccccatctcaaaaaaaaaaaaaaaaaaaagagctaggacgtttccttaccttatcaatataaaggattttgaaagacatcaatggatggaccattataatgattaactgtctcttattctagatcatgctctggagaaatgttagcttggaaacccatcccaccagcctcaacatgagcacacatcagcttacaatcacagtgaacgtcacttccttggagaaatccttgatagtgagcatagatcctgacagtccccttttaatgacactctacctggggttccagtatcagcctaactgcactcamttccacctgaacatcacccttccaaaggataaggtgtggcaaaaaggtaaaacccaatcagctgtcagaaacttactttgatttctttttgcctaggatgtagtgcagtggcaccatcattgttgactgcagcctcaaactgtcaggctcagg

SEQ ID NO: 72097 - DNA, 743 bp, Homo sapiens
atccaggaggtggagtttgcagtgagctgagatcgcactgctgcacaccagcctgggtgacagagtaatgcttggtctcaaaaataagaagaataagaagtgttataggtctgggactatgtacttatccttaaccccagcagtattagctactaacatccaatgaggaagacctggctgggcacagtggctcatgcatataatcctagcattttgagagactgaagcgggaggattgcttgagaccaggagttcaagaccaacgtggccaacatagcaagaccccatctcaaaaaaaaaaaaaaaaaaaagagctaggacgtttccttaccttatcaatataaaggattttgaaagacatcaatggatggaccattataatgattaactgtctcttattctagatcatgctctggagaaatgttagcttggaaacccatcccaccagcctcaacatgagcacacatcagcttacaatcacagtgaacgtcacttccttggagaaatccttgatagtgagcatagatcctgacagtccccttttaatgacactctacctggggttccagtatcagcctaactgcactcacttccacctgaacatcacccttccaaaggataaggtgtggcaaaaaggtaaaacccaatcagctgtcagaaacttactttgatttctttttgcctaggatgtagtgcagtggcaccatcattgttgactgcagcctcaaacygtcaggctcagg

SEQ ID NO: 72098 - DNA, 1308 bp, Homo sapiens
caatattttaattttttgtagagacagggtctccctgtgttgcccaggctggtcttgagctcctaggctcaagtgatcctcctgtctcggcctcccaaagtactgggagtacatgcgtgagccaccatgcccagccaatagtacggattttgtgggacccttgtgagcattcaacgtgaagacactggaccgttctggagctacgtctggggtggggctgacagtggggctgacagtggggctgtgcctgtatctcgtcccttcttggctggsagcaactggaggaacagcacctgccacacctgctactgtctccccagactccgtggctcagctgtgagctgtgagggccccctggattcttggattttctccacattgtcactgctcaaatagctggccttgctgctggcagagaacagacaggggatgaggagctgatatttgaggaggtaaatttaagcagcaggtttacaatatgttttatgagcttggcaggtgtagctgaagtgggtgttatcagtaaacacagcaatggcattgaccacgctgggcaaatagcctcgaggagcttacaaagccttggaacgttcccacgaggtctccatttggagcctacatagtgcagtatactggatctgggggtcaaaagacctgccactcagccaggctggtggttcacacctataatcccagcactttgggaggccgaggcaggaggatcccttgagcccaggagtttgagaccagactgggcaacatagtgagatccagtctccacaaaaaagtaaattagctgggcttcgtagcacatgcctataatccccgctattggagaggctgaggtgggaggatcacttgagcctgggaggtcaacactgcagtgagctgtgattgtgccactgtactccagcctgggtgacagagggatatccattctcaaaagaaaaccaaaaagaccttcctcttgttagctatatgaccatggatacgttaattaatggaacccactgtttccttaccaactgtttcccaagcccctcaaggttttgttggcaagaagaaaatgtaacaatagaccaggcatggtggctcatgcctgtaatcccagcactttgggaagctaaggcaggcagaccacttggggtcaggagttcgagaccagcctggccaacatggtgaaattccatctctactaaagatagaggtggagggtgcagtgagcagagatcacgccactgcactccagcctgggcaaaaaagtgagactctgtctcaaaacatagaaaagaacaaaaaaaaaaaaaa

SEQ ID NO: 72099 - DNA, 501 bp, Homo sapiens
atacgtctgcaggagatttctagaggggaattgctgggtcattggtcatgggaatgtggaattgtggtcatgattgccaagtcaccttccacagggatgtcgcaatctttgttcctactagagatgcttggtgacagtgggaggtctygggttctgaagcccataacttacatagctaagatggggaaactgaggcccagagaggatcagaggctgacctagggtcaccaccaggacagtggctgggacagtcccctcatgcagaggagagggtttgttgccagagagagttcagggttgctcgggtggggctccccaggttgagccttggttggaaagtccaggtctgggctcaggtgtcatgggacatcctacagaaaatagaggcaggaggtagactcagcggggcagcttcgggtgggctcacctcctgcctctaaccccaactcagagagctgtcccggattgaagaggagaaagaagatgaggaggaggaagagg

SEQ ID NO: 72100 - DNA, 2116 bp, Homo sapiens
  misc_feature (1)...(2116): n = A,T,C or G
ttcagagcataggaaatcctaattattgtcatgcaggcactcggcaggcatgcaggtttgaccccagggctgggattctcagaaggtggttagagtctccatttgttcacttaagacaggggcatccggtgccatttgccccaggaggtgggcatgaagagcataggacaggraggcgtggagggggtggagtagcgtgggggcagtgcgtgctttctgggttatctggagatttagacagggacactgtgcctccaagatcctctggctcctccttttccttttatttatttatttatttatttatttttgtattttattttattttattttgagacaaggccttgctttgttgcccaggctggagtgcagtggcgcaatctcggctcactgcaacctccgcatcccgagttcaagtgattcgcctgcctcagcctcccaagtagctgggatcacaggcgtgcaccactacgcccaactaatttttgtattttcagtagagatggagtttcgccatgttgagcaggctggtctcgaactcttgacctcaggtgatccactagcttcagtctcccaaagtgttgggattaaaggtatgagccactgtgcccggccaggttctcctttttcaacagcaagttgcctaaacagtacaagtggaatgagctcctgcctcttattggccagtttagccctcgtgatggatcccttgcacctgtgcccctgggctcagcgttaggtctagtctggggttgcctcttgggcagctgcatctgcctgtgccccacgactgccaagcagacatggctggaccagttcgggggagcccctcaggggcagcaggtattccttactcacactttctggagtgttaagatgtttccaggcaactgagagcgccctggccagcccggtgtttcggtgtttccagtccaggctttgtttccaggccctccctgtctgagcaaaacctcatctcaccctgactcatggggtctctccnnnnnnnnnnnnnnnnnnnnnnnnnnnnnnnnnnnnnnnnnnnnnnnnnnnnnnnnnnnnnnnnnnnnnnnnnnnnnnnnnnnnnnnnnnnnnnnnnnnntcagtctctccatctgtacaatgggaataataacacctaccacacatgttgttgcggggattgaatgaaagcaaaggcaatcctgtgtgtaaagagtttttccctttgcctggcatgaagctgtccctcagcccattgctgaagttgaattagattaaattcccgtcctggcattcagggccctgcacattctggttgtctggggtggatggaagtttgtccctcccctcccttggaaggtggcagatggaagccactggaaccgcaggatccttgctgcttcctctcggtcacctggaagctggtggtgtcagcggggcgggcgggaggttgacactggtggcgatgactcagcactgagagctgtgggagtctagttaatcagcagcgtcaaaacttcctgttgctgtttgcaaacaagggccacccccagaggaggaggaccagagctaggggagaggctgcgcaccacagaacctcagcaaagcgaagctacagtttaaaggcagcagcagcagtggtgctaagagttcagcaggtggtcaggggctgtggctatggctttccaggagcacgtggcttcccttatggcccctgtccccatctccccacccaggaggaatttttttttcccccagtagtagctgattgacttactgcaaggagccccagtgaagtgccagggtgtgagagcaggaatcatggtggtggcaccagatgagactcatccgtctaggatgggccagagtgttggaccgcggggtactgaggcgttccaggactgacctcagaagatctctgagggcttaacagcaggcagggattgggagcactgagtcagtgctctcagccccacctggcctggcccagcagacagaaacactcccggcctgagcacctggcagaagaaccagatacgcccctctggtgacagccatcgctcagatatctttatatatgcctcatgcctcccaggagaaccagccagggcgagaattccagatccaagagaaa

SEQ ID NO: 72101 - DNA, 709 bp, Homo sapiens
ttgccagctccgggagcacaccatcctctggctcgagggtccttccctggcacagtctccttcacgtgaggattctggttgtgtcttggcagcaggccctgcaggacaaggggtgcaagagccagagtcaggggacgaaagaagagaagctttggaagagacaggcgccggcccccaggcgggcccgggaggcccgggaagctggtggcaccatgaatgtagagaatacaggtaaagcaggcctgcccgccaaccggcactccccagtgaagccagcgcaggagggaggctcttgtgcagttggtgatatccccatgccctgtcctccccggctggaggtggcctagacagactccagctgcctgatccgcagctgcatcccccagcctgcctctcccggattcagggacagtggtgtgtatagaaccttcatctcacccatgcctccyacagcatccaggccccacccagtgataagagtccttggccagcgtgggctggggttgaatttccctgctttttgttttttcccagtgcctgtctaaagcagggcgagggtggcagcctcacagacgccaccacctgcagagagagactcggccttctccctcctatccgtgggcccccagggtctggaggctcctaggacaggactttgattctcctggccagaggctgagacaaaggagccagtggctcagctcttccc

SEQ ID NO: 72102 - DNA, 619 bp, Homo sapiens
ctcctccctagccccccattcttctctctctcccccaaactctttgctccctacctgcaaagaccatggccattcttggcgccctggaagcaagctgtaacaagcatcccaggccccgtgcacaggtcacgggccctgattctgtgttcttgtccttcatccatctgtccatctctctcgttcctggtgacaggacagtgggaggcctttggaggaggaggactcaggcagagcttctgcccagccgggtgtttccctctctcttgcctgggaggttcctgcgcttcatccttgctaggtgccggctggctgagttcttgctccatgtgtggggctggcttygtgtcctggtctgtctgtccctcgcacatacacacggctcccctggctcccctctttctgcacagttgaccacttgccacaggggcaggctggggagccccactcttctgtactcttgagagggtttgagacttaaagaaataacgttcctacaagaatagagttttctagggtgagaatcccttgtctttcccagctgcgattccttgcagcctggccatggagagaggctggcccatcagacctagaacatgtgctttgagagccgtattcagtg

SEQ ID NO: 72103 - DNA, 448 bp, Homo sapiens
tgtaggggaacatagcaagcaggatggggtggagggaggattgagctgtgctgtgggagatgcgaatgctccagtcaatcccaaggaaactctgaagctggattattcttcagagatgcaaggaggtcaggaagtcattgatgtgsgctccctcctggagtgcgtgttgctttggtagggagctcgctttggctgtgggcagttcctgaggagggactcataggacagcctagcatctgaggaaatgagtgcctcctggcccagaatgggggatctcagcagcacactacaatatccactacagtttcttgggcttgctctgaagccatgcctctctaacttcagggtatattcatgtaagtgaggtgcagggatgggggaaagggagaaggtaaagctacaaaggtaagccagcttgtctagaccgggagctagctccttgtgaagg

SEQ ID NO: 72104 - DNA, 448 bp, Homo sapiens
tgtaggggaacatagcaagcaggatggggtggagggaggattgagctgtgctgtgggagatgcgaatgctccagtcaatcccaaggaaactctgaagctggattattcttcagagatgcaaggaggtcaggaagtcattgatgtgggctccctcctggagtgcgtgttgctttggtagggagctcgctttggctgtgggcagttcctgaggagggactcayaggacagcctagcatctgaggaaatgagtgcctcctggcccagaatgggggatctcagcagcacactacaatatccactacagtttcttgggcttgctctgaagccatgcctctctaacttcagggtatattcatgtaagtgaggtgcagggatgggggaaagggagaaggtaaagctacaaaggtaagccagcttgtctagaccgggagctagctccttgtgaagg

SEQ ID NO: 72105 - DNA, 1444 bp, Homo sapiens
cttgtcaaccagtctcaagaatttcagcagcagccccagcgccgggccttcccaagycagatcccacaccagaaggccggggccctgcaggacccgagcttggcggcatccctctccttcccaagtctaggcacctggaagggggcgaggaagggcagagccgcccccccgcacatcccttcacacccttcccagggccaagggggaacattacagcttctgcgtgaattcctgttttcctcccttcctgtgagtcaggcacgattgcttgcactgcgtccggccgccccaggctttatctgatgggaacgaggcctggcctagggcctgagaagctgcaatgggaaagacaaacacgggcggtgcggccctctgctctgtgacgagagcactgcccccttggtgcagggacgctgtgtccagcctccccatcggagacactctgaggggaccctggaggccgtccagctccagaagagcgcgcccagctccccacgggctgcgtccaagctggtcccctcaggcactcctggtggatgatccacaggctgtgccacggtcagccctggtccgcgctgcaagatgggaggtgggaactggcttagcccggctccggctctggttcccctccctggcttcatcctcagcgttaattctttgcgccgttctgagctaaaggtcttctccctgcccctcaagatcacacaaggtcacacaagtttcttggcccttacgaagtctggctgctgcagacgttaaaccccatcccatctataatataggaagctgacagttcttaaatccttcagctcactcaagagggaggccacgacccacctgcctgcatgctaagctttccatgggggctttactagaaaaacgcagcgatctcagaagatcaaagaagttggtgctacgttcacaaccacctcctcggggactgctgagacccagcggcttttgtacacagggcttctcctctgggttcagaagtccatggcccttccaatcacccagcgcctgcagcccacacaaaagccagtgagctcatcccaataggaaaaagataacttcatcgtttaaaaaagcacttaaacagcaaaagttcctgtggaaaccacatgtggaaaacccactgacaaacaggccaaatccctaaaccaaggttcaaatttcaggggcttcagatggggctgcgggcgagagagcagggtattagggctgaacgtccaccagcaaccaagaaggcggctgcacggcgctcaccaaagcgctcgcgcacaggaggcactcatgggcttcccgcatcctctacgtccccatcggggtcctgaaacagtcctgcctccaggcacctcggcaccgccaggccagcccatcacggccccaaaacatctgccttcccctggtgggagagtgggagagtcatggggctgaggttttg

SEQ ID NO: 72106 - DNA, 661 bp, Homo sapiens
cagacccaaccagagtggcacagagtcctccagaacagagcgtgcccccgggagagccaccggccctgctgcacctgctggggtgtccctgctgttcaccctccctgggctcctggaccacagcggggcagagtggaggaggaggtgtgcacagaggcaccattgttgtgggaagcagtttgttggtgaggagggagctgcggtcctgcatgacatccacacgtgtgacatccacacgygtgaaatcagcacacacgcgtgacatccacacgcgtgacacccacatgcgtgacaccagcacacacgtgacatccacgcacatgacatcagcacacacgtgtgacatccacacgcgtgacatcagcacacgtgtgccatccacacatgtgacatcagcacacacgcatgacatccacacttgtgacagcacacacgcacacacactcatcattcagacaggactagcacaagaaccgcacggaatgaccacagagggtcttggcgggaacggaaaacaagctgcctccaacctcgtgcagcctctttttcctccagatcatcgctaagtcctcccagggctggtgtgcccgagaagcaggagggttcccgagagcagctttttgctcccaggagtggcaggttcctgccgcctgacaggctg

SEQ ID NO: 72107 - DNA, 661 bp, Homo sapiens
cagacccaaccagagtggcacagagtcctccagaacagagcgtgcccccgggagagccaccggccctgctgcacctgctggggtgtccctgctgttcaccctccctgggctcctggaccacagcggggcagagtggaggaggaggtgtgcacagaggcaccattgttgtgggaagcagtttgttggtgaggagggagctgcggtcctgcatgacatccacacgtgtgacatccacacgcgtgamatcagcacacacgcgtgacatccacacgcgtgacacccacatgcgtgacaccagcacacacgtgacatccacgcacatgacatcagcacacacgtgtgacatccacacgcgtgacatcagcacacgtgtgccatccacacatgtgacatcagcacacacgcatgacatccacacttgtgacagcacacacgcacacacactcatcattcagacaggactagcacaagaaccgcacggaatgaccacagagggtcttggcgggaacggaaaacaagctgcctccaacctcgtgcagcctctttttcctccagatcatcgctaagtcctcccagggctggtgtgcccgagaagcaggagggttcccgagagcagctttttgctcccaggagtggcaggttcctgccgcctgacaggctg

SEQ ID NO: 72108 - DNA, 1135 bp, Homo sapiens
catattgcaccccatcctcaggcacactcattgcagatatcactaattaagcatagcacttgctactgctgaacccagatatggccttgaatccttccacatatggcactctaggcagccaccagcaagctatcagactaagcatgcaagaggattatttgacaaataatactgaggcaatcagttaactatttggaaaaacaaataaagttaaacctctactgcataccatatgccaaaataaattctacatagattaagaagttaaatgtaagaattgaaaccataaaaggactagaataaagctgttgcaaaagacattctcagagagaaacagagaaactgcaatgasaagaaatgggagacagagcaactgtcctcagcactgccttgggtttgtgacatttctgaggcgcagctcttcctgaagtcccgagacctgtctggttctttataacatctccatccttttatctgaactagtttaaatgggtttctgtgttttgaaacccaaagagccttgaataaggcatgtgcattttctttcttttttaaaatttttgttagttgatcaattcatcttaccataaataagtctgggctggacatggtggctcacacctgtaatcccagcactttgggaggccgaggcaggcggatcacctgaggtcaggagtttgagaccagcctggccaacatggagaaaccctgtctctactaaaaatacaaaaattagccaggcacggtggcacacaccagtaatccaagctacttgggaggccgaggcaggagaatttcttgaacccaggaggcggaggttgcagtgagccgagatggtgcctctgcactccagcctgagcaacagagcaagacactgtctcaaaaaaaaaaaaaaaaaaaaaaaaaaaagtctataccatctgagtctctttcaatgaaaaattaaagcttccaatttttctaagtgtaaggtgtaacttttttttttttcatttttaaaatacagatggggtctcactaggttgaccaggatgatcttgaactcctggcctcaagtgatcctactgcctctgccttccaaagtgctgagattacaggaatgaccaaccacacctgcctaggtgtaacattttac

SEQ ID NO: 72109 - DNA, 1135 bp, Homo sapiens
catattgcaccccatcctcaggcacactcattgcagatatcactaattaagcatagcacttgctactgctgaacccagatatggccttgaatccttccacatatggcactctaggcagccaccagcaagctatcagactaagcatgcaagaggattatttgacaaataatactgaggcaatcagttaactatttggaaaaacaaataaagttaaacctctactgcataccatatgccaaaataaattctacatagattaagaagttaaatgtaagaattgaaaccataaaaggactagaataaagctgttgcaaaagacattctcagagagaaacagagaaactgcaatgacaagaaatgggagacagagcaactgtcctcagcactgccttgggtttgtgacatttctgaggcgcagctcttcctgaagtcccgagacctgtctggttctttataacatctccatccttttatctgaactagtttaaatgggtttctgtgttttgaaacccaaagagccttgaataaggcatgtgcattttctttcttttttaaaatttttgttagttgatcaattcatcttaccataaataagtctgggctggacatggtggctcacacctgtaatcccagcactttgggaggccgaggcaggcggatcacctgaggtcaggagtttgagaccagcctggccaacatggagaaaccctgtctctactaaaaatacaaaaattagccaggcayggtggcacacaccagtaatccaagctacttgggaggccgaggcaggagaatttcttgaacccaggaggcggaggttgcagtgagccgagatggtgcctctgcactccagcctgagcaacagagcaagacactgtctcaaaaaaaaaaaaaaaaaaaaaaaaaaaagtctataccatctgagtctctttcaatgaaaaattaaagcttccaatttttctaagtgtaaggtgtaacttttttttttttcatttttaaaatacagatggggtctcactaggttgaccaggatgatcttgaactcctggcctcaagtgatcctactgcctctgccttccaaagtgctgagattacaggaatgaccaaccacacctgcctaggtgtaacattttac

SEQ ID NO: 72110 - DNA, 1135 bp, Homo sapiens
catattgcaccccatcctcaggcacactcattgcagatatcactaattaagcatagcacttgctactgctgaacccagatatggccttgaatccttccacatatggcactctaggcagccaccagcaagctatcagactaagcatgcaagaggattatttgacaaataatactgaggcaatcagttaactatttggaaaaacaaataaagttaaacctctactgcataccatatgccaaaataaattctacatagattaagaagttaaatgtaagaattgaaaccataaaaggactagaataaagctgttgcaaaagacattctcagagagaaacagagaaactgcaatgacaagaaatgggagacagagcaactgtcctcagcactgccttgggtttgtgacatttctgaggcgcagctcttcctgaagtcccgagacctgtctggttctttataacatctccatccttttatctgaactagtttaaatgggtttctgtgttttgaaacccaaagagccttgaataaggcatgtgcattttctttcttttttaaaatttttgttagttgatcaattcatcttaccataaataagtctgggctggacatggtggctcacacctgtaatcccagcactttgggaggccgaggcaggcggatcacctgaggtcaggagtttgagaccagcctggccaacatggagaaaccctgtctctactaaaaatacaaaaattagccaggcacggtggcacacaccagtaatccaagctacttgggaggccgaggcaggagaatttcttgaacccaggaggcggaggttgcagtgagccgaratggtgcctctgcactccagcctgagcaacagagcaagacactgtctcaaaaaaaaaaaaaaaaaaaaaaaaaaaagtctataccatctgagtctctttcaatgaaaaattaaagcttccaatttttctaagtgtaaggtgtaacttttttttttttcatttttaaaatacagatggggtctcactaggttgaccaggatgatcttgaactcctggcctcaagtgatcctactgcctctgccttccaaagtgctgagattacaggaatgaccaaccacacctgcctaggtgtaacattttac

SEQ ID NO: 72111 - DNA, 1135 bp, Homo sapiens
catattgcaccccatcctcaggcacactcattgcagatatcactaattaagcatagcacttgctactgctgaacccagatatggccttgaatccttccacatatggcactctaggcagccaccagcaagctatcagactaagcatgcaagaggattatttgacaaataatactgaggcaatcagttaactatttggaaaaacaaataaagttaaacctctactgcataccatatgccaaaataaattctacatagattaagaagttaaatgtaagaattgaaaccataaaaggactagaataaagctgttgcaaaagacattctcagagagaaacagagaaactgcaatgacaagaaatgggagacagagcaactgtcctcagcactgccttgggtttgtgacatttctgaggcgcagctcttcctgaagtcccgagacctgtctggttctttataacatctccatccttttatctgaactagtttaaatgggtttctgtgttttgaaacccaaagagccttgaataaggcatgtgcattttctttcttttttaaaatttttgttagttgatcaattcatcttaccataaataagtctgggctggacatggtggctcacacctgtaatcccagcactttgggaggccgaggcaggcggatcacctgaggtcaggagtttgagaccagcctggccaacatggagaaaccctgtctctactaaaaatacaaaaattagccaggcacggtggcacacaccagtaatccaagctacttgggaggccgaggcaggagaatttcttgaacccaggaggcggaggttgcagtgagccgagatggtgcctctgcactccagcctgagcaacagagcragacactgtctcaaaaaaaaaaaaaaaaaaaaaaaaaaaagtctataccatctgagtctctttcaatgaaaaattaaagcttccaatttttctaagtgtaaggtgtaacttttttttttttcatttttaaaatacagatggggtctcactaggttgaccaggatgatcttgaactcctggcctcaagtgatcctactgcctctgccttccaaagtgctgagattacaggaatgaccaaccacacctgcctaggtgtaacattttac

SEQ ID NO: 72112 - DNA, 813 bp, Homo sapiens
ctgaatggactcttttggcaaaggaaagttaatgctgggtttcttggaaagaaccctgattgtaagccgttagcttacccaatttcacttggagcatttgtgtaattttttggagctttcaaaagcctacctttggcatggggggagcagaggaagatataagaggcttccactattttgtctctgcttttacagtcctggtctagttcacagagggaggtgcccacctgcttcattggcataacacggaagctagcttttatcctttgggaagtttctgaaacaaatttttttccttaccatcaatattttgtgtagacagtaaaacctccgctgtggacatcctcttttccttttctttctttcttactcctattggccatttcccctcttctgtcttcctctcccatcccttcatgtttcagtagtgccaaggtgacctcacgctgtgcaaggccagccgtgaggctttgtataaatttcatttggtataaagaatattcaggggaatcatcctatagccttgtcatagaaaaccagttggaatcagaagccccgattagcaagtaccactgctgccaacaacttgtaggtggagccaccaacggggccaccttccaaaagcctgtcccagccaacccgactgctgaatttccactgattgtccaaaagtccctgctcccactgctwtttaaatagggactcatttagactccctgcccgctctgcggattatgcattgctaatggggtttctgcgaagcagttggtggcttattcttgggctgcttttacattcaacccatttattggc

SEQ ID NO: 72113 - DNA, 572 bp, Homo sapiens
ttcacaactcttctccactcccctgcagatactatcagatattctctgatgagagaattatcccacgtgctcttggttcctctttataattacggtgtttgtagtaaaaaaggccataccatcaaaaacatggacacaggcttaaaagaggcctcatcttggaactggagttattttgattagagtgggctttacacacccccacaaagtgaaaattacsagtcaatctattctgcccaatctgaacccaagcatgggtggcacacgacacaaatcggagaggaattcagaactgcctcttggattgaaagacctccttgacctggccctgacactaaagaaaaccccacatgtacccaaccatgagcctggctttcatctcaacaaaatgtcttagttccaacctgtttatcaaatcatctctccagttacctgcaaacatgtgggaaaaaagaaccaacaattttgaatggaaaggacttggaaatgatatagattagtgggtgttccaaggaggtctgtactagccaagtgggcagaattccatcagagatgtgaggaaggggactata

SEQ ID NO: 72114 - DNA, 677 bp, Homo sapiens
ttctctcaaatgaggaccccatactggttgtgggggagaaggtgggataagggcactcctccttcagtgctcccaaacagcccagaccggaagctcaaggagatgcccaattcctactgccctaggcagggtcctcctccccaacctgacacccccacctgggaagggacaagcgcacagcaccgggtgcaagcctgacacgtctgctggtgctgtgggtgctccagcaggtggcgctggagggcgcctcccgaatgggaagctgggttgcatctgcaacagctgagagctaccaggcagctgggctcctggagaaccagtggtgagatgttgccattgtgggccccatgcccccacccrtggcatcatcacccctatctgggctctaggaagcccagtgcacaaggctttggggccacattcctactgggtgacttccagctcatccttcccctgcctcggggtcctctcccctttatggaggagaagagtctcctgtaactatctaaagatgttgaccgggcacagtggctcacacctgtaatcccagcactttgggaggccgaggcaggtagatcacctgaggttgggagttcgagaccagcctggccaacatggtgaaaccccatctctactaaaaaatacaaaaattagctgggcgtggtggcacgtgcctg

SEQ ID NO: 72115 - DNA, 1925 bp, Homo sapiens
acccaagttccctttaatccggacagtgcataaacctgccaagttcaaatgttttgctgatatgtaacaatcttagattgtcggacgaagcgacttgcagactgctttcctgaacaacaataacaaccaaaaaaaggattatataactctaaatgggagaataggcatcaaaactatttccttgcctaacatcatcctgttattattttgacatctgtgtaggctgcggaatgattcttttaacgccgtgtgtgaggcgtatttatatcgctggctgtagcacagagcatatgcaaaggcttcagataactattctagtaggtcttgcctgtagccgtatcaggccccgtgtggagggcctgaaaaagcattcctgtgtttactatgtttaacgaggattggcttccaagaggcagggcgataagcaagccctgcttttccggtataccagttccttcagtcccagtggagacaggagcattgggaccacaaggtccccgatccccataccatgcaccatgccttggaggggacatggaaatgtgtcaaccaggagacgatatggagagtatgaccccatgcggccctcagtctttttggactaggaagaagcaagggtttgtccagagcctactctttgcatagccctaacccattctaacagccaggctgggctcttgtctctgacttccaactcccacgccagcccttggctctgccctacccaggagataattttaaagcttcctggcctaggcgggctttgtgttggcaccagaggctcgtggctcttctgttgtctctctgtgtttgaacccacatcattgcttccacctttaatttcctgtattttgagtgttktttttttttttttttttttttgagatggggtctcactgtgttgcccagactggactcaaactcctgggctcaagtgatcctcttgcctcagcctccagagtgtatttcaagaaataaaaagtagcacctaccatcgcccaaggcttgctgtacccaagcaccgtgctaggctgttttcagtcttcaccatcaccctctgtgatccgttccaatctgcccatttctcagagaagaaaacggaatcctagagagaggttaagaaacctgcctcatgtcctctggttgataagacgcagagtagagaatttcatcccagtctgctccttccaaaggcaggcatgcattctggggatggtttgatcaagatcattaccttcctcaccagcagcttctgtcagagaaaggaaggagaatgaaatctaaatggttttcccaggaacgctgtccctccagcttcaataatgtggcacatcggggcgcattgagagaacagaggaaaccggcaccttggagccaggcccgtctgggatttagtggagccacctgcacttaactgtcatgtgactctgggtgaaggtcatgatctctctgaatactggttacctcgcctgtcaaatgggggtaataatcagaattactgcctgtatttgtttgctagggctgttaagataaagaaccacagacaggatggcttaaatgacagaaatctattgtctcacggttctggagtcggaaagtctaagatcaaggtgtgggcagggtgggtccctttggaggcctctctcctgggcttgtcaatggctgccttctccctgtgtctcttcacatcacctttcctttgtccaaacctccccttttgtaagaacatcagtcatactggattggggcttaccctaacgacctcattctaacttgaggtcagaatgtggttatataataatatcggaatgtgatattatttgcagatagactcttctttttattttaagttcaagtttacatgtgcaggatgtgcaggtttgttacataggtaaacgtgtgccatggtggtttgctgtacctat

SEQ ID NO: 72116 - DNA, 500 bp, Homo sapiens
  misc_feature (1)...(500): n = A,T,C or G
cagtgcagttctaatagcagcagaggagcttctgatcactaccccaccttgatgtctctgtgtgtaaataatttgtttgaaattgaaaatttattttaaacttttattcttaagttaaataattttgaaattatttttcctaacatgactcatcctgaatgtatgagnttagggcaaagtccagcgacaanggtccaacttcatgcttgcttatctttttttccagttctctaattgttttcccatattttgagttctggkctctctttatacatttgatcatatatgcttatagagagtatcagttcaggtaaccacttttagttgtggttaacagaaacctgtcagacttaggagatgacaagtggccagaccatgtgtgttatatattcacaaatgttaaatccactgggggatctaattcaacctcaaaaatcaggttcagtactgtgcataatctcctgatttaggtacgttgctatccaaaataagtaatggat

SEQ ID NO: 72117 - DNA, 500 bp, Homo sapiens
  misc_feature (1)...(500): n = A,T,C or G
cagtgcagttctaatagcagcagaggagcttctgatcactaccccaccttgatgtctctgtgtgtaaataatttgtttgaaattgaaaatttattttaaacttttattcttaagttaaataattttgaaattatttttcctaacatgactcatcctgaatgtatgagnttagggcaaagtccagcgacaanggtccaacttcatgcttgcttatctttttttccagttctctaattgttttcccatattttgagttctggtctctctttatacatttgatcatatatgcttatagagagtatcagttcaggtaaccacttttagttgtggttaacagaaacctgtcagacttargagatgacaagtggccagaccatgtgtgttatatattcacaaatgttaaatccactgggggatctaattcaacctcaaaaatcaggttcagtactgtgcataatctcctgatttaggtacgttgctatccaaaataagtaatggat

SEQ ID NO: 72118 - DNA, 500 bp, Homo sapiens
  misc_feature (1)...(500): n = A,T,C or G
cagtgcagttctaatagcagcagaggagcttctgatcactaccccaccttgatgtctctgtgtgtaaataatttgtttgaaattgaaaatttattttaaacttttattcttaagttaaataattttgaaattatttttcctaacatgactcatcctgaatgtatgagnttagggcaaagtccagcgacaanggtccaacttcatgcttgcttatctttttttccagttctctaattgttttcccatattttgagttctggtctctctttatacatttgatcatatatgcttatagagagtatcagttcaggtaaccacttttagttgtggttaacagaaacctgtcagacttaggagatgacaagtggccagaccatgtgtgttatatattcacaaatgttaaatccactgggggatctaattcamcctcaaaaatcaggttcagtactgtgcataatctcctgatttaggtacgttgctatccaaaataagtaatggat

SEQ ID NO: 72119 - DNA, 1255 bp, Homo sapiens
cactgcacgcttgactaagaaatgcacacatcaccagcagctcaggattccacctaaggtctaatacgtttctcagaaaggacattcaaatgtcagatggaatgatttacactgcatgtcaataaaaagtactccgaggttcaccaagtcaataaagcttattagaacaatcttagggccgagtatcaatataccctgatgaggacctctaaagtcagacactatctcaaggcaaggggcattaaatagaccattctggagagagaaataaaatgaaaggcttccattattttgagagtgcatgttaaatgaatagcatataagaagctgcagaaatctgtgtttatattcccatcattaaaaccttctggacattcattgagtggccatagactaaaagtctctgatatgccaagtaytgcatcaggcatatcacactgacccattttttaagttcacaaatgcttcagtaatgcttcctatgtacactttcctaaatctttacaaatattaactatgtaaaccctcattatgactctatgcaatggataaaatattatctccattttgcagataagaaaactgaggcttagagaagctaagtgaaatgtccaaggtcacccaggtaataagcagcagagcctgcaggcaaagccaggtagtcaggctgtagagcaggtattcttttttattttctttaaaaaaaattttattttatcttaagtttcaggatacatgtgtaagacgtgcaggtttgttacacaggcaaacgtgtgctatggtggtttgctgcacctatcaacccatcaccttggtattaagccccacatgcattagctatttatcctagagtacatattcttaatcaccgtgcaacatgaccttgtatgcattgccttctagtcctctcaataaactctcaataaacccaaagtttggcctgctgaatatttctaaaattagcatttcaaagtcaggagacttcatagaaaagccagatttgtggactctcttaataaatcaaaacatctggccacctaggcctgctctcttgaaggcctttgacaagaggcctcagttggggggcacagaccctcctcactcatttgaccacttgtgtggttcctgaggcatttgagattgagaccctggcttagctgttttgcagacaaagatgctgaacccaagagatgttaaagaacttggccaaggccccaggcctagggaatagcagaggctagctttgcagttggca

SEQ ID NO: 72120 - DNA, 678 bp, Homo sapiens
atgaacaaatccatatttgctgcttgccacatagaagataaataaatactgtctacattgaattgaattgtgagtgacaaaattgaaaaaataactttagagtttatgttggaccatttaatgtcgaacctcttcaaagtcttttggagatgtccagatggacaaaatcagccaatatgatgttcatgaccaggcaagggaagccaaaatgaagggcagctttatttaaaatgaatagaacaagatatagttacattcatgccactgttcttttaaaatatatccatagaaatgattagtcctttaaaagtcttcatgccacagttctgcaaagaaatcaggagactttgtaaataccctgtccgcaaaaagttagaatgacaagcacccttaaataaacaggaataattaatcataggtgtggttgttttgatgagcatgcaagagtgacargttaataaataagcagttcatacagggaaagtggctaaggaggtgctgtggtttaatttacatctttggaaggtagcaaagatttaataatctccctgcctcatacatcaaacgaatacccctgaggcagaaaagcaaaacgtttttaactgttaatctgagaagcaataaaatcctgcctcaggtcacaaataaattgagtttctagtggtctcgatggatccc

SEQ ID NO: 72121 - DNA, 944 bp, Homo sapiens
tgtcagttttccaatctttagaacctgataatgaaatattttctttacttttttgagacagagtctgactctgtcacccaggctggagtgcattggcaagatcccagctcactgcaacctctgcttctcaggctcaagccatcctcccacttcagtctcccaagtagccgggactaaaggtgtgcaccaccatgcacagctaatcttggtattttttgtagagatggggtttcaccatatttcacaggctggtcttaaactcctgagctcaagtgatctgcccacctcggcctcccaatgtgctggggaactattttctrttatctgttctggactcacacattctggatgactggaattctttggacccatatgagcctctgcaaagacattggtatgtgctggtcatattcaaatgtgagattcataagaatagaataatttgtgtatggaattacctgtcctgggttacctaatccagagatccagcaatttttcttaattcctgaatttccaggcattgtaaagcatacttcactgtgcttggcacagattaattagtctatatattatatataggtacaaaaagtataagcttattctctcctattctaatagaaatgaggcatttttaacttgcttggaaatagcaattcataccattgcatagtggttatttgcaaatcttcctaataaactccaggaataaattttaggtaaatgtatgatgcctacaaatatagtaattgtcatagagaatgctagatttcaagtgacagaaacttttacttcaatacagcttaatcaaaataataaatttattagtccgtttagttaggacactaggatggttcacaggatcaaaagatgaaccacagacatcagggtctcaaagtttggaactgctctcaatgtctgctatgattcacttgtattcatctttc

SEQ ID NO: 72122 - DNA, 563 bp, Homo sapiens
cttttctgcaaagaagggaggggcttgggartagaagatggcagaaaaaaagtataggaaatgagttttttgagacatttaagataaagaaaaagcaaagagagatgatagagatgggggtgagggtatgattatggtgatcatgatagttattaatgtgacacgtacacgtccctgcagcatctggaagcattcactaatttaataatatacattatgagattctgctttacaaggctgcagtctactctaaatttgaactcttttagactcagctccttatgagttcctagaggtgaacagaactcaattccctacagaaaaggaattttgtgcctaaggatgtctactctaaaacgtttctttttttttctgtcttttagaattcaatggtgcaaatctataaagacagagctttaatggcaaaccctattctgtctggttctccttcctaagagttagctgagaatatatttgtctaacttttctttttaatattctctgaaagaagacattacatcacacatactgaactcttacttaacctggactctgttaagtag

SEQ ID NO: 72123 - DNA, 563 bp, Homo sapiens
cttttctgcaaagaagggaggggcttgggaatagaagatggcagaaaaaaagtataggaaatgagttttttgagacatttaagataaagaaaaagcaaagagagatgatagagatgggggtgagggtatgattatggtgatcatgatagttattaatgtgacacgtacacgtccctgcagcatctggaagcattcactaatttaataatatacattatgagattctgctttacaaggctgcagtctactctaaatttgaactcttttagactcagctccttatgagttcctagaggtgaacagaactcaattccctacagaaaaggaattttgtgcctaaggatgtctactctaaaacgtttctttttttttctgtcttttagaattcaatggtgcaaatctataaagacagagctttaatggcaaaccctattctgtctggttctccttcctaagagttagctgagaatatatttktctaacttttctttttaatattctctgaaagaagacattacatcacacatactgaactcttacttaacctggactctgttaagtag

SEQ ID NO: 72124 - DNA, 1467 bp, Homo sapiens
ggagtttagaaaagtgtgagctcaaaaaactagcacctaggtgttcccagcactgtgcctcctgagcactgacctgttactccacccccgccccatcgtaggtgggtttcttgggctctggttgctgtagcaggatagtcaagctttaccatctgacagatctaggttcagatccagactctgccacctgttagctacatgatcttaggcaaacatcttttggagactcactttttctcagtagaatgaggcagcaattttatctaactcttgggctgtttacaggttgcccgagacaatgcacgtgaagagtgcctggcacttggtaaagagatcacagtaatggttactatgacatcaccgtgacagtaggtccctggatcattcttttctgtccactcccacccctgcatccagccaggttctcctggstacagtgtagacctcaccttttcccattttgccaaggccagaactgtacttgtggaacttcactaagaaaagaaagatagataaaacccttctatgactcaaaacactcattttcctttaaaatttcaggaaataaacattcacctgccataagttggattgactggcttagcttacctgaggtacagtcctaaaacacttctatttcatcatacttgcctcaggatccttaataatactgattaattattgacagattgacttattatttattatatatttatggtgatccaggcttggggaatgcagtgctgggttagacagacaataagcagttaaatatttggaacaccagaaggttgtcaatgccctacagccaaagagcaatgggattatacctgtaattgagcgaagttgcctttattggctcttggcagtgagagagaatgtatgctggggagctgcattatccagatgtccttagtttttacctagtgttcctttttcattctaggatctcatccaggataccatagttcattagtcctcacgtctccttagggtcttcttggctgtgaccgtttctcggactttccttgtctttgatgaccttgacagttttaaggagtgccgatcagctattttgtagaatatctcttagtgagatgttaggaagaaataatgatagggcttggagttgtgttgggtgatttgggggaggattcaaggaagtggttctttgctccagattggatgcttccaggaagcaggggtcattctgtatctgggtatctgtattagtttccaactgctgccattatgaaacatcataaacctagtagcttagaacagcaaaaaattatctcacagttctggaggaagtccaaaatcagattcattgggttaaaatgaaggtgccagcaggtctggttcttctcccctggaggctccaggggagaacctgtcttcttgccattcccagctctggatgccacatgcattccttggcttatggcatcttccttaatcttcaaa

SEQ ID NO: 72125 - DNA, 1467 bp, Homo sapiens
ggagtttagaaaagtgtgagctcaaaaaactagcacctaggtgttcccagcactgtgcctcctgagcactgacctgttactccacccccgccccatcgtaggtgggtttcttgggctctggttgctgtagcaggatagtcaagctttaccatctgacagatctaggttcagatccagactctgccacctgttagctacatgatcttaggcaaacatcttttggagactcactttttctcagtagaatgaggcagcaattttatctaactcttgggctgtttacaggttgcccgagacaatgcacgtgaagagtgcctggcacttggtaaagagatcacagtaatggttactatgacatcaccgtgacagtaggtccctggatcattcttttctgtccactcccacccctgcatccagccaggttctcctggctacagtgtagacctcaccttttcccattttgccaaggccagaactgtacttgtggaacttcactaagaaaagaaagatagataaaacccttctatgactcaaaacactcattttcctttaaaatttcaggaaataaacattcacctgccataagttggattgactggcttagcttacctgaggtacagtcctaaaacacttctatttcatcatacttgcctcaggatccttaataatactgattaattattgacagattgacttattatttrttatatatttatggtgatccaggcttggggaatgcagtgctgggttagacagacaataagcagttaaatatttggaacaccagaaggttgtcaatgccctacagccaaagagcaatgggattatacctgtaattgagcgaagttgcctttattggctcttggcagtgagagagaatgtatgctggggagctgcattatccagatgtccttagtttttacctagtgttcctttttcattctaggatctcatccaggataccatagttcattagtcctcacgtctccttagggtcttcttggctgtgaccgtttctcggactttccttgtctttgatgaccttgacagttttaaggagtgccgatcagctattttgtagaatatctcttagtgagatgttaggaagaaataatgatagggcttggagttgtgttgggtgatttgggggaggattcaaggaagtggttctttgctccagattggatgcttccaggaagcaggggtcattctgtatctgggtatctgtattagtttccaactgctgccattatgaaacatcataaacctagtagcttagaacagcaaaaaattatctcacagttctggaggaagtccaaaatcagattcattgggttaaaatgaaggtgccagcaggtctggttcttctcccctggaggctccaggggagaacctgtcttcttgccattcccagctctggatgccacatgcattccttggcttatggcatcttccttaatcttcaaa

SEQ ID NO: 72126 - DNA, 741 bp, Homo sapiens
catatttcatattctcagtgcacaatcgacctgcttaagtactgccattaatattcacaatgtggctgttacaaagagaagcatgttgagagagccattcacatttcaagtttttcaaggaaaaaaactagacattgcttagtaaagaccctattggtaacacataacagggcctccttcaaataggctggaggaggggaaagaaaaatcactgtgatgacatactcctaactctgtgacaggctgatagccagacctcagctagtgctgaaatgagaaatctgtgagaaattaggaacccagggggttaggaatacctctccatctttgcttttttctaaatacagacagttcccagcttatgatggtttgacttaagatggttgcaaaggcaatacacatttggtagaaaccatatttcaggtacccatgcaaccattctgtttttcacttttagtatagttttcaataaattacatgagctattcaatattttattataaaataggctttgtgttaaatagatgattttgcccaaatgtaagctaatctaagtgttctgagcacactgaaggcacgctaagttatgatgttcagtaggttaggtgtattaaatgtatttktgacttagaatattttcaacatcatgcaactctatgatgggtttattgggacatcgaggaacatctgtagcccaatgcccttcacttctctccctctctttctacagaactgcttcca

SEQ ID NO: 72127 - DNA, 1681 bp, Homo sapiens
tcattgtgctgtgcccaaagaagttggcatccagaacggtgctggctgttggcatttccagctcaccttacccccattaggatggatgacgttaactaatgaagaattatccacccacattgtaagccgcaagcaattatgaattccattacccagcaacttggctgagattcctcctagctcacccacagacgagagaagttccacccagagaacagaggcacctgggaaacaggcagttaattgctgtggaagactgactaattaagtccttccccagtgtcagcctgtgctgtcacaggtatgccttgctccttccctatggtgtgaaggtggcagggtggaaagagggcagaatgtcacaacgaccatgttcaaacaactgctctgctgtgtgatcactgcagaagtggtctaatctcttcgagctccatttgcctcctctaccaaatgaggttgatactatcctaaggaaatatatgtgtgtggagaatgccctttgcatccgagcatccttgttgatggacacagaccatactagtgacagtgacctggatgaggctttatcatcatgctcataacaacagcttacatttttcaaacactggttcttccaagcatggggacttagcatrcgttattttatttaatctgcaaaataattgtcaaaggtattcttattaccctttacttgacagacagtgtaatcaaagcttaggattaaatggtttgccagtgattacatcccttttttctcaagctaaaatttgaatctagcccttctgactctggatccattgttcctaagccgcatccatactgcctccactaatctagaccactccattattgcctctgaggaacttcagtggcctttggatctgcattttacagtccagtcatgcaccacataatgacattttggtcaatgatggactgcatataggatggtggtcacataagattattatggtgctggaaaatttctatcacttagtgtcatcttaatgatcctgaccccgtgtaggcctacgctaatgtgtgtttgtgtgtctcagcttttaattaaaaagtttagaaagttaaataaataaataaataatttttaaaatagaaaaaagcttatagaataaagatatattctgtattataatatttttgtatgcctgtacatcatgttcatgttttaagctaattgttattacatgagtcaaaaatttaaaaaaaagaatgtttctaaagtaagttatagtaaactaagtttaatttattaataaagaaaaaactttctatacatttaatgtagcctaggtgtacagtgtttataaagtttacagtagtatacaataatgtcctaggcctttcacattcactcaccactcactccctgactcacccaaagcaacttcctctcctataagcaccattcatggtaagtgctctatggcatttataggtataccctatacaggtactccctacacagctgtaccaattttaatattttacagggtattttactgtaccttgtctatgtttcagtaaacaaatacttacaattgtgttacgactgcctacagtctgcagtacagtaacctacggtatagattgtatcctaggagtgaaacccaagacatgtaacctaggtgtgcagtaggctataccatctaggtctgtgtaa

SEQ ID NO: 72128 - DNA, 735 bp, Homo sapiens
tccactaaaacactagtaccttggcttgtacagtcacaatgagaattacatgcaaataagacaagacaatattacaacagttaatatttattaaatacttattaggtattcctcactgatcaattcactcccttaaaaatcatacagaatgtggtggctccattccaagatggccaaataggaacagctctggtctgcagctcccagcrtgatcaatgcagaagacaagtgatttctgcatttccaactgagttctgaagagaccagtggttctcccagcatggtgtttgagctctgagaacagactgcctcctccagtgggtccctgacccccatgtagcctaactgggagatacctcccagtagaggccggcagacacctcatacaggcaggtgcccctctgggacgaagcttccagaggaaggatcaggcagcaatatttgctattctgcaatatctgctgttctgcagcctccgctggtgacacccagacgaacaggatctggagtggacctccagcaaattccaacagacctgcagctgaggaacctgactgttagaaggaaaactaacaaacagaaaggaatagcatcaacatcaacaaaaaggacatccacaccaaaaccccatcagtaggtcaccaacatcaaagaccaaaggtagataaaaccacaaagatggggagaagccagagcagaaaagctgaaaattctaaaaaacagaggacctcttct

SEQ ID NO: 72129 - DNA, 735 bp, Homo sapiens
tccactaaaacactagtaccttggcttgtacagtcacaatgagaattacatgcaaataagacaagacaatattacaacagttaatatttattaaatacttattaggtattcctcactgatcaattcactcccttaaaaatcatacagaatgtggtggctccattccaagatggccaaataggaacagctctggtctgcagctcccagcatgatcaatgcagaagacaagtgatttctgcatttccaactgagttctgaagagaccagtggttctcccagcatggygtttgagctctgagaacagactgcctcctccagtgggtccctgacccccatgtagcctaactgggagatacctcccagtagaggccggcagacacctcatacaggcaggtgcccctctgggacgaagcttccagaggaaggatcaggcagcaatatttgctattctgcaatatctgctgttctgcagcctccgctggtgacacccagacgaacaggatctggagtggacctccagcaaattccaacagacctgcagctgaggaacctgactgttagaaggaaaactaacaaacagaaaggaatagcatcaacatcaacaaaaaggacatccacaccaaaaccccatcagtaggtcaccaacatcaaagaccaaaggtagataaaaccacaaagatggggagaagccagagcagaaaagctgaaaattctaaaaaacagaggacctcttct

SEQ ID NO: 72130 - DNA, 1054 bp, Homo sapiens
taactttgtctgggagcccactggcttttcttataaaatctgcagcaggaaaaaaagacagagctgttaatctcgttatccaaccagttagcacatgcaaacaaggggaattaaaagtctttgcattcaggggaggaaacagatatttgacacatgtatttattaaggagactggactggaaaatagcactgctgtattaatcagaaatggtctagaaaatacttaaataatacaacagaatgtgcacagacagcataagctgcttacaaatggaagcctgaggtctgagtatttttatttaaaggttaaattttcaattaattttgttttcagcttgctgccatcctttcaaagcatcactgttaattgctataaaacagtgtctccccctgtttgaattctggacatgaagacctgaagctgtcagccatctaatggacatcagggtattggagcagaaatcaaaattactgtgtaaaagctgaaccaaaatgtcagactctgagaagccagcggatcagttaaatgtcccttttttcatgtgttgagtgtcttaatctggatgtgccactgtaacaaaataccccaagactgggtaatttataataatttaaaaggactgatttctaacacaataataatagaaaaaaatggaataatagaaatgtcttatttatttctatgactaagttgaagatcaaggtgctggcaggttccatgtctggtgaggaccaggactctgcttccaagatggggccttaagcaccatgtcctcatgtgacagaggaaatagaagaagatgaacccactccttcagtctcctttataagggccctaatcctatctcrgagttctgctctcatgatttcactgcctcctaaaggcccccctctcaatgctaccacactggcagttgagtttccacatacaaaattttggggacacactcagaccatagtgctcggtttctcagaagtaagttccagcccatcatgggaaagtgcaaatagatacattctattattagagtttccagataacccaacttcagcg

SEQ ID NO: 72131 - DNA, 1436 bp, Homo sapiens
gttcccccatccaaaaccatatcaatacaaaacacaacaggtagtaccattacatgaacaaatgcccagttatcagttgccaataaaaaaaaatcttgaaatcaaagtcttaggagtcttttattttgaagatctttctagtctttgctttttttttttttttttttttaactttcgcagctaagtcatacagctgttcttggaaccctgtgttcaacttaacacaacatttcacacatgttgaataaatactatgctttccttatttccacagtatttttgaataaatagtatgctttcctgcagtgtttctgttaatgttttcatctgatattaagtaaatacagaaactttacagttttattcatggtcaaactagaattgtgagagcagttttacattcagaagatgatcctgatgctggttaataattcaatttcatattcggttaaagcagtatttcaaatgtagcacttattttgccttttttttatgcaacaaaaatgcagagaccttgtaccacagaaaattatgcactgtaccgtatttacttgtgtggcaatacaatgtgagtgcaatgcataagagttacagtgcgctaaggcccacaaggcagaatggtattgcagtacaaagaggtcgcatcacacacatacgcacatagtaggggcaagcttaagtataaatgctatacagaaagaaattaacttactcaactgcactttctagtatcaccccattcctcccattcaaactagatcctaatattttctgccataggggaacagatccccaataaaaacgcaaagaaaatataaaagaacattagttcttgccttttgagcttctaggacttatgttctgctgattaaaaaagtagtttgacaaattttcaacagacatttgaaatatattcccctttcaccttttagacagattctagagcctaagccatacatggcctgtggtttcactgcaaaacatttttaaatgttgctgtgaacagcaggatgtgttcaagaaaaaaaaatgtgtttaagaaaaagactgtgatgataaaagtgtcaccagtattaagcaaaaacaaccacatgtcaagcttccccagacyttcactcaagccaaccatacaaaattatcaatgcaaccaacaagaagggaactcacacaatctcccattgtcaaatgtttctctgtgtctgtatccgtatcctcctcttcctcccctgctgtcactcaggatgccctgtcctggctccaagtccaagttctttactacacactgattccatctcccctcatctccaccaggatgtgaccaccgtagttgccccacgtatggctactgagtgcttgaaatgcactcgtgtggttgaagtcaaaagccttttaatttaaataaccatgtgtgactaatggctaccatactggatgca

SEQ ID NO: 72132 - DNA, 734 bp, Homo sapiens
tataattaaaactttgaacccaaagtcccaccgcttcttggaaaactctttgtatcttagttcaaatgtctgagtgagaagtagactggttcagctcatcttttcgagccaggtcttccaggacatggggagcttgtccacctttgcttgcagtgctcacccaatcagctgaggtcaggaacatcaaggttagtgaaacatggtgaaccaagggttatgtcatggtgggttagaggatactctctacagccagaatgcctgcatccaaattctgactccccttgatatgttgttgtttttaactctcaggtgataatccatttatgactctattgagaaccatatattataataggataagcccccatgtatgacattattagaaaataaccatttaacttagcattttgtattttaagttatttcaggtgtgtggctgaaagtcatgagactttgagaagtggtacatcttggatggagagccagaggatgactaacaacatcgtgtagttgctcaaatatttatttaaaaggagggggatctggtcctgagaagtttagaaacttattattgcaggtttgggggctgcagtgaggtccttttggcttcagcttagtttaagcctcarggagaaacctggcaggacaagcctaggggcaaattatgttcagatgctcttcatgaggaaggacagccaacaagtcatagaatgcctacaggggacactgtccct

SEQ ID NO: 72133 - DNA, 2316 bp, Homo sapiens
cctagttctttgctttttccccctcggtggcttaagtctaaaagaggtgctaaaaagatggcagctccttctgaaccttgcttggaattggtggctcagtggccttgcctcagcttgggggcggtgtgtgtctacgcagagcagtcacacctacgtggacagtaacagggcgctcttggttagtaggtgcacatgtgggtcggggagcagagacaggaggctccgcaaagaaagcctcggagccagcccggctcagtgcccagccgcgaagccgtagcgccctctggtgtgccctgaacatattgcatggcgtcacaaggcggttgggaccgcttggagcatctctgagccgacgctgccatctcctggtgagagtcgctttcagcaaatctccagactattcagcgttctaggctaggagccacaaggactgggccactttcgcccgaattcccagggtccacttttggaaggcatgaaaacacacaggaaagactagttggctgccagcagagcccctgatgacttcaaaacatcctctgggcccgccttcccctacacaaatctttaccactgcacttttgtatgtttggcgagggggtggttgggtttttttgttgttgttttgcgattttgtttttttgagacagggtcttgctctgtcacgcaggcttgagtgcagtggcacaatcacagctcactgcagcctggacctccctggactcaagtgatcctgatgcctcaacctcttgaatagcgggraccacaggtgcacccaccacgcccagctaattttaaaaatatattttgcagaggtggtgggggtgagggtctcactgtgtcgcccaggctggtctaaaactcctggcctcaaaggattctcctgcatcagcctccaaaactgctgggattacaggcatgagccacggtacccaccctgctgcactttacaaaccaccctgtgctgcttgttttctttctggtctttgaggcccctacatgattctgaagcaaattatgtgaagatgttgttgtcagtggtaggaattaagcaactttaccagaaagtaatttttccatgttatttatgcatggaaacaaatatgtattctaaagcaatatatactgttatatttactgtttaacctcatagaaaccttgcaaaatagaagccacttaaagcctcacacccaaacctctattggaaccttttcacttggctttgtgtgtacttatagaacaaattaaacacataaatactaaaaacaaaaagcagctcataatcctctccttttggctttaaaaaaattatttaaaggcttaacatgtattaatttaaaggaaatggcatgaaatgaagaaaatgtctcctcatcctgtcttcccaagggaaacctgtgtaaatcattcctcaaacatcctcctaggttaaaatgaagacacctgccatgtatatgtagacagtattaatctcagtccacacaggtgtgaaaaaagctgcactctttgtatagtccgttctcccattgttacaaggaactatctgagacggggtaacttatgaaaaaaagaggtttcactgactcacagttccgcaggcttaactggaagcatggctgagaggcttcaggaaacttaaaatcatggcagaaggcgaaggggaagcaagcatcgtcttactggggcgtcttaccagggcagagcaggagagtgagtaagaagggggaggtgccacacacgtttaaaggattagatctcctgagaactcagtatcgtgagaacagcaagggggacgctgacgtgcaagatccaatcacctcccaccaggcccctcccccaattcgacattggagatttgggtgggaatacaaatccaaaccatatcagctttaatttttataactaacttattttcgggtggcccacattttgacaggtgggtggtaattatatgctccaactgttaccggagaggggtcctgatccagacccaagagagggttcttgagtctcccgcgggaaagaattagaggtgaatccataaagcgaaagcaagtttatcaggaaagtaaaggaataaagaacggctactccataggcagagcagcggcttgggccgctcagctgctcagacttagtgttacttcttgattacatgctaaacatggggtggattattcatgagttttttgggtaaggtgtaggcaattcccagaactgaggtttcctcccgtttttagtccatataaggtaactccctgacattgccatagcatttgtaaactgtgatggcattggtaggagtgtgttttagta

SEQ ID NO: 72134 - DNA, 1585 bp, Homo sapiens
gatccgttgtaggtaaagagaagactgtttggcctctccagtcctctgatttacgacctttcttttgttccttctcattagtaaatacgacaattactccctttccttgggaaagtaacaaccctmtgtcagctacggccaggtttccagttataacatattcccctaacacttcatttccatgtgcttcctctttctgagaacctcctccatccctcccaaatgtcttccaggtttagaccttttggcttcatttgcatgaattgattatgttttttaaattgtttctcttcataatccccatagcaactggcttctttagaaatttcctcacaggccaaagatatcataccttttaactgaaaataacattttaaatagaattagtacaggaaaataagctgtttttttacctcgtccttgacttttcatttctttaattttctttggtaaaattaaaaatttttaaaaaaacctgtcaactcagctggatggaatttgttgggtattgtggggcctgtaagttattaaaggatgtatataattttttaaatgctgtctcacccattttacagagcaggcggtttttcacttattcattcaataagtgtttttttagtatcttaagaactgtgtttaaagctgtgaaacatttaaggtgagtataaaacccagaattgtcctcctgcacctgaaatcgttttagttaacaatgaaacgtagtgtgtaattaaacactgaaactataaaacagccctatcatcattttcagttgatgtaagaagaaggtgaaatttgaattgggccctgaggagtaggatttgaaaagttgaaagaacaccaaaaacattattccaggcatcattccagaagagaaggcagtatgaaatttatatgaaggataaatatggaatgtttggagggacagtaagtagatcaacttggctagaggagagtacgttgagacatataagacagatgaaaagctagaagataaggctagaaggcaggtgtagaaagtcttacccatcaagtctcgacctgggtttggattttatctcaaaggtgataggattaactagataaaatggaagattaatctacaggaaattacgaagtgtaatctaaaagaatctttaaaatggcttgagggtcaggctttctccttgtcttctgctttgttcttccttcctccatttcccttctccactttagccagtgatcttaagaatcacacaattctattgtgcaatgtttaaacggtgtcactctactgcttaaaacagttcaatagccttgcagaaactttcagataaaatcctaccaatttaatacatggcctttaagatctggccgtaacttgcctccccagacttgtcacctatacaacaagcatcactttaacccttttctattggacttcactcctccatgcccctttccatttttttgtctcacaaacgtgtaactcatcttgaggtttcggcttagctgtcactttcccaaggatggatctcagagcgctttaaatccagattatgctgccttccacatcttccatctctatgacagtacttaggatcca

SEQ ID NO: 72135 - DNA, 1585 bp, Homo sapiens
gatccgttgtaggtaaagagaagactgtttggcctctccagtcctctgatttacgacctttcttttgttccttctcattagtaaatacgacaattactccctttccttgggaaagtaacaaccctctgtcagctayggccaggtttccagttataacatattcccctaacacttcatttccatgtgcttcctctttctgagaacctcctccatccctcccaaatgtcttccaggtttagaccttttggcttcatttgcatgaattgattatgttttttaaattgtttctcttcataatccccatagcaactggcttctttagaaatttcctcacaggccaaagatatcataccttttaactgaaaataacattttaaatagaattagtacaggaaaataagctgtttttttacctcgtccttgacttttcatttctttaattttctttggtaaaattaaaaatttttaaaaaaacctgtcaactcagctggatggaatttgttgggtattgtggggcctgtaagttattaaaggatgtatataattttttaaatgctgtctcacccattttacagagcaggcggtttttcacttattcattcaataagtgtttttttagtatcttaagaactgtgtttaaagctgtgaaacatttaaggtgagtataaaacccagaattgtcctcctgcacctgaaatcgttttagttaacaatgaaacgtagtgtgtaattaaacactgaaactataaaacagccctatcatcattttcagttgatgtaagaagaaggtgaaatttgaattgggccctgaggagtaggatttgaaaagttgaaagaacaccaaaaacattattccaggcatcattccagaagagaaggcagtatgaaatttatatgaaggataaatatggaatgtttggagggacagtaagtagatcaacttggctagaggagagtacgttgagacatataagacagatgaaaagctagaagataaggctagaaggcaggtgtagaaagtcttacccatcaagtctcgacctgggtttggattttatctcaaaggtgataggattaactagataaaatggaagattaatctacaggaaattacgaagtgtaatctaaaagaatctttaaaatggcttgagggtcaggctttctccttgtcttctgctttgttcttccttcctccatttcccttctccactttagccagtgatcttaagaatcacacaattctattgtgcaatgtttaaacggtgtcactctactgcttaaaacagttcaatagccttgcagaaactttcagataaaatcctaccaatttaatacatggcctttaagatctggccgtaacttgcctccccagacttgtcacctatacaacaagcatcactttaacccttttctattggacttcactcctccatgcccctttccatttttttgtctcacaaacgtgtaactcatcttgaggtttcggcttagctgtcactttcccaaggatggatctcagagcgctttaaatccagattatgctgccttccacatcttccatctctatgacagtacttaggatcca

SEQ ID NO: 72136 - DNA, 2591 bp, Homo sapiens
tggcagtattgtatggttcaacctcatccatccaatcttgccgttaatgtttaagatgacgtaagatgagataaatataggtgtccaaagttgctgattaagagccgctgtgtcttaaggctttttgacgttatgtaacccttcattgtctgtccagttacagcctctaattttttaatttaacttttaattttctcaaggtaaaaacacttaatgtgaattctacttttttaacatattttttaagtgtgctatacagctttgttaactattggcacaatgttgtatagcagatctatgtaacttattcctcttgcattactcagacactttgaataacctaacattaggtaacttaagagaacacaccttgttatggacttaatgtttgtgtttcccaaaaattcctatctcaaagccctaatcctcaagatagctgtatttggaaatgaggactctaaaaaagtaaagttaaatgagatcagaaagatgaggcccttgatccaacagaattagtgtccttataagaagaaacaccagacacctcacactctctccttgaacatgcaccaaggaagggctatgtgaggacacagcaagaaggtagttgtctgtaaaccaggaagagagccctcaccagaaaaccaaccatgctggcatgctgatctgggacttctaaactgcataactgtgagaaaataaatttgtgttgtttaggccacacgatttgtgatattttattgtgacagtctgagcagactgacatacgtagtcaacaacaagacctgccttaatcaataatgtacagaactatggactctttccactcttcctagacgtagactgcaccctttctatccatacttagcataggcacgaaaaatcatcccctcttctaagtcatattcccccgaatgcctctgtgaactattcagtcaatttgttccctgggctgtgttcccttacctggcaggggaataaattcagcattcactttgttgattattctggtggtcattttatttcctttacattgtgatatattgttgacagtaggctaaaaataagggacttgaagttaccattctgaagcttacaaaagaattgtgaagaccctctctctccccaccgtatgtgtacttagcatcatgttttcaaggttcattcatgttgtagcgtgtatcagtacttcactctttgtaaagctgaaaaatattcctttatatggatatgccacattttatttagccagtgatccttttatgtattcttaagttgtttctacctttggctattgtgaataatgttgctatgcccatctatgtatgagtgagtttttgtttgaacacctcttttctatctcttacatatacacccaggagtagaattgctaggtcacacagtaattctaagtttaacttactggggaactgycaaatgttttccacatctgctgaaccattttatatttctaccagtagtataagagggttccaatttctccacattctcaccaacatgtgttttttctgtgtgtttttttttattatagccatcttagggtgtatattatattatggtggtttttcattacggccattttagggggtatgttatcttattgaggttttgatttctagcaattgtgtatttagaagccctccggtgattctgatgcatctcaagcttgaaaatgtggtccgggggttagtaccgccaacatcactcaggaactagttatagacatgcagaatcttaggctccacccagaccaacccagtcagattctgccttttagcaagatctccaagtgatacccacatatgtcagtgttgagaagcaatggagtaagagacagccctaaattgccaacacttcctgattaccatttaaacagaccagagttagggtttttttttttatgcccctccttgtctgacatgttcttgcttaacagcctggaaaagtagaaagcacatagtacttggagtaaaacagatcctggttcatatcctgactttatcacttaccagttacacaaacttgggttacagagtgcttgatctagaaaattaattaatatctgcattctgtggatgttagaatgaattgactataggcatgtaaatctctcacacaacccagcatgaggaggttcactcagtcttgctctacccactttcccccttgtcccacaatctccctaaagagtgtcagggaagaaaatctcagcctaggcttcccatcttgccactgagcagctgagagactggctgaatgacttgccaaatgattcttttaaggcagctggctcagcaaggaaaagtccaggaatgatcccacagtctggactgagacagaactcaaggctgaaactgtgaactcttctagatcttttaatttgtagacttgtaagaatctctaagattgcttgctttggtataaagtaattctgaagtattttaaatagcttgggacggcctcagtagctcatgcctatgatcccaatacattgggaggccaagacaagaggattgtttgaggccaggagttcaagaccgtcctaggcaacaaagtgagaccccatggca

SEQ ID NO: 72137 - DNA, 2591 bp, Homo sapiens
tggcagtattgtatggttcaacctcatccatccaatcttgccgttaatgtttaagatgacgtaagatgagataaatataggtgtccaaagttgctgattaagagccgctgtgtcttaaggctttttgacgttatgtaacccttcattgtctgtccagttacagcctctaattttttaatttaacttttaattttctcaaggtaaaaacacttaatgtgaattctacttttttaacatattttttaagtgtgctatacagctttgttaactattggcacaatgttgtatagcagatctatgtaacttattcctcttgcattactcagacactttgaataacctaacattaggtaacttaagagaacacaccttgttatggacttaatgtttgtgtttcccaaaaattcctatctcaaagccctaatcctcaagatagctgtatttggaaatgaggactctaaaaaagtaaagttaaatgagatcagaaagatgaggcccttgatccaacagaattagtgtccttataagaagaaacaccagacacctcacactctctccttgaacatgcaccaaggaagggctatgtgaggacacagcaagaaggtagttgtctgtaaaccaggaagagagccctcaccagaaaaccaaccatgctggcatgctgatctgggacttctaaactgcataactgtgagaaaataaatttgtgttgtttaggccacacgatttgtgatattttattgtgacagtctgagcagactgacatacgtagtcaacaacaagacctgccttaatcaataatgtacagaactatggactctttccactcttcctagacgtagactgcaccctttctatccatacttagcataggcacgaaaaatcatcccctcttctaagtcatattcccccgaatgcctctgtgaactattcagtcaatttgttccctgggctgtgttcccttacctggcaggggaataaattcagcattcactttgttgattattctggtggtcattttatttcctttacattgtgatatattgttgacagtaggctaaaaataagggacttgaagttaccattctgaagcttacaaaagaattgtgaagaccctctctctccccaccgtatgtgtacttagcatcatgttttcaaggttcattcatgttgtagcgtgtatcagtacttcactctttgtaaagctgaaaaatattcctttatatggatatgccacattttatttagccagtgatccttttatgtattcttaagttgtttctacctttggctattgtgaataatgttgctatgcccatctatgtatgagtgagtttttgtttgaacacctcttttctatctcttacatatacacccaggagtagaattgctaggtcacacagtaattctaagtttaacttactggggaactgccaaatgttttccacatctgctgaaccattttatatttctaccagtagtataagagggttccaatttctccacattctcaccaacatgtgttttttctgtgtgtttttttttattatagccatcttagggtgtatattatattatggtggtttttcattacggccattttagggggtatgttatcttattgaggttttgatttctagcaattgtgtatttagaagccctccggtgattctgatgcatctcaagcttgaaaatgtggtccggggrttagtaccgccaacatcactcaggaactagttatagacatgcagaatcttaggctccacccagaccaacccagtcagattctgccttttagcaagatctccaagtgatacccacatatgtcagtgttgagaagcaatggagtaagagacagccctaaattgccaacacttcctgattaccatttaaacagaccagagttagggtttttttttttatgcccctccttgtctgacatgttcttgcttaacagcctggaaaagtagaaagcacatagtacttggagtaaaacagatcctggttcatatcctgactttatcacttaccagttacacaaacttgggttacagagtgcttgatctagaaaattaattaatatctgcattctgtggatgttagaatgaattgactataggcatgtaaatctctcacacaacccagcatgaggaggttcactcagtcttgctctacccactttcccccttgtcccacaatctccctaaagagtgtcagggaagaaaatctcagcctaggcttcccatcttgccactgagcagctgagagactggctgaatgacttgccaaatgattcttttaaggcagctggctcagcaaggaaaagtccaggaatgatcccacagtctggactgagacagaactcaaggctgaaactgtgaactcttctagatcttttaatttgtagacttgtaagaatctctaagattgcttgctttggtataaagtaattctgaagtattttaaatagcttgggacggcctcagtagctcatgcctatgatcccaatacattgggaggccaagacaagaggattgtttgaggccaggagttcaagaccgtcctaggcaacaaagtgagaccccatggca

SEQ ID NO: 72138 - DNA, 2591 bp, Homo sapiens
tggcagtattgtatggttcaacctcatccatccaatcttgccgttaatgtttaagatgacgtaagatgagataaatataggtgtccaaagttgctgattaagagccgctgtgtcttaaggctttttgacgttatgtaacccttcattgtctgtccagttacagcctctaattttttaatttaacttttaattttctcaaggtaaaaacacttaatgtgaattctacttttttaacatattttttaagtgtgctatacagctttgttaactattggcacaatgttgtatagcagatctatgtaacttattcctcttgcattactcagacactttgaataacctaacattaggtaacttaagagaacacaccttgttatggacttaatgtttgtgtttcccaaaaattcctatctcaaagccctaatcctcaagatagctgtatttggaaatgaggactctaaaaaagtaaagttaaatgagatcagaaagatgaggcccttgatccaacagaattagtgtccttataagaagaaacaccagacacctcacactctctccttgaacatgcaccaaggaagggctatgtgaggacacagcaagaaggtagttgtctgtaaaccaggaagagagccctcaccagaaaaccaaccatgctggcatgctgatctgggacttctaaactgcataactgtgagaaaataaatttgtgttgtttaggccacacgatttgtgatattttattgtgacagtctgagcagactgacatacgtagtcaacaacaagacctgccttaatcaataatgtacagaactatggactctttccactcttcctagacgtagactgcaccctttctatccatacttagcataggcacgaaaaatcatcccctcttctaagtcatattcccccgaatgcctctgtgaactattcagtcaatttgttccctgggctgtgttcccttacctggcaggggaataaattcagcattcactttgttgattattctggtggtcattttatttcctttacattgtgatatattgttgacagtaggctaaaaataagggacttgaagttaccattctgaagcttacaaaagaattgtgaagaccctctctctccccaccgtatgtgtacttagcatcatgttttcaaggttcattcatgttgtagcgtgtatcagtacttcactctttgtaaagctgaaaaatattcctttatatggatatgccacattttatttagccagtgatccttttatgtattcttaagttgtttctacctttggctattgtgaataatgttgctatgcccatctatgtatgagtgagtttttgtttgaacacctcttttctatctcttacatatacacccaggagtagaattgctaggtcacacagtaattctaagtttaacttactggggaactgccaaatgttttccacatctgctgaaccattttatatttctaccagtagtataagagggttccaatttctccacattctcaccaacatgtgttttttctgtgtgtttttttttattatagccatcttagggtgtatattatattatggtggtttttcattacggccattttagggggtatgttatcttattgaggttttgatttctagcaattgtgtatttagaagccctccggtgattctgatgcatctcaagcttgaaaatgtggtccgggggttagtaccgccaacatcactcaggaactagttatagacatgcagaatcttaggctccacccagaccaacccagtcagattctgccttttagcaagatctccaagtgatacccacatatgtcagtgttgagaagcaatggagtaagagacagccctaaattgccaacacttcctgattaccatttaaacagaccagagttagggtttttttttttatgcccctccttgtctgacatgttcttgcttaacagcctggaaaagtagaaagcacatagtacttggagtaaaacagatcctggttcatatcctgactttatcacttaccagttacacaaacttgggttacagagtgcttgatctagaaaattaattaatatctgcattctgtggatgttagaatgaattgactataggcatgtaaatctctcacacaacccagcatgaggaggttcactcagtcttgctctacccactttcccccttgtcccacaatctccctaaagagtgtcagggaagaaaatctcagcctaggcttcccatcttgccactgagcagctgagagactggctgaatgacttgccaaatgattcttttaaggcagctggctcagcaaggaaaagtccaggaatgatcccacagtctggactgagacagaactcaaggctgaaactgtgaactcttctagatcttttaatttgtagacttgtaagaatctctaagattgcttgctttggtataaagtaattctgaagtattttaaatagcttgggacggcctcagtagctcatgcctatgatcccaatacattgggaggccaagacaagaggattgtttgaggccaggagttcaagaccgtcctaggcaasaaagtgagaccccatggca

SEQ ID NO: 72139 - DNA, 631 bp, Homo sapiens
tccagagcccatccctttggcttccctctcacctctgcagtgacccagtgacccaaaagtcaggtcgatggatcttccctaaactgaacaagagcccaaggaaccccagtttgaaaatgtctgtcccagaaaagagggcatgctatgacacgcatgggcattttttatgaaaaggcaagactgttcagcccttgactcaagttgtgtactatttgttcttggaaacagagagagacaaactatccagtgtcatcacatcctgacctagctggattgaggctgctcaacaytggggacaatcttcgggttaacaatagcaggcagcttttgtttgatggcacaaacagagggaaggtattgcctactcagcttacagggaactgaacacagtgtgttaaattgacgaagtgttgaaaacaggttgcctgaaatgctgacattatttgtaatgtgagatttcctgtacaaatctaccaaccatgtgtgttggcagtcacattataaagacatataagaaccctaaatccccagtaacaaatggatgagttagaaggcagataagagtttctacatgaaagaatttgaaagaagagaaaggttttattgtgataagaccaacagggtatataca

SEQ ID NO: 72140 - DNA, 1285 bp, Homo sapiens
accccagaaatcctgaataagaaacactaaaggggagtgggcccagctatttgtgtttttggargaactcctgttttaatttgttttttcggaagtcctccagtttgagaaccaatgataaggacatttttccgggaatccagttgttttaggaaaggcccagtaggcatttatgtttataagcaactccaccctgcactccatatgccttctgtagctatctaacagagacagagttgacttgcagaaactgttttctctggccaggagacaggcttcgttttcgaaactcacccaggaaggcagtgttcttcttttcaaaaggcatttttctgttgactgtgcatgaagccacatagtaataaacagtttccatatccaagcagctaaggcttgtgccttgcaagttaagtggaacatcacgatctatatctcagttttccttatgtttccccagttggcacatcatggccaacaagagagtagggatcattaaggagtttattttcatctttattttatcatttaaaacacatttttttttccaatgagagtactgatgacataaaaggttatacattgaataaccacccaaattagcagtgtttcatatttacactgttcaacacagttctcttgtctctgttcatgatataacagtaaatccaagttgctttaagtagatattggaaatatgaacccaatatgttcttaacatctccatgtcgtaattctaatttaaaatcaaaatctcatcaaattacattttagattaaagcattgtacctatcgaaagaagagaatcgaaaatgcgaaagtccttcattttcagtgtggcctgagattgttgaaggatttgttctattgcatgctgataaatatttatcacggttaagtgaacaatcatttggagacagacaccattttatgatgcagcttctcagggcgtcctaattgtgactctgccttgccattctatgttttatcggaatacgcagacatatactttatgaggttgggtaatgaagagagagagaccccaataaacatattttctaagagtaatggttatctatagctcaggaacccttggttagcacagcctctattacacagtactaggcaagcagttcatagctcaattagatctaacttgcttcatttttaggcattatgttattctaaattaacactgtatttcatattctccaggtctgactattaaccagattttggaacctttagggcttattatttagtaatccctgaagctctcaagtaggcg

SEQ ID NO: 72141 - DNA, 1285 bp, Homo sapiens
accccagaaatcctgaataagaaacactaaaggggagtgggcccagctatttgtgtttttggaggaactcctgttttaatttgttttttcggaagtcctccagtttgagaaccaatgataaggacatttttccgggaatccagttgttttaggaaaggcccagtaggcatttatgtttataagcaactccaccctgcactccatatgccttctgtagctatctaacagagacagagttgacttgcagaaactgttttctctggccaggagacaggcttcgttttcgaaactcacccaggaaggcagtgttcttcttttcaaaaggcatttttctgttgactgtgcaygaagccacatagtaataaacagtttccatatccaagcagctaaggcttgtgccttgcaagttaagtggaacatcacgatctatatctcagttttccttatgtttccccagttggcacatcatggccaacaagagagtagggatcattaaggagtttattttcatctttattttatcatttaaaacacatttttttttccaatgagagtactgatgacataaaaggttatacattgaataaccacccaaattagcagtgtttcatatttacactgttcaacacagttctcttgtctctgttcatgatataacagtaaatccaagttgctttaagtagatattggaaatatgaacccaatatgttcttaacatctccatgtcgtaattctaatttaaaatcaaaatctcatcaaattacattttagattaaagcattgtacctatcgaaagaagagaatcgaaaatgcgaaagtccttcattttcagtgtggcctgagattgttgaaggatttgttctattgcatgctgataaatatttatcacggttaagtgaacaatcatttggagacagacaccattttatgatgcagcttctcagggcgtcctaattgtgactctgccttgccattctatgttttatcggaatacgcagacatatactttatgaggttgggtaatgaagagagagagaccccaataaacatattttctaagagtaatggttatctatagctcaggaacccttggttagcacagcctctattacacagtactaggcaagcagttcatagctcaattagatctaacttgcttcatttttaggcattatgttattctaaattaacactgtatttcatattctccaggtctgactattaaccagattttggaacctttagggcttattatttagtaatccctgaagctctcaagtaggcg

SEQ ID NO: 72142 - DNA, 703 bp, Homo sapiens
gacagctctggaacttgtaatatttgcagcatgtcttgccctcttaatgtctaagaagtcaaaaaaggacacgtatgcctagaaaacrtgaataattatcatctatcaaatttttaccatgtgccaagcatagtcatatttggctaacgaaaacaacaaaatcaaccgtgacaaggttttattagtaatgaaactgaggcttctggaggatctgtaactgttgcaaatttccagtggctagttcagggacagtgccggggcttgaacccctgtctctgtgtctcccagctcataaggtgtgctaccaagtcacccatgagtagcaattaggcgacttctaacatgtccagctttaaacctgtgacctcaaggcaaatgacttccacatctcattagcactccccagagccttccagccccctgtaggagagggaggttaatcagccacgcgctgaatctgcttataaggctgtttcatgtatgatttttatatcttggctcctaataatggccccgttgtaaatgattgtctcactatgatatacgggttccttaccttctaggaactgatttaaaaggaagccctagacttcttgtgcctgtagagtttattcatatcactctttgcttgctcagcagttgaaatgggatggaggaaagccccctaactccaaaaaaaaaaaaaaactttcttcccagcctg

SEQ ID NO: 72143 - DNA, 1472 bp, Homo sapiens
tggacctcaaatgatccaaccgcctcggacttccgaagtgctgggattacaggcgtgagccaccgtgactgacctgtttttaatttttttagagacagagtttcacactgtttaccagattggagtgcagtggtgcaatcctagcttactgcagcctgtaggtcccgggctcaagcgatcttcccacctctgccacttgaataggtgggactacaggtgggtaccaccatacccagctgttgaaaaaaaaatggtggggtattactctgttgcccaggctggtgttgaactcctggcctcaagcgatcctcctgcctcggcctcccaaagtgctgggattacaggcttgagctacttccccaggctcttcccccgtttgttaatacataccatgaccttggcctttcccacctcttaggttttgcttactttcccttctgtcctttacttatgactctgcccccttttgacctctgctaaaattatttgttactgttgttatgttattatttcatgtgttaagtctacagtgtataacttgggtttacttatctcatttaacccttaggaaaaccttacacttaaatactcaaagccttgattttgcaggtctgattgatgggcatacagaggaattaaatgaccttgtcttccacatatggtataaggcacagtagtggaagcaggatccaaatctgtgtctgtgtttggatcaacagccctggccaccatcttgattcatttctcttatctgtaattctatggagggaggttccattgtatatttttttctttcaattacagtattatttgtatattggaagcctattgtactttatctgtgtaactgtcgtagcagctagaggctagtaggactggctgaaatgtcagaggaaggagggaagaaaagggagaaaagcaggacaaatgaacgcagattaaggaaaataaaaaagagtgtttggctaacttgcataaaaaggatctcatttttctttgtaacacattactacatacagtgaccatagtgtttctctaatttcttcaggacktactttgaagatgaagaagtatgtgtatccgctttttgtctttcagaataacatactgctgtctgtaaaaatacagataatttctctcttaaattccataagctggagacactgcccctgtttcaaatgaatacagattcattttgtcacctgtgtgaaattggtgtccgtgtgccttgcttcctaggctgtccaccatgacatcagcctgcccatgcaatgcttgagatttgccctgtgactcaacccaaatctaaagcccgagtcgtatgaatccaggacacctgcctgcaaatgcatttttcatgtataggttattcactctggtctttgagattatgtaattagcatatgttgtcatagtgatgtatttattataatggaggtgttctcaggaaaccagatttaatacttttaaat

SEQ ID NO: 72144 - DNA, 987 bp, Homo sapiens
gtatcttgataatttagaaagattaattaaacattgatcatctatgtgaccacatttaaaatgagcaccaccacatccaaatgtctgagtttacattttgtgtcggtacttgctttggcagaactctgtgcctttccccaagtcttctgtgaccttctcacctggcctgcatcctggtccttatcaaccgtattttacagttaaggaaactcggctcaaactagcttcggggactcgctgtggccataggtgccctaggctgcagtctgagagtgaaactgaggtctcactcccttcatastctgctctccgtctctgcctcatctggcttctcagggtggtggggcgtgggcactaatttgatttgatcacttagagacaacagcttacaaaatgctaccgagcagtgcctgtcctttctgagaacttgatataataacgttggcttgatctcctcagcctgtgtcttgagggaacaagtaaattaaacaagtaattagatccataatgtttttagaagttagaagatttaaatatatgaatctcatctgagtgtgcagccttttgtctgctgtgtttcctgccaaaagatctcttgacaggaaataaacattaaaataatctttaatcccttgtttggtctattaccattaacaattgatgcactttaattttgtggggttttaactacaaaatggaacggctaagtagtgataattgggtttggaattatacggtcatttatatcaacagagatgcaaggggctgggagggagggtgattaattatttactatttcctggctgtggttcctattatagaattttctgatatgttcttctgtgaacaattatcaccaaatgaaagtaaacaaatctgtgatttgaagccttatttagaagttagtctatatttaggtgatgtgggcttgattttcacagaccctgtgggctgtctgtgtgtgttccttttctcagtaccccagct

SEQ ID NO: 72145 - DNA, 620 bp, Homo sapiens
tttatagctctctctccccctaaattcacacatgcatctctggggctggagatcagctcaagagatggacaccccattgtttcctgaaacactctcctctctaaccatgaagtcttattcctggactagcctatgtatctgcctctcctctgcccatcacccatgctcatatcattcacattagacctttgtattctgggtgaactggggagatgtggcccttgggttcactttgattacttccttgtaaaaataaacgcttaatagccctgcccactaattttttggatatgatattttaggcccaagccgggagtcatccttccatcactctatatttggaagagggaaggatttgtggcatcaaatatttaaaaataaaagtaaaaatattaaaattaattgagtaacttaattaaaataatagtttaaagtggcagcagggcaaaggagcatttgtagcttcagaaatgtagtgatcattctacagtcttttgaaaagataaacctgacaggaatttctagcsaaaatgaaaattggtgacggttgagcagctgcaaagcaaaagtgaaaaagtccttgagttgtcctagcacagaacgtgctcaccagcgccgtt

SEQ ID NO: 72146 - DNA, 1339 bp, Homo sapiens
gcatccaaaaaaggaaatgtgcgacatagtacttacatagattacaggcagagaaacacttgaaaatcattcacttaagacaaagtcaatagaagacttctcagtctcaaatttttttttattttattattatacwgtaagttttagagtacatgtgcacaatgtgcaggttagttacataggtatacgtgattttgactgaggaaactcgcttcagtttgcttaaaactgaatgctgagccttctagccctgaggcaaagaggtatccatggcagcttacctacctttcatgtttccagcaccatgaaccacagcaccccttcaagtgaaagaagcaaacttctttgggggcctaaaatcatgggagaaattcagattgctcatcgtgcaaccaaatgaacatcattcttgagtgattctaacaattgaaagaggacaaaaatgcttcttacgtggctctctcggaagaatttctggtaatagtcaaagatgaggactttcaaactttttggcaggttctcacagtatataatagttttttttttttgtaaccatgtacccccaatacacacacacacacacacacacacacacacacacacacacacacacgctctctcaaaacaaagtttacaaataatacttagtctatgtggtgctttgtagtttctcttctactgtcgcttgttacttaaaatactggtcatgacctataaattgattttatgatctaaaaatgaattgtgaaacctggtttaaaaaatgctgatgcaagatgttaggtaagaacatatttctgcaaaaatacttaagtggagggacaggaatgagtggggctaggtgtccagtgttctggaaagaattaaattttttattagtatctatttctcatatttctccccagcacagtcagttctgcgtggcgcagccatcctaccaaggggagtctgtgggaaccaggacacttgattgctttttagctcagtcttcgagggagtgctggagcaactctgtgcatcggaatcacccgggatcccagcaggtctgggagggactgagattctgctcccaggtgatgctgatactgctgctccccaaagtgcgttaggccatacactgaacagcaaaggaagagaaaaatgcaaagttggaaccttgtgtttcctggcctccaccgacagccccatccagtaatgcctcctttctccttcaagggcatcttattgtctcattactcacatttagagactgattatgtcatttagtaagccttcgattgaatatttaaaagccacttggatgaagttaaaagtcagcaaagaatgtatttgaaaagca

SEQ ID NO: 72147 - DNA, 1339 bp, Homo sapiens
gcatccaaaaaaggaaatgtgcgacatagtacttacatagattacaggcagagaaacacttgaaaatcattcacttaagacaaagtcaatagaagacttctcagtctcaaatttttttttattttattattatacagtaagttttagagtacatgtgcacaatgtgcaggttagttacataggtatacgtgattttgactgaggaaactcgcttcagtttgcttaaaactgaatgctgagccttctagccctgaggcaaagaggtatccatggcagcttacctacctttcatgtttccagcaccatgaaccacagcaccccttcaagtgaaagaagcaaacttctttgggggcctaaaatcatgggagaaattcagattgctcatcgtgcaaccaaatgaacatcattcttgagtgattctaacaattgaaagaggacaaaaatgcttcttacgtggctctctcggaagaatttctggtaatagtcaaagatgaggactttcaaactttttggcaggttctcacagtatataatagttttttttttttgtaaccatgtacccccaatacacacacacacacacacacacacacacacacacacacacacacacgctctctcaaaacaaagtttacaaataatacttagtctatgtggtgctttgtagtttctcttctactgtcgcttgttacttaaaatactggtcatgacctataaattgattttatgatctaaaaatgaattgtgaaacctggtttaaaaaatgctgatgcaagatgttaggtaagaacatatttctgcaaaaatacttaagtggagggacaggaatgagtggggctaggtgtccagtgttctggaaagaattaaattttttattagtatctatttctcatatttctccccagcacagtcagttctgcgtggcgcagccatcctaccaaggggagtctgwgggaaccaggacacttgattgctttttagctcagtcttcgagggagtgctggagcaactctgtgcatcggaatcacccgggatcccagcaggtctgggagggactgagattctgctcccaggtgatgctgatactgctgctccccaaagtgcgttaggccatacactgaacagcaaaggaagagaaaaatgcaaagttggaaccttgtgtttcctggcctccaccgacagccccatccagtaatgcctcctttctccttcaagggcatcttattgtctcattactcacatttagagactgattatgtcatttagtaagccttcgattgaatatttaaaagccacttggatgaagttaaaagtcagcaaagaatgtatttgaaaagca

SEQ ID NO: 72148 - DNA, 1339 bp, Homo sapiens
gcatccaaaaaaggaaatgtgcgacatagtacttacatagattacaggcagagaaacacttgaaaatcattcacttaagacaaagtcaatagaagacttctcagtctcaaatttttttttattttattattatacagtaagttttagagtacatgtgcacaatgtgcaggttagttacataggtatacgtgattttgactgaggaaactcgcttcagtttgcttaaaactgaatgctgagccttctagccctgaggcaaagaggtatccatggcagcttacctacctttcatgtttccagcaccatgaaccacagcaccccttcaagtgaaagaagcaaacttctttgggggcctaaaatcatgggagaaattcagattgctcatcgtgcaaccaaatgaacatcattcttgagtgattctaacaattgaaagaggacaaaaatgcttcttacgtggctctctcggaagaatttctggtaatagtcaaagatgaggactttcaaactttttggcaggttctcacagtatataatagttttttttttttgtaaccatgtacccccaatacacacacacacacacacacacacacacacacacacacacacacacgctctctcaaaacaaagtttacaaataatacttagtctatgtggtgctttgtagtttctcttctactgtcgcttgttacttaaaatactggtcatgacctataaattgattttatgatctaaaaatgaattgtgaaacctggtttaaaaaatgctgatgcaagatgttaggtaagaacatatttctgcaaaaatacttaagtggagggacaggaatgagtggggctaggtgtccagtgttctggaaagaattaaattttttattagtatctatttctcatatttctccccagcacagtcagttctgcgtggcgcagccatcctaccaaggggagtctgtgggaaccaggacacttgattgctttttagctcagtcttcgagggagtgctggagcaactctgtgcatcggaatcacccgggatcccagcaggtctgggagggactgagattctgctcycaggtgatgctgatactgctgctccccaaagtgcgttaggccatacactgaacagcaaaggaagagaaaaatgcaaagttggaaccttgtgtttcctggcctccaccgacagccccatccagtaatgcctcctttctccttcaagggcatcttattgtctcattactcacatttagagactgattatgtcatttagtaagccttcgattgaatatttaaaagccacttggatgaagttaaaagtcagcaaagaatgtatttgaaaagca

SEQ ID NO: 72149 - DNA, 590 bp, Homo sapiens
tcagcttctactgcaatggttctcaaacacctggtggcagggggggtgtttattaaatatgcacattcttgggccccacgccagatctactactaagaacctccatgggtgtgaactataatttgtaagcaaaatgtataagcaagctcccaggrtgaattttgatttggataagagtttggggacttccttcttagcacacaaaatccagtctttattccatttaggtgtgttcaaatggtgtcatctcagtgagccctcctctgcccctcttatttaaaattccatacttccagccctgtctgacccggcactccctatagacacatgctttatttttatccagagaacttgtctgtcacttcccactattatacatgagggcagggatcgttggtcactcctactatattcccatttcctagaacagtgcctggtacacattagacatccaatacatgtttgaattaatgccaagtttgccccatagagcatttatgatgttcaaggccttaagcagctgggaaaggagagatgctgggccacataacttgagataatattgacattcttttttgctatttttcttt

SEQ ID NO: 72150 - DNA, 590 bp, Homo sapiens
tcagcttctactgcaatggttctcaaacacctggtggcagggggggtgtttattaaatatgcacattcttgggccccacgccagatctactactaagaacctccatgggtgtgaactataatttgtaagcaaaatgtataagcaagctcccaggatgaattttgatttggataagagtttggggacttccttcttagcacacaaaatccagtctttattccatttaggtgtgttcaaatggtgtcatctcagtgagccctcctctgyccctcttatttaaaattccatacttccagccctgtctgacccggcactccctatagacacatgctttatttttatccagagaacttgtctgtcacttcccactattatacatgagggcagggatcgttggtcactcctactatattcccatttcctagaacagtgcctggtacacattagacatccaatacatgtttgaattaatgccaagtttgccccatagagcatttatgatgttcaaggccttaagcagctgggaaaggagagatgctgggccacataacttgagataatattgacattcttttttgctatttttcttt

SEQ ID NO: 72151 - DNA, 702 bp, Homo sapiens
tcattggtacctgtcttcttaaaagaagaaaggcaggataatcaatgagaggttttctcactcatggttatgaccttgcatttggatggaaagtcatctacaaatatgttttcaccttctcagggcaggctgaacaaagcctgtctgaaggttgtcasataactatgttctccaaagtatggggagtttattaaaaactcagatgcctaaaccatactccgaacctactgaataaggatctctttctgtggggcccagggaatctgcattttaacagattcctaggtacaattcagtttgggaatcctacaaaggctttaaaagggcaaagatttcttaaagtgtgatcagtgagaatccctgagactttttcaggggcttcatgaggtcaagactattttcataaaaatactgaggtgttttgtgcgttcatccctctcatatctcatgtatatatcatggagcttccagaggcttcctggtgtacatcattgaaccagactcaaagtagcagataagagaatccagcggattcccttaagtcaaacgtgaaagccctgcaatagccactctttctactatattttcttttgtttaggaaaatacagtttttaatttaaaaatatttttatgttaaaaagctatgagtttatttttttagtaatttggtaatctttttaggttttgtagaaatataaagga

SEQ ID NO: 72152 - DNA, 702 bp, Homo sapiens
tcattggtacctgtcttcttaaaagaagaaaggcaggataatcaatgagaggttttctcactcatggttatgaccttgcatttggatggaaagtcatctacaaatatgttttcaccttctcagggcaggctgaacaaagcctgtctgaaggttgtcagataactatgttctccaaagtatggggagtttattaaaaactcagatgcctaaaccatactccgaacctactgaataaggatctctttctgtggggcccagggaatctgcattttaacagattcctaggtacaattcagtttgggaatcctacaaaggctttaaaagggcaaagatttcttaaagtgtgatcagtgagaatccctgagactttttcaggggcttcatgaggtcaagactattttcataaaaatactgaggtgttttgtgcgttcatccctctcatatctcatgtatatatcatggagcttccagaggcttcctggtgtacatcattgaaccagactsaaagtagcagataagagaatccagcggattcccttaagtcaaacgtgaaagccctgcaatagccactctttctactatattttcttttgtttaggaaaatacagtttttaatttaaaaatatttttatgttaaaaagctatgagtttatttttttagtaatttggtaatctttttaggttttgtagaaatataaagga

SEQ ID NO: 72153 - DNA, 1311 bp, Homo sapiens
ggccagaataagaaatctaattgtattacaagggtgatggcaaggtcttcactcgggttctccacgttcccggggtcccccaaggtaaccccaggaaacagttgtggaggagtggtgaagggaggcatctcacttcacagggggtgcagaagctggggcgtctacccatcccctggggtcagtcatgggggaatgccgggaagtgaagcggggagttaacatggccttatttctggcccaggtgccaaaataaaatccctcaagcagagagcctcaggtgtttgcagtaagcagaccttgttgagggtgagtggagaggggctatgagcagcagcttctgctacagcaagttatgcggggcttgaaatggggaggtatgtgctctgacgttcacttttaccacctctctgtgttactgagaatcgactgtgggaggggaggctaccaccaccctgtgcccttgcttggaggggatcccaagcccctctgaattcctcaacaggcaactgagtctggggaacaggctacaccggacgaggagaaaggaagatccggccccagaccccctgtgcactctgcccctcctgcatttctaagagctgctttcctgagaactgacctcaccccttcaggcacaacctcacttgggaagcccasggttctaggaacttgcaaagagagaaactgcgaactttgaattctattgtatccaaaagccaacgaaaatcatagatttaacttccgatcaggcttcccagttaaaaatattcattcattttccattcaacaagtatgtcttcagaacctattttaaaatagatttgtatggagacacaatccaaacaaaattcaccatttaaaagcgtgattccgtggttttagtatattcgcaaggtcatgcaaaccctccctctaattccagaacattgccatcacccaaagaagaaacaccagcagctcccaatgccccctccccgcaaccgctgacgaccactcatcggcttcctgtctgtgtgcagttgcctgttctgggcaggtcacctgagtggcgtcacacaggatgtggtttttgtgactggtttctttgacgtggatcatgttttccaagcccatccaacctgtcgtgtggatgagtgtctcattcctttctatggctgaaccatgtcccatcctctgggcatgccacgtgctgttcacctgctctctgttggtggacgttagcgctgtttgcattcagcgccctcttttaaactcgtaactgtgataaagttgccatcactttggggaaaccgtgggtgcagtggggctccc

SEQ ID NO: 72154 - DNA, 727 bp, Homo sapiens
tgaagcaaaccctgggcagtcatggcaaagacctctcggtgggctggagaatcccctcatcttcctgtaatatccagcaacaggaagaaggtattgctacccttacactgaccaggagactgtggtccatgaccaatgtatggttcggttaaaatggctacagcrcatcctgtgcctgctaggtgcacggtcctgttaatggctttatgtgcataatttccattcatcatgacagccctccagaggttagacaactgaaagtccagaggagacaagtgatttgcccaagtaagtggaagagatgggatttgaaactgcgctaggctctgagagtattgtaactagacaagcagacatggtttctggggggcttgaaggctggtagggcacagaaagttcctgattctccaatcttgctaaaaacttgctgtgtggcttcgcactggccactgaccctctctgtgcttcagtttccaaagaagaggctggaacactctggactccaccccttggcagtgctgcctctgactcccacccctgcaatagtccacacagaagtccagccagaaaggtgccctgccctggacaggcaaatagagactgtcgtggttcagtctctttctctttctccagcagccaggcataaagaacatttcaatttatgatttctgtggacactggaaataatttctttttccatttcagagcattttaatccagagaaaac

SEQ ID NO: 72155 - DNA, 672 bp, Homo sapiens
tcggaggaagctgcaccataggagggtttgtcaaaggcctcacatgtcatgaatgatgcagcaaatgcagatacttatatggaggtcaacgggcaataattctatgaggcaagaatgggacttaaattacaaagttgaacataaagggtactgtctaatgaatgcaggaagagtgatgagttttcgatttttcagccaaaagaggtgccatctgatgggcattatctggtgggagtcagggcaaaaagtaggccccatggcatggttgacagastggggagaaagctgtagtgggtatactgtttgagacgctacttgaagagggtgaaacctgacccaaggaaatctccaattcctaaatccaaggtatttcatagagagtgaaagatagcccagggtgtggtgaatgagaaatggagagagcaggaaaacagaaagaaaaccacagagagaccacagaggtggactgtgctgagtatgctggaaggaggaacggaaaagatagattcttaagccaagcaaaaagccaagggatgctggtggcaatgtaggcatggccttctaagatcttgagacagtctgaggcagctcctttaagaagctgaattcttggctgggtgtagtggctcacgcctgtaatcccatcactttgggaggcagaggcaggatccc

SEQ ID NO: 72156 - DNA, 549 bp, Homo sapiens
aaatatgcatacaacaatcctctttttaaaacatgtaattaaacatggagggggtggtaagatagaaaaactattaacagatgctacctctgggtatggaattatgaatgattttcattttctgttttgtaatgttattttgtttttcctcatatgttctacaatgagtatgtgtagctttgtttttagatagtataataaatgctgcttttaaaaatccctgaagaaagctttctggacttcagcactattaacattgagggytggaaaattctttgttgcgggggcaagaagaaagtattagagacaatactcaacagtgaaaaccagcctttgtagtccaattttcattcccatatcaatttactgctgtattccagagagattatatgatactgtgaaaatcattattcttgaagtttaattcttgcctattaaatagcaatgcataaccaaagaacatgcttagaagctcttcctgcactggcagagactattcaatatttcaaaggtagcatccctttggtccctggaacaaagaatgtagag

SEQ ID NO: 72157 - DNA, 528 bp, Homo sapiens
gggacagggacgctgccaccccgccggcccagcaactgggccaaagagcaccaatgtctgtcctcaaagccaaggctctgcgggtgactgtgatgagaactggctgttccctgccccacagcctcccagggcccaccatcggcggctctgtgcgccaagcacggccaaccccttgccagggccagcaagacaaggcctgacagcttcttgaggtcccacccttccggcctcctgtgccaaggcccccaccctggcccccgtgctcagccgggctgtggagctcctgagatctgagcccctccaaggccagagcygcctctgtggtccctccacggggcctgtacgcaggtgacctgctgtatgaccctgcggaagcccctgaccccatccgagttccacgttctctctggatgagcctggcattcctaggcctgccggacgaggcaggaagcctgaggcacagcggccggctttgacccatggccggccctggtgaaaggcctgtgtggactcacctggccccaccac

SEQ ID NO: 72158 - DNA, 551 bp, Homo sapiens
cgaagctagaacagacagtgccctgccggcgccctgagcagtcggggacttcatgtggttccctttgggcagaacaggaggctgtccctttacttcagaggcctggacagaggctcactgcaggaagatccttctcggtgctctgcagatatcgacgactcattgcatcctcaccgagaccctctgcggctgatgctgccatcagcccattttactaggasggaccaggctcggagagatgaagtcatctacccaaggtcacgccgcgagtgtgctgcgggccgggatcggaaccacgacctggtgttgcccccacagggccaggactcggcaggactccaaagtctccgcttgtcatcaacacgcttgcctccttttaggcctcaagatacttgcaaagaggcagcaggtctgggattcaaacctgaggccgaacggaggctgcaggggcaggaggccccgtgcctgaggaacaccctgggagctggtggtgtcctcccctccgttctccaggccccaccccgggttgtgcgggggcagctgtgcaggag

SEQ ID NO: 72159 - DNA, 551 bp, Homo sapiens
cgaagctagaacagacagtgccctgccggcgccctgagcagtcggggacttcatgtggttccctttgggcagaacaggaggctgtccctttacttcagaggcctggacagaggctcactgcaggaagatccttctcggtgctctgcagatatcgacgactcattgcatcctcaccgagaccctctgcggctgatgctgccatcagcccattttactaggagggaccaggctcggagagatgaagtcatctacccaaggtcacrccgcgagtgtgctgcgggccgggatcggaaccacgacctggtgttgcccccacagggccaggactcggcaggactccaaagtctccgcttgtcatcaacacgcttgcctccttttaggcctcaagatacttgcaaagaggcagcaggtctgggattcaaacctgaggccgaacggaggctgcaggggcaggaggccccgtgcctgaggaacaccctgggagctggtggtgtcctcccctccgttctccaggccccaccccgggttgtgcgggggcagctgtgcaggag

SEQ ID NO: 72160 - DNA, 551 bp, Homo sapiens
cgaagctagaacagacagtgccctgccggcgccctgagcagtcggggacttcatgtggttccctttgggcagaacaggaggctgtccctttacttcagaggcctggacagaggctcactgcaggaagatccttctcggtgctctgcagatatcgacgactcattgcatcctcaccgagaccctctgcggctgatgctgccatcagcccattttactaggagggaccaggctcggagagatgaagtcatctacccaaggtcacgccgcgagtgtgctgcgggccgggatcggaaccacgacctggtgttgcccccacagggccaggactcggcaggactccaaagtctccgcttgtcatcaacacgcttgcctccttttaggcctcaagrtacttgcaaagaggcagcaggtctgggattcaaacctgaggccgaacggaggctgcaggggcaggaggccccgtgcctgaggaacaccctgggagctggtggtgtcctcccctccgttctccaggccccaccccgggttgtgcgggggcagctgtgcaggag

SEQ ID NO: 72161 - DNA, 734 bp, Homo sapiens
cggaggccgcctgcccaggaggggcgtcaaaggaggggacagatgtgggtttagggaggccacctgcccgggaggagcctcgaaggaaggcacaggcgtgggtttggggctgcctgccctggaggggcctcaaggaccccaggtctggtcttggtctcactcacctcctggaccccccaaggcctgcagtttgcaatctgtcgcctgggacccccactgtctgcctttacgcagctcagccaccacgcggccctcgctccctcatttacttgatttctgtttatggttaaagtaccgtttaaaacgacacatcattaaagcaacatgaaagggagttttgaaaagggaagccatcrtccatcccactgcccctgcctcagcggggatttacttttcctttcctgtctgcgggccagtgacaatgaggaccccgcaatgtgtctgcgggccagtgacaatgaggaccccgcaatgtgtctgcgggccagtgacagtgaggaccccgcaatgtgtctgcgggccagtgacagtgaggaccctgcaatgtgtctgcgggccagtgacaatgaggaccctgcaatgggcggcctgtaaggctctgccctggcctccgctgccttcgctttctccctccttggtgggtgcacgcccttgtgcttttcctaaaagagcaggtcctccgggcatggtggctcacgccggtaatcccagcactttgggaggccgagacgggt

SEQ ID NO: 72162 - DNA, 1529 bp, Homo sapiens
gcccccgcctccgagggctcagcctccaggtggtctaacctggagtctaaacctggattgccatctgcctgcctcagcccttcccttccccagggaccgagggccagtgcggctccccagccacccattttttgtttgttttgagacggagtctcgctctgtcgcccaggctggagtgcagtgtcctgatctcggctcactgcaagctccatctcctgggttcacgccattctcctgcctcagccccccaagtagctgggactacaggtgcccgccaccacacccggctacttttttgtatttttagtagagacagggtttcaccatgttggccaggatggtctcgatctcctgaccttctgatctgcccgcctcggcctcccaaagtgctgggattacaggcatgagccactgcacctggcttgtttgtttttatttttattgttttttgagacggaatcttgctctattgcccaggctggagtgcagtgacataatctcagctcactgcaacctccacctcccaggttcaagcgattctcttgcctcagcctcccaagtagctgggactacaggcacccaccaccacacccagatacattttgtatttttagtagagatggggtttcaccatgttggccaggctggtttcgaactcctgaccatgagatggcgggcttgagccatcttcccgcctcggcctcccaaagtgctgggattacaggcgtgagccacggtgcccggccccagccaccagttttgtacagcactcaggtgggtgtggttcctgaggacatgtcacacgagatccttccggtccattagcccaccccgccccatcagtggccagtgcggccattgtggggtccagagtcccgaggcagaacgactgactccaggttgtggaggggcctcttaggatccttctaggcacccaggttgggcaggtgcctccatgcctaagactgagctcctggtggacatcgggctgggtgtgggcgtcctgcacaccctccctgtggcctggtgcccgtgaggagtggacagtcaccccgagagcatagaccaccctcgaggctcccagatggcggccgcagagccccacttccctgcctggtgtgtgataccttccatggctgaggacacctctgactgctcactcctgtgaccctggacccaagtgctgggccacacctggactccaggccccagtccttccttcttctgctgtcctggctcctgggtggcccccgccctccccgctccgaggctctgccctgtgctgggaacccaggaattgccaccccctggccccggtttctcatgtcrggatctgctggccaggttgactcctgagcgccactgtctcctcagacttgctggtcccacccggtccccacctgtccaccgcccgaggctctcctgtgaggccgctctgcagctcttggcctgggggcccccggcctctcatggtgccttctgcactgtcccctttggagatgggagctttgagcggtaggcgccaccgt

SEQ ID NO: 72163 - DNA, 666 bp, Homo sapiens
acgctggctcgtactggaggctggggtgggtggcccgtcaccatacagggtctggggtagcacctggggtggccggctctgaggcatgagcggaaggaccatctttcaaaccccaaggggttttctttccagagctcgaagtgcccatgaaagagaaacgaggcctccagcatccctgaactctacatcagctgcaaggggaccccggtccccgaggacacccacatgtattttcaaacagctcccgaggcccagcgctgcccgtgcagaagaaagcatggaatttggggagggctcccgaggcctggccgcccagcacaagggggtccctggggcacctgctgtccccaccctggctatcctcctgtggcctacacaagtatcctaacccctccctggctcagaacagcactgaggtcctcctgctggggtgggtggggtcagtctgggtcccagtcccttccctatggccctggctcagaggcaggtgggcagcgggtgcggaatctgacgagaagggctctgacgcccggaggggaggaatctcatacagaggaccaactctgtcctcacggattcttccgcggycctgagatcctgcgcttctctatcttacgagtggggaaacagaggcacagagaggctgaggagggggagagccaggtg

SEQ ID NO: 72164 - DNA, 667 bp, Homo sapiens
cactccagcctggacaacggagcgagactctgtttcaaaaaaaaaaaaaaggaaaagaaaaagaaaattcccagaccctggaggccgctccccggggcccatgggagaggccgtttctttcccagacggcacatccagttcccagcgaaatgtcactaacgggccgggagaggaagccgctttgcaggttgggcagagccagtgggaaagagcctgcaatgtgccggggccgctcatccatcacttccccgtccgtgggggcacccagcccgccctgcccagctgggaaacagccacagcccagggctcccagcctgggagttccagaactctccatggaaggaggacccatggacaccagtgcaagagctcatctttccggccttccccgcctcgtaccctcgccagctctggagtaacaagccctgcttccgctgtaaccttctttgacccctcacaaaagccttggggcataggacgctgggcaggtaacgcaggtgacctgtcttgaggcctttgcacaggcaacatagccacggtgatgacgtcctactgcgtgccaggcctgacctgagcattttgtgcagaacacctcatttcgtgcccccgaaagtctagrggctgtcaggtggggaaactgaggcacgggccctgggcacctggctct

SEQ ID NO: 72165 - DNA, 768 bp, Homo sapiens
cagatggctcagagttgagtccttacggcctgagactggggacttctgggaacagacctgcctggataaattctgccaggagtgatgggtgctccccagggtcctctgcagcctccctgccctgcatccccgagccccggggcctatttcctcccacactgccctgcaagctcccacactgagggggtgctctccaaaatggggctggggccctggatgatgagcgtgctggccggagaggaagacagtgaggagagsggggagtccatggggctggcctcccagaggcccgccagctcccgtgcacacttcagagataaggccagggcgctgctgacaacccctgctccattttcccgaagttctaggaaactccattttggacactttctgttctttatgtttcaatccagccaagccccggagtagcttcccaaagacccagaggaacgggaactcagcgtcagtactcagagtgaaacctgcttttgaaatacgtcaatgacggcaacaggcctcccttgtccccacctggctggggtggggagccccgccaggccagctgtcagctccccaaccccatctgccagggccgagggggtcgggccggtgaggaccaggcgggggcacagccatgtgcagcctggtggggaggggacttactctctactttctcctcctcttttttttgactctcccagaggagttgagttgttttctgtagttgtgagaagcccatgccctgggtctgcaggctgtgcagggctg

SEQ ID NO: 72166 - DNA, 627 bp, Homo sapiens
ttctgtatcgtcagcgtaacagaaatgctagtttaatcaaaaggaaagcaccagtggagatgtaaattgtgtttctgaactgttatgtaattctccastgcatctcatttaatcatattgtattgaggtcatgtcttagctctctggtcatcttgaagtagattcccttttggacttctatccctaactctaaaaaattcctcagggtaaatttctgctttccatttttatagaatgacctcgttcccaacccgtagcttaaaagctgaatgtgattgcagtagctttaaataagatgatcaaattcagtttcaccaatgctgcctgggcccatactatgtgccatccacgcccctactatgtgccagccacggtggtagtgctgagatcagaccacagcaaactcctgaaagcaaggcgatatcatggcaatgagtggggactctggagccagacagccttggttcaaatccctttaccccttcctgtctgtatgaccttgggcaagtcacttcatctctctgggccttgacatgctcatctcttagaccgtgtaacttgtcttttctcacactgctaataaagacatacccgagactgagtaatttataaaggaaagagatttaa

SEQ ID NO: 72167 - DNA, 724 bp, Homo sapiens
tttggacttcagctcggcactcccgtgagagctgcatgagaaaaaatgagctaaatacttgaaaggtaacaaaacaaaaacacaaagatatgagataaacctgctatgaggaaactaacaaataaccctgtattttatctcccaaattttatacctcaaatatcttccagaataaaaattaaatgttgcrgccaggtgcggtggctcacgcatgtaatcccagcactttgggaggtcgaggcgggcggatcacctgaggtcgggagtttgagaccagcctgacctacatggagaaaccctgtctctactaaacacacaaaattagccaggcatggtggcacatgcctgtaatcctagctactcgggaggctgaggcagaagaatcgcttgaacccgggaggtggacattgtggtgagctgagattgcactactgcactccagcctgggcaacaagagcgaaactccgtctcaaaaaaataaataaataaataaataaataaataaataaataaaatgtgcaagaggcttcgaaaagcccatatctttagcaatgcgattatacatattcagcagtttctaatatactatataaacaacattcttttatgacagtatcctgataaaagtgaactggcttcattcagactaggttagttggaaagttttgtgtttgttgttttgcttagcaaactaatgtgtcagtctatgaacaccaggtagaag

SEQ ID NO: 72168 - DNA, 724 bp, Homo sapiens
tttggacttcagctcggcactcccgtgagagctgcatgagaaaaaatgagctaaatacttgaaaggtaacaaaacaaaaacacaaagatatgagataaacctgctatgaggaaactaacaaataaccctgtattttatctcccaaattttatacctcaaatatcttccagaataaaaattaaatgttgcggccaggtgcggtggctcacgcatgtaatcccagcactttgggaggtcgaggcgggcggatcacctgaggtcgggagtttgagaccagcctgacctacatggagaaaccctgtctctactaaacacacaaaattagccaggcatggtggcacatgcctgtaatcctagctactcgggaggctgaggcagaagaatcgcttgaacccgggaggyggacattgtggtgagctgagattgcactactgcactccagcctgggcaacaagagcgaaactccgtctcaaaaaaataaataaataaataaataaataaataaataaataaaatgtgcaagaggcttcgaaaagcccatatctttagcaatgcgattatacatattcagcagtttctaatatactatataaacaacattcttttatgacagtatcctgataaaagtgaactggcttcattcagactaggttagttggaaagttttgtgtttgttgttttgcttagcaaactaatgtgtcagtctatgaacaccaggtagaag

SEQ ID NO: 72169 - DNA, 1393 bp, Homo sapiens
aaaaaaaaaaaaaaaggttaattttatgttatgtgaatttcacctcaatttaaaaaaaaaaagaaaagaaaaccagcaccacagactccaactctttcttatttaaaagagaataaacctcctaccccctagtcactatagtgaccagaaagatgccgggatgtgggagcccccatggttaatgagaggctcattatatggagagaraaaaaaaaaaaaaacaaattcccacgttttctcacacagcagtataaacactgggttagggagcagcaactgatgtatgccatttccttctgagtcccctcattctggatttgagatagccaggcttttgcattaagctcagaaggggtatttctaaggatggatgagaagtgataccatctcaactctccggaacaaaggcaggactgataatggagcatctcagaaggtagagaaagccatcgtggagaacaagtgcatgtcagtgcgcaccgggaagcagccgatgctgccgagaccccagcacacacaaacatcccaacaaaaagcagcagttggggcagacaaataccaagagactgaggtatggaggtttctgctccaaccagtccatgggcagacaatgcaaatgtgttcagctgccaagaggagaagcctaaaatccatttgtagcctggctaaaagcttctaatggatccttaaacctaaataaagttaggacagcagaatttaactgtccatttgtgattcagattttgggaattaaaaaaaaaaatctggaaatcttcccccacccactttgttaaaaacataaaatcagatgatagaagctggtagggcaactctaagtgcactcacggaaggaagaagtttctagaagtgcagcaatcttctccccacaaaatagtctaaaaagttttcctaatatgactgaaatcagaagaatatacagcaaacaatttaaaaaacaaatgacaagaagaagaaatgaagtcgatattcactgcataccctccttccctgttcctcagtgcggtaggcgtgtctgtataaacaagagaacacagctccctgaggcataaattcactggtctcattccaaccgtgggtgtggcaaagacgagaagcgtctccctggcacttgcggtacaggacagggtccagcctataaggttaagagttaaaagataaccactaattaatagacatttccttctaacacaggctcagggtttttatgaggtgtttgcttgtatactcattgataatcacttccaggggcgtggagacagaagatatgtaaaagtatattcctgaattttgttcttttgttttttttttttgacacaggatctctcaatctgtcacccaggctggagtgcagtggtgctatcttgactcactg

SEQ ID NO: 72170 - DNA, 1393 bp, Homo sapiens
aaaaaaaaaaaaaaaggttaattttatgttatgtgaatttcacctcaatttaaaaaaaaaaagaaaagaaaaccagcaccacagactccaactctttcttatttaaaagagaataaacctcctaccccctagtcactatagtgaccagaaagatgccgggatgtgggagcccccatggttaatgagaggctcattatatggagagaaaaaaaaaaaaaaaacaaattcccacgttttctcacacagcagtataaacactgggttagggagcagcaactgatgtatgccatttccttctgagtcccctcattctggatttgagatagccaggcttttgcattaagctcagaaggggtatttctaaggatggatgagaagtgataccatctcaactctccggaacaaaggcaggactgataatggagcatctcagaaggtagagaaagccatcgtggagaacaagtgcatgtcagtgcgcaccgggaagcagccgatgctgccgagaccccagcacacacaaacatcccaacaaaaagcagcagttggggcagacaaataccaagagactgaggtatggaggtttctgctccaaccagtccatgggcagacaatgcaaatgtgttcagctgccaagaggagaagcctaaaatccatttgtagcctggctaaaagcttctaatggatccttaaacctaaataaagttaggacagcagaatttaactgtccatttgtgattcagattttgggaattaaaaaaaaaaatctggaaatcttcccccacccactttgttaaaaacataaaatcagatgatagaagctggtagggcaactctaagtgcactcayggaaggaagaagtttctagaagtgcagcaatcttctccccacaaaatagtctaaaaagttttcctaatatgactgaaatcagaagaatatacagcaaacaatttaaaaaacaaatgacaagaagaagaaatgaagtcgatattcactgcataccctccttccctgttcctcagtgcggtaggcgtgtctgtataaacaagagaacacagctccctgaggcataaattcactggtctcattccaaccgtgggtgtggcaaagacgagaagcgtctccctggcacttgcggtacaggacagggtccagcctataaggttaagagttaaaagataaccactaattaatagacatttccttctaacacaggctcagggtttttatgaggtgtttgcttgtatactcattgataatcacttccaggggcgtggagacagaagatatgtaaaagtatattcctgaattttgttcttttgttttttttttttgacacaggatctctcaatctgtcacccaggctggagtgcagtggtgctatcttgactcactg

SEQ ID NO: 72171 - DNA, 1177 bp, Homo sapiens
agtgtccagaatagacaaatccataaagacagaaagtttcatgggaatgaaaggagttggggtgaatgggggtacattttaatttttttgagctggagtctcactctgttgtccaggctggagtgcagtggtgcaatcttggctcactgcaactttcacctcctgggtcaagtgattctcctgcctcagcctcctaagtagctgcaattataggtgtgcaccaccacacccagctaatttttgtatttttattagagacagggttttgctgtattggccagcatggtcttgaactcctgacctcaagtgatcagcctgcctcggcctcccgaagtgctgcgattacaggcatgagccaccacacccggccagggggtacactttaaatggctgaattgaatgaagtgtgttatatctcaataaagctgtttttaaaaaaagttaagatgccaggtttctgaccccacagtggcaggcaacgaccctgttctgtgagcatccgggattatttttggtatggcagstgcccaggatttttgtgcagagccttcatacctgtcactgatggaggctctccgaagttcaagccaaagctgggatccgcctacaaactgttttacagttttccttcttctccaaggtgcagtgaaagcgaaggaacgctgctggacatggtgagacatggaggactttgtaagggataacctttggttccctgattttttgacatgaatctaacgctctgcaccttcctccttcttcttgacagtgacattcataaaggccagaagctcggtgtttttgtttctgttgtctgtattctgtattctgttccactagtccatctgtccatccttgtaccaatacttcactgtcttcacattacagtaactttttagtcttggttcctggtaggataagtcggaggtttgttgttcttcaagatcaccttggatattctaggtcctttacatttccatataacattttagaaacagcttgccatttttccacccacaaaaaccatgctgggatttggttgagatgactttgacaccacacatcagtttgggaagaaccaacaactttataatactgagtcttccaatgcatatacatagtatatccctccatttagttacattttgttagacttatttctaagtatttgatgctt

SEQ ID NO: 72172 - DNA, 1177 bp, Homo sapiens
agtgtccagaatagacaaatccataaagacagaaagtttcatgggaatgaaaggagttggggtgaatgggggtacattttaatttttttgagctggagtctcactctgttgtccaggctggagtgcagtggtgcaatcttggctcactgcaactttcacctcctgggtcaagtgattctcctgcctcagcctcctaagtagctgcaattataggtgtgcaccaccacacccagctaatttttgtatttttattagagacagggttttgctgtattggccagcatggtcttgaactcctgacctcaagtgatcagcctgcctcggcctcccgaagtgctgcgattacaggcatgagccaccacacccggccagggggtacactttaaatggctgaattgaatgaagtgtgttatatctcaataaagctgtttttaaaaaaagttaagatgccaggtttctgaccccacagtggcaggcaacgaccctgttctgtgagcatccgggattatttttggtatggcagctgcccaggatttttgtgcagagccttcatacctgtcactgatggaggctctccgaagttcaagccaaagctgggatccgcctacaaactgttttacagttttccttcttctccaaggtgcagtgaaagcgaaggaacgctgctggacatggtgagacatggaggactttgtragggataacctttggttccctgattttttgacatgaatctaacgctctgcaccttcctccttcttcttgacagtgacattcataaaggccagaagctcggtgtttttgtttctgttgtctgtattctgtattctgttccactagtccatctgtccatccttgtaccaatacttcactgtcttcacattacagtaactttttagtcttggttcctggtaggataagtcggaggtttgttgttcttcaagatcaccttggatattctaggtcctttacatttccatataacattttagaaacagcttgccatttttccacccacaaaaaccatgctgggatttggttgagatgactttgacaccacacatcagtttgggaagaaccaacaactttataatactgagtcttccaatgcatatacatagtatatccctccatttagttacattttgttagacttatttctaagtatttgatgctt

SEQ ID NO: 72173 - DNA, 717 bp, Homo sapiens
tcctgccactccctggtttgcaaactgttcactggaataaactctctttccttcaaagttcttttcaaagaacttttgttcaaatggacaaccccacattaagcaaaggcaatcctggccctggtggactttgtggtccaggggaagatcccttagaaccatggggcttcccgcatcctgctctaccayccctggcagctgcagtgcctgcccctcacacctcattcagggacatatcctagtccaaattcttaagagaggtcgtctgattggcctatccatctgcctgctggaggcacattattggctatgggaacccagtggactggctgcccttggctcagggccagacatggaccaatcagatttgttgccagggagccgtggtacagagcatggttgcccgtcactgacagaaggggaactcaggcgggtcaggatcatcaaggtgctgcctgaccctgaggatttcaccatctattcctgggcctttcttgtcttatatagtttttatgccttaaaaaaagttattcgttgcctacaaaatctatgtttctataatggttttaccaataaatccacaatagacagtacaatgggaagaaacaggtaaatcaaatcttcactagttagagattttagcatatctttaaacattgataggtcaaatagacaaaattaacacatatgttgaagatttgaataacatatatggaa

SEQ ID NO: 72174 - DNA, 564 bp, Homo sapiens
gtgcttccttctttttaaataaaagctgtttttcataggccttcacacaatgcttcacttgaagaaacgggtctgctaagagccagtacatatagtacacacagcacagtgcaaaagggcatgggcttaatggccaaaccgctcaggttcagaatctagctctgccacgtactatccacagcatcttgcaagtttcttaaccattctgtgcttggtcttttcatctggggttcaataaccagaacatggagaaattaacagtactatatcccattgggtrtaactgaggcctaatgaagttaacatatatcaacagggcctgacacacagaagtacgtaataaatgttagctctatataaaaattgtatctttattatatataaatgtataaagtatgttgaatctgaagttcagaaactacggagttagcccagtcttccaccatgcaaccttttacaacaaccctgttaagagttcctcttccacataaaaactattcagatactttagagagctctcctatcctctaagtctcccatttccaagagagagaacaaataaat

SEQ ID NO: 72175 - DNA, 564 bp, Homo sapiens
ttatgcctcaagagaagtgatttaaaatattttttaataaaaaaatggccaagcgtgatagcttacacctgtaatcccagcactttaagaggccaaggtgggtggattgcttgaacccaggagtttgagaccagcctggaaaacaaggtaaaaccctatctgtacaaaaaatacaaaacaattagctgggtggggtggtgcccacctgtagtcccagctacttgggagcctgaagtgggaggatggcttgggcccaggaggtcaaggctgccgtgagccatgatcacaccactgcactccagcctgggcaacagrgtgagactgtctcaagaaaataagttaattttttaaaataagatcatgtcaatcccatatataaaattctccagtggcttcccgttacccatggaataaaatccaaactcctaacctggcctacagagctctggtgtctggaaatcatcccaacatatcaaatttggtctcatctcctggccttggcacttacagttccctccacctggaatccagctgaaatgttctgccccaaatcttttcaagtct

SEQ ID NO: 72176 - DNA, 550 bp, Homo sapiens
aaaagttggatgggraaaaaatttttaaaaagaaaatttagttccattaatctatagtctcattccatttcgcatgtattcttacactattttattttgtcaacttgttacatttttcatgttatctatagaccataaattactatcaaggagagattcatacactctgttctttaatagcattctagtaaatagtgtgggacctgagaataggttaaaatatgaatgcaatgtattaataaatggataaaactaatgtaatcctttatgtcatctaacagctaattttaggcacaaactacaaaaatagtagaaggaagatacaaaattgcaattttctttctctcctaactattttcataaatctagaagttttaaaaataagtttcaaagttgtatgggaccaaaattttccaaagataaaacccaaaatagttccagagattcatctgttcatgacttgctcacagtgatttgtccacccacctgacctgcagaatttcaactatcacatcagaagaactttagagtcagcaattgtggcaaaatg

SEQ ID NO: 72177 - DNA, 1267 bp, Homo sapiens
cgcattctgcctacctttccatcccttccttctctgcatgccagtcctcctggctctctttcagcttctgcaacacaccatgttccctccagtctccaggcctttacgcaagctgttccctctgcctggtacactctcaccaccctcctccaacgtatttatgcctgctcacccctcagctctcagctccactgtcactctctcggagtcctagacaaggacatggctcttgctcacggtcctgcttcttgtcttcccagcacctatatcagcctgaatcatgcatccattaaggtgattcagtatgtttttgtttttgtcattgttcataaggatagagatgttgcctgatttgggtcccttcctaggctgaaaactcrcacagtgctgagcacagagtagatcctcagttcatgccacgtattatcaggtgcatgtctttattttactggagagaaaactgggactcagaaaggtttggttacttgcctaagcttgtccagcagagctgggacacaaatcccctgactacctgaggcagagccttgcttgactttcaaatatgtcaactgaggaggggtctcagagaggagaaaggagtttctggggagcatttcagctccgggagagacaaataggttgtgctacactcagccccatctccactccatcacctgctagttaaggagtcaggctcctcagagctgcccacaaccgtgggagagagacagatggtccctaaagacccatctcattatcccaggagtcaaattggaaacccattaaagaataactggcccatcaataaaccccacatgaattctgcaactgctcaggggagtgaaactgaccaaagccatgctaatgcggcctcttagcaccttcccatccaggactaatggtaattctcggaaagtaaatacagcccttcctgagcccccagaagccatttgctataatgtggtgtaaccatcttaagtaagtgcctggtaaattcatgaacctgttaagcagagttcattgtgcctttccactcacaggtggaatgcagtggtcatcagtgggaagtatttcaaggacaggtggcagataaaaccagacacaagcaatcagcagctgcagttacctgcacacctgcgcatgaatctgcatctgcagaaggtctgtgttctgtagacacgtgtccctgtgtgtgtgtgtgtgtgtgtgtgtgtgtgtgtgtgcatgtaagcattgtgagagcagatgtagattcatggagcatgca

SEQ ID NO: 72178 - DNA, 1267 bp, Homo sapiens
cgcattctgcctacctttccatcccttccttctctgcatgccagtcctcctggctctctttcagcttctgcaacacaccatgttccctccagtctccaggcctttacgcaagctgttccctctgcctggtacactctcaccaccctcctccaacgtatttatgcctgctcacccctcagctctcagctccactgtcactctctcggagtcctagacaaggacatggctcttgctcacggtcctgcttcttgtcttcccagcacctatatcagcctgaatcatgcatccattaaggtgattcagtatgtttttgtttttgtcattgttcataaggatagagatgttgcctgatttgggtcccttcctaggctgaaaactcgcacagtgctgarcacagagtagatcctcagttcatgccacgtattatcaggtgcatgtctttattttactggagagaaaactgggactcagaaaggtttggttacttgcctaagcttgtccagcagagctgggacacaaatcccctgactacctgaggcagagccttgcttgactttcaaatatgtcaactgaggaggggtctcagagaggagaaaggagtttctggggagcatttcagctccgggagagacaaataggttgtgctacactcagccccatctccactccatcacctgctagttaaggagtcaggctcctcagagctgcccacaaccgtgggagagagacagatggtccctaaagacccatctcattatcccaggagtcaaattggaaacccattaaagaataactggcccatcaataaaccccacatgaattctgcaactgctcaggggagtgaaactgaccaaagccatgctaatgcggcctcttagcaccttcccatccaggactaatggtaattctcggaaagtaaatacagcccttcctgagcccccagaagccatttgctataatgtggtgtaaccatcttaagtaagtgcctggtaaattcatgaacctgttaagcagagttcattgtgcctttccactcacaggtggaatgcagtggtcatcagtgggaagtatttcaaggacaggtggcagataaaaccagacacaagcaatcagcagctgcagttacctgcacacctgcgcatgaatctgcatctgcagaaggtctgtgttctgtagacacgtgtccctgtgtgtgtgtgtgtgtgtgtgtgtgtgtgtgtgtgcatgtaagcattgtgagagcagatgtagattcatggagcatgca

SEQ ID NO: 72179 - DNA, 1267 bp, Homo sapiens
cgcattctgcctacctttccatcccttccttctctgcatgccagtcctcctggctctctttcagcttctgcaacacaccatgttccctccagtctccaggcctttacgcaagctgttccctctgcctggtacactctcaccaccctcctccaacgtatttatgcctgctcacccctcagctctcagctccactgtcactctctcggagtcctagacaaggacatggctcttgctcacggtcctgcttcttgtcttcccagcacctatatcagcctgaatcatgcatccattaaggtgattcagtatgtttttgtttttgtcattgttcataaggatagagatgttgcctgatttgggtcccttcctaggctgaaaactcgcacagtgctgagcacagagtagatcctcagttcatgccacgtattatcaggtgcatgtctttattttactggagagaaaactgggactcagaaaggtttggttacttgcctaagcttgtccagcaragctgggacacaaatcccctgactacctgaggcagagccttgcttgactttcaaatatgtcaactgaggaggggtctcagagaggagaaaggagtttctggggagcatttcagctccgggagagacaaataggttgtgctacactcagccccatctccactccatcacctgctagttaaggagtcaggctcctcagagctgcccacaaccgtgggagagagacagatggtccctaaagacccatctcattatcccaggagtcaaattggaaacccattaaagaataactggcccatcaataaaccccacatgaattctgcaactgctcaggggagtgaaactgaccaaagccatgctaatgcggcctcttagcaccttcccatccaggactaatggtaattctcggaaagtaaatacagcccttcctgagcccccagaagccatttgctataatgtggtgtaaccatcttaagtaagtgcctggtaaattcatgaacctgttaagcagagttcattgtgcctttccactcacaggtggaatgcagtggtcatcagtgggaagtatttcaaggacaggtggcagataaaaccagacacaagcaatcagcagctgcagttacctgcacacctgcgcatgaatctgcatctgcagaaggtctgtgttctgtagacacgtgtccctgtgtgtgtgtgtgtgtgtgtgtgtgtgtgtgtgtgcatgtaagcattgtgagagcagatgtagattcatggagcatgca

SEQ ID NO: 72180 - DNA, 1267 bp, Homo sapiens
cgcattctgcctacctttccatcccttccttctctgcatgccagtcctcctggctctctttcagcttctgcaacacaccatgttccctccagtctccaggcctttacgcaagctgttccctctgcctggtacactctcaccaccctcctccaacgtatttatgcctgctcacccctcagctctcagctccactgtcactctctcggagtcctagacaaggacatggctcttgctcacggtcctgcttcttgtcttcccagcacctatatcagcctgaatcatgcatccattaaggtgattcagtatgtttttgtttttgtcattgttcataaggatagagatgttgcctgatttgggtcccttcctaggctgaaaactcgcacagtgctgagcacagagtagatcctcagttcatgccacgtattatcaggtgcatgtctttattttactggagagaaaactgggactcagaaaggtttggttacttgcctaagcttgtccagcagagctgggacacaaatcccctgactacctgaggcagagccttgcttgactttcaaatatgtcaactgaggaggggtctcagagaggagaaaggagtttctggggagcatttcagctccgggagagacaaataggttgtgctacactcagccccatctccactccatcacctgctagttaaggagtcaggctcctcagagctgcccacaaccgtgggagagagacagatggtccctaaagacccatctcattatcccaggagtcaaattggaaacccattaaagaataactggcccatcaataaaccccacatgaattctgcaactgctcaggggagtgaaactgaccaaagccatgctaatgcggcctcttagcaccttcccatccaggactaatggtaattctcggaaagtaaatacagcccttcytgagcccccagaagccatttgctataatgtggtgtaaccatcttaagtaagtgcctggtaaattcatgaacctgttaagcagagttcattgtgcctttccactcacaggtggaatgcagtggtcatcagtgggaagtatttcaaggacaggtggcagataaaaccagacacaagcaatcagcagctgcagttacctgcacacctgcgcatgaatctgcatctgcagaaggtctgtgttctgtagacacgtgtccctgtgtgtgtgtgtgtgtgtgtgtgtgtgtgtgtgtgcatgtaagcattgtgagagcagatgtagattcatggagcatgca

SEQ ID NO: 72181 - DNA, 1267 bp, Homo sapiens
cgcattctgcctacctttccatcccttccttctctgcatgccagtcctcctggctctctttcagcttctgcaacacaccatgttccctccagtctccaggcctttacgcaagctgttccctctgcctggtacactctcaccaccctcctccaacgtatttatgcctgctcacccctcagctctcagctccactgtcactctctcggagtcctagacaaggacatggctcttgctcacggtcctgcttcttgtcttcccagcacctatatcagcctgaatcatgcatccattaaggtgattcagtatgtttttgtttttgtcattgttcataaggatagagatgttgcctgatttgggtcccttcctaggctgaaaactcgcacagtgctgagcacagagtagatcctcagttcatgccacgtattatcaggtgcatgtctttattttactggagagaaaactgggactcagaaaggtttggttacttgcctaagcttgtccagcagagctgggacacaaatcccctgactacctgaggcagagccttgcttgactttcaaatatgtcaactgaggaggggtctcagagaggagaaaggagtttctggggagcatttcagctccgggagagacaaataggttgtgctacactcagccccatctccactccatcacctgctagttaaggagtcaggctcctcagagctgcccacaaccgtgggagagagacagatggtccctaaagacccatctcattatcccaggagtcaaattggaaacccattaaagaataactggcccatcaataaaccccacatgaattctgcaactgctcaggggagtgaaactgaccaaagccatgctaatgcggcctcttagcaccttcccatccaggactaatggtaattctcggaaagtaaatacagcccttcctgagcccccagaagccatttgctataatgtggtgtaaccatcttaagtaagtgcctggtaaattcatgaacctgttaagcagagttcattgtgcctttccactcacaggtggaatgcagtggtcatcagtgggaagtatttcaaggacaggtggcagataaaaccagacacaagcaatcagcagctgcagttacctgcacacctgcrcatgaatctgcatctgcagaaggtctgtgttctgtagacacgtgtccctgtgtgtgtgtgtgtgtgtgtgtgtgtgtgtgtgtgcatgtaagcattgtgagagcagatgtagattcatggagcatgca

SEQ ID NO: 72182 - DNA, 1267 bp, Homo sapiens
cgcattctgcctacctttccatcccttccttctctgcatgccagtcctcctggctctctttcagcttctgcaacacaccatgttccctccagtctccaggcctttacgcaagctgttccctctgcctggtacactctcaccaccctcctccaacgtatttatgcctgctcacccctcagctctcagctccactgtcactctctcggagtcctagacaaggacatggctcttgctcacggtcctgcttcttgtcttcccagcacctatatcagcctgaatcatgcatccattaaggtgattcagtatgtttttgtttttgtcattgttcataaggatagagatgttgcctgatttgggtcccttcctaggctgaaaactcgcacagtgctgagcacagagtagatcctcagttcatgccacgtattatcaggtgcatgtctttattttactggagagaaaactgggactcagaaaggtttggttacttgcctaagcttgtccagcagagctgggacacaaatcccctgactacctgaggcagagccttgcttgactttcaaatatgtcaactgaggaggggtctcagagaggagaaaggagtttctggggagcatttcagctccgggagagacaaataggttgtgctacactcagccccatctccactccatcacctgctagttaaggagtcaggctcctcagagctgcccacaaccgtgggagagagacagatggtccctaaagacccatctcattatcccaggagtcaaattggaaacccattaaagaataactggcccatcaataaaccccacatgaattctgcaactgctcaggggagtgaaactgaccaaagccatgctaatgcggcctcttagcaccttcccatccaggactaatggtaattctcggaaagtaaatacagcccttcctgagcccccagaagccatttgctataatgtggtgtaaccatcttaagtaagtgcctggtaaattcatgaacctgttaagcagagttcattgtgcctttccactcacaggtggaatgcagtggtcatcagtgggaagtatttcaaggacaggtggcagataaaaccagacacaagcaatcagcagctgcagttacctgcacacctgcgcatgaatctgcatctgcagaaggtctgtgttctgyagacacgtgtccctgtgtgtgtgtgtgtgtgtgtgtgtgtgtgtgtgtgcatgtaagcattgtgagagcagatgtagattcatggagcatgca

SEQ ID NO: 72183 - DNA, 1470 bp, Homo sapiens
aacacaattactgagatgccgtgggtgcctgggtgagattttaccctctgaattttagggggtggcagaacactattctgcattctccgatgtatttgtaggtctacaaaagagacaaggagcctgggaatctgaagatgctggtaagagggtggctgagtaattgaccttggaacctagaccgaatgcagtcggaagccaggtcagaaggtagaaaggctggaagacagaggggagggaggggcctagaagtcttcaaccagctgataaagcagataattctttattatctgctttagcatggagaagtgagaaagctatytggaccaaaggttatggtcagggaaaccagagactactgcttcaggggtgggaccaatgcggacgatgataggaaagttcatgatgagattcaggtggaggcgaatcttcactaaagaagggaggcaggtagggactgacagtctagggcagtgaatggttctttttttttcagacggagtctcgctgtgtcacccaggctgcagtgcagtggcgtgatctcagctcacttcaacctccacctcccaggttcaagcgattctcctgcctcagcctcctgagcagttgggactacaggcatgagccaccttgcccagctaatttttttgtattttaagtagagacggagtttcactgtgttagccaggatggtcttgatttgatgacctcgtgatctgcccgcctcagcctcccaaagtgctgggattacaggcatgagccactgcaccaggccatgaatgtttctttttttaggcgaggtggggatcccacaactctttgataatcttgtaaaaaatatagacctgttccctgtggaaatgccagtcacgctctttcacacaagatgcaccctgaatctcctggactcactgagtctctaatttggtgtctattggatggttggttggtgccaccttggtgaagatgtggcttgaaggagagaggaaggctgtgaaagctggggtcgaagtcagtgatgagattgtgaagcaacaggaatgcagaggatgctacagccaggggtcaggtcctcaggattcggagtgtaactctgacaatttcattttcttgctagaattgcaaaggacatgaggcactcttgggcctgattcatttcccactgccaacctgtggtctgtgggacatggatgaacagaggaaagacacaaggatgctcccaagatccctttcctacagatgctgcctcctgctctgtgagccagcatcatggtctcagttttttgagcatgacttatttccattttttatttctgttacatctattccaagatctgcttccagctgtctgtctgccacctcaaagcgctttgggtgtgtccttatacaactttgagctgcggggctcctgacctgctcctcttccccagggtctctgagcatcttgtctttaggagctcctttttattc

SEQ ID NO: 72184 - DNA, 1470 bp, Homo sapiens
aacacaattactgagatgccgtgggtgcctgggtgagattttaccctctgaattttagggggtggcagaacactattctgcattctccgatgtatttgtaggtctacaaaagagacaaggagcctgggaatctgaagatgctggtaagagggtggctgagtaattgaccttggaacctagaccgaatgcagtcggaagccaggtcagaaggtagaaaggctggaagacagaggggagggaggggcctagaagtcttcaaccagctgataaagcagataattctttattatctgctttagcatggagaagtgagaaagctatttggaccaaaggttatggtcagggaaaccagagactactgcttcaggggtgggaccaatgcggacgatgataggaaagttcatgatgagattcaggtggaggcgaatcttcactaaagaagggaggcaggtagggactgacagtctagggcagtgaatggttctttttttttcagacggagtctcgctgtgtcacccaggctgcagtgcagtggcgygatctcagctcacttcaacctccacctcccaggttcaagcgattctcctgcctcagcctcctgagcagttgggactacaggcatgagccaccttgcccagctaatttttttgtattttaagtagagacggagtttcactgtgttagccaggatggtcttgatttgatgacctcgtgatctgcccgcctcagcctcccaaagtgctgggattacaggcatgagccactgcaccaggccatgaatgtttctttttttaggcgaggtggggatcccacaactctttgataatcttgtaaaaaatatagacctgttccctgtggaaatgccagtcacgctctttcacacaagatgcaccctgaatctcctggactcactgagtctctaatttggtgtctattggatggttggttggtgccaccttggtgaagatgtggcttgaaggagagaggaaggctgtgaaagctggggtcgaagtcagtgatgagattgtgaagcaacaggaatgcagaggatgctacagccaggggtcaggtcctcaggattcggagtgtaactctgacaatttcattttcttgctagaattgcaaaggacatgaggcactcttgggcctgattcatttcccactgccaacctgtggtctgtgggacatggatgaacagaggaaagacacaaggatgctcccaagatccctttcctacagatgctgcctcctgctctgtgagccagcatcatggtctcagttttttgagcatgacttatttccattttttatttctgttacatctattccaagatctgcttccagctgtctgtctgccacctcaaagcgctttgggtgtgtccttatacaactttgagctgcggggctcctgacctgctcctcttccccagggtctctgagcatcttgtctttaggagctcctttttattc

SEQ ID NO: 72185 - DNA, 2481 bp, Homo sapiens
ataatcaacattgttttcaattataactcatgtattcagcatctattatatgccaggttcaaggcattgagttgaacaatgagtagaacaaagtttggagtatagcaatgctgtgaaatgcagaaatagtggaccactcacaaagttatctcaggaacttcctcggacctatgggaaaagagcacagatgtgatgggcctttctagaaggcaaggtaaattttacagcggaactattttcagagtcgagtttactggaaaagattaattctaaagccctgttctgtttccacagcccaggagggtgacatggaaaaatagtcagaacggtgtggcctgttcttccatcctcagcagacccgaacctctgtttacccatgtagtcacagcctatagggaaatagacatatattctcacacctgcacagaagcatgcactttcacaaatgcattcatttagctcttcactcatgcacacacttgcacagacctcaaaggtgtatatacgcaagtacttacacatgcccagatatattcatatactgggaaacatgctcatataatgatttttctatttttcttcttcttttttttttttttttttttgagacagagtctcgctctgtagcccaggctggagtgcgstggtgccatctcagctcactgcaacctccacctcctggatcctggttcaagcaattctcctgcctcagctcccaagtagctgggattatagggacacgccaccatgcctacctaatttttgtatttttagtagagacggggtttcaccatgttggccaggctgatcttgaactcctgacttcgtgatccgcccacctcggcctcccaaagtgctgggataacaggtgtgagccactgcactcagccaaagatgtatttattaagactcacttggacatgcaaagatgtgtaggcacctagacactcatctctaggtgaaaatttcatgatcttcataccatgtttacacacatatatgctcacatatggtatacaaacatacactctcgtacttacccacttggtcacataaacacatacttcatatatggatgcatacacttactcgtgcttactttcttattcacacacagatatgctttacacctacatagaggctcacatactgtcagagacagacttgtgtgactccttgacttacattcgtacacatgaaacaccttcagcttaggccagaggagtagtcacgagcttttgccgcctctcatttctaaattctggagagaggatgagaccaaaaggatgtctttaagggacagatagagggaatggatgtgataatcaccctccctgaattccctagggaagtgtgaagtattattccacggcacatatcaaagcaaatgctgcaacatgggtctgattgaagttcacgaattctagaacccggttagatgaaaaattatgccattgtttaccatgttgacttgaagtcttgggcctttttcttcccagaggaatgtttacttttatgtttttttcccactctaccttgaatgcagaagttgacactaagtggagataaaaggcagctctataaaaaaacactagggccatttctgccaccttgctgggaagaacaattcagtgaaggtagacccaatcagggtgatgagaccaggggaatcactaccactctttccatttccatagcaagacgcagtggaagaatcaatgtggtattcttcctcgaaaatcccttttgttgttccttgctgggggtcatcaggaactgctgagacagaggctgaaatgagcagacctgagtggaggagtccgcagcacacacagcagcaaaaggggaattaattcaagatcaagcctcaagctgacaccagctaggaagacaccagggcaagaggttttagaaaaattgacccagcacaggcccaaggcacagtacagaaatgggtgacaccagaggggaggggagagggcttggaatcataagagagggaccgagattcacagtctggtagatgtggaatgaaatccttacccaggtcattcttgctgtgaaaacccagtcaattttcttaacatcactcataacatggatggaatcacgtttgctatgagaagtcaatgaaatccgtatgggaaaacaccagattcattcattcattcaacagattaataatcgttgataataactcatatttcttgggtgcttactatgcaccaggtgctattcaaaaatggattatcacatccattccctctatctgtcccttaaagacatccttttggtctcatcctgtctccagaatttagaaatgagaggcggcaaaagctcgtgactactcctctggcctaagcctgaaggtgtttcatgtgtacgaatgtaagtcaaggagtcacacaagtctgtctctgacagtatgtgagcctctatgtaggtgtaaagcatatctgtgtgtgaataagaaagtaagca

SEQ ID NO: 72186 - DNA, 770 bp, Homo sapiens
aagtatgaaataggaaaatgcactccataaatttgtggatctggctaaagagatttccagaagaatgttgaaagtattgactggcttttttttactgcctataataaagtgggagtggggagagctggggtaagatggtctaaagaaggaaatgttcaatattcaaacagaatttagaggaaatactttgaaacaaggacttgcagatttaggagaaaaaactatttctatttttggctatctccgagtaagtaaaaacttgaggggaaaaagacccagatatataaagcaaatatttttagatctaaagggagacagagtctccaatacagtaatagttggaacttcaactccccactctcagcactgggcagatgatctagacagaaaattaacaaagaaacattgggtttaagctgcacattataacaaatagacctaacagacatttacagaacatttcatctaacagctccagaatactcatttttctcatcagcgcacagaacattctccaggatagaccatatgttaggaaacaacacaagcctcaaaaaatttttaaaaattgaaatcttattaagcagtttctcagatcacagtgaaataaaactagaactcaatgacaagaggaacttyggaaactacacaaatacatggaaattaaacaacatgctcctgaataaccactgggtcaagaaagaaattagagtaaatcaaaaatgtcttgagacaaacaaaaatcgaaacacaatatatcaaaacctgtg

SEQ ID NO: 72187 - DNA, 615 bp, Homo sapiens
aaaatctagcacttgttctcataccattaactagtgtaagccagaaagaggaactcctgagcagcctttattaagcatggatttttaaacagcaagtggcctgccttctgaggtgtgttctctgcccaggaaaccaagttcagtgtcaacaacctagaacaccaacagtgccttagcttctttgtcaaggatggatttgggtctgaaaatatctatatcctgcccaaagcatgaacagtgacctcacatctctaccgattctctcactcccatgaatggtctttaatactattgaccacgagataccactgcccagatgatakgacctgatctctgtatttaaaaacattaaggaacttgctcaagctcaaagattttcagaaatccaatttgggtgaattaagaaacacagatagcactacaggcaagggcacaaagttttcaaatcacagttaagccacaaaggcccaggatgccttgaataaaaaatgcaacgaatcgcttgacaaagaatcttgaaaagatctaaggatggaagaaagcccactgcagaaatagagaaaggatgaggaagagccaaaaaaaaagaatgtgcaactctttctaaggctcatg

SEQ ID NO: 72188 - DNA, 581 bp, Homo sapiens
gggttttgatggagaagaggattttattggtggctgtcacaataaaaatggccttggaccctcaagttaattctactgattgacatcctgggtagctgggtagtcagcatgcaatcctctctactttttttttttttccaaacaatcatagtgtgtccaggaataattggttgtcctatctcatcagcatcaatggagtaaggaaggaggcataacacttatgctgtgagttttttcccctctcctttctttgtcttccttttaatgatgagaacacaaagatatttgaggagggagaaatcaggagagagactcaaagaatatgactagaagaggatgttttcttgtagacttagctatcatatatgaataaatcaaatagatttgatctcaaaacctaatcaacagccctgaggaagcgcctttatttccctcacamtaagtagtgctgttattaaaattgacacaagacttatcaattgtgcaagggttttacggaaaataaatatattgggaaacatctaggtaggtttcttaataatgacctttcactgtctcctttctgggaagactacgctgac

SEQ ID NO: 72189 - DNA, 1383 bp, Homo sapiens
atttccagaattcacatccattcacatgatgtttctaaattccctgcaatttccccaatctaaaacatacccactattcacgtaacaatgatacaagaataaataaattttaattttaatgtcttacatgtataagacattgtgttgttttgtttaatcatcacagcaatcttactaggtacatagaatttgaactctaattttatagataaagaaatctagaaacagtttagttgacatcttcaatcttcaaatgtccagggccagagactggcagcaggacataaacccacttttgccacctaaatagtttcacttaagtacaagtttaagatataaataaatacaaaagactaaaaattgataacttgatgtcacaggtgtgttaccacagtattcaaatgtctttttgacctaaacaatgagtaactggagatagatgttggaaatagaggaacaaataaaacactggccttctttcatttgttaataaccacaatgacacctaggttttgtgatccaaggaatagccatctatattagctgattattttatatatatatatacacatatatatacatatatatatagatagatatatagatataatctagaaatacagaagttcatggatatactctgagggaaccaagctttcagactcctactccttgccaggcatggctcagagcaacacatcaatctcttttctgattatttgaggccataggatcctttaggtagtccttttgtcatgaacacaatttacatttaaaatgtttaaaatcataaaacctaggcactgattttgaggcagttgtctatcgcctatgtcttyccctagaagacagcataaaagctaccagtttagggatagtcctttcaatctgatttcctcatatcctcattcatttacccattcatttaatacctagttttgagcatctactatatgctggattctcatcagttttcattgattaaaaaaagcagagcttaataagaaaggaacaatcaagattggagacacttatttcatatattgaaaactatgggcagcagagaatgtattatctgcctccataatctttactgcagaaagaagcagtgttatttcattgatgcatacgcatgtgagcatggaccctgaaactcatgttatttaggcttctcatgttacagcttagtttaggacttagaactcgcatccactaagtcttacagagcatatttttcacctgcctacgtataaaggactagccttccacaagagtataccaactttttttgcagctagttgtatattccttccttgcagctagttggatagctgtagagtcatttgactgggttagcccaaaatataagcatcatttgaagca

SEQ ID NO: 72190 - DNA, 1164 bp, Homo sapiens
ggtaaaatgccttttatgatccttatgctcttgaagatttaagatatctacattctggatacaaagttaacttagagccacgctcccttctttccaggcaagccatcttctggcaaaagatagttttatattttgatattactttccctatttactttgcagaattgttaggagaagcaacaattattatggatcataaaatacttttacagttgaaccgtgtttcactccattgtcagatgagtgaatagaataaagggaaatataaattgcttgtgcatggaaattcatttggttgatggtgaaaataagatctcttaaattcatagaaggcaagtgtattttcctctcctttgtcattcattcatttcagcatagtgctaggcatgccattgactagatcatttcaaatgactaaactgaaatccagtaactttgggttgatagatgtggtaggctaaagaatggccacctaaagatgactgcctgctaggtgccagagcctgtgaagaggtcatgttacgtggcatgatgaattaagattgtagatggaattaaggttgctaattagctgaatttgagatgggaggattatcccggactgttcaagtagtccctatgtaatcacagtggcctttatgaatggaagagtcttcactgatagcctctgaaagcagaagaggaggtcagagtcagagatttgaatatgttatgtttctggctttgaagatagaggaagagggaaaaattaatttttcccctagggtcactaaaaggaacacgtaccaactgccgccccgattttagcccagtgagaccccactttggatttctgactaccataactgagagattgtaagttgtgttgttttaagccagtaactttgtggtaatttgttatagcaagaatagaaaactaacacaaaatgtgtggataattgattaacaaaaagtccttttcctggatccragagaaaatacgagtgaaggggtggacaagagataaatcttcttctttctcagaatctgattactattttaccttcttccacaaagcaagtagcagatgattctttagcaattttttgccttaatttctgaataagatggcatttttataaatcaatgcaaatctacttctgtcttagcaggaaaaatgtatgc

SEQ ID NO: 72191 - DNA, 968 bp, Homo sapiens
tggggctgacaagtaataaataatacctaatatataaataaaaagataaagaatgcgaaatcaatacaaatgtatggtagtatgggaggtattcctacccgatgaggtaatatttgagcagatatctgagtgaattgagggatgtgggcattggagctatttggagaaatgttccccatgacaaaaagcataaataaggggatggatatttrtgggagagagggaaagacagagagagagagaaaaagagagagagagagagagaaactgacatgaagctctttaattttctctgatttgttatttaagataatagaatttccatttagtatgggaagaaaagtctcttattctttttttgttttattttttatttttttttttttgagacagagtttggtcttgttgcccaggctggagtgcagtggcttgatctcggctcactgcaaccttcacctcccgggtttaagcgattctcctgcctcagcctcccgtgtagctgggattaccggcatgtgccatcatgtctgctaattttgtatttttagtagatatggggtctcaccatgttgccgaggctggtctcgaactgctgacctcaggtgacccacacacctcggcctcccaatgtgttgggattgcaggcatgagccaccatgcctggccttattctttagaagtgtatgtaattacttgattttttcccctcccatcctctcctcctcccatgacatagaaacataacaagcattactctgtggtactttagggctggtaggtttaaccaaatgagaagacattggttggtctctgatagagtaggactgtggctagaactaagtctgagtctattcctgaaggggcccaggcaaatgaaaatactgaaatctgccagaggtcatgaacaaagacccaggtagactgaagattcatgttgaattatcacttcagcttcttctgtagagttg

SEQ ID NO: 72192 - DNA, 968 bp, Homo sapiens
tggggctgacaagtaataaataatacctaatatataaataaaaagataaagaatgcgaaatcaatacaaatgtatggtagtatgggaggtattcctacccgatgaggtaatatttgagcagatatctgagtgaattgagggatgtgggcattggagctatttggagaaatgttccccatgacaaaaagcataaataaggggatggatatttatgggagagagggaaagacagagagagagagaaaaagagagagagagagagagaaactgacatgaagctctttaattttctctgatttgttatttaagataatagaatttccatttagtatgggaagaaaagtctcttattctttttttgttttattttttatttttttttttttgagacagagtttggtcttgttgcccaggctggagtgcagtggcttgatctcggctcactgcaaccttcacctcccgggtttaagcgattctcctgcctcagcctcccgwgtagctgggattaccggcatgtgccatcatgtctgctaattttgtatttttagtagatatggggtctcaccatgttgccgaggctggtctcgaactgctgacctcaggtgacccacacacctcggcctcccaatgtgttgggattgcaggcatgagccaccatgcctggccttattctttagaagtgtatgtaattacttgattttttcccctcccatcctctcctcctcccatgacatagaaacataacaagcattactctgtggtactttagggctggtaggtttaaccaaatgagaagacattggttggtctctgatagagtaggactgtggctagaactaagtctgagtctattcctgaaggggcccaggcaaatgaaaatactgaaatctgccagaggtcatgaacaaagacccaggtagactgaagattcatgttgaattatcacttcagcttcttctgtagagttg

SEQ ID NO: 72193 - DNA, 587 bp, Homo sapiens
gcaatttttgtcttgccttcccatccctgctgttttctaacaaggctatatttgccctatcaaaaaagtccaggacccaaaagggctgaagagtctggaaacacatatcataaaccttcacatctgcaaaaaaataaacaagccaagcaacccaaactcacgctaaagtaaaagccaaagccaaaaccacaagccagtacaaccaaacaaatgtaaacttcctttatcactctggacactttatcaattttcctgcttcagcatccagttgttgtaacaatattttttatactatggaagtttttttycttaaaaattaaaaaaaggtacaaattgcaacagatatacagttccctattattgaaacttcaatttatatcaaactgacagttgaaagcaattttttttccatcagcctgcaaaaactcatctaaaatgacctttctgaataattgatgagaagtttttgtgtttgttgcaactttctaagctgtgcacaccacactgtagccagattacttcaatggactttgcaaaacctaatttgtaactcttcctgtcagcttttctataagtggtggcatttg

SEQ ID NO: 72194 - DNA, 608 bp, Homo sapiens
aagccagcatcactgacaatgagcggtgtggtgttactcggtagaatgctcgcaaggtcggctagaaattggtcatgagctttctttgaacattgctctgaaagcgggaacgctttctcataaagagtaacagaacgaccgtgtagtgcgactgaagctcgcaataccataagtcgtttttgctcacgaatatcagaccagtcaacaagtacaatgggcatcgtattgcccgaacagataaagctagcatgccaacggtatacagcgagtcgctctttgtggaggtgacgattacctaacaatcggtcgattcgtttgatgttatgttttgttctcgctttggttggcaggttacggccaagttcggtaagagtgagagttttacagtcaagtaatgcgtggcaagccaacgttaagctgttgagtcgttttaagtgtaattcggggcagaattggtaaagagagtcgtgtaaaatatcgagttcgcacatcttgttgtctgattattgatttttcgcgaaaccatttgatcatatgacaagatgtgtatccaccttaacttaatgatttttaccaaaatcattaggggattcatcagtattawgtgt

SEQ ID NO: 72195 - DNA, 720 bp, Homo sapiens
gtaaagtaccttaaatctgcttaaatgctttatagatatgtcagctctgccaggcaaggtatattttttgttccagtttctccttaactcccactgtgaaaaaattatctctactgttgatgtgtttaattacccgagttaaagggcattaggcagcgatactctgtaatgcttgccataaggaaggccatcttttatcattagcaaactgcttagtggtagagctcacaattgtacatcttacctagcagatattagtagcccacttatcagtttttctaatgagatgaatcatgaggcagagatggggttgggagggggagctaggttaatgttccaacgggactaattagaatcaggtgagagctggagaaagcaaccaaggtgatttcagtcagaacccatatgaaaaactctaattaaaaggagtgatagactttgctttaagacctcgggagaatacatgatgctcaatttaacttttttgacctggtggccagataatgtcaggtctcaacgtattattttttaagtaaaggtagaaaayacttttgtgtgtgtgtggtgcatgaatcatgaggctgtgtaaaaatcaaggactttaaaaagcatactaagcatagaagcagagaaactcacggtttccagggatggggctgatgggaatgagatgttagtcaaagggtacaaacatttagttataagataaataaattctgg

SEQ ID NO: 72196 - DNA, 662 bp, Homo sapiens
ccctggccattggctaactccttgggctttgtgcagggagggcctgactgggcaggtgacgtccccaggccgagcccttggtcaccttgggccatgtccaccctcactgtggactgttcaccgccactgaggcctccagaccttccatctccccagcactgctctgctgggtgacatcaccgcctcctcagccactgctggggtccagaaccacccacatcagcctccataacttgtttcacttgtgccagtctgttctttcatgctcagagtgccccacggggtctggaatagtgccaagcttaggaagtacctgctggtgggtaaaaaatgaggtggtcctaagctccttggctaagcctgaagcagagatctggggttcaggaacaagaccagtaggaagaaaaagactcaacccagtttgctggtgtcttagttcattttctattgctgtaacagracacctgagactgggtaatttagaaagacaagaaatgtatttcttacagttctggaggctgggaagtccaagatcaagggggtcgcatctgatgagggtcttctttctgtgtcataatatggtagaagatggagagagatagagagtatgccagctcagatctctcttcctcttataaagccgccagccccatcatggatcc

SEQ ID NO: 72197 - DNA, 293 bp, Homo sapiens
tttgaaacttggaaacagccaagaattatttactatgatagtgattaarcaagtgatcaaactgggtggtactatttttaattttaaaaaatgactcttaaaaccagtggacttgaatctgtctctaatggttactgggaaaaaggattaccaaaaatgcttaacattggaaaaaataagtgatagctgcttaatgacagctctgaattacaacattgacttagatagatgaattttaacttgtttgtttcctaatacaggggggcataatccaattacatagtgtacatgca

SEQ ID NO: 72198 - DNA, 954 bp, Homo sapiens
taccccctctcccccagtgtgtgacatcagttaaacatggtgaaacacaaaaacagagaacatccagttcttaaaatcagggatacctactaaaagatcaggagtaatgaaatgttctcttaaaatacaagtcagtgggaaactaactctgtcaaattttctggaccatttctaatgtctaaaataggggcattgaagctgggtgtggtggctcatgcctataatcccagcactttgggaggccraggagggtggatcacttgaggtccggagtttgagaccagcctggccaacatggtgaaaccccgtctctactaaaaatacaaaacttagccaggcatagtggcatgtgcctgtaatcccagctacttgggaggttgaggcaagaaaattgcttgaaccagggaggcagaggttgcagtgtgagatcgcgcagagtgagacacagtctcaaaaatcaatcaataaataaattaataaaataaaataaaataggggtgtcaccagcaggctctaaagcagtggttttcaaagtgtggtcttctggacagctgcatatatcaggctccacccagagttatgcaatcagaaattctgggggtggggtccaggtatttttgttttaacagccctctgggtgatttgatgtgtactcatttgagcatcacagccctaatggagaggaatggaagcaactcacaaacatgcctgtggcaatccttggggacccaaccctcccgtttcacacccacttctgtctctccatcctccctcctcacacttatagattgtctttctcttcttcaaaactgatcacaagccagtttggagcatcaatttctgcatcaagtttttttggatacaagtggatttgttaagagttgtgggcacgtcaggtgtctctgctattttctttccaagcccatggctttatggcactgttctgcctgtgtc

SEQ ID NO: 72199 - DNA, 546 bp, Homo sapiens
cgagggttccatgctttgcccatgcatagagtagatacaagtgaggttgctcttaggaaatgaggaagggggtcccagaaccctacctgttctgccacaycctcctcccacctcatacatcattcttgaatctttggggtccaaacaacacagttcaaagaccactcatctagtcaaaaacctcattttacagatgagaaaacagaggctcagagagggtatgtcagttgtcgagggccacacagcaagttggcaatgaggttagaactggaaccctccctcctggctctctggtcaccaagcctaactgcataatacaatacctccgggtattgaaaagatgagctagttttcctcctctgggcaaccttggtggaaaggaatatccttcaagttgtgtcaacattatttgctcactctaggggctctgactacatagctgatttttttttaagatctttagctgaatcggtctgaccttgttagaacccttactggaatcttttcccagtgtcctattcaccagtatttcttttcattgagcta

SEQ ID NO: 72200 - DNA, 554 bp, Homo sapiens
  misc_feature (1)...(554): n = A,T,C or G
gnnnnnnnnnnnnnnnnnnnnnnnnnnnnnnnnnnnnnnnnnnnnnnnnnnnnnnnnnnnnnnnnnnnnnnnnnnnnnnnnnnnnnnnnnnnnnnnnnnnnttactgggattacaagcatgagccaccatgcccagccttacaaattatcattgttaaagagctgatacataccacaaataccacagaatccagacaaacatcataggttaattaattaaccatcgggtactcttctctngatccncttttctcctacatttttaagctgcatactctgatagcctgttcagaagacagtactgttacatcattttctgtacagagagtagaargataattcagtcgttcttccagcatgggtggaacaaaaactttccaggatttcgcttgaaattttaaaagcaattatatgaaagaattttacagtgaacacatgtatacctaccacttagagtctaccattaacattttgctgtactttatcatctgtttttttatccatccatctatgcgtgcatccatccatccattcattcattcatctgtccatca

SEQ ID NO: 72201 - DNA, 1854 bp, Homo sapiens
atcaccaccaccattatcatcatcatcaccagaggaaggattgctcttcatttctctcttcccaaatgcttctggtcctcttgacaaatttgccctgtcctccccatgtccttctagtacccttgccaggtcaaggatatcagaaggggcagcacctgccaggtcacaggggtcccattatttcccccagaggatattgggcgcctgtgagcctgaaacctgcccacctaggactttggggaagaggctaagtggttcttccctataagtctttttgtgtctacctggccagagtaacaaactcagattctcttacagaaacatcctaagaaacaacttaccaggcactctggtatgaaagtagtgcccgttcgttattgctgatttaagaaatataggtaaacaataagagaataaacaatgagagaaaattaagccactcgttcactctttattctaccatgtggaggcagccagtgtcaacttttgttatgtatgatttcaatctcttttccatttacctacacacacacacacacacacacacacacacacacacacacacacatgactgcattatttgtattgtattgtaatgttttttccacttaatatattatttttgaatttattaaagatatctattgaagacaggacatgcctgtcttcaggcatgtctaataaaagctattagacatttatattatgtttgtccatgcagagattatccctggaagaataaaaaaagaacctccagggaaggaaactacatagatgagagtcaggggcaagacagaggcttactttccagagcatgctttaagaatcttgtaccatgcatgtatctatcacctttatagaataataaattttggccaagtgtggtggcacacgcctataatcccagcactgtgggaggtcaaggcaggtggatcacctgaggtcaggaatttgagaccagcctggccaacagagtgaaaccccgtctctactaaaaatacaaaattagctgggcatggtggtgcatgcctggaatcccagctatttgggaggctgaggcaggagaatcacttgaacctgggaggcagaggttgcagtgagtccaggttgcaccactgcactccagcctgggcaacaggagcgaaactctgtcttaaaaaaaaaaaagaataataaatgtttattaaaagaataaccccacagacatttcagctgtggtttaatatgtttgcgatagtgtttgtagacgaacagtactctatggtagtagttgtagggaccataatcttttttatgttaattctttttaaaatattgtattatgagtgattttgaacataaacagaagtaggtaggatagcataagtcaggattggcaaattctttctgtaaggggccagatacgaaatatttcaggctttgtgggccagatggtttctgttgcaacaattccactctattgtagcgcaaaaccagccagagaaaatctgcaaacaaataggcatggctgtattctgatacaactttatttacgaaaacaggcagagggctagatctagccattcagccatggtttgccgacctctggtataaataagcctctacgtacccagaccccagccccaactaccatcaacccaaggccagtgctgcccatcaaccaccccgcaaattacccggaagaaaacttcagacatcatatcattttatttatttatttatttatttaattttttttttgatggagtcttgctctgtcacccaggctggagtgcagtggcatgatctcagctcactgcaacctctgcctcctgagttcaagctaktcttctgcctcatcctcccaagtaactg

SEQ ID NO: 72202 - DNA, 1174 bp, Homo sapiens
tgtgtagagaagagagaaagatgtttccaggtagggacagtagaatgaacaaaaacgtggcaccaaaaagggaaatgcgaggtatgtttcaagaagagtgacagggagcccagtgtgttggcatatgcctgtaatgcagctactcaggaggctgaggtgggaggattgcttgaatccagcagtttgaggctgcagtgagctgtggtgatgccattgcagtccagcctgggcaacagagcaaggccctgtctcaaaaacaaacaaacaaacaaacaaacacaaacaaaaagagtgacaaggataaaagagtgacaaggataaaagagtgattgatgctgttattggagtctagtatgccaggttgaatttggattttattttataaatagggaaacatctaagcattctgaacaagggagaggcacaatcatggctctcttttggsggaaactaaatttatactaacgttaaataaatcggagagggtgtcagagttcagagcagaagaaaacaagactccgaaattagatgcactgtccagcgtatagtaagtaattgggggtatattcagataatgaaaagaaacctagacaaaaataaaagcaaagggaagaggcctgcatttgctggggtaaatgaggctctgcagcaaatgaaagactcaaatgtataatggcttaatacaagagagtgtctcacctatgtcatagaccaagactattccaggtggttggctgggtagtcaggccctttctcacatagctattcagtgacccatgctgaggatcactctgacatctcaccaagaggattccaaaagcctgacttcccaattgaccagtaagacaaaaaatcatggaggaatgtatgtgggaggatttaatggaacaagtctggaatttctgctctgtttcactgttcagaatttggccacacctaattgcaagagagactggggaaataaagtctaactatgtgtccaggaaaaggagaaataattattttgaggactggctagcagtcttggccacaaagaccaaggagagaaacgtagttaatgctaacatctgtggattgggaggaagaagggaaactagagagtaatagcaacaataataaatataatgaacatctattaacttcttgttttatgcggaacattgggctttatgca

SEQ ID NO: 72203 - DNA, 657 bp, Homo sapiens
cttttaagacaaaatatgaagatattttatttgctcaaatcttgttacacagttttccactgtgatattcacatgctgacagagaggctatttgcatggtgtttgtcaccagcaatgaacagcagyatttgagttatgtagtggctctgccagttaccagtggggcaacttgggcaagacactaagcacctctgaacctcatttgttttatcagtaaaatgaagatagctatacatacttcacaggctgtggtgatgatatattctaatgaatatacagtcttaaataaaaacattcaataaattctagctactcatttatattaatttattatacccatttgctttgagttatcttctttgcaataagctgtgggaaaaacttactgttccttctcatactccaggatacatcatcacccaaatcattacacattcttatataacgcaaacattaagaaagaacaataatcttactaaaaagcagagtgtggtatggtagagagattaagaggctttggaatagttacatcagggatcaattagtgagctgtgtgactttaggcaaattaataaactgaatttctttaaattttgttaaataggtataataacattatatataagaaagcaggaaaaatatgaacagctcctatta

SEQ ID NO: 72204 - DNA, 1385 bp, Homo sapiens
ggtatctctaagcttgtgcatattcaagttaatttatttcttccacaaatagtgcattttacagttaacaaagcactttaactaacatttcctcacctgattctcagatgagaatgatgacgatcatgactgatgatgactgatgatgatatccctatgttacagatggggacagtaaggggcaagatgaaggttaaccatcatggcaaaagtcctcgtatcaactatgcctatcacaagggcttctgatcctgaatgcaagaattttacatgaagttctctcctgccttggagaataccattataaatcccactattagttttttaattatttaaaacaatcaccttcaaatgacttttatgctctctcctatgatgattttaatttagaccaaaagtgtctgcaacttcctaatgtcaaagttaggctttagaacatttgtttttgttttactttaaacttaaggttgaaatagaatgtaagagtagaacgtgaaaattcagggcagaatcaagatctgagagcattccactttgcataagcaagagtacaagctcgtatttggagaaaaaaaaaggtccttaagagatttaactgttaaaagctaattttcttgagttttctttagccagaatgtattccccaagaatgaaagtgayggatggtacttctcaaggtacaaaaacaccaatgtcccagagttaagtgtctattctaattgctgctgcactccaaacagtccttcaggttgctcatctgtgttatttttacttgctaaagcagaggtgtctgggtgatgaattatacaaggtgctccactcggcaccactggtgtattataataaatattgccatggaaagacaaagtaaggaaatggtgaacattttcataatgtgtaatgtaggtttctttcttgcttttttttaaaaaaaaacccagagcagtagtattaaattgtaatctaattataaacggtcaaacaggtgaatttggcaaaactgtttcaaggcttcaatcacaaatgtatgtccattctgctcttcaaaatacacctgagaataacccccacacaaaagcataattgaagaagtggaaatatccatttgctaaaaggacagtaatgcagtggagccctagcatcttagtgatgaaagaagaaatgcattataatcaaacctcaatttccatttttctgcaatctttgatattgctgcatttaaaaagatactagtgcatttccccaattctcaatgaagacaaaatgacagaggactgtaatctggcttcaatttgttatggttttctgcatcagtaaggacactgcagaaaagactgtaaagagacagaattaagggtttcaagtaattatttatcccatcttaa

SEQ ID NO: 72205 - DNA, 2152 bp, Homo sapiens
ttctgccaatcttagcaagaacatgaacctcaaaattccttctcatgaacttgatatttgacaaaaaaaaaaaaaaaaaaaagaaagaaaaaaaggagtctctcaagaagcatattctagtgttaggattcaaagacctcctttccttttcaggaaaggtagaggaaaaactgttgtacattcacagagttcttgacattatgggagacatagtcagtatatggtctctgtcaaaaagcaaacacagactgtctccccctgcaagatttgggcagtcctaatgtatcacaaaattgccttcatcctcattgcttagaagaagtctgattctacttctggtctgatatattatgctggaagaaacttacttacttactaaaataatctggggatgcttcagttagatcagggggtgcaacaaaggtggagtggagaaatctgccgctttgtatccagaaatgctcatgtgtcagggaaacagaatcaatgaggtttcataaaccacatgggggaaatgtgatgttaaaatatgaaatagtattttcaagacaatatgaagtacttgaagtaatatttcttaaatatatatgttatatataaatgtgtgtgtatatatatatatgtatatatatatgtatatatatatatatayatatatatatatacatatatatatatatatgaagaaagagaattcagagtgaaatttatcatcagtcttttccttggcttttaaaaaccatatatataacaatgagtaatgaatagacagactgaaaaaaaatcagcataatacaatccttgtatatatttgtaatataactcgttagactagaaaatcaaattttaggctgtcagctttcattgtcttgaaaggagtacttgttttagtgcagacactatttctctaaatatatcatatgtgtgtgccctcttcatgtctcttttacttaagaaatcacatttcttactaaaccaagacaatatgtttctttaaaaggattctctcttcaaagttttgtaagttttcacaaggaaacaaaatttaaatatatccactcaatacaaggtatcaaacattttaaaaataatgccacagtgaaaacaacaaaaaggaggtaagttggagatgcaaataaaaagttaagtctctcaataatgcatgcttgtatccacatactcaaatcacatacacaaatatacacactgacacacagttttctatacttatggatatctgattgataaaatagaaaaaatggctgggcacggtggctcatgcctgtcatcccagcactttggaaggccaaggtgggtagatcacccgagatcaggagatagatagagacaagcctggccaacatggtgaaaccctgtctctactaaaaatacgaaaattagttgggtgtggtggtgggtgccagtaatacttcggaggctgtggccggagaatcacttgaacctggcaggtggaggttgcagtgagccgagatcgcaccattgcactccagcctgggcaacagcaagactccgtctcaaaaaatataaaataaaataaaataaaataaataaaaaataaattttgcataggaaataaaacaagtttttggagcagataactttaccatcttcacttccagcataaatattgactgcacagaaaatcataataatgttacatttcttactactaaggcagatttgataaagatatagacatatgtgtttacaatttcaaataatattttggaattattgttcattttctctcattttatcagtttctgttagaaatatagacaccattagtaatcccagaaaaagagaaataagaaaaaaagagggaaagaaaaggaaaaaggacaggaaagaagggaaaaggaaagcaacagtaaaaggaaaacaacagtaaaaggaaaggaaagaaggagaaaggaaagaaggaaaaagggaaggaaaggagggaagaggggaggacaggggaggagaggggaggggaggaaggaaaggaaaaaagaggagggaaggaaggaaggaagaccttttttaacagaatgcaatcttatatactctgatttataaattgtaaaacttaggaaaaccctcattatatacttggtcttctgtggccttttgaattcgtaagttaggt

SEQ ID NO: 72206 - DNA, 818 bp, Homo sapiens
acagagtcaacaatggacatttgtagccagtatgtcaattgctcggagcacagttggtgtagcagcattgaatggcaagtaagtaaatttttttcttattttttaatcttagaaaaaaagttattgggtaaatattatttgaaaaataagttttaataagctggtaaaaaytgttttaaaacattttaagctgttgatatttttaaattgacaaataaagactggtgctctctctatagacaacggaacccaaaattgcttcacattaattgatgattaaagaagtatcaaatacatttcatgggaatatttatatcacttttgaataaatagttgagtagccttcaaaaaactactaaaagtttggtgttcaatatatctttctttacataattacactagtttactttccaagcatcttcattcctatccctctaaatcaagaattctcaacctcaacactattgatatttgaggctagatgagtctttgttgaaagaagtcttctgtcctgtgcatttcagagtgtttagaagtgtcctgggtttctacccactagatgcccctcacccaccacctcattgtgacacgcaaaaatatctccagatattgtctactatcccctgggaagtggcaaaatacagcccctgtcttccccatgagaaccacagatctaaacaaagctagtatcacctcttgtctagaaaactgcaacagcttctagtctgatcttttaaattattttctcttcagtcttatttatgaaggcttccagagaaatccttttacaaatgcaaacaatatgtcaatcctcttca

SEQ ID NO: 72207 - DNA, 818 bp, Homo sapiens
acagagtcaacaatggacatttgtagccagtatgtcaattgctcggagcacagttggtgtagcagcattgaatggcaagtaagtaaatttttttcttattttttaatcttagaaaaaaagttattgggtaaatattatttgaaaaataagttttaataagctggtaaaaattgttttaaaacattttaagctgttgatatttttaaattgacaaataaagactggtgctctctctatagacaacggaacccaaaattgcttcacattaattgatgattaaagaagtatcaaatacatttcatgggaatatttatatcayttttgaataaatagttgagtagccttcaaaaaactactaaaagtttggtgttcaatatatctttctttacataattacactagtttactttccaagcatcttcattcctatccctctaaatcaagaattctcaacctcaacactattgatatttgaggctagatgagtctttgttgaaagaagtcttctgtcctgtgcatttcagagtgtttagaagtgtcctgggtttctacccactagatgcccctcacccaccacctcattgtgacacgcaaaaatatctccagatattgtctactatcccctgggaagtggcaaaatacagcccctgtcttccccatgagaaccacagatctaaacaaagctagtatcacctcttgtctagaaaactgcaacagcttctagtctgatcttttaaattattttctcttcagtcttatttatgaaggcttccagagaaatccttttacaaatgcaaacaatatgtcaatcctcttca

SEQ ID NO: 72208 - DNA, 659 bp, Homo sapiens
caaaagagtgcctccttgcttgtctcccccagccctgaccacagtatgacacaattaaaatgttaactgatagatcattaaagacaccttttgatcttatatcagtttgtaatttttgttgtgtaactcagaagaggttcaaaggaatgactaccattgctcaatttctatctttaggaatagacttcttctggcatatatgtatatccattttatgcygactttccatatgtgtgtgtgtgtgtgtgtgtgtgtgtgtgtgtgtgtgtgtacttcatataaattgagttatatattatatatataatttatgtatataaattgaaaagtaggcataaaatgaatgctcaatcctttcttattctagtaataaatcataatcatccaaagaaaaagacatacttttatgtaattgtttgtattagtttcttatagctgctgtaacaaattactgcaagcttctttgcttaaaacagcagaaactcaacatcttacagttctgcaggttaggggtctatatgagtcttacaaggctaaaatccaggtatctgcaaggctgtgttccttctgaatgccccagaggtgaatccctttccttgccttttccagctcccagaggtcacctgcattccttggctcatctcagtcttcaaagtgca

SEQ ID NO: 72209 - DNA, 903 bp, Homo sapiens
tgcatctcattcaccttaccctggtctcagtcctaatcacctgacctttctaagtcccactgtaaacctaggaggttatatctcacagtatctcatagtttaaaacatctctaatgcacaatcacctgggaaactgaagaatttgagaaaaggaatacttattgcatatacttatggtccttttcaaaagcaaccatcctccactttgatcaatgggttctggcttcatgaactgacttcaatctaaaatcaagaaaccctacattttttgtattgtcacagctgatctaagtcttttgcttccgcttcctcttcctctccctctgcctctccctatacatagtgattagtaccctccttggctgcccctagatctcggttctataagcaccataaattaggtattttctgcagtttcaggatatgagtcttctttaaatctgacatagagactctagctttgaaagcatgccttaaattgcaattgactgctagaatctacattctccagttycgttctcctgttctatactgctgtaaaaataagacgtcttcctcctaaattcttataattgtcattgcccttatactgactaaatatcttagctacttgatcccccaatgcctgctgtcccagactaatttaggatcaagaagtaaaatagtcatcatggggatatatattgacaagtttatctgaattaaaaattaagtaattaaaaaagttaaaagtagatacataatgacattctttctcacataaaatatgtcttatttgcctaattgcttttgctaattaatttatatgcaggcatttcccatgaaccaaatgttcagctccaacattttccaaaatatatttcaagcacaagaaaacataaaagctcttaatccaaaatgtaa

SEQ ID NO: 72210 - DNA, 645 bp, Homo sapiens
caacgcaaaagccactataattcagaaaaattgattgtagctttttagtaatatcatgacagaatgaatgaatgattttaatttggtataggtataaatgtattttagccacccaaattattctaatgcaattccttaggaattattcttgtcagtatgctttctaaatgtctcgacatctacaatttgaagggttattcaagaacaatttgatagttttcccacttccttcctcaaccctcaaacatttccattgtatctcaaaattgtaagagctagtatcagtggtttagtttaaaactataaactatagtggtaatatagccttttagttgtgaggacagcaaatgatggccaagaggaggaaagtctccttgagtgcaatattcaaagtacaatgcaaggtctcaccacaagtaactaacccagtataaatggttttgatggtcaagaccgtaacccaacctttctctgtgtaatggtatagaagtaagtatgtgttataaaacaattatgtacattggtttttatttccttacattgattgtttcaagttgcatttgactttctcggtgctatagaacaagatggarcacattgcacagaattaacgagattatctttgtaatcaggaaccttaaattt

SEQ ID NO: 72211 - DNA, 1793 bp, Homo sapiens
gcataatttactctcctcgaaacagtgaaggaaaaaaaaccacacaagccaaatctcaaactcaagtttgtctcagtagttgcttgtatgcagaagtggttttttgttgctgcagtggaattgaattttaggaatagagatgagatttgaatgttaattaagtcattgcagcttgctaccagattttgctagaagctcccataccatggttctttactcatcaacctgctttctgtagctactctggtaaatgagggtaaaactggctgactacaaggtccttctttctatgatcttcaaatttcaacatacctaagaatcaccagaaatgtacaagtgcagattcctgggccttttccccagtagacctggatgaagccccatagtctattttgttttgttttttatttctgtttctcttttttttttttaaaaaaaatcaacatttaggatatcaatattactctataccaataagctcacacaccaagaactgaatccctgatttgatctttggtttttcaaaattctcaagtttgtmaatatattagatttgcttcttctgttagagtaatcagtgtttttcaaagtttggtcaaaggaccactgcattagaatttcctatgggacagtgtaaaaattcagattcctgggtttcacttgaaacctactgtatccaaaattatacaggagaatatatattttaacaaactattaattcttatgcatactaaaatttaaagaccactgctttggagcaagtaatatttgatataggtgtaacagtaaatggaagagtctcttttgtatcctccctgcagtcatagttttgcctagaaggcaaagatgtattatgtctaaccctgcctagctcagtaatctcttaaagaatgaatttaggccaagattgaagatagggctggaatggtcttccctccagaccactttggcctccaactccttttggtttattttctaacgaactctgaaaagttgctaccatcttgttgagggctgctctcaagttgcctccaggacatcaggaaataaataattaaggggcagtcccctgagctactgctgctgtggtgtagcggtgggacatgccggtgacgttgcaatgactgatggcagaaattgatgtgccagacagaccctaatcaaatcctgacaccctcccaagcccaggaagagatgataaccttttctatttcagcaaaaaggtaggccaagaggcagaagagaagtcttcaggatagagaatgacagagcagtgcagcagccaggtaaccgaggaaaagggcagcctgcatgctacagcgcatatcacccaaagcaaaggctctaccagaatcactggacagcatatgtatttaagctttgcacaatcatgtagccagagatagagaataatctgataatcgtaacgagaattctaattataagatgttatcatttcatcccagactgcatcaggcaagggtgagctcgatgggaaaagagacccttgaaacatgaggggagagaactttgtaaacgaccagaacagacgcctctcccttatcatactggataaattatcactcatttcaccgtgagaaagaagtagaaattgatttgagagactcctcaatatccttcataatcccggcagtaatttcttttgctcattactattaatatatattgttttctccttccctagtggagattcaggtcatttgcaataaaccctgcagttatcttcaacatgttcccaaagaaagaaactccaggtatcaatgcatatagga

SEQ ID NO: 72212 - DNA, 687 bp, Homo sapiens
acacaagccaaatctcaaactcaagtttgtctcagtagttgcttgtatgcagaagtggttttttgttgctgcagtggaattgaattttaggaatagagatgagatttgaatgttaattaagtcattgcagcttgctaccagattttgctagaagctcccataccatggttctttactcatcaacctgctttctgtagctactctggtaaatgagggtaaaactggctgactacaaggtccttctttctatgatcttcaaatttcaacatacctaagaatcaccagaaatgtacaagtgcagattcctgggccttttccccagtagacctggatgaagccccatagtctattttgttttgttttttatttctgtttctcttttttttttttwtaaaaaatcaacatttaggatatcaatattactctataccaataagctcacacaccaagaactgaatccctgatttgatctttggtttttcaaaattctcaagtttgtaaatatattagatttgcttcttctgttagagtaatcagtgtttttcaaagtttggtcaaaggaccactgcattagaatttcctatgggacagtgtaaaaattcagattcctgggtttcacttgaaacctactgtatccaaaattatacaggagaatatatattttaacaaactattaattcttatgca

SEQ ID NO: 72213 - DNA, 687 bp, Homo sapiens
acacaagccaaatctcaaactcaagtttgtctcagtagttgcttgtatgcagaagtggttttttgttgctgcagtggaattgaattttaggaatagagatgagatttgaatgttaattaagtcattgcagcttgctaccagattttgctagaagctcccataccatggttctttactcatcaacctgctttctgtagctactctggtaaatgagggtaaaactggctgactacaaggtccttctttctatgatcttcaaatttcaacatacctaagaatcaccagaaatgtacaagtgcagattcctgggccttttccccagtagacctggatgaagccccatagtctattttgttttgttttttatttctgtttctctttttttttttttwaaaaaatcaacatttaggatatcaatattactctataccaataagctcacacaccaagaactgaatccctgatttgatctttggtttttcaaaattctcaagtttgtaaatatattagatttgcttcttctgttagagtaatcagtgtttttcaaagtttggtcaaaggaccactgcattagaatttcctatgggacagtgtaaaaattcagattcctgggtttcacttgaaacctactgtatccaaaattatacaggagaatatatattttaacaaactattaattcttatgca

SEQ ID NO: 72214 - DNA, 685 bp, Homo sapiens
ctgctctataagtaaatagataatctgaagcttagtggtgaagagacttaccagataaattagagctactacatatctaaatctaggtaacttgattcaagtcttatactttccaatggcaggccatttaagatgatgcttacactgcaattactggagattccatgtataaacctaccaggtcctatgcttggtgaactgaattctaaaggcaaaaaaggtttaggataaatattctgaatgccaattagcccaaagcaatgaaaaagcaarcaaggcccttactctaactcttttttatgtctaagtgatataattattcccttacacacccttctactctgtcacacacacaattaggaccttgtatctaatagccagttccaaagagactgttccatgcactgtagcactttgtatcagtgcactgattactacagttctgtccttgggcaatacgggtttcatatgcacatatatattttttcttagtattactgaacagcttattacaccattaatctcccccaatggtatgttcatataactcatgttttccacttgtttatgactacatacataattggagactttgccccaaattgctgagtttaggacacacaaattctatagcactggctgactctgacttcaggtggctaatggatgaccaccggtgacacag

SEQ ID NO: 72215 - DNA, 1313 bp, Homo sapiens
tgcattggctccccatttctttcagaggaaaatccaaagttcttttaatgccacaaacccctagctgtttcttggttctacggtccctccctgaattcacttcctatatccctcaccccacaatgaccttctggctgttccttgaacattccagacatagacccaagccagcgccttggatctagctgctccttacacctcaaatgcgtctcctccagaccccttcaaggtctactccctcccctttcagtctttgctcaagtctcatcatctcattaagaacgacaacaccacataaaattgcagaccttccccaacactcctcagaccttctccaacacttctcacttattctgtctttcccaaaggatttagtccttttcgaacacacgtcataacggaaatacgtattgtgcttattgttcaatgtccactcctaatagaaggtaagctctccctaggcacataattgtagctgttktcttcatccaagacactaacaacagtgacaggcacacggcagaggctaaaatatttgttgaaataattgaagaaaaatgttttaagaaacacagcattttgaaagtactgtttttggtcatgtagatttgatttgatttgtgtttctaaattatgatcacattattattattacgactattagtattagtattattttacctatttggctcttacaaaaatccaaaaagaaaaaaaagaaaatgaaaaagaaagtgtcgtgaaatttctagaaggcagaggttttactggctcagaatataactgtgcttagaactactgaatggaattcaaaaattgagtttgctcatcagaacataaaaataaaataggagccatctttttaatataggtgagtccttataactcttttttaatactctataaaattatcatcctttcagttccaggtctaggagatttttcccttttaaaattcttccgcaaaaaaaaaagtcacaaatctaataggacaggaactcttaaaaccacagatatgattaaggctcagttccctaataaatgtgcaatgaaacacttgtcagcccttgaaataatgagctgtgatctatgataaatgtgccaataacacattttccagggcagcatatttcagatgggtaggaaatagttgaatcacagcaggatcttatttttacacaaattacttctaaactccaaacatatctaaaattaatttctttcatcacattaacactgggctgttaatcaccggaatgtgtgctcatatttgacagacataaaaactgatttacatttggaagaggaggagg

SEQ ID NO: 72216 - DNA, 989 bp, Homo sapiens
tcatcaaaccccaatgtctcatttgcacctggaaaatcatagcaaactggttttaatgtccctgtttccaatatcatcagrgcctgcatacttgttgtagtttactttttttcctacactcaagtttaaccgcatcaaaaatatagatcttgcttctaaaggtaatcttgaaactagacaggctttctctaaagtataatttcaggggcttggagctacttacttcctctccctcctgaactgattctctttctgctgtctatggtgccacaactagaaatacatttctccaggtttaaagctgaaccctcataactttccaagtagccttctagcaaaaaacaaacaaagaaacaaacaaacaaaaaactagagttttcttttttttaatatatttaagttggcttttagaaactggatggcagagtgttttatttggcaaacatagtacatttttaaaaatgaagttattatccacatttacacgttaggtttcaaacaaaaacttagatttccagtttctcataaaaaacagttgacgttgcaaccagaaattgcagcaaattcctctcacactcctgagtctttctaaaaggggctactttggagggaaataataatattttagacagttgaaagggaactatgtcactagatacaagaccatgtcagcctctcttaggagaaaatcacctttcttgtttcaggccttctgcccatctgcaaaaacactactgcttgtcttctttaataaatggaagcaatttaaagaaaacaatctataaaatgctacataagaccacattaaaactacaagtaaaaattgacatccaacaaaaccctgctttcaaatacaatttcttagaaagaaccttgattctgctgtatccaccacatctcgagtctatctccagggaaagtacaatagcgttaaaggtaacgggtagagactgttgccaagtcaatgaagcaaagactttctctctaga

SEQ ID NO: 72217 - DNA, 597 bp, Homo sapiens
tggatcctcacaggcaccctgggagaaaggctgggcaaatgtcattctctggatcaggaaaaagaaactgaggcaagctagtgccgtgactggcatcacacagccatattaagaagcagagcccaggcatcaccaagggttttctggcccttccacctctgccctttcctttccatacagttcagcagctgggaattccaaggctccacggctttccctctcctctcttgtcttgatggaaactcagtcactgccaagtactgcctatggggcatttgcacatggggcttttccctatggctgttttctcaaagtctctatcttatctcttaaggtgcttcttttatctstcacaacacctaaaacagtgctgggcacacagtaggtatcagtgggcttgtgggctcattgatgggtagaccagtgcagaagcagtgtcactagggaaaggataggctagaaaaggattttgggtatgatcatcactacctcaattcatagacacttgctttggaagtctttaagaaacaggactagctcctgtcatctcctcacttatgtccttaccctgcctacagacatcttcctactgtctat

SEQ ID NO: 72218 - DNA, 1265 bp, Homo sapiens
caggagtccttggccaagatgcaacatgattcactaaggacaattcttaaaggatgcaagcctaggccccactcccatggttccttttgataggacccaaggcatctgcactttacagaagtgtctcagtgattccagtgtgttaccagcgtcaccatacacgactgaacagtactaggcagcctcatggccctctctagttagaaccactggttttgacccagcaaggcaagtagcttctatgcagaaacgtatttgtataggatggataagggtatgatgaccctttaccagcaatgggaatagtcattgtcatttctatctaagggcatggagagggtggtaaggagagcttgggggcgggtatgtgcaggccacaccacccaggaacaactcaaaatattaacctgtggcatatcaaccagtcagcagggttctgcccaggattgacggacccagagaatctgagactcttgaactctttagaggagtgtcagattttcttttctctcttttttttcccgtaagtacaagcctcaaaatataatctaccaaaatttaggaggaatgatcaagaagacatactgcttattatcaataaccagctaaactcttcagccaactagacaaattggtgattaagaatgtggatgctgggccaggtgcggtggctcatgcctgtaatcccagcacttttggaggccaaggcgggcagatcatgaggtcaggagatcgagaccatcctggttaacacggtgaaaccccgtctctactaaaaataccaaaaaaaaattagccaggcgtggtggcaggtgcctgtagtcccagctactcaggaggctgaggcaggrgaatggcatgagcccaggaagcagagcttgcagtgagctgagatcgcgccactgcactccagcccaggcgacaaagcgagactccatctcaaaaaagaaagaaagaaagaaagaaggagtgtggatgctggtgccagactgcctggttcaaatcccagcacaaccatttactgtgttatcttgcacaagttaatctctctcagcctcagtttccctatttataaaaaagagataaaagtagtacctccctcagaaggttgttgttgtgaagagtcacttagataatatgtacaaagtgcttagaacagtgcctggcccagagtactgaaaacaatgttaattattgttattactgggggcacagttctcaaaatttctgtcagttattctcaggtatcaagccctgaaaaatca

SEQ ID NO: 72219 - DNA, 725 bp, Homo sapiens
cacagttttattacagtgactataataagcatgaagacatattagaataaaattccatgggggaagtgggatggaaatgcagatccaaagagaaataagaacaatataaaagttctgatggccaaagaagacctggttggcataatttttaaacaagtgatggtggctaacacattgttatagtatgtatgtttcactggacacattaaggagtattattacaattttataactgtcaaattttcagtatgccagagattgtactttttgtgattactgtttaaattcctgatttaaaaaagtgtagttgtcaatgtgcycacactgcctcagcctcggcttagccctcccctcgctggaatactcttcccctcctggccaggacagtgtgtgcatggaggccctggaactggtgtggcccagccatgtacagaacccaggatggggcatgtggtaggggtaggggcacccaggacttaatgtctgcatcacagctttgccagagctgtcctgaccacaccattctccaacagccaagcagagggaagtttcataccttccttcagggattatgtcctccatgtgagctgaggacagcaacaggtggcatccctgttgggacaaagagtctccaggactttcaggctacagacccttgcaatgtcctctaccttaaccggtgatgcttggattcctacaagaaagtgtactaaggggcctgggct

SEQ ID NO: 72220 - DNA, 725 bp, Homo sapiens
cacagttttattacagtgactataataagcatgaagacatattagaataaaattccatgggggaagtgggatggaaatgcagatccaaagagaaataagaacaatataaaagttctgatggccaaagaagacctggttggcataatttttaaacaagtgatggtggctaacacattgttatagtatgtatgtttcactggacacattaaggagtattattacaattttataactgtcaaattttcagtatgccagagattgtactttttgtgattactgtttaaattcctgatttaaaaaagtgtagttgtcaatgtgctcacactgcctcagcctcggcttagccctcccctcgctggaatactcttcccctcctggccaggacagtgtgtgcatggaggccctggaactggtgtggcccagmcatgtacagaacccaggatggggcatgtggtaggggtaggggcacccaggacttaatgtctgcatcacagctttgccagagctgtcctgaccacaccattctccaacagccaagcagagggaagtttcataccttccttcagggattatgtcctccatgtgagctgaggacagcaacaggtggcatccctgttgggacaaagagtctccaggactttcaggctacagacccttgcaatgtcctctaccttaaccggtgatgcttggattcctacaagaaagtgtactaaggggcctgggct

SEQ ID NO: 72221 - DNA, 725 bp, Homo sapiens
cacagttttattacagtgactataataagcatgaagacatattagaataaaattccatgggggaagtgggatggaaatgcagatccaaagagaaataagaacaatataaaagttctgatggccaaagaagacctggttggcataatttttaaacaagtgatggtggctaacacattgttatagtatgtatgtttcactggacacattaaggagtattattacaattttataactgtcaaattttcagtatgccagagattgtactttttgtgattactgtttaaattcctgatttaaaaaagtgtagttgtcaatgtgctcacactgcctcagcctcggcttagccctcccctcgctggaatactcttcccctcctggccaggacagtgtgtgcatggaggccctggaactggtgtggcccagccatgtacagaacccaggatggggcatgtggtaggggtaggrgcacccaggacttaatgtctgcatcacagctttgccagagctgtcctgaccacaccattctccaacagccaagcagagggaagtttcataccttccttcagggattatgtcctccatgtgagctgaggacagcaacaggtggcatccctgttgggacaaagagtctccaggactttcaggctacagacccttgcaatgtcctctaccttaaccggtgatgcttggattcctacaagaaagtgtactaaggggcctgggct

SEQ ID NO: 72222 - DNA, 725 bp, Homo sapiens
cacagttttattacagtgactataataagcatgaagacatattagaataaaattccatgggggaagtgggatggaaatgcagatccaaagagaaataagaacaatataaaagttctgatggccaaagaagacctggttggcataatttttaaacaagtgatggtggctaacacattgttatagtatgtatgtttcactggacacattaaggagtattattacaattttataactgtcaaattttcagtatgccagagattgtactttttgtgattactgtttaaattcctgatttaaaaaagtgtagttgtcaatgtgctcacactgcctcagcctcggcttagccctcccctcgctggaatactcttcccctcctggccaggacagtgtgtgcatggaggccctggaactggtgtggcccagccatgtacagaacccaggatggggcatgtggtaggggtaggggcacccrggacttaatgtctgcatcacagctttgccagagctgtcctgaccacaccattctccaacagccaagcagagggaagtttcataccttccttcagggattatgtcctccatgtgagctgaggacagcaacaggtggcatccctgttgggacaaagagtctccaggactttcaggctacagacccttgcaatgtcctctaccttaaccggtgatgcttggattcctacaagaaagtgtactaaggggcctgggct

SEQ ID NO: 72223 - DNA, 725 bp, Homo sapiens
cacagttttattacagtgactataataagcatgaagacatattagaataaaattccatgggggaagtgggatggaaatgcagatccaaagagaaataagaacaatataaaagttctgatggccaaagaagacctggttggcataatttttaaacaagtgatggtggctaacacattgttatagtatgtatgtttcactggacacattaaggagtattattacaattttataactgtcaaattttcagtatgccagagattgtactttttgtgattactgtttaaattcctgatttaaaaaagtgtagttgtcaatgtgctcacactgcctcagcctcggcttagccctcccctcgctggaatactcttcccctcctggccaggacagtgtgtgcatggaggccctggaactggtgtggcccagccatgtacagaacccaggatggggcatgtggtaggggtaggggcacccaggacttaatgtctgcatmacagctttgccagagctgtcctgaccacaccattctccaacagccaagcagagggaagtttcataccttccttcagggattatgtcctccatgtgagctgaggacagcaacaggtggcatccctgttgggacaaagagtctccaggactttcaggctacagacccttgcaatgtcctctaccttaaccggtgatgcttggattcctacaagaaagtgtactaaggggcctgggct

SEQ ID NO: 72224 - DNA, 725 bp, Homo sapiens
cacagttttattacagtgactataataagcatgaagacatattagaataaaattccatgggggaagtgggatggaaatgcagatccaaagagaaataagaacaatataaaagttctgatggccaaagaagacctggttggcataatttttaaacaagtgatggtggctaacacattgttatagtatgtatgtttcactggacacattaaggagtattattacaattttataactgtcaaattttcagtatgccagagattgtactttttgtgattactgtttaaattcctgatttaaaaaagtgtagttgtcaatgtgctcacactgcctcagcctcggcttagccctcccctcgctggaatactcttcccctcctggccaggacagtgtgtgcatggaggccctggaactggtgtggcccagccatgtacagaacccaggatggggcatgtggtaggggtaggggcacccaggacttaatgtctgcatcacagctttgccagagctgtcctgaccacaccattctccaacagccaagcmgagggaagtttcataccttccttcagggattatgtcctccatgtgagctgaggacagcaacaggtggcatccctgttgggacaaagagtctccaggactttcaggctacagacccttgcaatgtcctctaccttaaccggtgatgcttggattcctacaagaaagtgtactaaggggcctgggct

SEQ ID NO: 72225 - DNA, 665 bp, Homo sapiens
acactcccatgtctggtgccttggctaggaaggctggaatggcagggggttgatcacgccccctctccagcaaggtrgtctgacttcctcacttggtggctcaaggctctaagagagtgaaagtgggagctgtcaggcttcttaatggtctcttacaagcagacttctcctggccaaagcaaatcacaaagccagccaggttcaaggggaggagagatacactccacttcttaacggaaggcccaacatgcacatccggagaggggaggaattgttggcaatcatctttgcagacagtttaccataccatttactagcccatcagatggctcctatcatgtgtctattggcctgaaaatcatgttataaaataggggaagggagtgtgttgacatgcttgattatccatccctaatttaaattgtttaaatattaatatcactttatgcatatacaatataatatgcatgtacgtattatattcataaatacatatctttacatcattgccttagccaatatctagatatcatcaaatgtgatcatttgttaggttattatcttcaccagtgactattggtaaaagagaatgtggttgaaattggccctacaatcccttgacggaattgtcttttcttgtatttcacaaaataattggaaataga

SEQ ID NO: 72226 - DNA, 2374 bp, Homo sapiens
attcaatattaattagttcagatgcttaatttcatgctttccctaaatttgcattgttgctccttctgtctgaaatttgattcacatttcaaatatacttgcccaccaggattcaaattcatgctgactcagcttcagaagtttcacctaaaatttccatgactgccaaataactcttgtgcccaggatttattcaggcagcccatggggagcagtgtgaaatggcccagtttcttgtgtttgttggtgtattgctataggtttgtatggaaacagatgagcatgcttgggtaacatctgtggtttggttagaaatcctatcaaagaatcacaatatcttacataaaaaataggctatttttttctcaactgttttttccttttttattgaattccagatacattatgggttgagatcaagttcctattttaagagtcacccatttgcccagtgcaagttcctagagaaggtagagtattacaaggctaaccttctagcatctggttctggtggttttcatgttcaggtttctgtgattttcacaagcttttccccataaagactgcattttctttaggagcttctcctgcaaaagagccaggaattggagcaccaatgaagacaataaagtatcattcacactctgatatatgaaggggcccagaatgagacacaaatcagcctataggaaatagtgtttcctttgtttctcttcatgtttgtcaaatctgagagggttgaagccaaggaagctcataacagagatgtttaaagggacacagagatggcatcatccaatctccaagaaaatagacccacaggaatttcatgtgtcctttggagaaatagatcttcagaggcatcacttacccggtgttyctcagcagcccactcaatgggacagtgtctgtgatcccggtgctcctgagagctggagcagagcaaacagagcagactcttgtccacttcacagaacatcttctttgtctccctgtgagtgccacacatttgctcttcagagctcaggaatagccagagactggcttttctggcaagggaagccatcttcttcagtcaaatgttagttttgaggtttctctgctgtgttgtctttatgcattcaaagcactgagtaacaactgggatgtcttgccagttgaggtagaaacagggcctgcaaaagctgtgcccacagtctatggtgactgggtctatgaagtagttcatgcagatggggcagctgagttccctctggaagacttgcgagattccagaattcatgtttctgaagaaggaagagcaacatgtcattttgtggtctgggttggtgaaaatctatgtacatgtggtgatatgtgatagctatattttcttctcgacagtgctgattaaagcagaacaaactatttcctctgtaacaaaaataaaaaaattcatacacaaggagagccttcaggctttatagcagacattactgactagatgactcacaaccccttctattcgtagttccggcccataacataatgcaaatctgttcaagaacctattccctagatgtcgatatgaaactcaggttttagtcttaagttgtctagaataaatcaaggttgtccctatttctgtttcaagtaactactgaatgactatggaagagaagtacaaaacctacattggctaaaaaaatatgagaagatggacagagggcactatgatgtgtttttagagagggacccagaagcccatctctttaaaataaaaatcaaccctgcaagaaaaccaattaaccagataaacaaaaaacagcaattaaaccagtttaggttcactagtagagaaaatacataatgaaagatattgggtttatttttcttacggattacattaacttcttcctttggctactcaaactctgaactgacatatagtcaattttttaaaaactgaaacatgtataattacattactatggtattatggttaattttaagtgtcaacttgactggattaagtaatacatggagagttagtgaaacattatttctgggtgagtctgtgaaggtgtttccagagagacatgtgagttggtgagctgagcggggaacagcagccctcaatgtgggtggacaccatccaatcaagctgggagctcagactgaagaaaaagggcagagagaaggcaatttcttctctctctctctctgctgaagctgattctaactcagccacgatattggtatctccaggacactagcttaatggcaggctatattcaacttctcagactccataatcaagggaaccaattcccctagtagacttcctctcctgtatagtcatgtgtagagtgaggacagatagatgatcggagaa

SEQ ID NO: 72227 - DNA, 1291 bp, Homo sapiens
gagttaatttaaagaaaaataataagaaacaatagcacaggtcacaacagatacagcaaaacggtaaaggcaggaagtgtatgtttctctctgtggctgaggctgggggcttsctcgactcagccaggcgacccctcaagtctgagtgacggcggcctctcgccaggctgctgagactgacatgtggctggtccacactgagacgtgccctcgtgtaaacacacactgggttccaaacatttacttactagactatcaaatagttcattaaaaatgctttatatcaattgcaggttgaaatgataatcatttacactgggtttaataaaacatatggttaaaataatttaacctttttttctttctttactgtgcctactggcacattttaagtgacatctgtggcttgcatcatgtctctattggacaggactgatccggatggttctcagacctgccagccggcaggcttggggcagcatcctcctggcagggcacagccgccccagctgctctctgccactcaagtccagctggactcgcagctgcctcagaagggtggcctggtggaatgtgcagatcagattgggggttcgatgaggcaggcggccatctgggggaggcgagggatgcccaggcccaggagagcgggggaaggctgagccaggcggaggtcatggctgggtgctggggatattatggagacaggtactcaggacctactctagatgtggccagtgagggaggggcggcgacttcccagtgcctgagaaaactgtcactgcgggaatgtaggaggcagggctgtcccccatgccttcctctccccctgaacacagtccagtctctgccgcaaacaccacaccatcatcccgagagtttccacaccacagacagaggctgagcacttggaacaaacctccaggacctggaccggacattttgcctcgtggctccctacactctaggtcccctgagaggccaggtggcccacggagcagcgtcccactccttgccccatgcccagcatggcacagcttcgtcttgaggaggcccatctggctgagaagatggagtcagactgtcaggagtgtgccaaggtgaaaccctcgagccgctagttcagtctccatggttctcatcaactgtgctccagagaaactcccagaaagccttccagagcagatgtggcagaggtgactggggggcacatgacagcctgtgagaagtgggggtcctggaaaacctgcgttaaagtatccaggctcccgggtggcgttctaggagtaca

SEQ ID NO: 72228 - DNA, 2121 bp, Homo sapiens
tcatgcaggaagcaggcacttcctgagcagcattcttgcagatgaggcagggcccaagacagcagaggcagaggcagcagtttgcctgggcccagggagacagaaatgggccctttactcttgcagtcagtcttcttgtccccagagggagagaggatgagaacccaggagactggctttgttgtcaaggtttccatggagactggcaatgtcctagggggacctgtggtgtaaattacaacctggtgaagtaggctgctctaggatgtccaggaatgcactttggtgagggaggcagtgcccccaaatgaagattgggcctttgataagaaggggagacaaagaaggaattatgagtgtcagcagaatggagcccaggaggaagagctgagggggatggctggcattcaggatctaggctagatcagggagaaggcgggtaacacggaggccagacactgtttcaaagtcagtgtgaagcaaggaggtggcaaacccaggaagggacagaaggtcagcaaaaaagggtgggtgtgtgtttggcgcccaggaggaactagatgagctggtgagtacagatgcagaaatgaagtgtggcatgtgagcacatgttgcaacaggcagcaggctgctgggagaagcaccagaagcataaagcagaaactcagacatgggccagctggaaaaaggagccttggttctgtgatatgttgggagccacgcagcagccggacctgggtgtgaatcttggagacagaagcttcccagggcacctccaggatccaggtttcacctaaccaaagctctgacaagaagccccagggttaagtgcggctcctccctggtggtgtcaggctccccaggagcactcctgtgggaataatagcctttgcttcaggtggggtggggaacagctggaatcccctcctaggactctctctccaggaaaatcactgtgattcagcagtgctgctcctctacagagaagcccagcacctctgcacttaaaaattagtcaaaggcagcagactgcctgtcctggagcccagggctcaggtttagcctatattatcatgaagaatagatcacaagtgaagccatcggatcataacactcgcctcccactggtgcccctacaatcaagttctgtcccaatgtttgttggccaccacagccaagacaatgctccatgttcactttcctctcccagatgctggggaagattgcatattccaggctccattgtagttggctcagggacatgtggctaattctgatgagcaggctgtaagttaaaatcaagtgggttacttcttggctgaagcacagcaaagtaggtgtgaggtcacctggctttcttctccatgggggagaccctgaagcagcatgctgagatggtgatgtaataagatggtggtgcctccatctgcctggatctctggggtcttgtcagagccgccaaactcaagcctccaatctcccccaaatacacacatacacactccaatcccagtgaagagtggcagaacattcaaccccaaaataggccactttgacataaggattacctcaagctaaggcaacttgaaaacagcagatgcaacgagggcactctgatcttccttctttcccggaaaacaggagacaaaaactcccacgtgaaaggtgccctcctttctccagaagaaaggaacattcttcaatggggagttgtcgccaagagaattccctgcaaacagaccttgttaaagtaattctctcccttgcacctcgccacatatccagttattctctgcaatcgcttctccttgtctaacctgatacacatgcaggcagttcttgccatttctttccgcctttgatcccttatgagaattcccatgttatgtaaaacttacataaatgtgtttgtttttctcctgttaatctgtctgatgtcaatctcattctcaggcccagcagaaatcmtaacaggtggaggaaaaggtttgccctccctacagtttctggtgatgaggatgggaccctaaaaggttaagatgccccatttgctctagaacctatggacggggccctgggagaggtaggaattcttacggagtcaggcattgtgtctgttgt

SEQ ID NO: 72229 - DNA, 1107 bp, Homo sapiens
actgtacagcattatagaaaagtaagatgttgttgctgaaatttgatattagttcctatctccaagggctttgactgagtttctttttcattctcaatattcagctttaatctctgtctctctaaaaggagtccttcagtttcttaggccagactttggtaatttgttctaaattgagatcacaccatgaaagttgtgcctgcctaataaatcgccggtctcatcagggtagggtctatatttgttcactcctattttctatgttgttgccgttcaacaagtatgtattatctgataattctaaagagtgcattgagttatttgataatatcaaaataacaaaattacttctatayacaatccaaatgtcctcaaagttgcttatttagttttcaacactaaaattcgttattaacattttcttgcgcattgatatggtttggctgtgtccccacccaaatctcaccttgaatagtagttacaataatccccacatgttgagggaggggaggtaattgaatcaagggagtggttacccccatacagttctcatgatagtgagtaaattctcatgagatctgatggttttataaggcacttttccgcctttgctcagcacttctctctcctgctgccatgtgaagaagggcgtgtttacttccccttccgccaagactataattttcatgtggtctccccagccatgcagaactgtgagtcagttaaccctctttggtttataaattacccagtcttgggtattttttcatagcagcgtgagaatggactaatacacacacacacacacacgtgtgtgtgtttattatatataatttgatcacatatattaaagtatttcttggattgatttttctgaggtagtattacaggtcaaaagccatgtatatttttgtggcttttgctgtatcttactaagttgcttatatatattttcattctgactaagtgttcaacacttttaatttgaattcaataataatgaaactaaagaaaaagaatgaaagattatatttcaatagggataattggaagcatgggtatttgccataaccaatgagtggtcatattaggactaaatcacaggcg

SEQ ID NO: 72230 - DNA, 1422 bp, Homo sapiens
cacctccaaccagcagtcaaggtgtttcctgggctggaagatgaaggctacagcggcggcggtcagggctctgacagcaggaacaggggcatgtcctctgagttcttgggggacctctgctgggccctgagctctgtgtctcgggacaaaaatcccagattccagagctgaaggcacttcccaggtttcctacccagccagttgctttccaggtggggtctgaggcccaggccttttgaaaggccctggcacgtttggaataaaaattctgaaagtgctgattttytaaaagagggagatcgaggaggctggccgggaaagcatacccttcctcgggtgctggagcccaggaaagccgtaaacactgtgagtccacatcccagcccttccctgtctccaggccagtccagcattgtgtccagccctggggagcaggccaggccgaggagccctggtggattccatcagaggccctggtgcagctgcattcacggtccagcgggaaaggaaggctgcactcagcccatccccgagttcagtgcaggaacagctcttacggggtccccactggccacccaacattgtccccgtctcctccagagggactgtgcccagaggaggtgcccagatttgtggcgaggttgaccatagcaccatgaagtcggttctgtgagctcaggcctgggtactgggtgcacagttctagtgtgggtctggtcttcagtgctcagggtctggggcagcccccgaggggaccgtgttgctatccagtgtgaagcatctagacaaaggaccattggacaactggaagatcctttcttttttgtttttttattttttttattttttttatttttttgagacagagtctcactctttcgcccaggctgcagtgcagtggtacaatctgggcctcccgagtagctgggactacaggcgcccgccaccacgcctggctgtatttttagttgagacggggtttcaccgtgttagccaggatggtctcgatctcctgaccttgtgatctgcctgcctcggcctcccagagtgctgggattacaggcgtgagccactgcgcccggcctggaagatcatttctattctctataactgaggcagttgctgctggttaccgggcttgctaataaatggccccactgggacgcaagtgtcacagggggagagacttgacagtgatgaaaatgactgatttcctgggagacagcattccctccagcagcagcaggagccctggaggtggccttggggggcttttccttctggttctgacactaccatgtcctgagagctcaggcccctggagcactgagtgcccatctgcaaaatggagagagagcaagtcacttggagtcattttagaccatcatagatctgagcaagaggcagggtgaagacagaaag

SEQ ID NO: 72231 - DNA, 1422 bp, Homo sapiens
cacctccaaccagcagtcaaggtgtttcctgggctggaagatgaaggctacagcggcggcggtcagggctctgacagcaggaacaggggcatgtcctctgagttcttgggggacctctgctgggccctgagctctgtgtctcgggacaaaaatcccagattccagagctgaaggcacttcccaggtttcctacccagccagttgctttccaggtggggtctgaggcccaggccttttgaaaggccctggcacgtttggaataaaaattctgaaagtgctgattttttaaaagagggagatcgaggaggctggccgggaaagcatacccttcctcgggtgctggagcccaggaaagccgtaaacactgtgagtccacatcccagcccttccctgtctccaggccagtccagcattgtgtccagccctggggagcaggccaggccgaggagccctggtggattccatcagaggccctggtgcagctgcattcacggtccagcgggaaaggaaggctgcactcagcccatccccgagttcagtgcaggaacagctcttacggggtccccactggccacccaacattgtccccgtctcctccagagggactgtgcccagaggaggtgcccagatttgtggcgaggttgaccatagcaccatgaagtcggttctgtgagctcaggcctgggtactgggtgcacagttctagtgtgggtctggtcttcagtgctcagggtctggggcagcccccgaggggaccgtgttgctatccagtgtgaagcatctagacaaaggaccattggacaactggaagatcctttcttttttgtttttttattttttttattttttttatttttttgagacagagtctcactctttcgcccaggctgcagtgcagtggtacaatctgggcctcccgagtagctgggactacaggcgcccgccaccacgcctggctgtatttttagttgagacggggtttcaccgtgttagccaggatggtctcgatctcctgaccttgtgatctgcctgcctcggcctcccagagtgctgggattacaggcgtgagccactgygcccggcctggaagatcatttctattctctataactgaggcagttgctgctggttaccgggcttgctaataaatggccccactgggacgcaagtgtcacagggggagagacttgacagtgatgaaaatgactgatttcctgggagacagcattccctccagcagcagcaggagccctggaggtggccttggggggcttttccttctggttctgacactaccatgtcctgagagctcaggcccctggagcactgagtgcccatctgcaaaatggagagagagcaagtcacttggagtcattttagaccatcatagatctgagcaagaggcagggtgaagacagaaag

SEQ ID NO: 72232 - DNA, 665 bp, Homo sapiens
tccattttgtaatggattggttttgtaatctgcccaccccaattgtggtaccttagtagattctacccctaactttcctaccttgtctggaaccagggtcttttaaggtaatcctccttttccatttgagagagaactgcctaattccaacaggcattaaggcaagggagggaaagagactgttaaaagagggrtagctcaccttatgccagagggagggatgaaagcaggaaaggaggggaaaaagagtataagcagtcggccttttacaataatggctatagcagcggcaagactggtaaataagagcttagcctcacctgggccttaatcccagagttgccattaacaatgtatttcttcttgctgcccagcatagtgacattaccagccccactgccacctctgtggtccagggacccttgtgatcaggcctttaaactttcctcatcagcaattctgttggctctggttccagccagctttttgggctggggagtgggggactactcttccttggaatccctgaagcagctccaacaaccccttcagcagtacagccccaatttaataaggcatttctgttagtggctcaacagccattcctaattctagtggctgttttgcttttacttgtttttttcctaaacacctaattacatgga

SEQ ID NO: 72233 - DNA, 623 bp, Homo sapiens
cagccggcaccaaggacagcagcagcagcgtggtgactcctcgttcctgagctgctgtagtgagagggcagactccgcgagcagcggctrcctggtcctcttggctctgcaccgctttctccccctgtgagttctgccttctgtcggtttcagcgtctctaccaccacagcttgttgtgatcctccgggatcccctgtgactcctgctttactttctggtctctgtctttgcttgcgttgagctccagcttcctctcctaaatgccttattctcagggtttgacaggagcaagagtctgattgaccacccttgtctttcggggccaggctgtgtcgtggcagccactgaatgagctgtgggggtccggggcttcccacccccatcagctatgcctgagggtggcaacggtcaggacctgcaaaatacccacccaggaatctgccttggggttggggcatggagaccacagattgcatgagggtttgcttctgtctctttgtctctccctcaggctgaagtctatccctttagagtaaagatcctgggaagaacttgcttactctttggtctttttcctttacttcctcacctttctgtcacacatttttttcctctcactttt

SEQ ID NO: 72234 - DNA, 623 bp, Homo sapiens
cagccggcaccaaggacagcagcagcagcgtggtgactcctcgttcctgagctgctgtagtgagagggcagactccgcgagcagcggctgcctggtcctcttggctctgcaccgctttctccccctgtgagttctgccttctgtcggtttcagcgtctctaccaccacagcttgttgtgatcctccggratcccctgtgactcctgctttactttctggtctctgtctttgcttgcgttgagctccagcttcctctcctaaatgccttattctcagggtttgacaggagcaagagtctgattgaccacccttgtctttcggggccaggctgtgtcgtggcagccactgaatgagctgtgggggtccggggcttcccacccccatcagctatgcctgagggtggcaacggtcaggacctgcaaaatacccacccaggaatctgccttggggttggggcatggagaccacagattgcatgagggtttgcttctgtctctttgtctctccctcaggctgaagtctatccctttagagtaaagatcctgggaagaacttgcttactctttggtctttttcctttacttcctcacctttctgtcacacatttttttcctctcactttt

SEQ ID NO: 72235 - DNA, 623 bp, Homo sapiens
cagccggcaccaaggacagcagcagcagcgtggtgactcctcgttcctgagctgctgtagtgagagggcagactccgcgagcagcggctgcctggtcctcttggctctgcaccgctttctccccctgtgagttctgccttctgtcggtttcagcgtctctaccaccacagcttgttgtgatcctccgggatcccctgtgactcctgctttactttctggtctctgtctttgcttgcgttgagctccagcttcctctcctaaatgccttattctcagggtttgacaggagcaagagtctgattgaccacccttgtctttcggggccaggctgtgtcgtggcagccactgaatgagctgtgggggtccggggcttcccacccccatcagctatgcctgagggtggcaacggtcaggacctgcaaaatacccacccaggaatctgccttggggttggggcatggrgaccacagattgcatgagggtttgcttctgtctctttgtctctccctcaggctgaagtctatccctttagagtaaagatcctgggaagaacttgcttactctttggtctttttcctttacttcctcacctttctgtcacacatttttttcctctcactttt

SEQ ID NO: 72236 - DNA, 1246 bp, Homo sapiens
tgcatggtgtggtgctctaagagcatctgtgtctgaacgataagatgaaacaaaccacaggtgctgaatctgcacagaaaccagctcgccaaacatgaccacctgtacccaaatatctatttgaatcactgagaatgacagtacctcatgggcacagaggttgaatctagttaagataattctctcaacaaatttgtatgctcactccaatttcatgaatgtgcaacagtgggtgatctggaaaagcatggtcaacagtcaacaagaatatcatctcttgattctagcaatgctgaaaaccataggggctgctttctagtaatgaagctctcagtgcttttacatctataaatacaatgtaaaaaaaaattcttacttaaaaaaattcctgtcaaaaatgtatattagccttatggatagctggagaaaagttatgagtacacagcacgtccttagtgcctgactcctagtttctccaaaccaatggaaaaatcaaatatctattctttaataacgatctcccataaacagttcctgggtagagtcggatttatagtgtaccttcttccaaacaggaaaagagataaactcacactgttctcatatgccaaaggcatttctttggctcagaggttgttcccaaactgatgactgccatccctccttccacccccaacccccacccacctacttccattccaattctgtcagctctggcagtggttggtgcgctgttacatccaaaaggataaaaaaaaaataaaggaagaaacagaacttcaaaatccttcctaggtagggccccttctgcaataggaaaagaagcagagaacctcaaatttgctctgggcagaaacagagccttaattaaagaagtgccagtgatctagcctgggacccactgctatggccagatgtacamaagaatgcccacagtagctcccgtcactcccactcactcccacagccacaagagaccttaatatgcagacccatgtgcacccgtaagtcatttccaagtcagagacaggtttggacccacataatgaaattaatacccatgcttaaaacacacacttatgagaatgaaagcctagatgtataaatagccaatgttttactcaatgttacatcaagaaaggtactcagctaccgggggaaaaaaaataaagtcagaaaggaaaatttaattgtgtgagtgggttaacaggcttgatcccagaagtaaccactaaaattttatgca

SEQ ID NO: 72237 - DNA, 736 bp, Homo sapiens
tgatccacattgttggagatggggcctggcaggaggtgtttgggtcatggtgctggatccctcatgaatggcttggtgccatccccttggtgatgagttacttctcactctattagttcacatgggagctggttgtttaaaggaacttggcatctccctctttcaccatgtgacatgtctgatctccctttgcttctgccatgagtaaaagctccctgagggcctcaccagaagcctagcagaggctggtgccatgcttgcatggcctgcagaaccgtgaaccaaataaacttcttttcattttaaattacccagtctcaggtattcctacagcaatgtaaaacagattaatacagcaacttacaagcattcactcatttaattctcaccattgtcttatgaggatggtaaagaatagttgctattattgctattgcatcagatagtttatctctttcctcttttcttttttctttttgtgtaaaagctaaactgcttaattagatgtctctactttgtaatactagggacttcaaggagcaaygttcgttcctctgtcctgacattaccttggtctctgtccatctgccttcatctctagataacgaaaaaaagccctagttagtctacctgacccattctcttccccttccaatccatctagcattttgctgccttttttttgtttttttttttgagacggagtctcactctgtcgcccaggctggagtgcagt

SEQ ID NO: 72238 - DNA, 1449 bp, Homo sapiens
tgaagattacccaacaaatttaaatacaaactcctaccaagttttcaaagtcaccatcatctagccatatgctaataaatttgcatcaattcccataattcttatataaaccctcaccttgagttaaactaatcttcctactattcagtttgaaaataatttatagagcatctatgaaatccagtcactgaggatacatatataagcaagacataatgcatgtccccaaaaatgttacagtttagacctctactgcacataataaataattcccacctctgtaggttggcccatgttctttcatctgcatgacacgcattcactttctccccatcctttcctcaaagcctaactcaaataatgccttttggaccattccagcctgcacagattttctccctctctgatattcttgaagctcaactatttattcttaccataaagagttacaagaaggacaagactgtacaaagattaatattctccaagactttaggagcagatacttctgaaatttaagttgatacaaatgaacattaaatagatgaagctagcaaattgcaggaatcctcccaggacaaccacatgaagatgtaaacatgctacaggcatgtatttatcaaactttaatgtgtgcataaatcaccttgttgaaatgaagattctaacttactaaagtctggagtgggacctgaaattctacatttctgacaagttctcaggtgatgctgatgctgcactctttgaaccatacttcaagtagcaagtggatagcaagtgtatctcaagagtccccagtcaatcccaaagctttactgcctcagttgtgttctgctggctttatcaggtttctaagttgagacagatatctactcaggttttatcagcagcaaataccaccaacatcctcatttcatgatctcaagacttaagataaatatttagtggtggttattgttcacagaaatattagatataccattccccttggagacacagatatcaatcttcctaaagaggagacaagcatcagacttcatcgtccagctacgtcctttttaacacatctatttccctttttctgattctgtactcacaaaacaacttcctagtctgatatttgtgtctcaaaagaagtcagtcctgatatgaaaaccacctaggaaaaagaagcactccagacagaatgrtgctccctgaaagtatgagagcagttgcaaaaattgtcaaaatcaacattttcagaattctaaaaattaaccaaaaggttgaaataaaaatggcttattctacagaacagtgagctctgtgatacttaaacctaccctattcctattcccatctccctttccctatctctgcagtacccttgaaaaccagcagctttagaaagatggtagctgtgaaaaccagtggcctagtagctattggagagagcagaataggttt

SEQ ID NO: 72239 - DNA, 1005 bp, Homo sapiens
tactcagtaaagtttggtagctaaataatccaccattctgtagaataagaattttgtagaatttgaagcaaagaatttcagcctcaccttagacaatattcatcccaaaatgaatgttgttcaacagtgatctaagtgctgatgccctttctgtagaacaagtgtcagcactctgcaatttttcattctgcaaagtgttttgttctatactgtctaatacaatcttgtacttctcttcctatcactcttatgcactgatttgtcattttcacttcaggagcctgggaaacttttgatgaagcatgactcatggctcaggaagagaaaagaaggaagtaccagctgatgctaagaggctggaaggtcaaatattatactttcttgctccctggagttggaaatgggatcggctttcctgaatctcattagctrctagaaagagaaaaaaaagatcaaggtttcaaaaggaaggagcaaggggaaatggatttcataaaacaactgtgtcctttacatcattacatagctataaagtatagtgcaaaaataaacaacaaaagcattagttcattagatgtaggaccagaaagcttgggaccctccagtttctaaccatgtgattttgaaaaattaaacatcaggtttcagtcctcagtctcactctccacagaataaataataattcggagtgacctgatagtaagtggcattatcactctctctgccatctgctgacagtcctatgaatcaggatggagatcagtctcttttatgatgtataagattccatatcctgaatgggaaacaagggagtgtgtttatatgcacaggcttgcacccactgggggtgagagctggggagagaggattagtaaatgttctggaagaaatcaatatgggtttgtggctgggaaaagcatcctccaaaagaattgcagccctcagctctctctccttggcaaaagcttcaactttagcatgtgcccccctgccccatcactcagt

SEQ ID NO: 72240 - DNA, 1187 bp, Homo sapiens
atgtttggattctgtctggtcttgctctgtctktgtttatgacagtatacttgcaagctaatttctcctctctaggaagtaggtaactatgccccagagagttaacaatgtaagtaaatcgatacatctattgtgattatttttctttatgaatgaggcagaaaatatattgcctaagctccttcttagaagaatctgaatcaaagctgatgggatttgcatatcagactccagataatctaggaatcaggtagagagtgggcacttcagtccccagctggtgtattgcagcaatatcttgggacttatgggtgtaattaaaccatccctattagtaattacaaaaaaggactcactgcccttaaacgtgactgtaacatatcacatctttgtaaaagcatgaagctatttatttaatcagcaaagtccatgtagaaaatgttttattaatattccaattttctgattcaaccctttgtgtaataaaatatggtgactaaaacagtttcctttttactgctcttgctcagccttataagagagattgaaattttgtagcaccatttatgccaatttttttaaactctccagcataaagcatatcagcaaattaatatttcctgactacaagatgagattgacctcataggtataagttcatttcttgttctaacatctactgtaccgtgaaattagaggtctttttctttatctctgtctctctttttttacctcattttcattgtggcaagactgctaatatatcatcaacttttaactagtaagtcactattgtataatggtgtcattatgcaatgtcatgaacacagcttactttttagtgttgttttattacagctggaatcatagagaggttctccaatgtttgaaagggacctaaatgatgaagctcagttttagcaaatctccatggtcacctctgctgagtcatctatgctgaattgagttacctttgtgcaggcaaaggaaatgaagccctggcaggctgtgtagcagagagtcctaggataaagtagaatgtatgggttctaatctcaggtctgtcggaaaatctgtgtgtccttgaactgctgacttgggctctctggacctacatattctcaattgagatgaaagggtttggatgggtgatcactaagatccctgctcactgtgtgattttatgc

SEQ ID NO: 72241 - DNA, 1187 bp, Homo sapiens
atgtttggattctgtctggtcttgctctgtctgtgtttatgacagtatacttgcaagctaatttctcctctctaggaagtaggtaactatgccccagagagttaacaatgtaagtaaatcgatacatctattgtgattatttttctttatgaatraggcagaaaatatattgcctaagctccttcttagaagaatctgaatcaaagctgatgggatttgcatatcagactccagataatctaggaatcaggtagagagtgggcacttcagtccccagctggtgtattgcagcaatatcttgggacttatgggtgtaattaaaccatccctattagtaattacaaaaaaggactcactgcccttaaacgtgactgtaacatatcacatctttgtaaaagcatgaagctatttatttaatcagcaaagtccatgtagaaaatgttttattaatattccaattttctgattcaaccctttgtgtaataaaatatggtgactaaaacagtttcctttttactgctcttgctcagccttataagagagattgaaattttgtagcaccatttatgccaatttttttaaactctccagcataaagcatatcagcaaattaatatttcctgactacaagatgagattgacctcataggtataagttcatttcttgttctaacatctactgtaccgtgaaattagaggtctttttctttatctctgtctctctttttttacctcattttcattgtggcaagactgctaatatatcatcaacttttaactagtaagtcactattgtataatggtgtcattatgcaatgtcatgaacacagcttactttttagtgttgttttattacagctggaatcatagagaggttctccaatgtttgaaagggacctaaatgatgaagctcagttttagcaaatctccatggtcacctctgctgagtcatctatgctgaattgagttacctttgtgcaggcaaaggaaatgaagccctggcaggctgtgtagcagagagtcctaggataaagtagaatgtatgggttctaatctcaggtctgtcggaaaatctgtgtgtccttgaactgctgacttgggctctctggacctacatattctcaattgagatgaaagggtttggatgggtgatcactaagatccctgctcactgtgtgattttatgc

SEQ ID NO: 72242 - DNA, 843 bp, Homo sapiens
attttagaaaattatggtgtagttgaaagagtcctggctttaaaagcaaacacatcagaaagtaaatcccagctctatcacctacgagctgtgtgaacttaggcagatgtcttcctagtgtgagtctcaggtttattggcattaaaatgtaggttttgcagatttcagattataaagtataatatttttaatatctgtcctgtgccagtcagaaagtataggataaaattaacaatgtttataaaatagacatgctttttccaattaaatttttaacagcaaggaggcattatttattctgtgtctatgcttcagaattctttcattctcattgtagggaaatagataaatataaatacatttttgtaataaaaatgttaatgrtagggttaaaagccccactttttaactgatagagttgacaaaagtatattaaaagtgtatatttaatggcaaaaaatgtaggttttgatctgtgcagtaccaaattttcacgagaattaattactaaataacaaatataaactaaaattataaacaatgaaatccaaaataaatgttaatttatattcttattaattcatttaatgaattatagatgtaatcttcagatatttatattaacaaattttcagtttggaagctttggttcttgttttaaggacatttccgataaagttgatatttagctgaaaagatgctctcatacttgtccacattccacaaaacagttcacttttgatgagcccaaaacagttagcaaagtagtctcaaaggagtaccccccattttattaaaaaatagttggaaaaatctgcccaatcttacccacaaaaatgttgc

SEQ ID NO: 72243 - DNA, 930 bp, Homo sapiens
ttacaattcaagatgagatttgagtggggacacagctaaacaatatcagtgcatgtgaggctttgcaggattctggagccaacgaaaagtctttgaagaactttaagtatgacatgatctgatttatgtttttttaaagtccactttggctaagaacagattgcaagtggtaagaagtcaagaggctattcagaaaccagtcagaggaacatggtgtgttctattagaaagagtgatggtggtggcagtggagtaaagtggtaaccctcttcgaagtttcatagaaaaataaattgaggttcaaagaggttagggacattgacaagattgaacagccaattagttgcagagtcaggattcaaacttttcttttttggatgccaaagtatgttttctttcctctgcatttctttgggtctccattttgtcatcagtaaagtaatgrtttgggttagattatctacgagatgacttctggttctaagatatcaaaacctccctctacttagatatttgtttgatattttttgattaccatcttatcacatgtgcactcagcttgtttcctgttgtgcatagtgaagaaacatacatagtttacagaactcccacgtggtcttccgttttcaggaaccttctagataagagtgagtaagagggcagagcatatcttgtcactgtatcggcaaggagtgaagtcttgggctgtctacaaaaagcagtccagccagtaagaaatagtggtggagggtaggtggaaaagaacagatgaaggggaacaaggttatgcgataatcatccggaataaataacgacatcgattttctaaaaatcaaatccatcacctgtaaaataggagtcctttaaagatcaggctatgactttttgctatttttaacacatcgacattatttgaatttttctatagaa

SEQ ID NO: 72244 - DNA, 710 bp, Homo sapiens
caagaaatgcaatagaaggtgagaaaaaggagctctacaaacatggagttgagaagtcacgaagaatgttacagagataggacctcactgtatgtgttttgtgtactaaccttaccatggctccatcttatttacctacccctattttcccttagccagaatttctctgtttaaaaaaaaaggttgcatttatttttataagctgatttgaatacttttttataaaaggataaagaaggaaggaaaaggagggagagagggaagaaaagagaaaggaaagaaaagtatctccattaacccttgaaccttactatgctctgaggcattcagtccaacagcatatcattatgtaaacactgtagtagagcaaagtgtgtaagaacataagcktaaaagtttgacttcagggggttcagctctcagctctgtcacttataggtatgtgacattggacaagttgcttgtgtcttttgaaaaccttgaaggaagaaatctaaaactattttccatattgatattcagaaagtttttgtatattttgccttcctgcaccctctaattcataagccacatatggaggacttggttttctcaactgtaaaatggaaataatactattactttcctcaataggtgtaattaagctaattacattaaagttcttagagcagcctctacacataataattatgtgttagtcatttgacaat

SEQ ID NO: 72245 - DNA, 882 bp, Homo sapiens
catctccattttagagatgagggaatcgaggtaaaacaaagtcaagtaacaagcccaatatcactggtagggctggaattcaaatccaggctgtctgatggcaggtttctttaagccgctatgctatgctatgctatgctatgctatgctatgctrtgctgtgctatgctgtgctgtgctgtgctgtgctgtgctgtgctgtgctgtgctgtgctgtgctgtgctatgctatgctatgctatgctatgctatgctccccttttacaatcttttcttcagggctccccttcttcctgtctggtccacctgccttattgccccagttgcatgaggaatggttcccattcagttccccgctccagtaacaatgatttcatatcttcctccacagaaatcaatgtcttccccatttcaaatctgttcccatctcatgtaataaggaaggggcccaacggtgccattttgcctccatgtgtctttgcttagaccaaggagagaaagggtgagtggccaatagatgtgtttttaaacacttagtatcaccggcacagaataggaacttgatacatgcttatcagatggtcgaataaatgagactttagttggaggcagtagggaatcttgtgttttaaaggagtcttgcagcaagactttctgctgatctttcctggacatcaatgtctcacttcatggttccatgagtgctcagtcatgtgggtgcgtgtgcatgtgtgtgtgtgtgtgtgtgtgtgtgtgtgtatgaagtagaaagttctttccttttgtgtcacacaaagttaagagggcccaaagcatggtcacttgagcctccaggtgataagaatcatcttgttatgtccacatacgtgtccatttcctccc

SEQ ID NO: 72246 - DNA, 882 bp, Homo sapiens
catctccattttagagatgagggaatcgaggtaaaacaaagtcaagtaacaagcccaatatcactggtagggctggaattcaaatccaggctgtctgatggcaggtttctttaagccgctatgctatgctatgctatgctatgctatgctatgctgtgctrtgctatgctgtgctgtgctgtgctgtgctgtgctgtgctgtgctgtgctgtgctgtgctgtgctatgctatgctatgctatgctatgctatgctccccttttacaatcttttcttcagggctccccttcttcctgtctggtccacctgccttattgccccagttgcatgaggaatggttcccattcagttccccgctccagtaacaatgatttcatatcttcctccacagaaatcaatgtcttccccatttcaaatctgttcccatctcatgtaataaggaaggggcccaacggtgccattttgcctccatgtgtctttgcttagaccaaggagagaaagggtgagtggccaatagatgtgtttttaaacacttagtatcaccggcacagaataggaacttgatacatgcttatcagatggtcgaataaatgagactttagttggaggcagtagggaatcttgtgttttaaaggagtcttgcagcaagactttctgctgatctttcctggacatcaatgtctcacttcatggttccatgagtgctcagtcatgtgggtgcgtgtgcatgtgtgtgtgtgtgtgtgtgtgtgtgtgtgtatgaagtagaaagttctttccttttgtgtcacacaaagttaagagggcccaaagcatggtcacttgagcctccaggtgataagaatcatcttgttatgtccacatacgtgtccatttcctccc

SEQ ID NO: 72247 - DNA, 560 bp, Homo sapiens
taggacatgtataatttgtcctcatgtgatcacttagtccattttagttgaatgtaaatacaaactagcaataaaatagttataacttaagtctaacttaagaaaatatgttaacagtttctacttgtgaaatctttagtttcttatttatgtctaggattggaaatatgagacataagggtaggggtaaagggacttggaaacttactgtgggtgagggataaaaaccgtgcgctgtctcctttccgctaggtagctcctcccaatcctgaaactttgtgtctctgcccatttctgcccattacaacctcattaatctgaccastcctactctacatttcccctcactgaaacccttgactcatacgtttttctccttaagttttttcatgtttaaagagcctggccgggcacggtggctcacgcctgtaatcccaacactttgggaggctgaggcgggtggatcatgagatcaggagtttgagaccagtctggccaacatggtgaaaccccgtctccaccaaagataccaaaaatacaggtgtggtggcatgtacctg

SEQ ID NO: 72248 - DNA, 1966 bp, Homo sapiens
ataattaaaaaaaaaacatgcgaaattctcagtaaaaaggcaactgggaggagcaacatcctttgctttcagtcttatgaggaactaactgttccatgtatgtgtgtgtgtgtatgtgtatgggtgcatgcgtgtgtgtatatatatgtgtgagataagaatttttaagtgaggataaatgtcagttctcaaaaatatagacctgttgattaatttatcttttttttttttttttgagacaggatctcgctctgttgcccaggctggagcgcaatggtgcaatcatagctcactgcagccatagccttctgggctcaagagatcctcctaccttagcttcctgaggagctgagattacaggcacatgccgctgcacctgactaatttttaatttttttacagagattgggtttcactatgctgtccaggctggtctcaaactggtggcctcaaaagatcctcccacctcggcctcccagagtgctgggattacaggcatgagccaccacatccaggcctcagttaatttagatccaataataagaaatgtgttttggtagaaagcaagaatgaagtaaagttgttttgtttttatttaaacatctgtctatagttctgtgaaatgtgtgtatatatatggaaagcacaaatagtttattccctactcaacccactggtataaactttgtataagaaagcagtacatttacagattacaaatgggtcaatcctgtccccagatttttagaatatttccaaaccactgatattattgactctgatttcattttgccccaaatgaaggtctgttctaacttctctctgctttgttagttttacataattaaatggccttcactgcttgaaagccttccaatgggttccacttttttattgtgttatctcaactattgataaattcatatttgcaagactaataggctgtcaaactgtgttgatgtctgtgttagttgtgaatatcccttaaagtattctttgcattgcagcaagagagatcaacccatttagaggagagtgtgaccaaaagtgacagccttgctttcttagctatagaatcatcaatgcatggaaatatgcacaaggtggaaataatgtaggatgtctatttcaatttctaaaattaatttttaataatattttgtgttttatttaaaacacttttttttgtaagataaaaaactrtatcacaggaccccactgtcagaactgactatggtcgtaaaggtgaaaatagtgtttattctgccttctagtttacttttccaccactaaacagcaccagaggcatggcaacactcaatatttatttgttgttttgattaactgacaatgtaatataatggtaacacaattgacccttctttggtttttttaacttctccataactttgctgtttttaaagccacagtttaaaagtatttagctattctcaggtgatatggtttggatgttttgtcccctccaaatatcatgttgaaatgtaatctctgatactggaggtgggcctagtgggaggtgtttgggtcattggggcagatctctcatgaatggcctggtgttgtcctcaaggtaatgaatgagttgttgctctatgggttcacacaagatctggttgtttaaaaaagactggcacctcctccctctgtcttgctccctctctcaccatgtgacatgctggctccccttcaccttctgccatgattaaaagcttctgaggccctcaccagaggctgatgcaagcactatgctttgtgtacagccttcagaatgttgagtcaaataaatctattttctttataaatcaccctgtctcaggtatttctttatatcaaggtaaaggactaacatatcaggtgagaagtaatttgacacacacacaaaaaagtttagttggcattttcattcactgtagttggaaatttggcagtgttcatcaaaatacag

SEQ ID NO: 72249 - DNA, 1966 bp, Homo sapiens
ataattaaaaaaaaaacatgcgaaattctcagtaaaaaggcaactgggaggagcaacatcctttgctttcagtcttatgaggaactaactgttccatgtatgtgtgtgtgtgtatgtgtatgggtgcatgcgtgtgtgtatatatatgtgtgagataagaatttttaagtgaggataaatgtcagttctcaaaaatatagacctgttgattaatttatcttttttttttttttttgagacaggatctcgctctgttgcccaggctggagcgcaatggtgcaatcatagctcactgcagccatagccttctgggctcaagagatcctcctaccttagcttcctgaggagctgagattacaggcacatgccgctgcacctgactaatttttaatttttttacagagattgggtttcactatgctgtccaggctggtctcaaactggtggcctcaaaagatcctcccacctcggcctcccagagtgctgggattacaggcatgagccaccacatccaggcctcagttaatttagatccaataataagaaatgtgttttggtagaaagcaagaatgaagtaaagttgttttgtttttatttaaacatctgtctatagttctgtgaaatgtgtgtatatatatggaaagcacaaatagtttattccctactcaacccactggtataaactttgtataagaaagcagtacatttacagattacaaatgggtcaatcctgtccccagatttttagaatatttccaaaccactgatattattgactctgatttcattttgccccaaatgaaggtctgttctaacttctctctgctttgttagttttacataattaaatggccttcactgcttgaaagccttccaatgggttccacttttttattgtgttatctcaactattgataaattcatatttgcaagactaataggctgtcaaactgtgttgatgtctgtgttagttgtgaatatcccttaaagtattctttgcattgcagcaagagagatcaacccatttagaggagagtgtgaccaaaagtgacagccttgctttcttagctatagaatcatcaatgcatggaaatatgcacaaggtggaaataatgtaggatgtctatttcaatttctaaaattaatttttaataatattttgtgttttatttaaaacacttttttttgtaagataaaaaactgtatcacaggaccccactgtcagaactgactatggtcgtaaaggtgaaaatagtgtttattctgccttctagtttacttttccaccactaaacagcaccagaggcatggcaacactcaatatttatttgttgttttgattaactgacaatgtaatataatggtaacacaattgacccttctttggtttttttaacttctccataactttgctgtttttaaagccacagtttaaaagtatttagctattctcaggtgatatggtttggatgttttgtcccctccaaatatcatgttgaaatgtaatctctgatactggaggtgggcctagtgggaggtgtttgggtcattggggcagatctctcatgaatggcctggtgttgtcctcaaggtaatgaatgagttgttgctctatgggttcacacaagatctggttgtttaaaaaagactggcacctcctccctctgtcttgctccctctctcaccatgtgacatgctggctccccttcaccttctgccatgattawaagcttctgaggccctcaccagaggctgatgcaagcactatgctttgtgtacagccttcagaatgttgagtcaaataaatctattttctttataaatcaccctgtctcaggtatttctttatatcaaggtaaaggactaacatatcaggtgagaagtaatttgacacacacacaaaaaagtttagttggcattttcattcactgtagttggaaatttggcagtgttcatcaaaatacag

SEQ ID NO: 72250 - DNA, 633 bp, Homo sapiens
tcaaggagttgctttctgtgcccccagcaggagggctgtgggaggcaggcatcccctttgtgtccccatagcacccttgtgtccttgtggaacactttgtgtctccgtgtccttctgtgttcccaggggactctctgcacagcccatcttaacacttactccattacctgcatgtcctctgtccatgtgtcggttcccccacccctactgtgtgtaagctcctcagagaatgggaccccccactgcctctgtcagggtctggctctcaaaggtgcttgycaaattgaacctgaatagagccagccaggtcttcaagatgcagctgctccttcatctgcttccatatctaatcaaacaggtcaagattatttctctatccagaataggtccttgcaacttggatagcacaaagaggctatagtgcattctaactaccaagaactctttctgtggggtcatgaagctgatgaaaaactctcagacccagcctctgccaatggacagtcaggtgctcctgtgctgctgctctggggaactgatagtacaaacccagcagaagcctcggaacattccaaagctgcctggagggagcggggtcagagaggactctcccactgtcctcagtgttccctg

SEQ ID NO: 72251 - DNA, 633 bp, Homo sapiens
tcaaggagttgctttctgtgcccccagcaggagggctgtgggaggcaggcatcccctttgtgtccccatagcacccttgtgtccttgtggaacactttgtgtctccgtgtccttctgtgttcccaggggactctctgcacagcccatcttaacacttactccattacctgcatgtcctctgtccatgtgtcggttcccccacccctactgtgtgtaagctcctcagagaatgggaccccccactgcctctgtcagggtctggctctcaaaggtgcttgtcaaattgaacctgaatagagccagccaggtcttcaagatgcagctgctccttcatctgcttccatatctaatcaaacaggtcaagattatttctctatccagaataggtccttgcaacttggatagcacaaagaggctatagtgcattctaactaccaagaactctttctgtggggtcatgaagctgatgaaaaactctcagacccagcctctgccaatggacartcaggtgctcctgtgctgctgctctggggaactgatagtacaaacccagcagaagcctcggaacattccaaagctgcctggagggagcggggtcagagaggactctcccactgtcctcagtgttccctg

SEQ ID NO: 72252 - DNA, 633 bp, Homo sapiens
tcaaggagttgctttctgtgcccccagcaggagggctgtgggaggcaggcatcccctttgtgtccccatagcacccttgtgtccttgtggaacactttgtgtctccgtgtccttctgtgttcccaggggactctctgcacagcccatcttaacacttactccattacctgcatgtcctctgtccatgtgtcggttcccccacccctactgtgtgtaagctcctcagagaatgggaccccccactgcctctgtcagggtctggctctcaaaggtgcttgtcaaattgaacctgaatagagccagccaggtcttcaagatgcagctgctccttcatctgcttccatatctaatcaaacaggtcaagattatttctctatccagaataggtccttgcaacttggatagcacaaagaggctatagtgcattctaactaccaagaactctttctgtggggtcatgaagctgatgaaaaactctcagacccagcctctgccaatggacagtcaggtgctcctgtgctgctgctctggggaactgatagtacaaacccagcagaagcctcrgaacattccaaagctgcctggagggagcggggtcagagaggactctcccactgtcctcagtgttccctg

SEQ ID NO: 72253 - DNA, 605 bp, Homo sapiens
ttaatggactggaccagggtcatttcagagacggatgtagctcagtgctgtcacctcccccacgccactcctactctattgcaggggattatcagtcactttaataattctgtattaactatattttaatatgtatactccctttcctggcagtttatacatcaaaataaactttccattgtcagggatgtgatcactgaaacattttattaatacatgactggtttaggttcacttactttatgtaagcattagtagatcattctttatttaataagtgtgtccttggagcttaatgttgtttggattcagaggagtaaacccaagtatataatatatagtcctctcsttaatcaatcagtagtccagttgcaaagacaagcatgtgtataacactagatatctcactttgaagaggttgatacttagttatatgtacagtatatagttgatacttagttatatgtacagaaatgctgaggagagtggccatttcaggatagacttgtgagggatggtgttgcatgggagctggaatttgaaagtgatttctcagtggttagagaatatagccatggccttgtcttgattgtttttggggtagt

SEQ ID NO: 72254 - DNA, 605 bp, Homo sapiens
ttaatggactggaccagggtcatttcagagacggatgtagctcagtgctgtcacctcccccacgccactcctactctattgcaggggattatcagtcactttaataattctgtattaactatattttaatatgtatactccctttcctggcagtttatacatcaaaataaactttccattgtcagggatgtgatcactgaaacattttattaatacatgactggtttaggttcacttactttatgtaagcattagtagatcattctttatttaataagtgtgtccttggagcttaatgttgtttggattcagaggagtaaacccaagtatataatatatagtcctctcgttaatcaatcagtagtccagttgcaaagacaagcatgtrtataacactagatatctcactttgaagaggttgatacttagttatatgtacagtatatagttgatacttagttatatgtacagaaatgctgaggagagtggccatttcaggatagacttgtgagggatggtgttgcatgggagctggaatttgaaagtgatttctcagtggttagagaatatagccatggccttgtcttgattgtttttggggtagt

SEQ ID NO: 72255 - DNA, 1991 bp, Homo sapiens
cttggatcccacgtgtgcttttttcctaaattccccttgagttttccagtggtcgttaggccctgttttcatttcgatatccttagggaatatggtagactcccatcagtggcagcattccattatacttttaatagatatgggaacacagtatttttctatgtcttctcaattccttgtctatatttctgaaatctaaaagacactgaaaactgttttttcttcttttaggtttagatacaaagcttatttgggagcaaaacataacctgaattgactgaatttatagctttattgatcccacttatgtgactatttataagttttgctaaataaatttttttttattatagagtgtgactctagattttcctgggttcttacataatatataatatgtatcccttaggtattctaaggaactaaatctaaaaaattcagaattctgaaacacatctgacccaaagggtttggataagggattgaggatgtgttatattccctggtaagtgcttgatgtgtgtctcttaagtgcagagccatgaactgtaactgtgggcaaagctggagacgggtttacgtgactaaggacccaccagagtcagcagtgcatcaggtagctcattctttattatctgtagaagacatgttacagccacagggtactgagtcatctaaaaatcttttctgtttggttttggaatgtgttctgtttggtgttcccccccaccatagagtttctggttaggtgcagtttagactaaaactgccttatgtttgccgtcttccagtatatctagtcaatttaatgggtgggctggacgtatgtccaaggagcacacttgcctattgacggcatggttgtctctcaagctgtcttctttatgtgcccaattgaggccttgttctctgtcatctttctttgctgagagttccataagcttctatcctctacttctatcttcttctgaagccccattaacagagggtcctatggccagaggcccataaatgggattttacatttataactgagttcatttcaacaacaaacattttattgggcatctgtgttccaagcacttgcatgtgtattttattattttaccttcactaccgctttgagtagggattatccctagttttatgataggagtattggacctggaccaagttacttgccaaaagtttcagagttgtggtggaacttgaatttagacccaggtttaattcactgtctttcaagctgtttgcagtggagaagaaagcagtgcactgaacactcttaaaaactaaaggagtcaaactagtcacagctgggcatgttaaaatcttagtctaggaaaccggcctggtgacctctgcaattgytaatttctgtgatttttaggaaatctgaaggatccacctagagccgcaggtagaagctgaaaggggattgttagatttctggaagaagtctttctcactttctttccctacccccagcctgcctgcattttcctccatgtcctcaccttggctgccaagactgtccagacttggcagtaatttctgagaggtgggtttaagagggttgtaaatcctaggatgacccgtgatagccttctctctggacctttatgaactgggtgagtaggctggctccgaagagtggccaggaaatgccatgtctgaaggcagggggttaggctggatggtggtgtgggtcccagcctcttgtttttaagctattatgtatggttctaggcaattggtaactctatgcaaaccaatatatctgtagccacaagagggagctctcctcctgctgaaccaaaatgtaactaaggaaaggctgtattgatcacgtgcccctgcatagttagttgggacctgcattgagcaaaaccagaactgatattcattttcatttgctaagcttggagtttaggcagcagtaccagttgaacactcatctcttcttacaagtttcaaggaaattaaataag

SEQ ID NO: 72256 - DNA, 1478 bp, Homo sapiens
ttgttgcctgatatttagaatacttttttcaaactgttagaaagagtagatcagtaaaacgaaatgtaaaaagaatacggggcactaataactttttatcttactacataaggaagttaaaaaatagtaacgactacctctaatgttaccatcatttcacaaaatattttacatcmaaaaaagtaggaagaaaaacattatagaataaaggatgaaggcagttttgtgaccacacacctacacaccaccaaattgtgcttatttttctcattttgcagtcatctaggagaaacttgtcatggtctggactagcctggcatggagaagtcccagatccgtctgtgatgctgcccagactttagagatgccataaaggctacttagtatgcctcactctttgcttgttactttttctgaacagagctctgtcagaaaaaattgtctcggtcctgccaaggatgaaatgcccacaccagctggagccccaccagatccaggggatggattttattcacatatttcctgttgttcaggtgagagcctctgtgtggtttcttgtcctcttaacatcagaattcctgtgatgggcctggcttgtcctgtaatgggtccgtctgtcctggatcctgaatgtaatgggtgtggcttagatttggtacagcagaacatggtggtgttcgttgtcgtcatcttcagaagattgccagtcctgcatatactctagtttcatgctgtcacctgataagatctttgaatgttctcatctgacttttcattgcctttttggtaaaaacagaactctgtagcctggtatgctctgttcccttttgacctatccagcttgatttcattccttgcttttctttgttctttttgttctagcactctctggcattcattcagatttccccaggtttattcttccacctgtcacagtgcttttgcgttgctagttccttgggctggaatgctcttccattctctccttacctgtttaattcatatggcttacttcaacccttcagatctcagttccaccaaacctcttcaagaaagccttccctcatccgctaatccacagcatgttcctttatggtatgcactcctacggccacattcctttccttcaccagaatcttacagcagttcataatcatgtgtatccatgtgtgtgtgattgtttatctgcttctctcattagactcttaagctgcatgagagcaagtctgcatggctgtcttgcttattgctttgtttccagtacctaccagaacatcttacaatttgtagatattcagtccgtatggctaaatgcctaagggagagacttctctttgcctccagctgtttcccaaacccctatgattaagtggctcgtgctgtacagctcccaaacagccggccctccatattcgcagctccacatccataaattcaacaaacaatgcatcaaaaatgtttgggggtgggtgggggga

SEQ ID NO: 72257 - DNA, 1478 bp, Homo sapiens
ttgttgcctgatatttagaatacttttttcaaactgttagaaagagtagatcagtaaaacgaaatgtaaaaagaatacggggcactaataactttttatcttactacataaggaagttaaaaaatagtaacgactacctctaatgttaccatcatttcacaaaatattttacatccaaaaaagtaggaagaaaaacattatagaataaaggatgaaggcagttttgtgaccacacacctacacaccaccaaattgtgcttatttttctcattttgcagtcatctaggagaaacttgtcatggtctggactagcctggcatggagaagtcccagatccgtctgtgatgctgcccagactttagagatgccataaaggctacttagtatgcctcactctttgcttgttactttttctgaacagagctctgtcagaaaaaattgtctcggtcctgccaaggatgaaatgcccacaccagctggagccccaccagatccaggggatggattttattcacatatttcctgttgttcaggtgagagcctctgtgtggtttcttgtcctcttaacatcagaattcctgtgatgggcctggcttgtcctgtaatgggtccgtctgtcctggatcctgaatgtaatgggtgtggcttagatttggtacagcagaacatggtggtgttcgttgtcgtcatcttcagaagattgccagtcctgcatatacyctagtttcatgctgtcacctgataagatctttgaatgttctcatctgacttttcattgcctttttggtaaaaacagaactctgtagcctggtatgctctgttcccttttgacctatccagcttgatttcattccttgcttttctttgttctttttgttctagcactctctggcattcattcagatttccccaggtttattcttccacctgtcacagtgcttttgcgttgctagttccttgggctggaatgctcttccattctctccttacctgtttaattcatatggcttacttcaacccttcagatctcagttccaccaaacctcttcaagaaagccttccctcatccgctaatccacagcatgttcctttatggtatgcactcctacggccacattcctttccttcaccagaatcttacagcagttcataatcatgtgtatccatgtgtgtgtgattgtttatctgcttctctcattagactcttaagctgcatgagagcaagtctgcatggctgtcttgcttattgctttgtttccagtacctaccagaacatcttacaatttgtagatattcagtccgtatggctaaatgcctaagggagagacttctctttgcctccagctgtttcccaaacccctatgattaagtggctcgtgctgtacagctcccaaacagccggccctccatattcgcagctccacatccataaattcaacaaacaatgcatcaaaaatgtttgggggtgggtgggggga

SEQ ID NO: 72258 - DNA, 559 bp, Homo sapiens
acttggtggtgaaaacatctatggggtccctttaggtgaaaggcagaattactgacgggacacataggctaagtaagatggatctgttggagttgggtttgggctgcaaagatgaactgttaaggtcaatggaaagtatcgcttcctgttgagttgggcatgggctggcccacaggagcttttgagtgtagaatgccagattggcggtggctgtttcactgcctgctccattatttcaataaaaaagttgtctatggtaattgtgagggaagcgatcagggatttgctgcagacactgccatggtactgtgctgttctacctcccttccctgcattgaggaatgtgaacttagagtaattactctgacaggtgaacctgacttgtaacccagacakgcaaagtagagctctgactctcacagtgtaagagttctctgctttacaaaagggtcaccttaatatttaaccctgtgtgtgtgccttttagcatctgcaaaaaaataaaataaaataaatacatatatcatatatatatatatctgatatatatatatgtatc

SEQ ID NO: 72259 - DNA, 728 bp, Homo sapiens
cctttttcttctgtcaggctaaattcttcaatacccaattcagatcctgtaaacctattctaggcaccccaccccaggcaagaagtgaccacctcttctccaggctcctactcttgtatgtccccatgatacctgaaactcaacaggtacaaaattgaattcggccctcctactccgtattcctcttaggcaaactggacccctctttcttctctgactcaagctgctcgccaattctgtgtcttagtaattttcaagtctatttcttctggactgcgctgtagccaccttcctttgctgcycagagtctaattagatctctttcaacatatatttgatcattttactctaaaagctgtaatacttaggctccctgcaacttcttgggtaatctttagaatcctaaatacacaatactaagtcctgcatcgtcttggcccacttcacccagcttcacccctcttgcacatctgcatcttggcctgtgagctggtacctgagtccatagtgccattatcctacaattcccacttggtatttcaaaatccacctaagattttgccttgaggacttggcctctccagcatccttcctggtagagcactggctctattggaggagatcagatcacacttccttcatgtgcccggccccactaggctgggatttcatccagtcctcacactggactcaaatgatcagaggcagggatcagcagtgacagtttt

SEQ ID NO: 72260 - DNA, 1124 bp, Homo sapiens
gagaaaatgtaaagttccttacacatggtggattctcagtacatacttgttcctaccctccccctcaccttgaggttgatagaatgtgttttcattttgtcaccttgtagtctacactaattaccactttaataaggataatattacaaatgtatcttttacctgaacccaaattgaggcatctgtaattactgtcacctttactgcctgctgtcagacaaaccaggtagatctctgtcatcctagagggtgctccttgggaagctgttttatttttttctgtatccggggcttacacagtggtaggcgtataacagacatttgataaatgtttgaatagatgaatgcatttcatgggatttgcatcagacctggggaatagctctgtcccacatcctggccttggggccctcctacctggcaaaggaaagatttgccaaccctgacttagggataggccagccccttcccaaagaccttaaaccccattgaccttccttcatcagcagtgtttaaagttgttccactgtttaaaaactaggaatattgcgaggcagactggggagctgggctttctaattccaagccatgttaccagttagaatgttacatttgaataaatttggtattttattttaaatggatttatgcctrtgatagtttaaaaccttcctgtggagtactaaggacaagaaatattctacattgctgactgtgaacctaaagttcacatatggtaattacttagttctgaggccccaaattgagtagttttatggccagaaagatgacccaggtttccttactcctgcctcagagcccttcccaggactgtatcattggggcagataagaggatttgctgcggggctaaggcagtgtccacggggccttgaacagtgcatccccttggaggcactcagccacccagcagcttagcttgttgcattggcgagaagattctgtgggaaggaatagggtgtaaacgactctcactttccacactgtctgactcccgtaagctgttatccttgaaaataaagtgcagtgtttggcaagatagaaagggctgtggtggcagtttgcctagagagccctagtgttagcttagtgtcctctcagctg

SEQ ID NO: 72261 - DNA, 1124 bp, Homo sapiens
gagaaaatgtaaagttccttacacatggtggattctcagtacatacttgttcctaccctccccctcaccttgaggttgatagaatgtgttttcattttgtcaccttgtagtctacactaattaccactttaataaggataatattacaaatgtatcttttacctgaacccaaattgaggcatctgtaattactgtcacctttactgcctgctgtcagacaaaccaggtagatctctgtcatcctagagggtgctccttgggaagctgttttatttttttctgtatccggggcttacacagtggtaggcgtataacagacatttgataaatgtttgaatagatgaatgcatttcatgggatttgcatcagacctggggaatagctctgtcccacatcctggccttggggccctcctacctggcaaaggaaagatttgccaaccctgacttagggataggccagccccttcccaaagaccttaaaccccattgaccttccttcatcagcagtgtttaaagttgttccactgtttaaaaactaggaatattgcgaggcagactggggagctgggctttctaattccaagccatgttaccagttagaatgttacatttgaataaatttggtattttattttaaatggatttatgcctatgatagtttaaaaccttcctgtggagtactaaggacaagaaatattctacattgctgactgtgaacctaaagttcacatatggtaattacttagttctgaggccccaaattgagtagttttatggccagaaagatgacccaggtttccttactcctgcctcagagcccttcccaggactgtatcattggggcagataagaggatttgctgcggggctaaggcagtgtccacggggccttgaacagtgcatccccttggaggcactcagccacccagcagcttagcttgytgcattggcgagaagattctgtgggaaggaatagggtgtaaacgactctcactttccacactgtctgactcccgtaagctgttatccttgaaaataaagtgcagtgtttggcaagatagaaagggctgtggtggcagtttgcctagagagccctagtgttagcttagtgtcctctcagctg

SEQ ID NO: 72262 - DNA, 356 bp, Homo sapiens
taggatctgggactttgaaaattccacagagatttgtctttataaacatcttttaagtttcatcttaaatttgtcagtctgcaagcttctcaagcccagggtgtgagactatgcaccccaggtgcatccagctgatcctgaggtgatgggccagcactctgcctctctgtaatgtcctgctagaaaatctcaagcttttttattaatataagcagaaagaatcgtttcaaaacagaactgccactgtcatactttggtggagcagacattcccaaaagatctaggagtgacatgtgatgactataaagggaataraaatgagtttgatccaatggcagaaattcccagtgaatgca

SEQ ID NO: 72263 - DNA, 989 bp, Homo sapiens
actatgtttcttaaatcatttacttcttttcccatgatactttccctaaaataatgatgcaggggatggcagagcagagattttgagagaatccattttccatctctggcaacttggacaaatctgatatctttcactctcatctactaaacaccatgacttaactaacaaaattggtagcagaattggctggaatctagatttcctaatgtctctctactttcttttgcccaagtaccttatggtacaaactgctttcagaagaaatacttaagcaagaaatgtaaatgcaaattccccaaatgaggttaagtttgtaagtgtgacaaacctagtggctgggaacaggaaggaaagtagtggctgaactgtggtattagcatttgaaattttccttcctaaaatgtaagtttatggcaaaagtgctgacattaaaggggcagaaggacaagacagcaggtgcagccctgttactcttcatagtggaggtacaatgaaacctcagttaagttctcctgccccagcccaaatgcacaacacacgccagggaattccatctaggtctggcacccagtctggaggcttgaaaagtggcatcctgagtagggggaaaagtgtgagtagcttccttttcccttccccagcatgtgacatgtggacccagtcacaccactcactggctctgggaccctgggctcactggttttctttcttcatctcagtgagtgtcctcatctccccataacaggcacaatgccaaacatctctctcccaaagttgctytacagaaccctgggattacaggatgtacctagcacattagcagacattcaataaacaacagtttcccttccctctgttctatcctgaaaagacatgtatgctcttccatgtcccaaaaagcttctactggcagccagactatactatagaagaaaagaaacaaagaactagaaaagttgttgagaaaacgttttctcttctgaatt

SEQ ID NO: 72264 - DNA, 1129 bp, Homo sapiens
cttctaacttgatcacagttgtaaagtctcttttaccatgtaaggtagcacatttacaggttccagggattcgtatgtggacaccttgtgtgtttgagggagggggcattttcctgtgaaccacatgcaaagatgaaattttgattatcttcacatataataatttgaattttagaaaaaaaatttaaaaactccatctatgtctccagcaacatttccagtggaaaaaaaagcattataaaataaatagcattgcttttctctgaaagttaataaatagatgatcagaaggcacttcaccattttttcacacaagaaaaaaagtcaaaatagagagattgcttatcatgcacagaatctcattaaagcaygtcaggagaaggaaaaccacctcagatggatgagtgatctgaaatgcagatgagcaaataaatttataaatatatgtgcaaatgtatttgaacactgcagaactacatgtgtagaatgattaaataaatctgtaaaaagggacttaaaatactaaggataatatgtaattgggaaataaaggtaaattgtattttaaaatttcttctattatctgacaggaagatcaaagataatcaaattttaaacttagatgagttaatttgatacattttgtaatttctaaggtaaccattaagaattttaaaagcgtataatttataatatggtagagagaaatataattataaaaatagtcaatttaaaaataacaaaaaggaaaaagagatctgattggacaaatagtttaaaataaaatgtttaaatcaaaaataactatacattaataattatattaactgcgaaatgattaaggtaaaagagtatctttttctgcataaaaatagaaaatctaatctttgctatttttaagggacatattttaaatacaaaacacataatgtttgacttaacagagcagaaaataatattctaatagacaattagagaaaactgaagttgctctcagatttaacaaacgagaatagaatgcactactacagataaagaggattcaacatattgataataggttcaattaattttgatacttgaatttgacagtactattaggagaatattgacaaatacacagccaaga

SEQ ID NO: 72265 - DNA, 679 bp, Homo sapiens
cccttcaagaggtggagattaattctcctccccttgaatgtgggctgtgcttaatgacttgcttccaacaaatagaataaggcagaagtgatgagtgtgacttcaaaacctaggacagaaaaggtaccctggcttcctgcctgccctctatctcttgaatggctcactctaggccaggccacctgccacgttgtaaggactcttaagcagccttggagaggcccagccaacagccataagagtgccatcttgaaagtggaccctccagtttcgtcaagccctccgataactcagcccaggctgacatcttgactgcagcctcttgagagacyctgagctagaaccacccagttaagctgctcccagatttctagcccacaggaactgtaagctactgtgtttgctgttataaagggttaacctcctgacccctccctatgaccatgcagctgaaagggagccccagggtcaggtgcccactcctggttagaagctctttccgagtgagagtccagcacgctgcggagaggctggctgcttactcacctttccaggtcctgcaggtggagcagcaggtacacactgtgggaatggggtaggggcaccatcagtgacatcccccactggacaggaaccagccccgggcaaacagggaggccctggagaggtgtggggatcc

SEQ ID NO: 72266 - DNA, 679 bp, Homo sapiens
cccttcaagaggtggagattaattctcctccccttgaatgtgggctgtgcttaatgacttgcttccaacaaatagaataaggcagaagtgatgagtgtgacttcaaaacctaggacagaaaaggtaccctggcttcctgcctgccctctatctcttgaatggctcactctaggccaggccacctgccacgttgtaaggactcttaagcagccttggagaggcccagccaacagccataagagtgccatcttgaaagtggaccctccagtttcgtcaagccctccgataactcagcccaggctgacatcttgactgcagcctcttgagagaccctgagctagaaccacccagttaagctgctcccagatttctagcccacaggaactgtaagctactgtgtttgctgttataaagggttaacctcctgacccctccctatgaccatgcagctgaaagggagccccagggtcaggtgcccactcctggttagaagctctttccgagtgagagtccagcacgctgcggagaggctggctgcttactcacctttccaggtcctgcaggtggagcagcaggtacacactgtgggaatggggtaggggcaccatcagtgacatcccccactggacaggaaccagccccgggcaaacagggaggycctggagaggtgtggggatcc

SEQ ID NO: 72267 - DNA, 1409 bp, Homo sapiens
ccatgtcaccaggaaaccaacaacaataacacaaagaaaactatttaaaaagaattgtaagtccaggccaagaagtatttggaggatattatatgaaaaaagacagaaatcaccctggttgcctcagacactgctctagagtgatggttgggcaagggtccaaggtctcacgtccttggcaggaacagctgggtggtctctgccagcaaaatggaggctggaccagccagacacccattatataaccccttcaaatatagcagccaatgatccatgattattttacgcagaaacattctaggcagcatctagaatttagaagaaatttgatgactaaggaacaaaacttgattctgaaatgagtgagaaaatattctgctaattataagtgagtaactcaatgttaggttagtgttcaagcaaactgttcactgactcactctttcattcatcctctcatttcttcgtttactttacttgttcaacaattaccaagtactttttatgggcaagaacatggtgctaggtgctaacatgaaacaccaaaaatacagtttgatttctgagaaagcggagaacgacaaatgtacagatacaacacagaagtatcctagcagaagctacagaaagtgaagattgagaacagcagttcttgagtcaggccttgattcaaattccagccctgtcattcaacagctgagtgatcttaacctctctccacctcaagaccttcatttgcagaagaggatccaaatggccggctgctsgtgcggattcaatgagattacatccttaagatacccatcacatagcccattgcatatttagtcttcaaaaatgtcaactatgatgataatgatgttgatgctgtggctactgcctaagatacaaaggttgctattgaaagctattgaaagctgcctaagacacaaaggttgctattgaaagcagaggtggaaaaggtcacttcctaagcttcatgaccccaagcccaaataaacggccagggacgaattccctcaacacagtttgccagttcttgctcattgtcgctcagcaacatatgtgagagaaagcaacagcaggcatcgtacacgttcattttagcaaagtgctccattcaactcccagaagccagccagtctagctccaatatcacactggcagtggcagaggttaggaaagagagggagataataatagctcagtatcaacctaggcctgtgtcagaggaaattatagtggcatagatacaagactcctgaaaacaaattagcccttgcccatcaaaacactctgagatggttaaaatcagtatgcctgaccgggcgcggtggttcacgcctgtaatcccagcactttgggaggccgaggcaggtggatcacttgaggtcaggagtttgagacca

SEQ ID NO: 72268 - DNA, 1409 bp, Homo sapiens
ccatgtcaccaggaaaccaacaacaataacacaaagaaaactatttaaaaagaattgtaagtccaggccaagaagtatttggaggatattatatgaaaaaagacagaaatcaccctggttgcctcagacactgctctagagtgatggttgggcaagggtccaaggtctcacgtccttggcaggaacagctgggtggtctctgccagcaaaatggaggctggaccagccagacacccattatataaccccttcaaatatagcagccaatgatccatgattattttacgcagaaacattctaggcagcatctagaatttagaagaaatttgatgactaaggaacaaaacttgattctgaaatgagtgagaaaatattctgctaattataagtgagtaactcaatgttaggttagtgttcaagcaaactgttcactgactcactctttcattcatcctctcatttcttcgtttactttacttgttcaacaattaccaagtactttttatgggcaagaacatggtgctaggtgctaacatgaaacaccaaaaatacagtttgatttctgagaaagcggagaacgacaaatgtacagatacaacacagaagtatcctagcagaagctacagaaagtgaagattgagaacagcagttcttgagtcaggccttgattcaaattccagccctgtcattcaacagctgagtgatcttaacctctctccacctcaagaccttcatttgcagaagaggatccaaatggccggctgctcgtgcggattcaatgagattacatccttaagatacccatcacatagcccattgcatatttagtcttcaaaaatgtcaactatgatgataatgatgttgatgctgtggctactgcctaagatacaaaggttgctattgaaagctattgaaagctgcctaagacacaaaggttgctattgaaagcagaggtggaaaaggtcacttcctaagcttcatgaccccaagcccaaataaacggccagggacgaattccctcaacacagtttgccagttcttgctcattgtcgctcagcaacatatgkgagagaaagcaacagcaggcatcgtacacgttcattttagcaaagtgctccattcaactcccagaagccagccagtctagctccaatatcacactggcagtggcagaggttaggaaagagagggagataataatagctcagtatcaacctaggcctgtgtcagaggaaattatagtggcatagatacaagactcctgaaaacaaattagcccttgcccatcaaaacactctgagatggttaaaatcagtatgcctgaccgggcgcggtggttcacgcctgtaatcccagcactttgggaggccgaggcaggtggatcacttgaggtcaggagtttgagacca

SEQ ID NO: 72269 - DNA, 760 bp, Homo sapiens
aaaaaaaaaaaaaaaacccttaaaggacacaaactagtctttcaaatctggcagttttaccactgctttaattcctaagtgctcaattaacatgtcctattagatcattggcatgttgcctgaaaccagaggtgaggtatgaagggacatcaacagcctcccacttgcagaatctggtaactcatgcaaaaggatatgtttccaacacacttactaatagaaattacgatgttgatcaggtccaatgaatttccagttgtctccggtttttaaaaggccatgtacttggtaggcaagttctagatctctgagagatgagcactgaaaatatgcaagtagtaagtatcactctgatamcctgtcagccagtggttcacaaataaataacaacagtagagtgtcttgtgaaaataatgttgattcaacatattattggttgacagcaagtaagttataagaaatgggggggagacaaatcccaagttctgtgaaatttattacaatattattttaattaagcaattataccattaaaaattaatcctgtaacaacacctggtcaagtgcacaaaagacacctgcactgcagagtctggactagtaaaaatctccatgaaataactccaaaatctacccacaggaaagttaagttatggttcttactatgaaatactggttgctgccaacaaataaaacaccctgaaagtatgcctggatatacatacgcttgagtacccagagtaaaaaccttgtgaggatc

SEQ ID NO: 72270 - DNA, 760 bp, Homo sapiens
aaaaaaaaaaaaaaaacccttaaaggacacaaactagtctttcaaatctggcagttttaccactgctttaattcctaagtgctcaattaacatgtcctattagatcattggcatgttgcctgaaaccagaggtgaggtatgaagggacatcaacagcctcccacttgcagaatctggtaactcatgcaaaaggatatgtttccaacacacttactaatagaaattacgatgttgatcaggtccaatgaatttccagttgtctccggtttttaaaaggccatgtacttggtaggcaagttctagatctctgagagatgagcactgaaaatatgcaagtagtaagtatcactctgataccctgtcagccagtggttcacaaataaataacaacagtagagtgtcttgtgaaaataatgttgattcaacatattattggttgacagcaagtaagttataagaaatgggggggagacaaatcccaagttctgtgaaatttattacaatattattttaattaagcaattataccattaaaaattaatcctrtaacaacacctggtcaagtgcacaaaagacacctgcactgcagagtctggactagtaaaaatctccatgaaataactccaaaatctacccacaggaaagttaagttatggttcttactatgaaatactggttgctgccaacaaataaaacaccctgaaagtatgcctggatatacatacgcttgagtacccagagtaaaaaccttgtgaggatc

SEQ ID NO: 72271 - DNA, 760 bp, Homo sapiens
aaaaaaaaaaaaaaaacccttaaaggacacaaactagtctttcaaatctggcagttttaccactgctttaattcctaagtgctcaattaacatgtcctattagatcattggcatgttgcctgaaaccagaggtgaggtatgaagggacatcaacagcctcccacttgcagaatctggtaactcatgcaaaaggatatgtttccaacacacttactaatagaaattacgatgttgatcaggtccaatgaatttccagttgtctccggtttttaaaaggccatgtacttggtaggcaagttctagatctctgagagatgagcactgaaaatatgcaagtagtaagtatcactctgataccctgtcagccagtggttcacaaataaataacaacagtagagtgtcttgtgaaaataatgttgattcaacatattattggttgacagcaagtaagttataagaaatgggggggagacaaatcccaagttctgtgaaatttattacaatattattttaattaagcaattataccattaaaaattaatcctgtaacaacacctggtcaagtgcacaaaagacacctgcactgcagagtctggactagtaaaaatctccatgaaataactccaaaatctacccacaggaaagttaagttatggttcttactatgaaatactgrttgctgccaacaaataaaacaccctgaaagtatgcctggatatacatacgcttgagtacccagagtaaaaaccttgtgaggatc

SEQ ID NO: 72272 - DNA, 732 bp, Homo sapiens
ctaggagttggaaaccatccttggcaacatggtgaaaccccatgtctacagaaaatacacaaactagccacacctgtggtcccagctactcgggaggctgagtcagaaggatcacctgagcccaggaggtggaggctgaagcaagctgtgattataccactgcactttagcctgggagacagagcgagaccttgtctcaaaaaaaaawaaaataaaaaaaaaaaaaatgacaggttttggtgggtagcagactacagtcctcaggctggccacctgcttctgtaaataaagtttgattggaacacagccatgcctatttgtttgtgtactacctgtggctgctttggtattaggtggcagagctgagcagctacagcagagcctgcatggcccaggaccacagaaatatttactatctgaccccagaggaatgagggcttgctaaggcctgagagagcagcaagaattcgctgccttcagtcccctctttagccctgaggctggccccagcacctggctcacagttgcctcctgatgaccccaaactctccctgcccacttgccctgcacattcccctcaaacttgtttcttcttggacattatgtgcttaaagtcactgtctgtcactgctgttccctatggtgtctaccacacccctccgcaacagcaatacatttatatgcttacttcctagtggttcccccaccatgctgtcaactccagggtggcga

SEQ ID NO: 72273 - DNA, 732 bp, Homo sapiens
ctaggagttggaaaccatccttggcaacatggtgaaaccccatgtctacagaaaatacacaaactagccacacctgtggtcccagctactcgggaggctgagtcagaaggatcacctgagcccaggaggtggaggctgaagcaagctgtgattataccactgcactttagcctgggagacagagcgagaccttgtctcaaaaaaaaataaaatmaaaaaaaaaaaaatgacaggttttggtgggtagcagactacagtcctcaggctggccacctgcttctgtaaataaagtttgattggaacacagccatgcctatttgtttgtgtactacctgtggctgctttggtattaggtggcagagctgagcagctacagcagagcctgcatggcccaggaccacagaaatatttactatctgaccccagaggaatgagggcttgctaaggcctgagagagcagcaagaattcgctgccttcagtcccctctttagccctgaggctggccccagcacctggctcacagttgcctcctgatgaccccaaactctccctgcccacttgccctgcacattcccctcaaacttgtttcttcttggacattatgtgcttaaagtcactgtctgtcactgctgttccctatggtgtctaccacacccctccgcaacagcaatacatttatatgcttacttcctagtggttcccccaccatgctgtcaactccagggtggcga

SEQ ID NO: 72274 - DNA, 541 bp, Homo sapiens
tatgttaaaacattcggacctcacaacaatgtgaggcagtaatgtttctatcctcattttgtatatgagaaaactggcatacagtatgtattaataacttatcccaaggtcacatagccagtaagtgctagccaggatctagacacagacagctggactccaggatctgtgcttttaaccacttctctatatattgatggtcttgagtaaggggagagggatgggctatctatgacaaaaaacatatccctcattttggaatttcactgcaatgcatctaacatgaattgagaaatcaacatgacccggcagtggtttagccaccrggaactcagagtcctcaagaacttaccatggagtaggggagatagacatatctacaaatagctatagtgaaaggcagaaagcaatcagtgccctaagaagctgatgccttgtcagcacaaaggaggaaggaaagatatttcttcatgattttagtgattagaaaatctcacctagagataattgttggtttgagttctgcttgttttggatagaa

SEQ ID NO: 72275 - DNA, 987 bp, Homo sapiens
ttattccaatcagactgcttcctgttcctctaagtcttgaaaacatgtcttctttccttgcctcttgtcttctctaactagtcagggaatcaccgaactcagtgttagaaaccaagagatcagctggctcaaattctacctgttgtaaatcactgctatgctgcccttatttattcatttattatttgagaagtgaggtcttgctatgttgcccaggctgacctccaacttctgtgctcaagtgattctcctgcctcagcctcctgagtggctggaactataagtgaacatcatcacaccttcgtaacctgaaatccttaaaactttggctcatccttaaactgaggcctacagagtaagtcttacttccatcggctttcaggaaaaatttctatgacctatgaagcccggagcaaagaatcaagcacatatatttgaaaacaaatttaaaatatgctcacttaaaatttcccttttaaatatttttacaagataggttctaaaacattacgtttagagtgatcctatgtgataaaaggtacatcttgagcctagaagttcaaggccagtctgggcaacatattgagaccctgtctttacaaaaaaaaaatttaaaaattagctgggcatggtggtgtgtgcctaactatttgagaggctgaggcaggaagattgcttgagcttgggatgtcgagctatagtgagctatgatggcgtcacggcactccagcttagacaacagagtaagacagcaagactctgtctctgtctctcaaaaacaaatgaaaaaaattaaaaacaacaaataaagaaaaatayatgtgtaaatatatgtaaagggaaagtccagaaagatatacacacaaatgccaaatatctctgcatggtggagttatgctttgatgattgggagctttctaatttcctcttgtttttttttgtattaaatgaatttttgtctaataaatatatatcatttgtgtaatg

SEQ ID NO: 72276 - DNA, 987 bp, Homo sapiens
cactttaataaatttacaaaaacaaaaaattaataaaatttaccaaaaaaagatggtcattagcaaattactgttggatcaaattctggcttttctcactgagttcttttataattcttctcatccaaggtgctttggtaatttagatgagtttcacggttcaaaaaattggacatatattaatcctcaccatttaaattctctcctaaattttcctgtattttaattgtacataattttcacccattttttttcttaacaactcagatgttaaaaaattaaagcattgaggctgggcgcggtggctcatgcctgtaatcccagcactttgggaggctgaggcgggtggatcatggggtcaggaattcacgaccagcctggctaagatggtgaaaccctgtctctactaaaaaagaaaaattagccaggcatggtggcgggtgcctgtatcccagctacttgggaggctgaggcagagaattgcttgaacctgggaggcggaggtcgcgatgagctgagatcacaccactgtgctccagcctgggcgacagagcgaggcgccgcctaaaaaaaaaaaaattaaagcattgacacttcttgtttctgaagtgggagataggatattgaatatcaggaagtgaggttttctgtgtttatgagatgggtgactttgtgcagaagactctgttaagattctggttacttctcagactggagctagaatcatgcagtcttataactcaaagagcctttagaaaccrgccagccctagtcgacccactttgcagaggaccaaacctgtgatcagagagcttaagtaaatttgctgtctgtcgcagtgtggtcagaaatagaatcaagctttctcactctaatttcagaaagcccttgctcctcagcatatactgggtatttctgcattattgggtaacactctgcctttactcagacattgtagactgttttgatgtcagccttaccgtaatc

SEQ ID NO: 72277 - DNA, 987 bp, Homo sapiens
cactttaataaatttacaaaaacaaaaaattaataaaatttaccaaaaaaagatggtcattagcaaattactgttggatcaaattctggcttttctcactgagttcttttataattcttctcatccaaggtgctttggtaatttagatgagtttcacggttcaaaaaattggacatatattaatcctcaccatttaaattctctcctaaattttcctgtattttaattgtacataattttcacccattttttttcttaacaactcagatgttaaaaaattaaagcattgaggctgggcgcggtggctcatgcctgtaatcccagcactttgggaggctgaggcgggtggatcatggggtcaggaattcacgaccagcctggctaagatggtgaaaccctgtctctactaaaaaagaaaaattagccaggcatggtggcgggtgcctgtatcccagctacttgggaggctgaggcagagaattgcttgaacctgggaggcggaggtcgcgatgagctgagatcacaccactgtgctccagcctgggcgacagagcgaggcgccgcctaaaaaaaaaaaaattaaagcattgacacttcttgtttctgaagtgggagataggatattgaatatcaggaagtgaggttttctgtgtttatgagatgggtgactttgtgcagaagactctgttaagattctggttacttctcagactggagctagaatcatgcagtcttataactcaaagagcctttagaaaccggccagccctagtcgacccactttgcagaggaccaaacctgtgatcagagagcttaagtaaatttgctgtctgtcrcagtgtggtcagaaatagaatcaagctttctcactctaatttcagaaagcccttgctcctcagcatatactgggtatttctgcattattgggtaacactctgcctttactcagacattgtagactgttttgatgtcagccttaccgtaatc

SEQ ID NO: 72278 - DNA, 987 bp, Homo sapiens
cactttaataaatttacaaaaacaaaaaattaataaaatttaccaaaaaaagatggtcattagcaaattactgttggatcaaattctggcttttctcactgagttcttttataattcttctcatccaaggtgctttggtaatttagatgagtttcacggttcaaaaaattggacatatattaatcctcaccatttaaattctctcctaaattttcctgtattttaattgtacataattttcacccattttttttcttaacaactcagatgttaaaaaattaaagcattgaggctgggcgcggtggctcatgcctgtaatcccagcactttgggaggctgaggcgggtggatcatggggtcaggaattcacgaccagcctggctaagatggtgaaaccctgtctctactaaaaaagaaaaattagccaggcatggtggcgggtgcctgtatcccagctacttgggaggctgaggcagagaattgcttgaacctgggaggcggaggtcgcgatgagctgagatcacaccactgtgctccagcctgggcgacagagcgaggcgccgcctaaaaaaaaaaaaattaaagcattgacacttcttgtttctgaagtgggagataggatattgaatatcaggaagtgaggttttctgtgtttatgagatgggtgactttgtgcagaagactctgttaagattctggttacttctcagactggagctagaatcatgcagtcttataactcaaagagcctttagaaaccggccagccctagtcgacccactttgcagaggaccaaacctgtgatcagagagcttaagtaaatttgctgtctgtcgcagtgtggtcagaaatagaatcaagctttctcactctaatttcagaaagcccttgctcctcagcatatactgggtatttctgcattattgggtaacactctgcctttactcagacattgtagactgttttgatgtcagccttacygtaatc

SEQ ID NO: 72279 - DNA, 727 bp, Homo sapiens
cctttctctttgtggagtctctgtgggtggactctatagtacctctgcagtgaaattctgcctccctcccgtccatgcagaaggtgcatgtgcagtatggtccccagcaggtaggaatagcaggaagtagtgcattaaagccaatggatacaggtagatgtgggcatggtrgtttaaaaacatgtcgataaattctttaattattctttcttcaagaggtggagcttagcttcaatcttccctcctctgccccaagtgtgggctagacttggtgacttgtttataaagactagaataagggaggagtgataatactgatgtaaaacttcagggcctaggtcatgaaaggcattgtgaggctggcctaggtcatgaaaggctcagacctgtaatcccagcactttgggaggccgaggcgggtggatcacctgaggtcagaagttcgagaccagcctggacaacatggtgaaaccctgtctttactaaaaatacaaaaattaggtgtggtggcaggtgcctgtaatctcagctacttgggaggctgaggcaggagaattgcttgaacccgggaggtggaggttgcagtgagctgagattgtgccactgcactccagcctgggtgacagagtgcgactccatgtcaaaaaaaaaaaataaaaataaaaaataaaaaccaaacaaactaaaaaagcttcttcctttctctctcaatctctctctctctcct

SEQ ID NO: 72280 - DNA, 724 bp, Homo sapiens
aggatctgtggtagaaatagaaatcacccgggttatgaaaaggaatttaacagggaattaggagctgatgaaattgttggaagaattggaggagtgcctctaggcttggcctccaggaatgggaatggttcctgggacaaggtggcagcatcggccgcttccccagcaagagagctgggaatcagaaggccaccactagcagtgccaatgccagaccacccaggcactgctgccacccatggcacagccaccactttacacccacgaagctgctgacaactcatggagtggtctccacgttgctgtggttctgtggctctcccgagggagagaaaatgttatccttcttctgccttccaaatatcatacaagtgcattcagtaccctgggatgttttttaacctatcaaggyagaggttaatcagtgggggttggaaggagtgagtgattcagcagaagcctagtttctggggaagggagggaacttaggggagatgtggttagcacacgcacactcaagggactcagactctattctgatgttccgacaagagactagccattggctctttctgggcattttctttcatttagacagtgagaggaattgctgcatcagggaatcaagagaaaaaatattaatttagctacatatgtttatactctggagaaataaccactacaggaatgcttgcactcacttttatactatcatacattgact

SEQ ID NO: 72281 - DNA, 773 bp, Homo sapiens
ccattactgggtatatacccaaaggattataaatcatgctgctataaagacacatgcacatgtatgtttattgcggcactattcacaatagcaaagacttggaaccaacccaaatgtccatcagtgatagactggattaagaaaatatggcacatatacaccatggaatactatgcagccacaaaaagaatgagttcatgtcctttgtaaagacatggatgaagctggaaaccatcattctgagcaaaccatcgcaaggacaaaaaaccaaacackgcatgttctcactcataggtgggaattgaacaatgagaacacttggacacaggaagggtaacgtcatgcaccggggcctgtcatggggtcgggggagggaggagggatagcattcggagatatacctaatgtgaatgacgagttaacgggtgcagcacaccaacatggcacatgtatacatatgtaacaaacctgcacgttgtgcacatgtaccctagaacttaaagtatatataaaaaataaaagagtatgtttgagaccctggttcttacaactgtctttatttctttctaataatatgataaatgtggattttctgttgttgatggagatgacagatttcctgtggatgtctggagaaatgaacactccgcccaaggaggtggctgcatggagtgctgacaggtttggacttctccttaaatggtccaggcagctggtgaacgatgggaatttagagaatctggcctctttcctcaggaagcatccgttcttct

SEQ ID NO: 72282 - DNA, 773 bp, Homo sapiens
ccattactgggtatatacccaaaggattataaatcatgctgctataaagacacatgcacatgtatgtttattgcggcactattcacaatagcaaagacttggaaccaacccaaatgtccatcagtgatagactggattaagaaaatatggcacatatacaccatggaatactatgcagccacaaaaagaatgagttcatgtcctttgtaaagacatggatgaagctggaaaccatcattctgagcaaaccatcgcaaggacaaaaaaccaaacactgcatgttctcactcataggtgggaattgaacaatgagaacacttggacacaggaagggtaacgtcatgcaccggggcctgtcatggggtcgggggagggaggagggatagcattcggagatatacctaatgtgaatgacgagttaacgggtgcagcacaccaacatggcacatgtatacatatgtaacaaacctgcaygttgtgcacatgtaccctagaacttaaagtatatataaaaaataaaagagtatgtttgagaccctggttcttacaactgtctttatttctttctaataatatgataaatgtggattttctgttgttgatggagatgacagatttcctgtggatgtctggagaaatgaacactccgcccaaggaggtggctgcatggagtgctgacaggtttggacttctccttaaatggtccaggcagctggtgaacgatgggaatttagagaatctggcctctttcctcaggaagcatccgttcttct

SEQ ID NO: 72283 - DNA, 576 bp, Homo sapiens
tttttggctaattttatcctcctagccactgctctacccaactgactactccagcccaagcccaagccctttgcattgtcacagttttataatttgctactctgtttattttggtgtacgtttgtctcttactgcaacttcgtgtcttcacacaaaggttcctgtgcaatataaagcttgtattaaataaatttgcatgcttttyccctgttgatctgtcttacgtcaattttattttcaggcccagctgaaaaaccctgaaaggttagaggtaaattgttgcacgccccaccatatcactgaggtatataattaataaatttgcctaagccagaggttctcaactgggggccattttgccctcacctcaggagacattagcaatgtctggagacagttttggttgttacagctggaactatccaactccaaatgttggttgtgctgaggttgagaaaaccttggcctggggtatttggaatgagagctgagatgtcctaattcaatgggtgtcttaggaaggataagtcctagcagcctgtgatgtctcagtttccaactaaagtatccaagaaa

SEQ ID NO: 72284 - DNA, 1154 bp, Homo sapiens
cagctttagactctgagtatattactaaattccactatttcaatcagaaatcttcaaatcagcttatttaatttgctcaagcagtgctgaataaactggacttcatcaaaattaagaatttctgctttgcaatagatattgtcaagagagtaaaaagacaagccacagacaaggagaaaattttttgcaaaagacatatctgataaaggacttatcaaaaatacaaagaacacttaaaactcaacatttggaaaacaacctgattaaaaaatgggccaaaggcctttacctccccaaagaagttaaccagatggtaaataaatagccatatgaaaagatcctccacgtcatatgtcatcagggaaatgcaaattaaaacaacaataaaatatgacacacatctattagaatggccaaaatccagaacacttacaacaccaaatgctggcaaggatttggagcaacaggaactcttattcattcctggtgggaatgcaaaatggtagccactttggaagacaatttggcaattgcttacaaaactaaacattctcttaccttatgatccagcaatcatactacttggtatttatccaaaggagatgaaaacttatgtccgcacaaaaaaacctgcacacagatatttataacagctttttttcatcacactggggtgagggatgttgataatggggaagggctatgcttgtgtcrgggcagaaagtatatggaaaatctctggacattcctttccattttgctgtgaatctaaaactgccctcaaaaaaagtttaaataatttttttaaagcagtactgtattgtgatgtttaactcaattacttattacaagaaaactattcaactggtcaaaacgttatatataagaagtttctgtttgttaaaaacattgtttcaaatatatttaggctttgacttttaaaagtatacagcaacattcaagataactagacagaatgcactgcaacttggcaggtttttaaatccttggacttactggcctaaggaaagatgtgtaaacatccatgattcagaaatacagggagaaattggggcagccagacctcatcctcttgccctaaagggaaaagatatctttcttgcggtatctaagatatgaatcttagataatat

SEQ ID NO: 72285 - DNA, 840 bp, Homo sapiens
tgagtcattagctccttaagaacaccaagagtctcaggacaagctgtttaattagtgagagaataaagactcctgttccatttctggacatgaattttaacttaacaattagttcaaatgcagggatgagaaatgccagggtttttgccactgctggtttgtgtagctgctggaagatcctgccttccataagtggcccatcatttttatgctaaatttcagtcatgttggtaaagcccatttcttttattgccttcaaagtgttttcactgacaaaattagagaagaaatgaagtattctcatctytctcattgtctggcttccccccagttttctgtttcttcaggagcctcgataccatcttcttcggattcccctttgttttcagtttttgctttttttgtatcacgcccagcattagtcactatttttctcttgttcttcttttcttttttgatttcgaatctagagactgaattgctgcttctgcactggttagtatgatagatttctagttttctttaacttttacattttctactatttctttagacatgtctccatttggggcttctgacaagcccacaatcataacatgttttagggatttttttaacttttccatgccccactgtttcttctgacacatttccattttgagcctctgataggctcacatccaaagcccccggtggctttaggtttcactgccaccatttgaaattctgcctctccatcttcttgcacaggagtgtcatccgtaggtaagatgtgttcttggggagacgccttcacatcttcacagcagcaccactgtatgggtcctccactctccaaat

SEQ ID NO: 72286 - DNA, 1081 bp, Homo sapiens
tgtattttatatatagtctttcttgaaaaaagcaagaggaaaaaaaaaagcatgaagaacatataacatatggcattccctatcgcctcagctggtgtttgccatttcctgcttgtaactttcttaattttacatctcctctatttcaatatactagacattttaatcagatttgcaagttggccttccatttcttcacttgcagccccggctcctattaatcttttcaattacatgagtaggcctattcratttaaagaagagctaataagtacaatgcctagggtgtcttcatgaataatcaataatgtgctcattgtgatgtggctgtctgggtaagctatgctctgatgcaagaggcaataaaattcaaaactattctaatattttaatcaaatattataggattgatatatgtgatatttgggagaacaaaaatcagtgagtagcatagaggcaccctgtgagggggaaaacaaaaacaaaaacaaaacaaccttactttgagtcactcaagcattgcccctcaaagctgggcctgtttttaacttctacgccctgcccaaatccaggctgcatatgaagcagttctcttcaggaaagtcaggaaaacaaaactggtcattaaccctcaggcaagtagattgaatatctttcctgaagcaattaattaggattccagcatgttaggatcttatcctttgctggcaaaaccttcctcactaattccaatgtcagaagtggaaacaaaacaaaacaaaaaaagtgaaagcgcctccacagattctaaaataaatgcctatttgttctcaactagaaaccaattgctgggaaatgttggcaactcaagatgatctcccattccaagattctcactgccatcctaagaatgctgtggtcctaagagttcctgtagtttgcttcagcaattaactctgtgcctttagacaccccaaggagttttcctggtaaatgtaaagagtaacttacccaaaacacattctttcacactctggcagcaatacctaaggttaggcagtaccatttaaggaactaatgcgacaggctagaactcaatgtt

SEQ ID NO: 72287 - DNA, 514 bp, Homo sapiens
ttttttcatatatttatctatcactgagtcttcttcgggaaatcatgatattcatgtgtttctttccctgccagtctwctgagatgtttatctcttccttgatttaagttccttataaaaaataactatcatacataaatagtaaaatgggctggtcgtggtgggtcacgcctgtaatcccaacacttgggtaggccaaggtgggtggatcacttgagcccaggagtttgagaccagcctggccaacatggcaaaaccccatttctactaaaaataaaaaattagccaggaacggtggtgtgtgcctggtcccagctactcacaggcatgagccaccgcacctggccggaatttttatgtagtcaaatccagtattttccattacggtttatagcattcttgtcattgaaggttaaatacaacaaacaggacagaaaattatttacatatatttttaatgcacacataattatatgtttaaatgtacttagagacggaaatataccaaaatgtt

SEQ ID NO: 72288 - DNA, 932 bp, Homo sapiens
atgggctagagaaagaatttgaaatattgatattcagaaaaaacacctgtagtaggctaaattatacagttacaatctaacctcacataattaataagtctatgaccataggaaacttactcaatctccttttatctcttttttctcactgttatttagggaaaatgcttatcctattgaattaatatttgaggagaaaaatgtttgtagacagactatgtataaaaatgtacattaatttcatgtaaatttgtgtcccttctctaccacaactccactctttccatcctgccctgtaccctgggaagctcacctgcatggactacatgaagatttccttgccgtgtggcttctcgttaaggttaagcaatgagagtacaagcccaacactgaaatgtaaagaggggagagatactagtgagctttttctagtctttcagattaacaaggatcacctgtgttattctacttaaagacacaattcctgtcctacagccattctctccatgagtttgagtaatgactctctcccattgaccttagtgttcaacagatgataatgcctcccaaattttgctctgtgataccactactccatgtgttgttgatatwcttaactttgactatatatgtactaatagttcctttgttgaattttttaaatcactagagtgattgtgcacattggcttaattacagttccagtttatgcttcttgttctggtgtacttattaatttcagattagcagggattggacagtaggtgatatgttcaacttatgagtaatctcactcgagtaggctatctttcctgatgtaaccctgacagacagagaccattctaaaaatattagtatatttaataatcattcagtaaatagtatacaaacataattattttagctcttaataaacagatttttaataaaat

SEQ ID NO: 72289 - DNA, 694 bp, Homo sapiens
gaaattccagttttccagaataacagcttatgtagaatgtttattttttaaaatgcacataactgaccaagaaaggcagggttttatggttggtgctttccttattttttaggtcaaggtaactcctcttagggaaagcagtgtaraagaaaagggcttttgtgcctgtataaaaacctgaaataactggaagcaggtactagaaaaatggaatcacaaatatttattgctctattgagcatatgtaaataaatctgaattaagaagggaagggaggacatgaatcattattgagcaattactgtgaggaagacacttccacagacatttaattccataacgtaatattgtaaggttgatattattatcactgctatactaatcacggagcaaaaagctcaaaatggctaagtaactccttgaaagtctctcagacacaatttttatccatggccacttgattctgaagcccatggtctttccagtctactcacgtacttggcagtggtagagattaaaaggtgctttctcgctgcgtgcagtggctcaagcctgtaatcccagcactttgggaggctgggttgggcggattacgaggtcagatcgagaccatcctggctaacgcggtgaaaccccgtctctactaaaaatacaaaaaattagccgggcgtggtggtgggcgcctgtactccca

SEQ ID NO: 72290 - DNA, 1168 bp, Homo sapiens
ctcttcattgatttagctcactcttccagtatgatcctggacccagcccttgcataataaccaaaatgctgataaatgtgtttttcaaacaaaggagcagctttctctcgaataattctacctatttctcctggcagagaaaatatttgcagccagcataaaaaagtaaataaataaaaaataaagtaaatggatgaaaggaaacttgttcttattcagaagcttgtaagattatccatcttcagaakagaaaactcttaatattgcaatcagcagccctgtctaaaacagagctttctgaaacatgggactctcaatgagttcagtcaaaaatcaatacaggttgagtatttcttatctgaaatgcttgggaccagaagtatctcagattttgaaatatcttggggttttgaaatgtttcatataggcaataagatatcatgggggataggacctaagtctaaacacaaaattcagttatgttttatatacaacttatacacatagcctgaaggtaatttatgtgtgtgtgtgtgtgtgtgtgtgtgtgtgtatgtgtatgtatatttagtgttgtacattaaacaaagttttgactgctttttgactgagccccatcacatgagttcaggtgtggaatttctcacttgtggcattatgtcagctctcaaaaagttttggattttcgagcatttcagattttggatttttggattagggatgttcaacctgggctaaccttaaaacagaaaactaaagaagacatctcggattaaagcaagtagtcttgaccattcgccttgccagagtcctaaaatgtgaagttacccccaaaatctgaaggtctatgtagtgtcaaaaaggtgttacccttttctccccttctgtaagagtcacagctgtcactcctataacaaaagacaggttaacaagagaagaaacataacaaatttatttaatcaatgttttatgtgacatgggaaccttcagaaatgaaagcctaaagacccagggaaaactatttttatgcttagatttaatgaagattagacagccatgtagaaatgtgatgggacaaaagggtatgatctaatgataatagactcgggggagaaacccagcacctattcagattcttcttgatctgtgtggctgtccttttctcttg

SEQ ID NO: 72291 - DNA, 1168 bp, Homo sapiens
ctcttcattgatttagctcactcttccagtatgatcctggacccagcccttgcataataaccaaaatgctgataaatgtgtttttcaaacaaaggagcagctttctctcgaataattctacctatttctcctggcagagaaaatatttgcagccagcataaaaaagtaaataaataaaaaataaagtaaatggatgaaaggaaacttgttcttattcagaagcttgtaagattatccatcttcagaagagaaaactcttaatattgcaatcagcagccctgtctaaaacagagctttctgaaacatgggactctcaatgagttcagtcaaaaatcaatacasgttgagtatttcttatctgaaatgcttgggaccagaagtatctcagattttgaaatatcttggggttttgaaatgtttcatataggcaataagatatcatgggggataggacctaagtctaaacacaaaattcagttatgttttatatacaacttatacacatagcctgaaggtaatttatgtgtgtgtgtgtgtgtgtgtgtgtgtgtgtatgtgtatgtatatttagtgttgtacattaaacaaagttttgactgctttttgactgagccccatcacatgagttcaggtgtggaatttctcacttgtggcattatgtcagctctcaaaaagttttggattttcgagcatttcagattttggatttttggattagggatgttcaacctgggctaaccttaaaacagaaaactaaagaagacatctcggattaaagcaagtagtcttgaccattcgccttgccagagtcctaaaatgtgaagttacccccaaaatctgaaggtctatgtagtgtcaaaaaggtgttacccttttctccccttctgtaagagtcacagctgtcactcctataacaaaagacaggttaacaagagaagaaacataacaaatttatttaatcaatgttttatgtgacatgggaaccttcagaaatgaaagcctaaagacccagggaaaactatttttatgcttagatttaatgaagattagacagccatgtagaaatgtgatgggacaaaagggtatgatctaatgataatagactcgggggagaaacccagcacctattcagattcttcttgatctgtgtggctgtccttttctcttg

SEQ ID NO: 72292 - DNA, 666 bp, Homo sapiens
gagaggttctgctgcagaactgttgtgttagaggccagcagcacggtcagatgggcccaggaggctctggaatgctccatttcagttcagacatgagcttccctgtgagtgtggtggcactctggaaaggctgtggagcctggtctggggtcccctctcaggctggcttgtgagggggatttgcacaggtgagcacaatgtgtggcctgcgactttggtgggctgattgcttaaggacagggatttcagttctgggtccctgtttcaggcctgccagggagcaacatgtagctgataggcttcagagctgatggacactgaagcacaggtctttctgtggcccctttccagatcctctttgaaatgaccacagagatatcaagtagaaggacaacagaaaatgtccggaaaactaagagaggggccagagtcccaagggattcagttccaggaagtcaattgaagraagacagaaagggcagacaccaatcctcttggaagagctgtgtgttgcaggaagggaagaggagaggagagaccctggcggaacctgccagtacctgccaactcagggtcagagaacttcctctcctctcctaggcgtgattgccagtgcaaaggagatgtcagttaaagtaaagcatgcccagttcaatttttaataca

SEQ ID NO: 72293 - DNA, 553 bp, Homo sapiens
tccaagcctctgataaactcycccacaatgaatccttaaaaactcttagtctgtaaaagagtggggctctaacctaactcagccagcagcccctctcaggtttgtttaatgaccctgttaactgtaaacccacacttcgtgtttctctcctctttctttaatttcttacagatgtgtgaagtttgaccaacttgtgagtaaatggcagagatgtcaccagctggggatggatgcctctggagctccagttgctggaatccaacctctcctgtgtcatcacctctgtgttcccttcttggagcccatccagtgagtgggtaaaaaatgatgtcacaaggacttttctttgaaataggtcaggaaggggaggagagcctctggaatgtggaatgggactgattaattcttgaatttaaaagggtcactgtgttttgagaaattctgggtgcctcacaggacccaactttgttcctttttcccctgagctccctacatcaagcagggaaggacctgctaaattgtggaagggctcctcccatgccttccttgtgga

SEQ ID NO: 72294 - DNA, 553 bp, Homo sapiens
tccaagcctctgataaactcccccacaatgaatccttaaaaactcttagtctgtaaaagagtggggctctaacctaactcagccagcagcccctctcaggtttgtttaatgaccctgttaactgtaaacccacmcttcgtgtttctctcctctttctttaatttcttacagatgtgtgaagtttgaccaacttgtgagtaaatggcagagatgtcaccagctggggatggatgcctctggagctccagttgctggaatccaacctctcctgtgtcatcacctctgtgttcccttcttggagcccatccagtgagtgggtaaaaaatgatgtcacaaggacttttctttgaaataggtcaggaaggggaggagagcctctggaatgtggaatgggactgattaattcttgaatttaaaagggtcactgtgttttgagaaattctgggtgcctcacaggacccaactttgttcctttttcccctgagctccctacatcaagcagggaaggacctgctaaattgtggaagggctcctcccatgccttccttgtgga

SEQ ID NO: 72295 - DNA, 880 bp, Homo sapiens
cataatagtaactgtcaacaatgtatatctacagagattatgctataatataataatacagagctgaattcagttagcactctccaacaaggtttgcttaaacttgaagacgcaaggtatactgcacatagcttttgagttttatgttaaatattgaccaacatcatttaattttagatccttattattatagtatgtaaactcttaaaagttagaaaacttacatatcttacacataattttgagatatgccctttgtcagatgtatttacttctgcccaagtgatctatccaagtgaaagatgactgcaggtcattagcatgaactatttgaagaaatcaaatatttatcttgtcccaaaaatcagtactctattttttgtgcttgttcagtaattgttaatttagttcagacagtcayaggcagttttccagcaggaagagctgcctttgaaaatacttctttttttttttttttttttttgtttgagacagagtctcactctgttgcccaggctggactgcagtggcacagttttggctcactgcaacctccgcctcctgggttcaagcaattctcctgcctcagcctcccaagtagctgggattacaggcctgcaccaccactcccagctgatttttgtatttttcgtagatacagacagggtttcaccatgttgaccaggttggtctcgaactcctgacctcaggtgatccgccttcttagcctcccaaagtgctaggcatgagccatcatgcctggcctgaaaatacattttaaaagttgtttctgaacaaattgatttaaggaaaatgagtaaattatttaataaattcctttaaggataaaataattatttttattggtgataacccagat

SEQ ID NO: 72296 - DNA, 588 bp, Homo sapiens
gctaaatctaccctgcctatgctctgtaaatggaacaaccattttatatgagggactttatgatcttctgatttttgtatccataggcgaggaggtcctggagcaagtcctccaaggatactgacagatgattatatttcatgttatataccacagcttgtaaaagtacatccttagaatagagaaaccatttgcctaatagtcaaaagatttcttcagggagaagtataagagaaaaagatttgaaagaggtctaggatttagacttaacgatcaattgtgaggtttccttgttggtttagatcagagcagaggttggtaaactgcgtcccactgcagaaatccttcctgctgcttgtttttgtgaggcatgagagaatggtaggaagcctggctgacagcctatctgtttacagcatggtttagggaacgttaagcccgctgttgagacctacygctcagaaaaaaagattcctttcaaactgtccctgtgcattgccctggtgacctgagagctttgatggagatgtacaaggagattaatgttgttttcatgcctgctaacacaacatctattctgcagtccgt

SEQ ID NO: 72297 - DNA, 1181 bp, Homo sapiens
gcatgagataatagcaattcatattgctactatcaatgtactaacaaaagtggctttgttaggcatttggaaataatttatttactgaagaactattacttttattgttcttaccgactcgaaagagtccataatacctgcttaggtacggaaaattagacctggtgtggtgactcacatctgtagtcccagcacattttggggccaaggtgggaggatcacttgagccyaggagttccagacaagcctgggaaacatacggatactgcatctctacaaaaaatttacaaaaaaaaattatctgggtgtggtggtgtataccaccaccactacttgggaggctgaggtgggaggattgcttgagtctgggagatcaaggctgcagtaagctgtgatggcatcactgcactctagcctgggtgagagggagaccctgtctccaaaaataagaaaagaaaagaaaatcatataaaagcacatttacaggaagagtattaaaaaaaaaaaaagattggggccaacaagctaaaacttttttttaaatggttgtaattgagaaaacataggttttataaacaaggacaatgagagcaaaagatatctagggtagaaaaagtagagataatacagataataggaatttggggatgtaagaaaatagcaaagtcataaaagttcacatttttggatgcttaatggaaggataatcttgacagactgaaacaaaaattttactgcttgttaattttctggatcttagtactctttaccttttttattttttttatgctttgaggataggactgatttctgttggctctctagacctagatttggattgattcataaacatttctttaaaaaaaagtgttttgttttgtttttgtcctgtgacacagcctcaggagactattcttatgtgccccaaaagaacaatttctgagttcatctgtgttgtgtatattaactctttgttcctttttattgctgagtagtattcagtggtgtgggtataccacagtttagctatttacccactgaaggacattttggttcttttcagtttctggctcaactaaaagctgttatgaacatttgtgtacatgttttcatataacataagtttttatttctctcagataaacgcccaagagcaaaattgctgggtcatctggtaagta

SEQ ID NO: 72298 - DNA, 652 bp, Homo sapiens
tattkggtctctgtgatcatccagtcctgctggaaactccctatgcggcttctgtggcaatcaatcctctctctcaggggttctccgacgcctccaaccttgggttccatgggtgggtcttcttcagcttctcgtctgccctaaaactcctgacagttcacagagtcacagcccaagccttcctcttttctttctctagatcttcctgggcccgttaattcgtggtttccattgccccactgagcagaaactcccccacacccaggagtctcctcagccacaccttcccactgactaccttgacctgtggaaacctcagacttggtatatgccaggtgtagctcattgttctttgtatgtgtgtatattttattatttctcatccactaagtcctgtgccactgctatatttcctctcttggtgttcatggtgtccccagccactgggccagacttgactccttcctctcctttgccctgtacttcggggtgccaagttccattaaacccaccttggagacgtctgttgaatccagcctttcctcctcattttcactgctgtggtttatttcaggccaccattctttcctgtctggggtatggctggaaactccaaaggctttttagaatgagatgggcatgtaaataaatg

SEQ ID NO: 72299 - DNA, 1510 bp, Homo sapiens
gcttattgccattagtgaaaacacctggatgctccattcatcaaggttacatccaatggggcccatttgtttattaggctgtcagtaaacatctttatctggtcccagttcagccacatttggccacgcctgaaggggctcaaatccagcctggggatctctgtggtttctcattattagttttcttgttaaaaaaaaaaacaaacagcaaggcaagctaatgaaaagttagrggcggctttataaagaacacattttacctcacataatctgtggtgatggtccaaagatcagggaggcaggctcctgggtgggcccccagcagctcttctttcagcagctgccacacggccgctctgcctcccccaccagtgccaacattgaccactcagatccctgggtccctccccaagccatctgtagcctggctctgcagccctttggatgtggagacatggcccacacgccctggaaggggtagatctcccctggacgttgccccccacagagcaaaatcaaattcctctttccttcagagagcttgccatttgccttccacagacatttcctgacatacacactccatttctttcaggagaccttgtctttttcttaaagccatgttttaaagaaaattaggaaatacaagaaatgtcccacattaggcataaaacataaatgtataccttaataaatttcggttacgtaaaagagcgcctgggtaacctcacccaggttgagatggaaaatgtgccagtacctgggggtcctcccccaaagccccatggatcccttctgctgcagaagtagctgcctggcagcctcaactcccagatcatatgaatctcacaggagacttgaatctgtagaccacccaggactcaccatgagatccgtccaacttttcctttcagaaacatctttgagcagactcctagccttcactttccagtcctgattagagtgcactgcggggtggatgagggaaaggacaggcaacaccaatggcacacatggatgcatccaaagtctacccagtagcaaaagcccgagactgcagactgagagcttccccaaattgttcacattcatggcgcccactgccctcctggggcgctggtgttgtggcctgcattcaagctctgggctggtgggcaattctgatcgtaatgtaaacatttctacttccctaaaattgtattatgtatctcctgaatcaatgcagggaagcctgagtttgcatcagtgaaaaattagtcaaggtgtatcccataattgccaccccagaagtggtataaaatctgccagaggtgggtcatgtgtgggccttctagaaaagcctgtgcccctggcttgggcaatgttgatgccatcttgtattgggccctttggggattgctcctgtggggtgacagttggctgagggacgcagggggaggtggggctcggcccgggccctggacctgcctccagggagaggacaatctgcccagagagaggagcaggtgcc

SEQ ID NO: 72300 - DNA, 639 bp, Homo sapiens
aaatccttgagagatacaaactgctgtatgggttttaattagagtgagatatcatagttgacagtcgagatagatggtaatctcccagaagacaggcatcatggcttttttacacaatatgcttattcatgtttattctcagtatatagacatgtataagtataaatattaatatgaacaaatatatttgtaaatatgagttgaataaattgtaaacatattttacaattttcatatgtgtgctttttttccttgtgagaatatgaaatattaatgtctggcattgatctaaagtgactatagtaagtaggtggaaaccagaaaaaacacacggcatcttttagagatatatgctactcacaggttccctgtaacctcaacttgagtgtcagcctactggtgggggatattgacckttagctagaaaagaatataagaatgatttattctacccaccagcatgttacagatttacatctgatgggaagatagaggcacatagttgtcatcgtaagaccaaggggaagtgacataaaaagaccaatgcaaaaagaactttcaaaagaagaaggtagagataacagctccatgagaagataaaacttcaaagctataagcccctccctctgtttcctcatg

SEQ ID NO: 72301 - DNA, 556 bp, Homo sapiens
taaaattagttgagtatagtggcacatatctgtaatcccagctactagggaggctgaggcaggagaatcgcttgaggctgggaaacggagattgcagtgagctgagatcacgccattgcactccagcctgggtgacaagagcgaaactgtctccaataaaaaaaaaaaaattgtrcgtaacactggagttttagatgcctgtacactgaatcttttctgttctttctccccttttttaaccttagtttatttattaatattattattacactttaattagatttcacttattattgaggtgaatgtacctgcagtgaagtgtgtaatgtgcactcatcttaaatgtacagctaaattcttgcacatatgtattcccatataactaccacccagaagatttcctatgcttcttaacactccctgagggtcaacactattctgatttctaactctatctcttagttttacctattctttaaataaatagaatcatactctgttttgtgtttctggcttctgtaactcaacaaaatgtctggcacattcattcttgtgg

SEQ ID NO: 72302 - DNA, 436 bp, Homo sapiens
tcagctcaaaatcatccttattccaatgtggcatattttggggtgacatattctggttcccttaagtataatcattgtagagcaaatgcagacacagtacctgtgatgtaaatatttagtgaatgaatttagtcctgtgtgaaatcctccctcccctcccttcccattccttcccaccacttcacgcttaaccacagtgcagcattcttactttttgrggtgacatattctggttcccttaagtataatcattgtagagcaaatgcaggcacagtacctgtgatgtaaatatttagtgaatgttagtcctgtgtgaaatgctcctctccccgcccttctcattccttcccaccacttcacgcttagccacagcgcagcattcttacttttctcctcctgctcagcttggagaattcagatgtcgatgagacaaaat

SEQ ID NO: 72303 - DNA, 847 bp, Homo sapiens
gtaaagtagtgaaagtaatgtttttaggatggtttgtctggcagcagtgtgcaaaatgaattggtagaggagaaatggagagctgcgaattagaaggcaggttcaatcagtgcaggaaggaaaggctacagtaaggcagaggcagggaaaagaaaggcaatagagatgagagagattttgaaagaaggaattttcaataccttttaggcttaactataagaaatggagagtcggctgggcatggtggctcatgcctgtaatcccagcactttggaaggccaaggccagtggatcacctgaggtcaggagttcaagaccaacctggccaacatggtgaaaccctgtctctactaaaaatacaaaaaaactagccgggtgtggtggtgggtgcctgtaatcccagctacttgggaggctgaggcaggagaatcgcttgaacccaggaggcggagcttgcagtgagctgacattgcaccattgcactccagtctgggcaacaagagtgaaactcctcaaaaaaaaaaaaaaaaaaaaaaaargagagtcttaagtcaggttgaagttgtgaacctgagtgattgggagttggggtcaggaagatggtgctttgtgcatgttgaattgaaggtctgtgtattggtagactatccttgcagaattgtgttataggaagtgtattagtctgttttcacactgctgataaagacatactccaaactgggcaatttacaaagaaagaggtttaattggaatcacagttccatgtggctgggcagcctcacaatcatggcggaacgcaaggaggagtaagtcacatcttacatggatggcagcaggccccaaaaaa

SEQ ID NO: 72304 - DNA, 847 bp, Homo sapiens
gtaaagtagtgaaagtaatgtttttaggatggtttgtctggcagcagtgtgcaaaatgaattggtagaggagaaatggagagctgcgaattagaaggcaggttcaatcagtgcaggaaggaaaggctacagtaaggcagaggcagggaaaagaaaggcaatagagatgagagagattttgaaagaaggaattttcaataccttttaggcttaactataagaaatggagagtcggctgggcatggtggctcatgcctgtaatcccagcactttggaaggccaaggccagtggatcacctgaggtcaggagttcaagaccaacctggccaacatggtgaaaccctgtctctactaaaaatacaaaaaaactagccgggtgtggtggtgggtgcctgtaatcccagctacttgggaggctgaggcaggagaatcgcttgaacccaggaggcggagcttgcagtgagctgacattgcaccattgcactccagtctgggcaacaagagtgaaactcctcaaaaaaaaaaaaaaaaaaaaaaaaagagagtcttaagtcaggttgaagttgtgaacctgagtgattgggagttggggtcaggaagatggtgctttgtgcatgttgaattgaaggtctgtgtattggtagactatccttgcagaattgtgttataggaagtgtattagtctgttttcacactgctgataaagacatactccaaactgggcaatttacaaagaaagaggtttaattggaatcacagttccatgtggctgggcagcctcacaatcatggcggaacgcaaggaggagtaagtcacatcttacatggatggcagcaggccmcaaaaaa

SEQ ID NO: 72305 - DNA, 847 bp, Homo sapiens
gtaaagtagtgaaagtaatgtttttaggatggtttgtctggcagcagtgtgcaaaatgaattggtagaggagaaatggagagctgcgaattagaaggcaggttcaatcagtgcaggaaggaaaggctacagtaaggcagaggcagggaaaagaaaggcaatagagatgagagagattttgaaagaaggaattttcaataccttttaggcttaactataagaaatggagagtcggctgggcatggtggctcatgcctgtaatcccagcactttggaaggccaaggccagtggatcacctgaggtcaggagttcaagaccaacctggccaacatggtgaaaccctgtctctactaaaaatacaaaaaaactagccgggtgtggtggtgggtgcctgtaatcccagctacttgggaggctgaggcaggagaatcgcttgaacccaggaggcggagcttgcagtgagctgacattgcaccattgcactccagtctgggcaacaagagtgaaactcctcaaaaaaaaaaaaaaaaaaaaaaaaagagagtcttaagtcaggttgaagttgtgaacctgagtgattgggagttggggtcaggaagatggtgctttgtgcatgttgaattgaaggtctgtgtattggtagactatccttgcagaattgtgttataggaagtgtattagtctgttttcacactgctgataaagacatactccaaactgggcaatttacaaagaaagaggtttaattggaatcacagttccatgtggctgggcagcctcacaatcatggcggaacgcaaggaggagtaagtcacatcttacatggatggcagcaggcccmaaaaaa

SEQ ID NO: 72306 - DNA, 742 bp, Homo sapiens
ttatttgacatccagggcagacactgtagggaaccccaaggttattcagcacacaggactcagtcaggcaacaagagttattcatatcaggggcttctgtatggtcatcattgatttaaaatcctgcagtaaggccagaagccagatgccatagactgaatgcttttgttcccctcaatttcacatattgaaattctaactcccaacgtgattgtattgggggggggggggggcgggtggcgcattggcagttgattagatcacgaaggtagagccctcatgaatggcattaagtgcctttataaaggagaccctggaggactccttcaccccttctgccatgtaaggctacagaaagttgatgtctgtgaaccagcaagggaaccctcatcaaacgccaaatctgccagcactgtgatctcagacttcccagcctccagaactctaaaaaatcaaygtctgtcatttataaggcactctgtctatggtactttgttatagcagcccaaattgactaagacatcaaagaaaatcatagactatattctcatgagcaagtgtagccaagctgaaagtaagtgcatatgtggacacacaaacacatgcacacacaaaattaccctcagcggtactggaggctccatctaccttgcaaagtacaaacaaaagcagagtcgaacagcatttcctcttccttactggcaactccacatcccgcatccctgactttcccctatcataa

SEQ ID NO: 72307 - DNA, 972 bp, Homo sapiens
gatgcctggctctgggctgattaatgatctgtggttgttaaaatctagttatgcctccacttgggaggagtaggtaagctcccagggcaggtatgaacctcaccattttagagaggaagaaatctcagtgtcaggatgttaagttagttgccaagacctcaaaactcataaatagcagagccaggaccagggttgaaagtctggtgtttcacattctgccacacctctctggccagtgttgttcgtgaacttcgggactaagactccagctcaaatcctatgcggatgtaggtcaatttcttaacctctctaagcctcagttttctcatccttgatgtggggatcataaatttacttcttacgaagatgaaatgaaataatatatgtaagcagtgtgttcaataattgttagttcctttgcccttcctattttctcaccaaggaaatcaggtgcaataagctttagtgatctgctaaggctagataactggtaaatagtgaaagaagagtgaggagtcaacagatgattctgcttcttatttcacgtgctttagtggtatttacagagccctggtgcaagagtttctctttgtacttagagaagttgattttctttttcctaatttcttcttatttgaactaagaaccctctacttctctccatcccatctgtattttttctgatgagttctgtagaatatgatattgcattcaagcttcatcatacttttggtagcgcctttgcttgctacatgataactgtcattttagctgcaatttttcaaaaatctcctraaacactcttctcacacaatcggcctctcttaactaacttgtagacaattttgcccttctgctcaagatcttttctgcctcctttagatttcctccctatccatttctgtctcttctccctatgccttgatctaaagcttttgtgcattatgggactttctccgaatccattttgta

SEQ ID NO: 72308 - DNA, 1085 bp, Homo sapiens
ggggaaaactctactaaatattcagtggttccaagaaatgccttttaaccatttgtaatactttagctttctaccttttcatctcattacttattttcaggcagaatagatatagaggcttctttctgcattatagtcttcacagacttaaaggcatcaggaagtagcccttgtgattttccttgctcttcttcttcccatttttccacctcctcctgtaagcacgtactttgtgtcaggcattgagagatacagagagaaaaggcataggtttctccccttgagaggctcctggtctactggaagaaacagacaattccagcacaatgtgatagatacaatgatagcagttagaacatgaagccatgggggcggagaggaagaaatcagctgtgggtgggaatggagtgggtagaaatattgaagaaggtttctaaaaagaggtgatgcctaaactgtgcytcaagtggcgaatagtagttatccaggtagagaatccaggcaagatttatccctggaatgataaattggaggacctgctgaacttttgtcaaggctggtaacaatgaagtgaggactagatcaggaagaggtttttatataatgcttcaaagtttgcatttaattctgaagttgataaagaaccatcgaacaattttaagcagagaatgacatgttattcccagacatgttaatagtgagacgattagagtcatttctagtcctcggaataaaaataacagtagtttcctagtggttcagcaaggtatgttttaaatttcgtcatctttttaatcaaactgcttaaggcttcctttctactctaatagttacctttttcccctaattgcataatgtatatatttttagagcttttcataatcaggtaccacctattcacctcatcttaattcctctgctttgtgacatgtaacttttactctactggagttggtgccctcatcaaatattctaaaacagaaggaaatgtaggcattctctgggtaggtttgtttagtgcctaagaaaatgcaggaaatgagagtgtgtatttattgagcttctactatgtgccacacactttg

SEQ ID NO: 72309 - DNA, 559 bp, Homo sapiens
gtggaaaagagacccaaatagttactttctactcagactaaaaataggttcctagcaggtccaaggaaagaaagaaaggaatctggaagtgatagaatagttgctgaagctatataggtttcakcaaatatcctgtgagcagcatttgcattgactgaagagatcatacctccactgtgaaagatgagcaaaggcacaattggtggagagtgggatggtggtagggagtgaggggacagctgcaaaacacaggttccagattgcggggctcttccaacattcgtgggaggctgtgccattggccactccgctgccatagcaatagtatacctcctcactcttactgtcactccagtgcactctcccttcagtgttacctcaaaaaaatcaggaaaagccatatctactgccaaagaggagggaacctgcttcagatgccaaagcaattctgtgtggggttatttcattagcatgctgcaccagaataactcactcacccattccaactcagttctggtctgaaaatggcatcagaggttgttttgtggactcaggtgac

SEQ ID NO: 72310 - DNA, 533 bp, Homo sapiens
atcagtggaaaaattaaaaaagcagttcttttgaggctctgccttgcaaataagctcaaggtacagagaacctaaccattaaggtacctggacatctgtggagagcagcagggagaaytgatgtttttagccccatcacacagaaaaagaattattttagactgaggtagaagttggcatatgactacttctgaagggatggcttaaggttgtaattattgctgtacagaagacaatattggggaataaaaagtatacagaacttggcaaagccatatatatatgtttgtgattctcaataaagcaactgaaataactacattgttacatgcaaaatagaatcacaactctgaacacttatgtctattttttaaaagtttgatctttcatattcagttatttttttagttttaaaaataatatcctattaccacattgttgtctgcccatagtagcagtcagctaactctttttttccaaaattatagaagaaaaaaataaaagtaaatataaaaactgctaaacaaagaatg

SEQ ID NO: 72311 - DNA, 533 bp, Homo sapiens
atcagtggaaaaattaaaaaagcagttcttttgaggctctgccttgcaaataagctcaaggtacagagaacctaaccattaaggtacctggacatctgtggagagcagcagggagaattgatgtttttagccccatcacacagaaaaagaattattttagactraggtagaagttggcatatgactacttctgaagggatggcttaaggttgtaattattgctgtacagaagacaatattggggaataaaaagtatacagaacttggcaaagccatatatatatgtttgtgattctcaataaagcaactgaaataactacattgttacatgcaaaatagaatcacaactctgaacacttatgtctattttttaaaagtttgatctttcatattcagttatttttttagttttaaaaataatatcctattaccacattgttgtctgcccatagtagcagtcagctaactctttttttccaaaattatagaagaaaaaaataaaagtaaatataaaaactgctaaacaaagaatg

SEQ ID NO: 72312 - DNA, 533 bp, Homo sapiens
atcagtggaaaaattaaaaaagcagttcttttgaggctctgccttgcaaataagctcaaggtacagagaacctaaccattaaggtacctggacatctgtggagagcagcagggagaattgatgtttttagccccatcacacagaaaaagaattattttagactgaggtagaakttggcatatgactacttctgaagggatggcttaaggttgtaattattgctgtacagaagacaatattggggaataaaaagtatacagaacttggcaaagccatatatatatgtttgtgattctcaataaagcaactgaaataactacattgttacatgcaaaatagaatcacaactctgaacacttatgtctattttttaaaagtttgatctttcatattcagttatttttttagttttaaaaataatatcctattaccacattgttgtctgcccatagtagcagtcagctaactctttttttccaaaattatagaagaaaaaaataaaagtaaatataaaaactgctaaacaaagaatg

SEQ ID NO: 72313 - DNA, 533 bp, Homo sapiens
atcagtggaaaaattaaaaaagcagttcttttgaggctctgccttgcaaataagctcaaggtacagagaacctaaccattaaggtacctggacatctgtggagagcagcagggagaattgatgtttttagccccatcacacagaaaaagaattattttagactgaggtagaagttggcatatgactacttctgaagggatggcttaaggttgtaattattgctgtacagaagacaatattggggaataaaaagtatacagaacttggcaaagccatatatatatgtttgtgattctcaataaagcaactgaaataactacattgttacatgcaaaatagaatcacaactctgaacacttatgtctattttttaaaagtttgatctttcatattcagttatttttttagttttaaaaataatatcctattrccacattgttgtctgcccatagtagcagtcagctaactctttttttccaaaattatagaagaaaaaaataaaagtaaatataaaaactgctaaacaaagaatg

SEQ ID NO: 72314 - DNA, 2765 bp, Homo sapiens
aaagcagtagctgaatggaggtaaggacaatggaggtaaggaacatccctaaactggggggcaagagggcaggaagaagtagctagcaattttccacaaaactctaaaaggatatcctgttctgttcaactgcgttgtcttaaaatgacactccctttctttgtggggagatcgacaaaggatagcagcatgggacctgttcagggtcaactgccttgatcctgccttcctgtgctgtttctagacaccatgaacattcagttagtccacggacactttctgcagcccagttgtccaggagctatttgtgacagccttcacacaggggtggctccagagatgttctcttcgctagtctctatctctcgctctctttgtctctctctctctctctctttctctccctctctctcatacaaacatatacacatgtatcccatttaatattttatatatattgcactttctgctcagaagaaagaaacaaaagatattggagaagaggaagagggcatgaatatttgagaaggaaaataagaaaatatgtaagagagaaaaagtaaaaccttaagccctcagtaaatattccatctctcagtaaataaggtgttattggccaggtgcggtggctcacatctgtaatcccagtacttcaggaggccaaggcaagcggatcacaaggtcaggagatcgagatcatcctggctaacacggtgaaaccccgtctcaagtaaaaatacaaaaaattagctgggtgtggtggcaggcacctgtagtcccagctactagggaggctaaggcaggagaatggcgtgaacccgggaggcggagcttgcagtgagccgagatcgtgccactgcactccagcctgggtgacagagcgagactccatctccaaaaacaaaaacaaaataaggtgttattaagtcatgttttagtcatttaggaaagaattataacagagaatgcattaggttggtgcaaaaatgattgcaggttttgtcactgaaatgacaaaaaccaaattacttttgcaccaacctataataagacaaccagctggatatagtgatttcccacattgcaaatgattctttatttaaaagtacaaaaaaaagtgtgataataaactcaggatcttgggaaatcagttgcctgaactaaaagcatatagaaaataaaatggaagggtttcaaatgtacagtgctttgcaaaattttctggtgtagaaatccaccaagggcaggaatcaattttattcatgcctttgtttcccacaaaacctaatggaaggccttgcacagagtacaggatggtatgggcttaatccactggtaagaaacggcactgaactcatcaatatactgcttggagagcactcttctcttctgggtaacaatttctattgacactatgatctgtgcagtggcacaggcaccgttttcaggattatgtgcctaaagggggcagttgatcaagatgtttgcaaacattttcaccatttgttttmctctagtaacctgttgaaaaatgcagcacaggtgtccttcagtttgtccaacagatgcgcctaaaaaaagttatgtctgagggtaggactgttcagctttctcttagggctattggttccttgatctgcaatggcacctcactccacaggctgaggagtcaggcgtagcctctgccttcaggcagctgtcattaatacagagcagatcagttccagcagggggtttgcaggggcatatgggcagtcatcagcctgatgcctgaaaaccaaatatagctttagaatattcatagatgatgttatattatataacaaatatttgtatttccaccatgtttagctattaaaaaacacagatctacactatcagaatattaataaaatagctaacattttagagccccttccatgaaataggaacagtcttgagagctttatatgtattattacattaattcctcatgacaagccaaagagagaggtaatattactccattttactgatgaaaaaactaaggcacagagagaatcaaataattacacaaaatcacacagacagtgaatggtagagccgagatccaaacttagaaagtctgacttcagattttacattcaccctcagggcagtggtgaccgcttccttccttctgaacaaaactcaccagaaaacacaaacacaaattaaactattccaaggggatcagggttcttgtttgactaactatgagagtccttgtttgactaactatgatccccaaagtataaaaccacgacaaggaaagattaatctctggcctgaaggatgcatttctgagtgttgcccaggtaattcttacagatacattcatttcaatacctgcctgaaaggaaatctttaaattcttcaaatgtcagcttctagagggcaggcacactgtgcacattgcatcctggggacatgcagttcattttaagtaactgagacaagtaccccggtgctcttgaacaccatctctgctcagttctcaaaagaacatcctgcctcttctacccagccagtgcaagcaggggatgataaatgatagatgggaacatagagttttgatgaggaatgatgttgatttaaagttcttaaagcatcgccaaagatttggtaggaagatatcttaccttcataagatcaccagctattactgcctgcaaaattgctgtgaaagacaaaagagagatgtcccattagtagaagaccctcttattaaaatattacacaaagtt

SEQ ID NO: 72315 - DNA, 1608 bp, Homo sapiens
atccttgagtgtgcctttggggaggcaacgaacccaaaagggacccctgagagcccagccctctcctgtgggaggtactgacctgtggatggaaattcctccctcattcataactgaggcgcattagaagcctgaggtactttctgtaagggctgcctgtcacagccccacagttcaaccacggcacctgtctgtgactctcctttcctgccctgtcctcttcggatgggcacacagctccaggaagacacggaccccacacagacagcctagtttgcattatttaagacaggtgcagtgcatcacaacaaaagaaagctgcaagaaatccagacccacttctgtttagctttgagtgagttggatgatattggggaacacctttctaataatatttctcttagaatgatgctgaaattggcttatgtgttctgggcacctagtacctgagggctcagaggggaaggtgtcccctaatgggtcccgcctggtgtcttagactccacccttccagcgccccactcactgcctctgatcctcagggggagcccctctctaggttgtgcaagaacgtttcttccttctccatagccaactgtccggtctattccagaaagtgcgtcttacaacctgcacccccaactagaaatctgcacatcttgcagtgggggagggagtgtggtacccaggagaggactattctgctttgagtgtctctaggccgcccctttagcctcttctgggccccctgctggcctcaccaagaaccacagacgcgctatttttattctgatgaagaacagtgccgaaatgtctttcgacttgacgagacacaaaatttaggtgctgagagagatacttcaatttcaagcttaaagattactttgggtcccccaggactcagaagcaatttagagctgataccctgaacaagagaaaggttagaagattaagaccaactgctgtttggataaatggttggtaattgcccatatccgcaattatacactggcacataatatcttttccactacctttctcctctcctgagtcccatcgggattgattcggaaggatcccaccttggtcttcttctgccgagccttggtgatgtcgtgctctatctcgtccatcagcgccctgcacgctaaacaagacacaaaacagctgtgatcagaggaggaggcgagccrgagccgggcctgtggagtggcttcctctgtgccaccctctagctagaacagggacagtgccgacgtgcccaggacctggggaggactcttgtcctctgcagagttttcaaagacagtgagacagagacgactttttttatgttcccttttgtactttgtgttttcaaaaccatatacaatttacttttacatttaaaatgtgcttttttttttttgagacagggtctcactctgttgcccaggctggagtgcagtggcactatctcagctcactgcagcctcaaccttccacactcaaaccatcctcccatttccacctccgagtagcttggactacaggcatacgtcgccacacccggctaatttttttttttttttaagagacggggggtctcactatgttgcccaggtaggt

SEQ ID NO: 72316 - DNA, 1608 bp, Homo sapiens
atccttgagtgtgcctttggggaggcaacgaacccaaaagggacccctgagagcccagccctctcctgtgggaggtactgacctgtggatggaaattcctccctcattcataactgaggcgcattagaagcctgaggtactttctgtaagggctgcctgtcacagccccacagttcaaccacggcacctgtctgtgactctcctttcctgccctgtcctcttcggatgggcacacagctccaggaagacacggaccccacacagacagcctagtttgcattatttaagacaggtgcagtgcatcacaacaaaagaaagctgcaagaaatccagacccacttctgtttagctttgagtgagttggatgatattggggaacacctttctaataatatttctcttagaatgatgctgaaattggcttatgtgttctgggcacctagtacctgagggctcagaggggaaggtgtcccctaatgggtcccgcctggtgtcttagactccacccttccagcgccccactcactgcctctgatcctcagggggagcccctctctaggttgtgcaagaacgtttcttccttctccatagccaactgtccggtctattccagaaagtgcgtcttacaacctgcacccccaactagaaatctgcacatcttgcagtgggggagggagtgtggtacccaggagaggactattctgctttgagtgtctctaggccgcccctttagcctcttctgggccccctgctggcctcaccaagaaccacagacgcgctatttttattctgatgaagaacagtgccgaaatgtctttcgacttgacgagacacaaaatttaggtgctgagagagatacttcaatttcaagcttaaagattactttgggtcccccaggactcagaagcaatttagagctgataccctgaacaagagaaaggttagaagattaagaccaactgctgtttggataaatggttggtaattgcccatatccgcaattatacactggcacataatatcttttccactacctttctcctctcctgagtcccatcgggattgattcggaaggatcccaccttggtcttcttctgccgagccttggtgatgtcgtgctctatctcgtccatcagcgccctgcacgctaaacaagacacaaaacagctgtgatcagaggaggaggcgagccagagccgggcctgtggagtggcttcctctgtgccaccctctagctagaacagggacagtgccgacgtgcccaggacctggggaggactcttgtcctctgcagagttttcaaagacagtgagacagagacgactttttttatgttcccttttgtactttgtgttttcaaaaccatatacaatttacttttacatttaaaatgtgcttttttttttttgagacagggtctcactctgttgcycaggctggagtgcagtggcactatctcagctcactgcagcctcaaccttccacactcaaaccatcctcccatttccacctccgagtagcttggactacaggcatacgtcgccacacccggctaatttttttttttttttaagagacggggggtctcactatgttgcccaggtaggt

SEQ ID NO: 72317 - DNA, 535 bp, Homo sapiens
tataattagaaatctaaaggcactcatttcgatgaggaataataaaggctgatacatttccagtgttctgtatatcagaaaaaaatgaattgcatctggacgtaataagagaggttttagctagacattatttagggagcccaaaccacatataacggaattaataggagtgcttccagccaccgtaaactccatatttaaacacgtgaatttgtggtgtccataagaccttggggggaaaacacaaatgtttcastacaatttaccacaaataataatatacttaatgaaaataatacctaaatgttgcctgctataattaaagtgaaataagtcattcttatttaaaacaaaatagtttgcgagtaagtgttccagttcttgttactcacagacattaccagtaacatatatgcttaggttgttcaaaaaaaaaaaggtaataaaataagaacaatgtgattttggggggatatttttccagaattcatttttccttttaatttctggagcttattttcaacttaacagtgat

SEQ ID NO: 72318 - DNA, 535 bp, Homo sapiens
tataattagaaatctaaaggcactcatttcgatgaggaataataaaggctgatacatttccagtgttctgtatatcagaaaaaaatgaattgcatctggacgtaataagagaggttttagctagacattatttagggagcccaaaccacatataacggaattaataggagtgcttccagccaccgtaaactccatatttaaacacgtgaatttgtggtgtccataagaccttggggggaaaacacaaatgtttcagtacaatttaccacaaataataatatacttaatgaaaataatacctaaatgttgcctgctataattaaagtgaaataagtcattcttatttaaaacaaaatagtttgcgagtaagtgttccagttcttgttactcacagacattaccagtaacatatatgcttaggttgttcaaaaaaaaaaaggtaataaaataagaacaatgtgattttggggggatatttttccagaattcatttttcyttttaatttctggagcttattttcaacttaacagtgat

SEQ ID NO: 72319 - DNA, 654 bp, Homo sapiens
aaaaaaaaacaaaaaaattattcaactgtgagaactcactccccaaaaaaaatgttttgcaagcaactcattgaaaaatggtctctattaaaaagcacgttaatacatccatatttaaatggcttgaactctttatcayctttcattattttttgaactgtggaggatggcatgcctaactcagaaaatatttttcaggataattcagtggtgatcttcagaagaattccacaaaaaaccaaattaacagatgaaacaatctcataagccacttgaaactgaatttctctagaacaagagtctataaaattttttgatcaaacacccactggaaaaattttttagcgtggacacccagtatttgaagttcttggtaaattactgtgagtaaagatttaaccaaccccttgtccttatctatgaacaaacttcactttgtgttaactttaacttgtcatagaaaccttatgaaggcagagtgttcattgtggtataaaacaacattggttgtaggccaggcgcggtggctcacgcctgtaatcccaacactttgggaggccaagacaggtggatcacctgaggtcaggagttcaagaccagcctggcccacatggcaaaaccccatccctactaaaaatacaaaaattagctggg

SEQ ID NO: 72320 - DNA, 632 bp, Homo sapiens
ttttttttgagacggagtctccctctgtctgtcacccaggctggagtgcagtggcgcgatctcagctcagtgcaagctccgcctcccgggttcacaccattcttctgcctcagcctcccgagtagctgggactacaggtgcccgccaccacgcccggctaattttttgtatttttagtagagacggggtttcactgtgttagccaggatggtctcgatctcctgaccttgtgatccacctgcctcggcctctcaaagtgctggaatcacaggcatgagccaccgtgcccagcctctggcatctctttctaatacagttgggtcggttagtttctgtttgtattccacgtgggtccttccggcttatttatttatttcatttacctggaatggttagcttggttctaaaagtcggaactaaacagcagatgaacagagagcacggtatgttttcttctccttcttacgtgaaagcgacctcatcctgtagagacaccacagtttactcaactcctgtcctacatatggccgtttcgattattcccacaatattctgatgacgatcagtgccgcagtgagtaatctcacrtgtatgtagtttcatgctgtcggaggtatgtttttagagtggga

SEQ ID NO: 72321 - DNA, 965 bp, Homo sapiens
ctggatttctgtaaagtccagaaaaaaagttcagattttgcaagataaaaaccatgtgcctggaatgtgctggaatcagaaattataaacatcaaagaaactctgaggaggaggcgtggtaaagactctctcctaccacccataggaaatcaaattccagcaaagacaaagatcagtacaggagaagaaagcctgggcrgagaaaacgagggaaccctgacggaacctgggcaactggaaagtattactccttcgaaattctgaagttcatttacagctgccagtcagcacaccagggaatcagaaaccaccagagcctttctctgcagctggagaatttgaattcatttcagaaacttcctggagacgaatgaaaggcaagggcttccagaaatcagaataccttctgccccagggtcttgggcagaattgccattttcatcacagcacgtgaagtaagatagtgagtgaggggtttttcttagaatctatacttaaactcatgcatttttcaaaatatttcatgcttttctctaaaaccttatagctatcattcactgacaagcaatgcatgggtaagatatttctttatggccctctattgtcatcctattaatctagacattaaacttataagtatcatcttgtcttgatttatttttctaatctatacttttctcaatgatgtgtttcctaattgacatttccaaattacgagccttggggttcttttaatcattttggtttttaagcacttttttattttgcttctccgaagttagttagaaattgcaactactggttattccagggctgatggttcagttacaggctctggggctaaatcccctggtcctggctaccctgaacttcacgcagctctgagtaggggagtaaattagcctgcagggggaatgtgggtaattctcgacctcattacagccctcctttccaatttcgccttc

SEQ ID NO: 72322 - DNA, 1683 bp, Homo sapiens
caccgcatatctacaaccatctgatctttgacaaacctgagaaaaacaagcaytggggaaaggattccctatttaataaatggtgctgggaaaactggctagccatatgtagaaagttaaaatattttttgtatagagacaggatcttcctgtgttgcccaggctggtctcttgaacccctggcctcaagcaatcctcccactttagcttcccaaactgctggaattataggcatgagctaccatgcctggtcttgtctgagggactgtggattcttatcatgatggctgtgctctgtgagtgtctattccacatgtaggtcccatccccagaggctgctcttctggcctgtcacctgagtggtgttgagaggtatcttttcaactccaggtcacaccctatcatgaaaccaatttggtagttgactcaatcagcgacattctcaatagtcatgtgcaattactacgaagtctctgtgacatatagcaagtctttatttcttgcttatatgcctgagttggctgggatttcactgatctaggcagggctcatctaggcttggcttcaagctttaggttgcgtctaggcctgctctgtttgtccttcatcctgtccttgggccaacagggtacgttcttctcaagagagaagggcaagaaggtaaacccaaccatgcaagcatactttcaaaacttgtgtcaagtcagctaacccataggacaagcaaaagcccagagtcaaggggaagtacattccacctgccatgaaaaggcatctgctatgatgggatgatggaaagcagcacttcaatgctcagcattttcaaaacaggaaaaaaaatcagagtgtagtattaaaaggctaagtattgtcttataaaactttcctttcagttatatttaaatctggactatttcaggggtctcttaactgggctccctgcttctgccctccctatagtcaacacagccctccagagggatccttattttttatttatttttattttttgagacagtctcactctgtcacccaggctggagtgtggtggcgtgaacatggctccctgcagcctcgacttcccaggctcaacccatcctcccacctctgcctcccgagtagctgggactacaggtgtgctccaccatgcctggctaattttttgtatttatagtaaagacggggtttcgccatattgcccaggctggtcttgaactcctgggctcaagcgatctcccctcctcagcctcccaaagtgctgggacgacaggcatgagccactgcaccagtgtagggatgcctattaaaatgaagccagattggccgggtatggtggctcacgcctataatcccagcactttgggaggctgaggtgggtggatcagctgagctcaggagtttgagaccagcctgaccactgtggagaaaccccatctctactaaaaatataaaattagccaggtgtggtggcacatgcctgtaatcccagttactcgggaggctgaggcaggagaatcacttgagcccgggaggtggaggttgcagtgagccgagatcgtgccactgcactccagcctgggcaacaagagcgaaacaccatctcaaaacaaacaaacaaacaaacaaacaaaaatgaacccagatcacattgctttccttctcaaaaaccctccagtggctccc

SEQ ID NO: 72323 - DNA, 950 bp, Homo sapiens
cagtaacttgaaattgctttggtgaacataaaacttatttccctccttttagtgaatccttttccatccagaaactgcaatcaattatgggattttcaccctgctgagtagaaataactttaaatccttcacttttgcatggctctttacaaaaccccttcacaaagagtactccatttattctcattacaatcatatgagatacacattagtattcacattttaaataagaagaaactgaagataagagaggagaataacttattccaggttcaagttcattaagtggcagaaatggcgcttgaaactcaggtcctttgatttaaaatccaactccctctccctgacagcacaactttctccctgagtgcagcttcttacgttagctatgtatgattgatttaaccaattttctccctccaaggcagaggaactggtttctgtaaagcatcactcgctgtttccaggggtcccagctacagagtaagtggaaagattggttgcttgttaggcagtcatacaaaacatctgcaaaacccctcatttgtgtaccgtggraatgtgatttagacatttcggtctagaattatactctagaggtccgttgtggaatgtgcattaactaaattacagaactatgctagatccttctttaatttccttctgtgtcctatacttcttttattgacgacatcattcttcacattccctaggactttttgttcccttttacttttcctctcattctcatgtttgaatggtggcatctaaccagatgccaaggcgtgtgggtcccatcaccgtaatgtcattaatctctcttcccatcccttcattccagggctatggcctgattgagccccttgcaatcttctacataggccagctagtgtacagtcacatggggagtctgtttccttctccctgtctcttcccatccttaccatgca

SEQ ID NO: 72324 - DNA, 1423 bp, Homo sapiens
ccctagagggagaacccaattgcccccaccctctgtgtcatttctccatgctattcctctcaactgtggctatgagggaggtgaggtcctgaagggaagagatggctgcaggtgatgccacttcttgtgcctctactcatttctttagaaagacatctcaggtatacatcccatcctyggggctattctaacaggctctttacacctagaagctggtgatctggcttccacagagccacctaattaatctcccagaagcatgactccatttatgttatgaccctgctccaaaatcttcactgattcccagttgactctgcaaagttttaaaaacatccttgatgacaggaatttctaaaataccgggactcctctccagaaattccaaaccagtgcatctagttggaggcatagtgattgatttccttaacaagcatgccaggtgataactagcctcaagcatattagagaaaccaattatcctgcagaatgaattctaaaatcttgaatttaagactggagaatctggtaaagtggtctgcagataaagaagaataaattgatatttagggagaagcaaaaatgcaagagaggggaaagtctcaccaattttccacttttcactagacaccctgtgttcttacaataaacattctttattttgcctgaaaatacatgatcttctacaatgtgcaaccaagaactcatgacaaatagaggaaggattgcaagaagtcatcattctggtgtgatgggcacacagactggtgagtgcactgtcacctcctgtgaccctgtctcctagagggtaatttggctctgacacccaataccctctccttcttcccttttctgtcttcactctgaacttaagcataaggaatttagagtttatctgattgtggaatcaacttgatctagttcaaactcatgtttgttgcctgaatctcaagtccttgggtgtctcccatctctgtttggaatagaagttccccctagaaatgaaggggaactcactacttccaattttaaagcattccagcggttaaaacgttattctcttatccctttccattgaacccagctctgccctctaaaatgacccacgataattccattgtcttttccacattatttttcagcaatctgagttcagatataatgtgtatttagtcttctcttctataaacttctggatgtttaagcacaatgcctcacattattttgagttagctcaacttcgggttgctcttctttgggaatgctctaatttgtcagttttcctcttaaaggaaatgtagtcctccacatgaagtctgatcaagaaagagaagcatctctcttactttggcattgaaagtttgttaaactaagtgtgtgtgtatgtgcacgtgatagatctgtgtgacagtggttagtcagt

SEQ ID NO: 72325 - DNA, 1423 bp, Homo sapiens
ccctagagggagaacccaattgcccccaccctctgtgtcatttctccatgctattcctctcaactgtggctatgagggaggtgaggtcctgaagggaagagatggctgcaggtgatgccacttcttgtgcctctactcatttctttagaaagacatctcaggtatacatcccatccttggggctattctaacaggctctttacacctagaagctggtgatctggcttccacagagccacctaattaatctcccagaagcatgactccatttatgttatgaccctgctccaaaatcttcactgattcccagttgactctgcaaagttttaaaaacatccttgatgacaggaatttctaaaataccgggactcctctccagaaattccaaaccagtgcatctagttggaggcatagtgattgatttccttaacaagcatgccaggtgataactagcctcaagcatattagagaaaccaattatcctgcagaatgaattctaaaatcttgaatttaagactggagaatctggtaaagtggtctgcagataaagaagaataaattgatatttagggagaagcaaaaatgcaagagaggggaaagtctcaccaattttccacttttcactagacaccctgtgttcttacaataaacattctttattttgcctgaaaatacatgatcttctacaatgtgcaaccaagaactcatgacaaatagaggaaggattgcaagaagtcatcattctggtgtgatgggcacacagactggtgagtgcactgtcacctcctgtgaccctgtctcctagagggtaatttggctctgacacccaataccctctccttcttcccttttctgtcttcactctgaacttaagcataaggaatttagagtttatctgattgtggaatcaacttgatctagttcaaactcatgtttgttgcctgaatctcaagtccttgggtgtctcccatctctgtttggaatagaagttccccctagaaatgaaggggaactcactacttccaattttaaagcattccagcggttaaaacgttattctcttatccctttccattgaacccagctctgccctctaaaatgacccacgataattccattgtcttttccacattatttttcagcaatctgagttcagatataatgtgtatttagtcttctcttctataaacttctggatgtttaagcacaatgcctcacattattttgagttagctcracttcgggttgctcttctttgggaatgctctaatttgtcagttttcctcttaaaggaaatgtagtcctccacatgaagtctgatcaagaaagagaagcatctctcttactttggcattgaaagtttgttaaactaagtgtgtgtgtatgtgcacgtgatagatctgtgtgacagtggttagtcagt

SEQ ID NO: 72326 - DNA, 813 bp, Homo sapiens
tatgatttccgtataattaaaattgtaaaaatgaagttaattattatggtaggcagaattctaagatggccctcataatttttgctcctttaagcccctgattatgttatattacatggcaaagggattgtgcaaatgtaattaagtttcagttgactttgagttaataaaaagagagattatccaggtgggtctaacctagtcagtcacatgagcccttcaaaagcagttttctgtggctgttttaggagaagtcagagagattcaaataatgagaattcaattgaaggaaggttttctattgctgtgagagcagaggccacagggcaaagatctaacagtgaccttagaggcaaaggtgctccctagctgtcaatctgcaagaacataaagacatcagtcctatgactataaagtaataaattctgctaacgacctgaagaaaaaaacctggaagtaatgttttccaaaacctcaaggtgagaactcagacargctaataccttgttgtcagtcttgtgataccctgaacagagaacccagtcatatactacctgaaatcctgacctactgaaactctgagatattaaacaggtgttacttaaattttctaaatttatgttaatttgttaagcagcagaagacaaccaatataattcgtaaaatttgcttgataggtcgatgaaacctcctaaccctttcaatgagacagttttaagaacactgacaagacaagtaggctggtttatattaggttgtgcaaaagtaattgcggtttttgccattatctttcatgtaccaacataatagcag

SEQ ID NO: 72327 - DNA, 813 bp, Homo sapiens
tatgatttccgtataattaaaattgtaaaaatgaagttaattattatggtaggcagaattctaagatggccctcataatttttgctcctttaagcccctgattatgttatattacatggcaaagggattgtgcaaatgtaattaagtttcagttgactttgagttaataaaaagagagattatccaggtgggtctaacctagtcagtcacatgagcccttcaaaagcagttttctgtggctgttttaggagaagtcagagagattcaaataatgagaattcaattgaaggaaggttttctattgctgtgagagcagaggccacagggcaaagatctaacagtgaccttagaggcaaaggtgctccctagctgtcaatctgcaagaacataaagacatcagtcctatgactataaagtaataaattctgctaacgacctgaagaaaaaaacctggaagtaatgttttccaaaacctcaaggtgagaactcagacaagctaataccttgttgtcagtcttgtgataccctgaacagagaacccagtcatataytacctgaaatcctgacctactgaaactctgagatattaaacaggtgttacttaaattttctaaatttatgttaatttgttaagcagcagaagacaaccaatataattcgtaaaatttgcttgataggtcgatgaaacctcctaaccctttcaatgagacagttttaagaacactgacaagacaagtaggctggtttatattaggttgtgcaaaagtaattgcggtttttgccattatctttcatgtaccaacataatagcag

SEQ ID NO: 72328 - DNA, 813 bp, Homo sapiens
tatgatttccgtataattaaaattgtaaaaatgaagttaattattatggtaggcagaattctaagatggccctcataatttttgctcctttaagcccctgattatgttatattacatggcaaagggattgtgcaaatgtaattaagtttcagttgactttgagttaataaaaagagagattatccaggtgggtctaacctagtcagtcacatgagcccttcaaaagcagttttctgtggctgttttaggagaagtcagagagattcaaataatgagaattcaattgaaggaaggttttctattgctgtgagagcagaggccacagggcaaagatctaacagtgaccttagaggcaaaggtgctccctagctgtcaatctgcaagaacataaagacatcagtcctatgactataaagtaataaattctgctaacgacctgaagaaaaaaacctggaagtaatgttttccaaaacctcaaggtgagaactcagacaagctaataccttgttgtcagtcttgtgataccctgaacagagaacccagtcatatactacctgaaatcctgacctactgaaactctgagatattaaacaggtgttacttaaattttctaaatttatgttaatttgttaagcagcagwagacaaccaatataattcgtaaaatttgcttgataggtcgatgaaacctcctaaccctttcaatgagacagttttaagaacactgacaagacaagtaggctggtttatattaggttgtgcaaaagtaattgcggtttttgccattatctttcatgtaccaacataatagcag

SEQ ID NO: 72329 - DNA, 753 bp, Homo sapiens
caggatgatagaaagcagtcttcagcctgagacccattcctaggtaagtagctgaattggtgttttgtcttggctaacacttaacaaccagatggtcctaatttctctttaccactggagtgctcagtgatcatgttgttggggtttttgtcattcttgtgtgttttgtctttctcccatcagatttgaccaactctacctgacttagtcaaatctgagtgagaattctaaattaaggtaccaaaacctctctaaactggccaaaattcctcatagctgcaaaagaagaaaccgaaagaaaaatatcaaaaaaccatgtgcttggtttctgtgtttgcttcctgtattaaaaacaaaaagttctttaatttacttttcttccaccctatatctccttctccctttgccatctgcagtaccaaaaaaatatctagagaaggtgtctaatgacttgaacccctttaaagaattcagaagggcaccactcwcctattttggatgtttctttgtggagttccaagagccatggacagaatcttcttaggtataaagctctgttttcttgtgttgcatgacctgatctttttggctttgggggtaccagagatgtccttgcgctgtgagaggatttgaccttggtgtgtataatggcggatgagagctacaaagttatgagtggcctagtgcaatttacaagaagtggtctaggctatttttttttctttttttctcttttaggaagttgttgtttaa

SEQ ID NO: 72330 - DNA, 1627 bp, Homo sapiens
aaggctcatgtcaaagcagaggagtacttgctggagaagcagctcaaagaattcctgatcaaaggagacagcacttagaaccagagcagctcccgcctcggcaggcgttgcttcagctctcccagagcgagttctacacaaactgtcttctcaatccacttttagactagaactgttggtctgataggcactggaggtacaagtgcaacaacactgccgcagggaacacagttgcctggggaacagtctgagctatgttagttttcagaggacagctcacatcccactgataaaaggctgagaaaataaatctactacactgacgaaattagttacaaagaaggaagcacccaccttttcccatcccatctgatttctattaaaaacacatgcagcccggtgtggtggctcacacctgtaatcccagcactttgggaggccgaggcgggcggatctccaggtcaggagtttgagaccagtctgaccaacatggtgaaaccccgtctctacgaaaaatacaaaaattagccaggcatggtggcacgcgcctgttatcccagctactcaggaggctgaggcaggaaaatcacttgaacccggggggcagaaggttgcagtgagcccagatcgcgccactgcactccagcctgggcgacagagcaagactctatctaaaaaataacaacaaaaaaaaaccacacatgcaatgtttatttccaaaagtattattgccaattagaaggttccacgtatatgtccaagcaatacacagaaacttgactactacttgtaaatgtatgtttactctcttcctgtaagtctcaaaagtcagccaacttccaaggatagcaggagtggcaaacccaaggctgaggaacacgtgtgcaagtatcaycctataatgctagaatctggcctgcaaatcagtttggctgagatgttacgcaatgagtatagagtcagctataggtaaagataccagggtccccactcattgtaacattctaatttatagaagaaaatgcattttaaatatcctagacaatctgtatacttcatcaagtctccttagaggttattattgaaatccaggaaaatgaccacagaacttactccaaccagaataagaatgaactactactattttaagagttagatgtgagcttttgcattgctttttaaattcacttcaatatttttttaattgtgaatcttagtatacatttaattcattcatttataatcaaaagaaacaaccttgaagcacaattcctccctacaggtttaaacaatttctactaaaggaaatgatttactcctcctctaaaaagaacaaaaggacagagaaataagtattgaaagattaaagaaatgatggctaacaaacaagatgaagttcaataaagactaatgaaagtactatgcttagtaaagtacactaagctgtatgcttagtaaatacattacagataatgtcaataacctatacaaacaggcaggcatattgagtaagcaaaagtaaatgtaaaaagaaagcccttcagtgaaactgttctggatgatactataacggtgggtactcatcattacatcattaaacatttgcccaaacctatagaatgtacca

SEQ ID NO: 72331 - DNA, 959 bp, Homo sapiens
cagtggctcgatctcggctcactgcaagctccacctcccgggttcacgccattctcctgcctcagcctcctgactagctgggactacaggcgcccgccaccacgcccggctaattttttgtatttttagtagagacggggtttcaccgtgttagccaggatggtctccatctcctgacctcgtgatccacccgcctcggcctcccaaagtgctgggattacaggcgtgagccaccgcacctggctgcaactacaagtttctaagaattaaataattctacaagtagaatgctgaacccagccatcatataagaaaatttttaaaaaggcttcaacactctgtgtgcattcagatggcacttccttttttttttttttttttttgagacggagtctcaggttcaagcgattctcctgcctcagccacctgagtagctggaattacaggcactcaccaccacacccggctaatttttgtattttcagtagagatggggttttaccgtgttggccaggctggtctcaaactcctgacctcaaagtgctgggattacaggtgtgagccactgcacccggccctgacagcacttcttaacaaattaccagatgccctttctctctcctgcgacggcgggatgcagtcaactccaggccacactcactgggcacctaccctgtggctggtgctgggcaggcagagcccagcaggacgtggactaagctgctgctggygagcctccccggcgcacatccaacaacaaatgccaaagccctttcggccacacaggtttggagtccaattaccgtggacagcgtcagagccaaactcagcgtgatttggcacaaatgaagccaagaggacaggacaggccctgagcggcagccttcccgacccaagggatgaactgtcactaaaatatgaacccagcacttgggggcctcagctgccagccaagccgc

SEQ ID NO: 72332 - DNA, 721 bp, Homo sapiens
taagcacatgtctaccctgctaggtagcaaatcccttgacaatacagtctgtttcaattaataaacttcgtatctgggctacttaagacagtgtgtggcacatggtaggtgttcaatatatgtttgctacattgaaattaattatcttaagtatgagataggaaagattataaggctttataatatataaaggttataattatatattataaagattataagtgctttgcactgacaacaggtattctctttctaaaaccctgtctctcctaactatcctctcactactatcactgtcctgatgctactcaaaatattaaaatatgaggtgaaagaatcattaccrcaacaaatgaaaccacttcggtcttatatgctaaaaatggtgaaacaaaagagtcaaattcatcaaagtacaatcaaaccattgagggcttaaatgtccatttagactacataaggaaaaaaggaaatgcttaaattaatttgacaaatacaacttttcccactaattcaatcatctggataattttaacaatttcaaattgacaataacatcattcaagattttctcacagcaattcagttttttaatattaaaaattacaaaacttatttaaagacaataagcggattataatatctaactactatacatatttatttctttcagtaacaaacactaggttttaattacacaaactttacctcctccttacca

SEQ ID NO: 72333 - DNA, 621 bp, Homo sapiens
ttggcttgaactccttgacacaagggatcattgaaccttggcctcccaaagtgcmggaattacaggcgtgacccatcacacccggcccaagtatcatttttattacaagtttaatcactaagcatctcatcatttcttcctggtcatgccatgaggtgttagctcacgtgttgtcactccagccgcattatgtcactcttactaggttgttgcaaaactaattgcgttttttgccattgaaagtaaaagcaaattacttttgcaccaaccaacctgtgcctagcacagtatcagatatatatatactggataaactatcattactcttactcttcaaggtgtcactgtaagtaataacaattgaaacaaagtttgcaattatgggactgtacatctctttatatccttttcttgaccttatttacatgctcacactttaataagtgaattcccaatcttgcattaattacattcttaatgatgaggtcatagagcagcactgtctgatgcaaacataatgtgaaccccataacattattttaaatttgtagtagtctacttgaaaagcaaatgcaaaatagtcagttttatgacatatttcatttaacccaatatatccag

SEQ ID NO: 72334 - DNA, 621 bp, Homo sapiens
ttggcttgaactccttgacacaagggatcattgaaccttggcctcccaaagtgccggaattacaggcgtgacccatcacacccggcccaagtatcatttttattacaagtttaatcactaagcatctcatcatttcttcctggtcatgccatgaggtgttagctcacgtgttgtcactccagccgcattatgtcactcttactaggttgttgcaaaactaattgcgttttttgccattgaaagtaaaagcaaattacttttgcaccaaccaacctgtgcctagcacagtatcagatatatatatactggataaactatcattactcttactcttcaaggtgtcactgtaagtaataacaattgaaacaaagtttgcaattatgggactgtacatctctttatatccttttcttgaccttatttacatgctcacactttaataagtgaattcccaatcttgcattaattacattcttaatgatgaggtcatagagcagcactgtctgatgcaaacataatgtgaaccccataacattwttttaaatttgtagtagtctacttgaaaagcaaatgcaaaatagtcagttttatgacatatttcatttaacccaatatatccag

SEQ ID NO: 72335 - DNA, 621 bp, Homo sapiens
ttggcttgaactccttgacacaagggatcattgaaccttggcctcccaaagtgccggaattacaggcgtgacccatcacacccggcccaagtatcatttttattacaagtttaatcactaagcatctcatcatttcttcctggtcatgccatgaggtgttagctcacgtgttgtcactccagccgcattatgtcactcttactaggttgttgcaaaactaattgcgttttttgccattgaaagtaaaagcaaattacttttgcaccaaccaacctgtgcctagcacagtatcagatatatatatactggataaactatcattactcttactcttcaaggtgtcactgtaagtaataacaattgaaacaaagtttgcaattatgggactgtacatctctttatatccttttcttgaccttatttacatgctcacactttaataagtgaattcccaatcttgcattaattacattcttaatgatgaggtcatagagcagcactgtctgatgcaaacataatgtgaaccccataacattattttaaatttgtagtagtctacttgaaaagcaaatgcaaaatagtcagttttatracatatttcatttaacccaatatatccag

SEQ ID NO: 72336 - DNA, 649 bp, Homo sapiens
cttgagccaaggagtttgaggccagcctgggaaatatggcgaaacctcatctctacaaaaaatacaaaaattagccaggtgtggtggtgcacgcctgtggtcccagctactcggaagactgaggcatcagaatcacttgagcccagtgggcagaagttgcggtgagctgagattgtgccactgtactccagcctgggtgacagaacaagactctgtctcaaaacacaaaacaaaacctaaaacttaaaggatctgtcagttttcaagtcctgaaattcattgactgtgcccatgtggtgctgtgtgcctgagatggaatttcaaagtggtttttcacaccagaacatcctcttttttctaatacccatttatgcaatgctaggaaaaaaaaaaaamctcaatttggaagtttttggttttctttctcagaatcagaatagttttttaaaaatgtcctatttccacttctaggtgagcaaactgacaacatcatttgatcatctgttctacaaattaggaaagatagaaacccaacccataagctaattccaaaaccacttttccttcatgaacacctgagattttgtcagcactttctagattgtaaaataaaccagattcaatttccataatttatttcctcaccttt

SEQ ID NO: 72337 - DNA, 632 bp, Homo sapiens
caaactgatatttatttcatgatgcgcccatttatatacttacaaaagcaatttagttctacaaacaagccactcgaggtaactatctttatttcattttatggatgatgaaactgacattgaaagttgacggaactcactgaagtgacacagcatataaatgatggggtaggatgaagccctgacaatttccacccaggagccacacagagtgagaaagcctctcattgtaacggctgttgtggctcatttgggaaatttttacaaagtttcttcctaccaaataatagaggtttatttcagctcacttcctaggccactgtgagatgaacagctgtttgggccatagaagaaatagatgcctgtgttagatatttgtgggggtaaaaatggaaaattctcccccattaacatatgagtacaaataaacatcaaaaaacagaaaatgaacttcctattatgcactgtgcagaaaatcagtaccgagtcctcctgcagccacgtttttctgactcccaagttacttgctaccttctttttcacaygtttccattctctctacttcaggaattttctttctctttcttcagaaactacatagttcctccccatccatgccataaatcttccct

SEQ ID NO: 72338 - DNA, 526 bp, Homo sapiens
cgataatctactaggatagcaaaccattagaactggcaatagcaaaagttacaataattatgttgaaacagatgcaacctcagccctggtgatgtcagtgataattggttccatataggtggagaaattagtcctcatggagcaacaaacataactatatttatattaaatagtctatttcttccatgcctaagaatttatctttaggcaatattcattatagcatgaaatagttaagcagagaaaagtttaaaacctaaaagtccaacagtaggagaatatgtaaatatatgagggtaattcacttttgttcagatatgtgtttactatctatttaatgcaatatcaggacaagcaatttcatacacatgatgattttcttaataaaacatatccaaacatattgtggaggctaaggtgttagaaatgaaaatagactcagctatggaacacagatatttcttcttgctttgaaaggtaactgctcctgttataattgccttctcrgtcaaatacacagaggaca

SEQ ID NO: 72339 - DNA, 530 bp, Homo sapiens
ctcaataagcaattgctgattgaatgaatcaagtascttggaaggagataagtcccttttgtagtacaaagaactggaaatcagaaaactagattacagtctaagctctgtcttataaaatgggtgatactgaaacacttattttaatttgcctcagttgacacctttataaaatgtgtaaaagaagaatgcttaccacacacgggtgttataagaattaaacagaccacacatgaacgttgtatacatatacgctaaataaagcatctttcattaaagggggttgtaataatttgtgccaattaagaaagatttagattccctttgaatgtcttgttgcccctggtgtgttcagattcacctcaagacagaaagtcagaggactactcagtgcagtatgattctagtaacacccagattgattagcttatgttggagataagctatctgcaacatagggattcaagtaaaaaactttaaaagatgttcttgtttaagacagtgaattttagcccttggaattcagaaag

SEQ ID NO: 72340 - DNA, 530 bp, Homo sapiens
ctcaataagcaattgctgattgaatgaatcaagtagcttggaaggagataagtcccttttgtagtacaaagaactggaaatcagaaaactagattacagtctaagctctgtcttataaaatgggtgatactgaaacacttattttaatttgcctcagttgacaccyttataaaatgtgtaaaagaagaatgcttaccacacacgggtgttataagaattaaacagaccacacatgaacgttgtatacatatacgctaaataaagcatctttcattaaagggggttgtaataatttgtgccaattaagaaagatttagattccctttgaatgtcttgttgcccctggtgtgttcagattcacctcaagacagaaagtcagaggactactcagtgcagtatgattctagtaacacccagattgattagcttatgttggagataagctatctgcaacatagggattcaagtaaaaaactttaaaagatgttcttgtttaagacagtgaattttagcccttggaattcagaaag

SEQ ID NO: 72341 - DNA, 1040 bp, Homo sapiens
aagaacaactaaccacacagtctttgaaatgccacaggagtgaatgagaccatgtcagaagaggaagaaggtcatctgagctgggcatgtgcgtgtatttgtgagaaacaatctgacagagggaagaatcttaaagttgtctttagaggattggtagactttggactatggaaagatggggtgtgggaaataaatatataggaaggaagaaaggaaggaaaggaaggaaggaaggaaggaaggaaaggaaggaccaaggaaagaaggaaggaaggaaggaaagaaggaaaataaagaaaggaaggaaggaccaaggaaagaagcaaggatggaaggaaggaaggaagggaggaaggagggaaggaaggaaggaaggaaggaaggaaggagaatactagagcctttctcttgggatatagaaggaaatgaacactttaatttccaatgaaatatctcaccagttgaacaacaacacaaaaatcttacttttctttaatgccatcagaatctgtggacacaaagaaattcaaaagaactatacttcagaaagacaagccttttctaagtaagtaaaaaatacaggacacattcaaagccagtggtcagttgcgaaaagttggggacaggtgggctgatgagcaaagctgtcagaaaagacagtctgtgcttagactagaagaaacaagccagacattctgatgaattcatgggatgccttggcagtggatctgcgggagccccaaaggcaaagagaatcctctcagcgaagccacttamaggggaatttagatgattacgcagaggctgggagtagagggaggaagatttcacagcctcacagtcccagggttgtcagaatctctgtgtcctgatatctcactgggatcacaccatcacacagcttcactgtctgtggtttcataggcctctgggcctcaaggaaatggtaaacatagactgctttctttgttttcttaaacttttaaaagtcaaaagttattcaaaagattggttaaagaaaaaaatcataaagtattatg

SEQ ID NO: 72342 - DNA, 1079 bp, Homo sapiens
agagaagaaccctaacatttagcccataccctactcccaactgggtttctatcttcagcyagggcccttgcctcagtattctgtatcctcatttcatccaaaccaggcattgattgaccttctaccatgaactttggagaagccctgtgcgtggatggatctccaggacctatagcccaaacgccatgctttcgcctgtaccttcaggaactctccagccagactctggaagatcacaagctccattccctttcttggacatccacatgttggctgttgctgtgtctccctaaagcagacagcatgcctggtgaggagattactgctgctctctgctggactccatgccaccagctcttctgcctgataagataattctggaccgcagtagttatgagtagtacttcttctaaggaaaggcaatgtgaagttcctggcaagtgccagccacagtgctgttctgaagaaattctcattggaacaccttcagttacaaattaagagatataactttgtaatagtgatacctatagattgagataggaaaataaaaccatttgaaattctcatcccatttttttttagacagagtttcactcttgttgcccaggctggaatgcaatggcacgatgttggctcactgcaacctccaccttctgagttcaagtgattctcctgcctcagcctcccgagtagctaggattacaggcgtgtgtcaccacgcctggctaatttttgtatttttttttagtaaagacagggtttcaccatcttggccaggctggtctcgaacacttgacctcatgatccacccacctcggcctcccaaagtgctggcattacaggcatgagccactgcacccagccctctaaactttttgattgagccccatcagtaagtgttttctaaatattacctacatgtctttacttgtaagttatatatagggatattataaaacatacctaatatacattttaaaactatgaaatcaaaataaattttaaaaattcgtctagcaaaatatcatcttccatgcttctgcacatgccttcctccgtagctccacttctagagg

SEQ ID NO: 72343 - DNA, 1370 bp, Homo sapiens
  misc_feature (1)...(1370): n = A,T,C or G
tttaaaaaattgtgtcttccagttttttatggtgtcaggatagtagcccctgatgtagccacttttaatttccgttgaaaaatctatcacatttcctaaattggtagcccatggggcactgtaggatggtaataagcattacagagttttctctaaaacatctgcacatctttagtacaccaagaggaatagagaagattctaagaagaggctatagggcaaggtttcctacgcttgtttaaccacagcttttctttgttgttagctatccatgtctcyagaaacaagttctaaaataacattaaagacagactgaacaacaaaaatacaggaaaaactaactaacaccaaaaatgaatgtaacacaaatatttctggatcttctttctcctcccttaaggctcatctcagtgttaaatgcctttcaaaatagtgtattttttttctaaagttcttttatggaaatttaagagagggtcagggaggatggagcacagcaaaactttctaaaaatccaacttacaatttcccctttcccaaaatttctatgcctcattgcatcaacacaaatctctctctaacttgttccctgtaccccactcccatgatccctcccagatatttttcccatccatttgcaagctctacacatgactagaggtctatgtcatttgcatcctcagctactgtacctttcagccaatccaaaggaaacttctttggattcatcgtcttttaaaaaccagaggacaataaatattaatccaatagggagattccttggaggagaggatatgtggatattaactatgggtgtttaataaaaggggtccttttatttgtttcttattctatacttacctaggaaaaatggcaaataaaattctttctttcgttagttcccctgcctctttcttcccagaaagtggcagccagattttcaggtcagaataataatagtatttcaggaccaggtagaagtagagattctcttggaaaactaggttagtttgaagccttggagagataataaatgtgcttagtctaaatgcatgggtgggaatgggccagggctgtggagtgtcttggaggtagctggagatcacgggaagcctgtctgacaagtctaaacattgccgacataggctagggaaaattgaaaggggtaggggaactagttaaagaaatactttcatttttcatttttcctaggtaagtatagcataagaaaaaaaaaaggacccccatcttattaatcacttcttcttcnnnnnnnnnnnnnnnnnnnnnnnnnnnnnnnnnnnnnnnnnnnnnnnnnnnnnnnnnnnnnnnnnnnnnnnnnnnnnnnnnnnnnnnnnnnnnnnnnnnng

SEQ ID NO: 72344 - DNA, 1134 bp, Homo sapiens
ggggacacacacacgggatctcctccaggcccgctccagcacaaggagatagaaactgttctattgagctttctcacgccctaaatattccatgccactatgttttcttttttcttttttttttttttttcaagatggattctcactttgtcgctcagactggagagcagtggcacgatctcagctcacagcagcctctgcttcctggagtcaagcgattctcctgtctcagtctccagtgtagctgggattacaggtatgtaccatgatgcgtggctaatttttattttttattttcgatgtctggctaatttttttgggtatttttagtagagaccatgttggcccagctggtcttgaactcttgacctcaagtgatcacccgcctcggcctcccaaagtgctggggactataggcgtgagccaccatgcccggcctcatgttttctttattacaagcactacatacaggaataggaaatgctgtgacactacctcttcccagaattccaggtgggaagcaggcccaagtctcttctgttcttgaaatcctgatctggaactccatcgtggggattcccttgcctttgctaagttaaaaacttagagagaggcacccaggaacacattcagtcacaatctgggtttccctcctctttctcttcagcctccccatgacactgggaaggagtgagaagagtgtgctctgctttctggtttgagataaagactctttcttgatacttaaaggaagtgtttaagactcaggaaaacctttcactctcaagaaccaatctcttgcaaatagaaagatatttggtctatgctcacacacttgatgattgcataaaattgccttcacattttttattgcatccattctctcctgaagtgaggatctcataagcagagaactgcagaattctagcacaccctgtctagcatgtggtctgggttatctgtgtctttcgttatctgaattatttcacaaccctgtgagctktagaaaacagatgcaatgcaaatgattcctgttaataaaaatgcaaatacattttttctggtggcgatgtccattgactagttttgcatctattagcaaattccttttagcatttgtgatggcacatatgt

SEQ ID NO: 72345 - DNA, 1134 bp, Homo sapiens
ggggacacacacacgggatctcctccaggcccgctccagcacaaggagatagaaactgttctattgagctttctcacgccctaaatattccatgccactatgttttcttttttcttttttttttttttttcaagatggattctcactttgtcgctcagactggagagcagtggcacgatctcagctcacagcagcctctgcttcctggagtcaagcgattctcctgtctcagtctccagtgtagctgggattacaggtatgtaccatgatgcgtggctaatttttattttttattttcgatgtctggctaatttttttgggtatttttagtagagaccatgttggcccagctggtcttgaactcttgacctcaagtgatcacccgcctcggcctcccaaagtgctggggactataggcgtgagccaccatgcccggcctcatgttttctttattacaagcactacatacaggaataggaaatgctgtgacactacctcttcccagaattccaggtgggaagcaggcccaagtctcttctgttcttgaaatcctgatctggaactccatcgtggggattcccttgcctttgctaagttaaaaacttagagagaggcacccaggaacacattcagtcacaatctgggtttccctcctctttctcttcagcctccccatgacactgggaaggagtgagaagagtgtgctctgctttctggtttgagataaagactctttcttgatacttaaaggaagtgtttaagactcaggaaaacctttcactctcaagaaccaatctcttgcaaatagaaagatatttggtctatgctcacacacttgatgattgcataaaattgccttcacattttttattgcatccattctctcctgaagtgaggatctcataagcagagaactgcagaattctagcacaccctgtctagcatgtggtctgggttatctgtgtctttcgttatctgaattatttcacaaccctgtgagctttagaaaacagatgsaatgcaaatgattcctgttaataaaaatgcaaatacattttttctggtggcgatgtccattgactagttttgcatctattagcaaattccttttagcatttgtgatggcacatatgt

SEQ ID NO: 72346 - DNA, 829 bp, Homo sapiens
tgttcattcagcaaatatccactgggtactaagtgctaggagttacgctacatgttaggtttttttaaaaaaagtacagggacaaagtattaccacagtacaattttaagataaaaaggacagtaggaaaggaaatgaaaagaaagaagaaaatgttagaaatattacaaataagattaagaaagagcaaacaattttgaagaaaaggaggtataaatcttaaaaattaattcaaatcttgaaagccttctgaccaggataaaggtggcatcataaactcagatgaggaggtaagaaattatcaagtcatatacagataagttaggccattatgcttgtctatttcttcttgggtgaactcctgttgtttgtgtcttttgaggtatttgtccattccatctaagttttcyaatttattggcataacattgttcattgtttgcttattttacaattatcaatagaatctgtagtgatattacctctttcattttcaggtcagggatcacttcactgagctttgttgattaatgtccagtgtctaaaaaacataactttccacatattgtgtttatttattagcttttttaggcaggagttaaagcaggaggtaaagaatacaatttcttttaattcatcttggaaggaagcaaaggggtctaatgtaaattgaatttgaaaaatgtcaagaaattagtatccaaataattcgatactcagttgaagaggaggaaataaaatttgaggaacaattctagattaatgtataaatatttcatatgtcaattgatgaattcttaaataaaaaaggactaagctttagagaattc

SEQ ID NO: 72347 - DNA, 829 bp, Homo sapiens
tgttcattcagcaaatatccactgggtactaagtgctaggagttacgctacatgttaggtttttttaaaaaaagtacagggacaaagtattaccacagtacaattttaagataaaaaggacagtaggaaaggaaatgaaaagaaagaagaaaatgttagaaatattacaaataagattaagaaagagcaaacaattttgaagaaaaggaggtataaatcttaaaaattaattcaaatcttgaaagccttctgaccaggataaaggtggcatcataaactcagatgaggaggtaagaaattatcaagtcatatacagataagttaggccattatgcttgtctatttcttcttgggtgaactcctgttgtttgtgtcttttgaggtatttgtccattccatctaagttttccaatttattggcataacattgttcattgtttgcttattttacaattatcaatagaatctgtagtgatattacctctttcattttcaggtcagggatcacttcactgagctttgttgattaatgtccagtgtctaaaaaacataactttccacatattgtgtttatttattagcttttttaggcaggagttaaagcaggaggtaaagaatacaatttmttttaattcatcttggaaggaagcaaaggggtctaatgtaaattgaatttgaaaaatgtcaagaaattagtatccaaataattcgatactcagttgaagaggaggaaataaaatttgaggaacaattctagattaatgtataaatatttcatatgtcaattgatgaattcttaaataaaaaaggactaagctttagagaattc

SEQ ID NO: 72348 - DNA, 1104 bp, Homo sapiens
aaacatttctacatatgagaactgcttgttgcactaaatgtctccttcaagaaccaaggctttaaaagattttcttttctttcttttttttttttttttcaagacgaagtctcactctgttgtgcccaggctggagtgcagtggtgccaactctgctcactggaacttccgcctcccgggttcaagtgattctcctgcctcagcctcccaagtagctgggattacacgtgcccaccactacaccaggctaattttttgtatttttagtatagatggggtttcacaatattggccaggctggtctcaaactctcgacctcagattatccacccgcctcggcctcccaaagtgttgggattagaggtgtgagccacctcacccagccaaaagattatttttaagagctctttccagaattattgtttaatttcatgactttctttatggacaattctaaagttaatttaaccttttcttgttgacttggagtcattatgagcataagtattatactgtatattattagagttgatgtttacttttagtttttttctgcttcatccctcaaaatgagagtatcattcttctgcatttcaaattccacctcttctcttagtttctttaacattaaccaacctttcttcccaccccttaaattactgcctctcatctgctgttgtcaaggaaacaagataaccaagattttaaaagagctagttaaaatatgagtcaaaaaaggaactgagtataaattttaggattgaagtagaaaacattaaagcagaggcttattgagagttatttcagacatacaaaagactttttcacctatttttgagtttatacgtttattaaaggcattgctttttctcaaattcaaaccctggagaagtaagatcttctcagaagtgaaatgatgcagaggtcgttacgtgaracttgctattgaaagtctgtttggacaatgagaatataaccaagacaccacttcatatccggcataatgaatccaaattgaaggcagcagatctatcgtgaaacaaacaacttcatgagtactgtaagctagtggaacacaaaactataaagatacattaactcgga

SEQ ID NO: 72349 - DNA, 2141 bp, Homo sapiens
  misc_feature (1)...(2141): n = A,T,C or G
cctgtagataaatctgggtagcactgtcatcttaacaatattaagtcttccaagccatgaacacaggacgtctttcaatttatttagatctctaatttccttcaacatgttttctgttttttagtgtactttttagtgtacttctttggttaactttattcataagtattttattctttctgatgttattataaatggaattttttctatttcattttcagattatccatagctagcatataggaatgcaactgatttttagataataatcttgtatcctgcaactttgctgaactcatttattagttccaattttttttggtaaattctgtaggatttttctacatgtaagatcatgtcatcggtaaatatagttttatttctttctgatataaatgtattttctttttcctgcttaactgccccacctagaaccaccaatagagtgttgaataggagtggcaagagcatccttgtcttgttctgatcttaagggggaaagctttcagtcttcaaccattaagtatgatgttagctgtgagttttcctgttagttggattttgtttgttgaactgaattttgacagtgccaactcataaggttgtgctgagaatctaataagaaaagatctgtgaaggtgtttttaaaactgtaaaatatcgtttaatttcaagatcgtcttattcagtgacttggtactcttactctaaaaagtttcagagtaatgttgttaaatgaatcaaaatggttctgaaggcttttttaattccaacatcctgacaaagcctttgcacttatgttgttttgaaaggggaagaaaaaggggaaactctttggaggnnnnnnnnnnnnnnnnnnnnnnnnnnnnnnnnnnnnnnnnnnnnnnnnnnnnnnnnnnnnnnnnnnnnnnnnnnnnnnnnnnnnnnnnnnnnnnnnnnnnagtggaagcctctgatcttcatatgaaatggacccggaaccgtaacccagcattttgttgtatagcaaccttacctctgccacaaaggtgtttcttttgtttattttgaggccgggtctcgctctgttacacaggctgagtgcagtggtgcaatcttggctcactgcagcctctgtctcctgtgctcaagtgatcctcccacctcagcctcctgagtacctagaactacaggtgtgtgccaccacacctggctaatttttgtatattttgtagaaatggggtttcaccatgttgtccaggctggtctcgaactcctgggcacaagcaaccctctctctttggcctcccaaagtgctgggattacaggcatgagcccaaaatttttggtattctttttctgcccccaactttttattttaaacattttctttttttcctttaagccttagaatggctgggaaacattttcaaatggtataatgaacacctgtataactttcatctggaatcagtagttgctaatactttgccacatttgctttccgtgtgtgtatgtctatacattttctggacaaaaccatttgagagtcagttgcagacataatgacccttcaccattgaagacttcagtgtgcagcccctaagaaccaaggcattctccgacataaccagaggactrtcatcactcaatggaacttcatattatcattgtctactatgcggtccgtatacacattttcacaattgtcctaatcataacatggcttaaaaaattcagaatccaatcaaacatcagacattacacttagtacatgattctttagtctccttcaatctagaactgttcccaggattgttttaaagtatactgacaagtctttgagactgtaaatgacctgaggtatacttgagaataatttttcaatacacatgaaagatcattacacatgagccaagactcaaatgagctggcctacttactttgtacataaatgtgtaaactcctgaagacttccaataatgaactcccataagacagttagttcaatgtctttatggccttggtgacaaatcattacagaggatgagagcatttttcctatccaataatggtcaagaaaaaagcagacagatcctcactatcttagagaactaagtgagaaagctggtcgatgaaggggacttcatccagagaggaag

SEQ ID NO: 72350 - DNA, 2141 bp, Homo sapiens
  misc_feature (1)...(2141): n = A,T,C or G
cctgtagataaatctgggtagcactgtcatcttaacaatattaagtcttccaagccatgaacacaggacgtctttcaatttatttagatctctaatttccttcaacatgttttctgttttttagtgtactttttagtgtacttctttggttaactttattcataagtattttattctttctgatgttattataaatggaattttttctatttcattttcagattatccatagctagcatataggaatgcaactgatttttagataataatcttgtatcctgcaactttgctgaactcatttattagttccaattttttttggtaaattctgtaggatttttctacatgtaagatcatgtcatcggtaaatatagttttatttctttctgatataaatgtattttctttttcctgcttaactgccccacctagaaccaccaatagagtgttgaataggagtggcaagagcatccttgtcttgttctgatcttaagggggaaagctttcagtcttcaaccattaagtatgatgttagctgtgagttttcctgttagttggattttgtttgttgaactgaattttgacagtgccaactcataaggttgtgctgagaatctaataagaaaagatctgtgaaggtgtttttaaaactgtaaaatatcgtttaatttcaagatcgtcttattcagtgacttggtactcttactctaaaaagtttcagagtaatgttgttaaatgaatcaaaatggttctgaaggcttttttaattccaacatcctgacaaagcctttgcacttatgttgttttgaaaggggaagaaaaaggggaaactctttggaggnnnnnnnnnnnnnnnnnnnnnnnnnnnnnnnnnnnnnnnnnnnnnnnnnnnnnnnnnnnnnnnnnnnnnnnnnnnnnnnnnnnnnnnnnnnnnnnnnnnnagtggaagcctctgatcttcatatgaaatggacccggaaccgtaacccagcattttgttgtatagcaaccttacctctgccacaaaggtgtttcttttgtttattttgaggccgggtctcgctctgttacacaggctgagtgcagtggtgcaatcttggctcactgcagcctctgtctcctgtgctcaagtgatcctcccacctcagcctcctgagtacctagaactacaggtgtgtgccaccacacctggctaatttttgtatattttgtagaaatggggtttcaccatgttgtccaggctggtctcgaactcctgggcacaagcaaccctctctctttggcctcccaaagtgctgggattacaggcatgagcccaaaatttttggtattctttttctgcccccaactttttattttaaacattttctttttttcctttaagccttagaatggctgggaaacattttcaaatggtataatgaacacctgtataactttcatctggaatcagtagttgctaatactttgccacatttgctttccgtgtgtgtatgtctatacattttctggacaaaaccatttgagagtcagttgcagacataatgacccttcaccattgaagacttcagtgtgcagcccctaagaaccaaggcattctccgacataaccagaggactatcatcactcaatggaacttcatattatcattgtctactatgcggtccgtatacacattttcacaattgtccyaatcataacatggcttaaaaaattcagaatccaatcaaacatcagacattacacttagtacatgattctttagtctccttcaatctagaactgttcccaggattgttttaaagtatactgacaagtctttgagactgtaaatgacctgaggtatacttgagaataatttttcaatacacatgaaagatcattacacatgagccaagactcaaatgagctggcctacttactttgtacataaatgtgtaaactcctgaagacttccaataatgaactcccataagacagttagttcaatgtctttatggccttggtgacaaatcattacagaggatgagagcatttttcctatccaataatggtcaagaaaaaagcagacagatcctcactatcttagagaactaagtgagaaagctggtcgatgaaggggacttcatccagagaggaag

SEQ ID NO: 72351 - DNA, 2141 bp, Homo sapiens
  misc_feature (1)...(2141): n = A,T,C or G
cctgtagataaatctgggtagcactgtcatcttaacaatattaagtcttccaagccatgaacacaggacgtctttcaatttatttagatctctaatttccttcaacatgttttctgttttttagtgtactttttagtgtacttctttggttaactttattcataagtattttattctttctgatgttattataaatggaattttttctatttcattttcagattatccatagctagcatataggaatgcaactgatttttagataataatcttgtatcctgcaactttgctgaactcatttattagttccaattttttttggtaaattctgtaggatttttctacatgtaagatcatgtcatcggtaaatatagttttatttctttctgatataaatgtattttctttttcctgcttaactgccccacctagaaccaccaatagagtgttgaataggagtggcaagagcatccttgtcttgttctgatcttaagggggaaagctttcagtcttcaaccattaagtatgatgttagctgtgagttttcctgttagttggattttgtttgttgaactgaattttgacagtgccaactcataaggttgtgctgagaatctaataagaaaagatctgtgaaggtgtttttaaaactgtaaaatatcgtttaatttcaagatcgtcttattcagtgacttggtactcttactctaaaaagtttcagagtaatgttgttaaatgaatcaaaatggttctgaaggcttttttaattccaacatcctgacaaagcctttgcacttatgttgttttgaaaggggaagaaaaaggggaaactctttggaggnnnnnnnnnnnnnnnnnnnnnnnnnnnnnnnnnnnnnnnnnnnnnnnnnnnnnnnnnnnnnnnnnnnnnnnnnnnnnnnnnnnnnnnnnnnnnnnnnnnnagtggaagcctctgatcttcatatgaaatggacccggaaccgtaacccagcattttgttgtatagcaaccttacctctgccacaaaggtgtttcttttgtttattttgaggccgggtctcgctctgttacacaggctgagtgcagtggtgcaatcttggctcactgcagcctctgtctcctgtgctcaagtgatcctcccacctcagcctcctgagtacctagaactacaggtgtgtgccaccacacctggctaatttttgtatattttgtagaaatggggtttcaccatgttgtccaggctggtctcgaactcctgggcacaagcaaccctctctctttggcctcccaaagtgctgggattacaggcatgagcccaaaatttttggtattctttttctgcccccaactttttattttaaacattttctttttttcctttaagccttagaatggctgggaaacattttcaaatggtataatgaacacctgtataactttcatctggaatcagtagttgctaatactttgccacatttgctttccgtgtgtgtatgtctatacattttctggacaaaaccatttgagagtcagttgcagacataatgacccttcaccattgaagacttcagtgtgcagcccctaagaaccaaggcattctccgacataaccagaggactatcatcactcaatggaacttcatattatcattgtctactatgcggtccgtatacacattttcacaattgtcctaatcataacatggcttaaaaaattcagaatccaatcaaacatcagacattacayttagtacatgattctttagtctccttcaatctagaactgttcccaggattgttttaaagtatactgacaagtctttgagactgtaaatgacctgaggtatacttgagaataatttttcaatacacatgaaagatcattacacatgagccaagactcaaatgagctggcctacttactttgtacataaatgtgtaaactcctgaagacttccaataatgaactcccataagacagttagttcaatgtctttatggccttggtgacaaatcattacagaggatgagagcatttttcctatccaataatggtcaagaaaaaagcagacagatcctcactatcttagagaactaagtgagaaagctggtcgatgaaggggacttcatccagagaggaag

SEQ ID NO: 72352 - DNA, 532 bp, Homo sapiens
  misc_feature (1)...(532): n = A,T,C or G
ggatccttcttcctttgcctcccgagtatctgggactacaggcatgtgcccagtgagccttcagagatttaaaatcatgtcgtaagtgacatcagtgaaaatggtggaataaagacatgcaggctgggcgcagtggctcacacctgtaatcctagcactttgggaggctgaggcaggyggatcacgaggtcaggggatcgagaccatcctggctaacaaagcgaaaccccgtctgtactaaatatacaaaaattagctgggcgtggtggcaggcgcctgtagtcccagctactcgggaggctgaggcaggagaattgtgtgaacccgggaggtggagcttgcagtgagatgagattatgccactacactccagcctggacaacagagtgagactctgtctcaaaaaaaaaaaaaaaaaaaaaagagacatccaaaaattcatcccttcataaaagcaacaaataccaaaaaaaatagcnngnaaaaaaaaaaaaaagaaagaaaaaaaaagttgggcccccctcaacctttt

SEQ ID NO: 72353 - DNA, 823 bp, Homo sapiens
tcgctttcagatctctgtgaattgaaaccawgtgaatcccactagactattttaagaagtcgatataatagcaaaatttctcccacccaaaactatgtcaacaattggatgtactcatcaagtcacccttactctgccactaatttatttccttgttgctgaaatgatgagagaggtataatctccaccctcacggagttgtcatcaccctggagaggaaggagagagccaaaagacatacgtattgtcttgtagacttattagatttacacagtatcatcctccagtgtgtaaggcattgtctaaataggtccagttaaagcactacagagtagccatcttttacaaaaatttttggccacatttttaagttcactggtgaggaggaacgtctcatactctagccctcctgagcctataccctctgtgagatgtgtcaccatttcttggacaccatgtgagacattccccctcagattagagatgctcagcttgcatcaacttacctaaagcctacatctggctactctgggacaagtcctgtttacagtgcccattcctggagcttgcctctgtcttttgttcgattacatgatgtattacttttcccaacaggccagtgctagcatattggaagagtgatttaataaagctggcaaccttgacgctatgctaccagtccaaccttacttgcctcatttaccatttccattattgtggcagccctccattccagccacagcagcccctcaccaaaccccagtcacaccacccacatttctgcttttgtctgtgtgtttgtccatctaaaatgcccttattt

SEQ ID NO: 72354 - DNA, 823 bp, Homo sapiens
tcgctttcagatctctgtgaattgaaaccaagtgaatcccactagactattttaagaagtcgatataatagcaaaatttctcccacccaaaactatgtcaacaattggatgtactcatcaagtcacccttactctgccactaatttatttccttgktgctgaaatgatgagagaggtataatctccaccctcacggagttgtcatcaccctggagaggaaggagagagccaaaagacatacgtattgtcttgtagacttattagatttacacagtatcatcctccagtgtgtaaggcattgtctaaataggtccagttaaagcactacagagtagccatcttttacaaaaatttttggccacatttttaagttcactggtgaggaggaacgtctcatactctagccctcctgagcctataccctctgtgagatgtgtcaccatttcttggacaccatgtgagacattccccctcagattagagatgctcagcttgcatcaacttacctaaagcctacatctggctactctgggacaagtcctgtttacagtgcccattcctggagcttgcctctgtcttttgttcgattacatgatgtattacttttcccaacaggccagtgctagcatattggaagagtgatttaataaagctggcaaccttgacgctatgctaccagtccaaccttacttgcctcatttaccatttccattattgtggcagccctccattccagccacagcagcccctcaccaaaccccagtcacaccacccacatttctgcttttgtctgtgtgtttgtccatctaaaatgcccttattt

SEQ ID NO: 72355 - DNA, 823 bp, Homo sapiens
tcgctttcagatctctgtgaattgaaaccaagtgaatcccactagactattttaagaagtcgatataatagcaaaatttctcccacccaaaactatgtcaacaattggatgtactcatcaagtcacccttactctgccactaatttatttccttgttgctgaaatgatgagagaggtataatctccaccctcacggagttgtcatcaccctggagaggaaggagagagccaaaagacatacgtattgtcttgtagacttattagatttacacagtatcatcctccagtgtgtaaggcattgtctaaataggtccagttaaagcactacagagtagccatcttttacaaaaatttttggccacatttttaagttcactggtgaggrggaacgtctcatactctagccctcctgagcctataccctctgtgagatgtgtcaccatttcttggacaccatgtgagacattccccctcagattagagatgctcagcttgcatcaacttacctaaagcctacatctggctactctgggacaagtcctgtttacagtgcccattcctggagcttgcctctgtcttttgttcgattacatgatgtattacttttcccaacaggccagtgctagcatattggaagagtgatttaataaagctggcaaccttgacgctatgctaccagtccaaccttacttgcctcatttaccatttccattattgtggcagccctccattccagccacagcagcccctcaccaaaccccagtcacaccacccacatttctgcttttgtctgtgtgtttgtccatctaaaatgcccttattt

SEQ ID NO: 72356 - DNA, 1125 bp, Homo sapiens
gacctaaactcgagttttaaaaaattcaatttaagtggttactgtcctgaaactgcctgtttctaaggctcatgtgattacagtggtggacattattcactaggttcccgtaaaaggttacattaaacaacttaaacgactgtgtgtgcttccacttggtccagaaaggatttagtgctgctcacaaagttacaatacaagttaataaagcaactgaaaatgtgggaggatgaaggcaggaacggggagagtgagttttgtggaaccgcagtgaagttactgctcagtgtgtctgaccgaggctttcacacgtgccgggacgcaccctgaaacttggtttctaagctttcacacagtgaactcagtgacgtaaatgaaagcagtaggaaagtcacaggatccacagattaaaaatgaataataaaatgtaaaaagcagttgcttgagaaatgcaagagtattcccgacactaaaattagaagtatttttcataagtcaccctagaaagaatattgtgcgaatgttgggaacattttcacactcaacccagggatgtggtccaccagcccacagggcagggctcagtgtggaccaccggccacccccagcatggcgagtgggagcagggcggcctgaccccacagccgccagacagacggcaccacactcacgtcaagtgatgggaaatagctctttgatttttatttcaaaatgaaaaatgtatcccaaatgtcagtgtaaccaaaaagtcatttgactgtgttatattagcacagaaattatgcaagaaatrttattcttacacttcttattgtcatctgtttgtttgcattttaaagtaattaagaagaatttaaaagcaaaaaactttcttttactcatctgagaatttcatgttatctttgagtatactttcaatataaaggtagtcgtagatagcagtatcagaaggaaaatgttgtcaatatgaaatagagtcattacatactttaattttttaaactttagtttaaatgttgatttaaaaatcaaaattgtacttcaaaattttaaagccttgcttttaaaaaataggtttaaacttggtatcattatttttattttatataactgaaatccctttga

SEQ ID NO: 72357 - DNA, 901 bp, Homo sapiens
ctgaggatctggaagctggtattgagccaaaggccctatggggaaaagtattctgttcttgccttcaggcgtttcaactttgccatccctgtttactccactcgtaccttgtccactccgtaatctgcagcccaattccagagggagcaggggagatgggctttgctaaggccaggccaattcttacctagccttgtcccgtcaaacaggcccactggccagttgctggggctcacttgacccagtcggtggccatttgtgtgtccctgagcaggtgctgtggtgaggcagggccagccaggtggcactgagcagctgcaggactgatgtgattgcaggactgtgagaataattattatcactgagccttaaatactgtgttttctgtaaaagtgagtgtccttgaagcattgagcaagctgtgcaaattaccagagattatattttatattgaatttcccagttcctactgtgaaaatttaaaaacaacctctactgaattatcccccaaaatgcatttcctctaagtcctaatactaagtgattatgtaaccatggaaacggttattttgggagaaagaaaatcagagagaattggatctttagcatagctttataaaatcggactttgcttaatggaactttaaactccacagctcacagagtrtaggttcttatgctcagtacgacacatgataagctcctttagggtacatccatctcaataattggtttttgaattctctaaggagagacactatcccagaaaaaaagaaaagagcagcgaaaaaagtcaagtgatttttctgctgcagtcccagatctgttttctgtcatctttcaggagttttcttgaccccattggccctctttggcactgatttgatcctatggctgtcaa

SEQ ID NO: 72358 - DNA, 680 bp, Homo sapiens
taaaggagtgtgacagtctgaagcaaaaggagagtaagttttactatcatgaagacatatgaaagtataaaactcactggtagaggtaaattcataataaaatttagaaaactccattactgtaatggtggtatgtaaatctttcaaatcttagtatgaatgttaaaagttaaaatggtcaaaaataactatagccacaataagttactgaggaacacgtgatayataaagatgtaaactgtgataacaaaaataaaaattatacgtttgaaaagaaaggctagagtacttatatgcaaatgaagttagttgtaatcagcttaaaatactctatcataacttttagatgttttagatcagccccatggtaaccacaaagcaaagcattacagtacattcacaaacgagaaagatgaaatcaaaacttagcatacagaaactaattaaattacataggtaaacaacaggagaggaagaaagaaacaaaggatctataaaacaaccagaaaacaataaaaaagtaaggaataagtccttatctagcaataataatcttgaatataaatgaataaactggccaatcaaaacatacagagtgactaaaaggtcactaaatgctagtattttttataaaatggagaatttaaaggagcagataactgctagagttttgttcccaa

SEQ ID NO: 72359 - DNA, 680 bp, Homo sapiens
taaaggagtgtgacagtctgaagcaaaaggagagtaagttttactatcatgaagacatatgaaagtataaaactcactggtagaggtaaattcataataaaatttagaaaactccattactgtaatggtggtatgtaaatctttcaaatcttagtatgaatgttaaaagttaaaatggtcaaaaataactatagccacaataagttactgaggaacacgtgatatataaagatgtaaactgtgataacaaaaataaaaattatacgtttgaaaagaaaggctagagtacttatatgcaaatgaagttagttgtaatcagcttaaaatactctatsataacttttagatgttttagatcagccccatggtaaccacaaagcaaagcattacagtacattcacaaacgagaaagatgaaatcaaaacttagcatacagaaactaattaaattacataggtaaacaacaggagaggaagaaagaaacaaaggatctataaaacaaccagaaaacaataaaaaagtaaggaataagtccttatctagcaataataatcttgaatataaatgaataaactggccaatcaaaacatacagagtgactaaaaggtcactaaatgctagtattttttataaaatggagaatttaaaggagcagataactgctagagttttgttcccaa

SEQ ID NO: 72360 - DNA, 1132 bp, Homo sapiens
tatatatatatttatttatctatactttatgaggcttagatatattaaaaaaaaattatatctggggagagactgcctcttctggggctagttcatacttagaggtggcaagggacctgcccagctgaagcatgcctttcagatgcaaactaaccaatcctgcaccccttacccaacacacctcttttacctgttgcatacaacctaaaggcaatattcctctgccttggtcatcctgcggacacttcccaggcaactagagaccaccatatatccyaaagcccaccaaaatcattcaaaccagacaatcttgaaatacttagcctgccctgccatgtctttctatggaaaccccaatagaggccatggcctaagctctctccccactcctgtcttctgcctcctgactaccctggtgtttgacactgtaactttgggtggtatgtggcaacctcctctctgggacccatgagtcttcttcttccttccaaatctggctcttgtttcttctgtggcagcaaagatttcactataccatattccaacttgtacattcttagaacagcatgtatcttcacattctctctctctctatatatatatatttaagctaatctatattaaataattaaataggctaggcacggtggctcaagcctgtaatcccagcattttgggaggccgggggtcgggggggggtggtgggtcatgaggtcaggagttcgagaccagcctgatcaatgtggtgaaaccccgtctctactaaaaatacaaaaaaaattagtcgggcgtggtggtgtgtgcctgtggtctcagctaccagggagggccgaggcagaagaattgcttcaacccgggaggcggaggttgcagtgagccgagattgtaccaccacactccagcctgggtgacagagcaagactccacctcaaaaaaaaaaaaacaaaaaaaattaaataaactaacatatgtgtatattagtttaaattccaaaaagtatgattgctactaatacattggtttttgtattaatatcacaaaaagaaaattagtagagagaatttgaaatacagagctccaattaagatgacacattttagaagtgatatggcctttaaataatattttgagt

SEQ ID NO: 72361 - DNA, 1132 bp, Homo sapiens
tatatatatatttatttatctatactttatgaggcttagatatattaaaaaaaaattatatctggggagagactgcctcttctggggctagttcatacttagaggtggcaagggacctgcccagctgaagcatgcctttcagatgcaaactaaccaatcctgcaccccttacccaacacacctcttttacctgttgcatacaacctaaaggcaatattcctctgccttggtcatcctgcggacacttcccaggcaactagagaccaccatatatcctaaagcccaccaaaatcattcaaaccagacaatcttgaaatacttagcctgccctgccatgtctttctatggaaaccccaatagaggccatggcctaagctmtctccccactcctgtcttctgcctcctgactaccctggtgtttgacactgtaactttgggtggtatgtggcaacctcctctctgggacccatgagtcttcttcttccttccaaatctggctcttgtttcttctgtggcagcaaagatttcactataccatattccaacttgtacattcttagaacagcatgtatcttcacattctctctctctctatatatatatatttaagctaatctatattaaataattaaataggctaggcacggtggctcaagcctgtaatcccagcattttgggaggccgggggtcgggggggggtggtgggtcatgaggtcaggagttcgagaccagcctgatcaatgtggtgaaaccccgtctctactaaaaatacaaaaaaaattagtcgggcgtggtggtgtgtgcctgtggtctcagctaccagggagggccgaggcagaagaattgcttcaacccgggaggcggaggttgcagtgagccgagattgtaccaccacactccagcctgggtgacagagcaagactccacctcaaaaaaaaaaaaacaaaaaaaattaaataaactaacatatgtgtatattagtttaaattccaaaaagtatgattgctactaatacattggtttttgtattaatatcacaaaaagaaaattagtagagagaatttgaaatacagagctccaattaagatgacacattttagaagtgatatggcctttaaataatattttgagt

SEQ ID NO: 72362 - DNA, 1131 bp, Homo sapiens
gcataaaggatgaatggaaaggccaaaatgtcaaatacccaaacagatacaggtcaaccacggaagagagaaagggagtggaggggtggggaaggggaaaagtgatgaagactgttgggaaaacaggttaatgtagctccagttaaagccatctagatcaagaaattgtggacatttgcagaagtgccaagggctccaaatttccatcatccaagtaacatatttctgtggaaatctgctgtgtcctactagaaattatcaagttcttttaycaagggaaaaattttaagggctacagtgcacttgtttgtgtaagtgtcaggtgtaagagtttatgtaaagggatatataatcagatgctttgttttactgtttaatttagctttgggtgttagaacctagcctgcattgggccttcgggggaagaagaataaacattgacacaatctactgtggatgagcctagatgtctgtgcaggggtggggagggagctacactgcccttaatgtctccaagaaaacagaacacacaattattttgacctgttcctacatgaaagctggcagtgatgtgaaaaatactttcctcacacttggactcaaattcttaggcaaaataccatctttcttatgttttgagcagccagctatacaatggaacctcacaaataataactgagaatgaaatgaaaacaatttgtgttgtgcagagataacaaaatatgcgtaagagaaagaagaggtaaatgcctcatgaccgaagaacattctttgtaaaccacatattttttttgtctcattccaaaaacagaaaaagaaaaatgctgttattaaggactcagtagtgggtggtggataaatagcatcaagaaggatgtactaatgatggtgtcttaaaataagtaaaggcaatttttgttggccagaagccataccctataatttattatgttcaatccaaacagtgtgattcattaagaatcctgagaatgagatgtgacgtccaaaattattcatgcaggacactggaaccgaagttaattatttgaaagaaaaattgtgcaagtaatgccctaatcatttccacttgaagccactaaccaaagtcaaagcaaaatttctgatactcca

SEQ ID NO: 72363 - DNA, 1131 bp, Homo sapiens
gcataaaggatgaatggaaaggccaaaatgtcaaatacccaaacagatacaggtcaaccacggaagagagaaagggagtggaggggtggggaaggggaaaagtgatgaagactgttgggaaaacaggttaatgtagctccagttaaagccatctagatcaagaaattgtggacatttgcagaagtgccaagggctccaaatttccatcatccaagtaacatatttctgtggaaatctgctgtgtcctactagaaattatcaagttcttttatcaagggaaaaattttaagggctacagtgcacttgtttgtgtaagtgtcmggtgtaagagtttatgtaaagggatatataatcagatgctttgttttactgtttaatttagctttgggtgttagaacctagcctgcattgggccttcgggggaagaagaataaacattgacacaatctactgtggatgagcctagatgtctgtgcaggggtggggagggagctacactgcccttaatgtctccaagaaaacagaacacacaattattttgacctgttcctacatgaaagctggcagtgatgtgaaaaatactttcctcacacttggactcaaattcttaggcaaaataccatctttcttatgttttgagcagccagctatacaatggaacctcacaaataataactgagaatgaaatgaaaacaatttgtgttgtgcagagataacaaaatatgcgtaagagaaagaagaggtaaatgcctcatgaccgaagaacattctttgtaaaccacatattttttttgtctcattccaaaaacagaaaaagaaaaatgctgttattaaggactcagtagtgggtggtggataaatagcatcaagaaggatgtactaatgatggtgtcttaaaataagtaaaggcaatttttgttggccagaagccataccctataatttattatgttcaatccaaacagtgtgattcattaagaatcctgagaatgagatgtgacgtccaaaattattcatgcaggacactggaaccgaagttaattatttgaaagaaaaattgtgcaagtaatgccctaatcatttccacttgaagccactaaccaaagtcaaagcaaaatttctgatactcca

SEQ ID NO: 72364 - DNA, 653 bp, Homo sapiens
tctcattcacatcaggtagcatccatgtatcctcaccccgaagtcgcttaagttctttacgcctttcttctttttcaaaattggctttagcctacaaccaaagaaaaaaaaaagacaaactggcaattgacccaactgggtttcacaaaaaaaggaaaacaaaaacctctgtcatttttatacaaaaatatccactcatgaatgaatgtctattccttgccagggatttgcttctccagtgtaaaaaaataaawaaataaataaataaacaaaacaaagcaaaaatctctccttctgcatttccaatctccagtgatttgagttaccaatcagagagaatccagggactgagtccaggccctcccatctctctaagctccctagctcaatatgacttggaatcccttttcccttcaccattcccatggctactgccttaagacttttgcaacagttagacctccacgccttcaatatgcaatgcctgtagccccaatacccagccccaaaaatgcctcaggaagaatcatctctgtataaagaaaggatcatattggtaatttttatccattcttcaatgatagtcaaacaaagcaagtttttcctaggaaatcgttcctgccctctttctttccctgtaactccaaagctca

SEQ ID NO: 72365 - DNA, 1257 bp, Homo sapiens
ggtttatagattaattctttatgtattcaatttgtaaatcatttaacccttcaaaaatttactaatttttgtctgctaatctactttgtctaaaatttgcagtttaacacaggagggcaattatttttcttctctttaaagttcttgaaaaacatacacattctatcttggaattagtgacaagaaggacctatattgtgttatgcacttccttcttcattgcctgatttaagactgatcactattcaaaataccattgaataattttaagtgattgaataacatgagcaaaccacacctgtcatttcaaaatatagttccagcagcctttcgaaagagcagcagtgacattcaaaatgctcttacttggaattgcatgaacacacctctatcagaacggacataagccccaatggcagaagcaagtccttgcaggatcctggctgaaaaacatggcatgtcaatttttgagttgctgcatctttggaagacacagagtagtcttagggaaatagctggggaagagttcatcaaccacttattcagtaagacattatttcawcgctttaactgctatggcctttacaaggggtgtttactagctatcagcccagtggagggggatcggggagagagcaatgtctaagtgtgacttaacaagaacaaaacaacaaaacgagatgaagagtcttgagaaaatgtttgtttcattctacatcatctttgaagtacatttatacaacttaataagatattttcctgtctcccacttcacataaaactaatgcctttcatgatattattggattatttaagctacactacattcgtcattatgcagagcttaaagtcttacatcaaaatgttccaatttggtcactttgttggaagtctcagtagggaagatgaaaaacaagaaagctgaccttgtatatagtttgtctactacatgaatgcaaagagcatttctttcctgggttttagggaaaatgagggccagcaccttgtacagttgatcatgtcagtcacaactctgcctagttttaattaaaattttgttaaacgataaagattgtctcatgcagattcatcataataaaaggctgttttaggagttcatgacattcaaaatctattaaaatttcatccaaaaactgtcaaagtcgtttacatcatatttggtaatcttgatggcaaattcccagtgtactataagatttgttaattgccaggatctgtggggttgaattaaaaaaa

SEQ ID NO: 72366 - DNA, 1169 bp, Homo sapiens
ttaaaggtaatcaaagtgtccctataacagttcaaatttgaaacaactaatatgtgcatagtcatacaagtaaataaatgaattctggtttattttgaaaaagaaaataaatgtcaattgatgcaattgcccatatatacagactaaagaaggaatccacaggaccatcctaatggatagagataaaacattcttaaaaattcaccatatagtcagaacaaaaatgtcaggaaactatagataaagagaatgtcatcaaactgaaaaagggcgccyaccaaaaaacaactcacattatatactgtggttaaagcctgagttattttcccctcagaatgtaaaccatcaaggatgtacaccatcgccattccaactaaattcaaggtcctagcttgtataggaaggcaaaaaagagaaataggaagtatataggtaagaaaggaagaaatacaactgcctctgctcacagatgacacaattatttacatagctaattaaaaaaatgtcagactcatactacagagttcagcttatgagatattctggagaaattaaaactacttagatgaaacacagattagttgtgcctaggagttgggagtgagaagaaggtttgacaaccaagttgtatgagcaaagatattagggtggtgagtcttgtctctctggcaactacacaacaatatatatttgttaaaactcatagagctgggcaccaaagaggagattttactgtatgaaaattatatctgaattttaaaaacattttagtttacctaatagcacatttctctctgattatatttctcattgtagactgaattattgtgttatttgtatctgttctattcctatgatcagtttctcaaataacaggctaatcataaggtatttttcttacagcaatttttaatacatgttaacaaatgatgatagtactctgtcattacttaacttttttttcagaatgtttttggatattgtcaaacatttaaatctctatacgatcttttaaaaattatcaatataaagaatatctgctgtcacttattaaaaataattaaatttttagattgtcatatctatagagaaatatgacagctctaccatgttgtctttgtatcaataaaaaatctgcatttataatgatgtctatgcatccaaaaaat

SEQ ID NO: 72367 - DNA, 933 bp, Homo sapiens
catatgtagaagggagtttattaagaagtattgactcacacgatcacaaggtgaggtcccacaacaggccagactgaggagcatggaagccagtctgagtcccaaagctgaagaacatggagtctgttgtttgatggcaggaagcatccagcaccggagaaagatgtagcctgggaggctaggccagtctattctcttcatgtttttctgtctgctttatattctggctgtgctggcggctgattagattatgcccacccacaaaaagggtgagtctgcctttcccggcccactgactcaaatgttaatcttctttggcaataccctcacagacacacccaggaacaatactttgcatccttcagcccaatcaagttgatactcaatagtaactgtcacatttacctttcaccttctgccatgattgtaagtttcctgaggcctcccagccatgcttcctgtacagcctggagaactgagtcaattaaaagtcttttcttcataaattacccagcctcaaatagttcttcatagcactgtgagaatggactactacaatctgcttccaactgcacacaggccattcctcactttctggagcagccacatctccttttgcatagatgatcttttwccaaccaatggttatcttggagaggttatactttgagggatgaaagtgagtggctggtttggctaaagggaaagcatatttttgtggtatcactgggttcaaaaccctttagtaagcaaaatcctaatgtctgtgagttgggcttctagttaagtgtagtctgtgcaacaagtttcttagtttctgcttttatcacttactatgtgatcctagtgagttctttaacttcctattactcattggtaagttgagtacataacagttcctacctctgtgttgaaagaggattgaataagata

SEQ ID NO: 72368 - DNA, 670 bp, Homo sapiens
tgcccctcattagactagcrtgtcactaatctttaggccaccactccaaccttgcaaaatattgggagaggaattaaattcccagggaattcagaaagccccatccctctcacctcaaaaaaaccaagaagaaaaggatctctgctgacaaagccaggggggtatctttatctcaggggcccagatgtgggagaaggcagaagtcaaagcccatatggaccacccatggagcgtttcatccgaggttaagaactgcccatcctttgttccgatgctcaggtaaaaggaattgttactgctaggccagctctctatgggaggtgaggctgattgccaatttccatggtgtaaatactcctgcaatggccaatttcaagctattataccaatagtggagctggggactctgctctgctctgaagtataggagcagggagcctgtgtccccacaccaggtcctgagccagctggcctgccccaagctgcttccctaaacccacggtccatctccagggagggtgtttccttccctccctgcagctggcatggtgactcagcttcccctaaatttaggaaaaggggtggaggacagagacagctgcccaggctcctctcctcctcgctgagctcccaccaccctgtcagctgaggggctggcacaaggtccacc

SEQ ID NO: 72369 - DNA, 670 bp, Homo sapiens
tgcccctcattagactagcgtgtcactaatctttaggccaccactccaaccttgcaaaatattgggagaggaattaaattcccagggaattcagaaagccccatccctctcmcctcaaaaaaaccaagaagaaaaggatctctgctgacaaagccaggggggtatctttatctcaggggcccagatgtgggagaaggcagaagtcaaagcccatatggaccacccatggagcgtttcatccgaggttaagaactgcccatcctttgttccgatgctcaggtaaaaggaattgttactgctaggccagctctctatgggaggtgaggctgattgccaatttccatggtgtaaatactcctgcaatggccaatttcaagctattataccaatagtggagctggggactctgctctgctctgaagtataggagcagggagcctgtgtccccacaccaggtcctgagccagctggcctgccccaagctgcttccctaaacccacggtccatctccagggagggtgtttccttccctccctgcagctggcatggtgactcagcttcccctaaatttaggaaaaggggtggaggacagagacagctgcccaggctcctctcctcctcgctgagctcccaccaccctgtcagctgaggggctggcacaaggtccacc

SEQ ID NO: 72370 - DNA, 670 bp, Homo sapiens
tgcccctcattagactagcgtgtcactaatctttaggccaccactccaaccttgcaaaatattgggagaggaattaaattcccagggaattcagaaagccccatccctctcacctyaaaaaaaccaagaagaaaaggatctctgctgacaaagccaggggggtatctttatctcaggggcccagatgtgggagaaggcagaagtcaaagcccatatggaccacccatggagcgtttcatccgaggttaagaactgcccatcctttgttccgatgctcaggtaaaaggaattgttactgctaggccagctctctatgggaggtgaggctgattgccaatttccatggtgtaaatactcctgcaatggccaatttcaagctattataccaatagtggagctggggactctgctctgctctgaagtataggagcagggagcctgtgtccccacaccaggtcctgagccagctggcctgccccaagctgcttccctaaacccacggtccatctccagggagggtgtttccttccctccctgcagctggcatggtgactcagcttcccctaaatttaggaaaaggggtggaggacagagacagctgcccaggctcctctcctcctcgctgagctcccaccaccctgtcagctgaggggctggcacaaggtccacc

SEQ ID NO: 72371 - DNA, 670 bp, Homo sapiens
tgcccctcattagactagcgtgtcactaatctttaggccaccactccaaccttgcaaaatattgggagaggaattaaattcccagggaattcagaaagccccatccctctcacctcaawaaaaccaagaagaaaaggatctctgctgacaaagccaggggggtatctttatctcaggggcccagatgtgggagaaggcagaagtcaaagcccatatggaccacccatggagcgtttcatccgaggttaagaactgcccatcctttgttccgatgctcaggtaaaaggaattgttactgctaggccagctctctatgggaggtgaggctgattgccaatttccatggtgtaaatactcctgcaatggccaatttcaagctattataccaatagtggagctggggactctgctctgctctgaagtataggagcagggagcctgtgtccccacaccaggtcctgagccagctggcctgccccaagctgcttccctaaacccacggtccatctccagggagggtgtttccttccctccctgcagctggcatggtgactcagcttcccctaaatttaggaaaaggggtggaggacagagacagctgcccaggctcctctcctcctcgctgagctcccaccaccctgtcagctgaggggctggcacaaggtccacc

SEQ ID NO: 72372 - DNA, 670 bp, Homo sapiens
tgcccctcattagactagcgtgtcactaatctttaggccaccactccaaccttgcaaaatattgggagaggaattaaattcccagggaattcagaaagccccatccctctcacctcaaaaaaaccaagaagaaaaggatctctgctgacaaagccaggggggtatctttatctcaggggcccagatgtgggagaaggcagaagtcaaagcccatatggaccacccatggagcgtttcatccgaggttaagaactgcccatcctttgttccgatgctcaggtaaaaggaattgttactgctaggccagctctcyatgggaggtgaggctgattgccaatttccatggtgtaaatactcctgcaatggccaatttcaagctattataccaatagtggagctggggactctgctctgctctgaagtataggagcagggagcctgtgtccccacaccaggtcctgagccagctggcctgccccaagctgcttccctaaacccacggtccatctccagggagggtgtttccttccctccctgcagctggcatggtgactcagcttcccctaaatttaggaaaaggggtggaggacagagacagctgcccaggctcctctcctcctcgctgagctcccaccaccctgtcagctgaggggctggcacaaggtccacc

SEQ ID NO: 72373 - DNA, 656 bp, Homo sapiens
atcctcaccaggtagttgcctccatgtttggacttgagcatctgcgccacctcacggaggttgctccggaagttctcctcattggctgtgctggggaaggagacagcgatgatcctctctgtgacgtacaccaggtccagctcacagctgtcctccatggtccggctcacactcatgtttctagggagacagcaggcagcrgagggtccatatcagaatccagcccacagggaaggccccagatagctgcaccccatacacaccctgtgtgacccccatatgcagcccagggtgcttggctgctcttcaacccaaggccaaggccacaggcttcctctggcaaggccaatgtggccggcttgggagtgccggcgagaacaagctgggtagggctggcaaggacctcaggccatttcagaaccaaactgtgatgacaccaattcttggttcccatcagtcctttggccactgccttcaacctgtgactccagagctcagagccagggccagactggcccaggaacccaggagctctggctcccaacactggctgcctggccaggcagaagtctcccgaaaggccccagactgctctggaagaggaaggagagcctgcgctgggcgctctccagccctggaacggagacttcccactg

SEQ ID NO: 72374 - DNA, 684 bp, Homo sapiens
ttccccacccctatcccctaacccagcaccaagcccaggactgaacacaaaaactgctcccatacagggtggctggagaccagctgattgtccaggtctggtcaaggtcaaggggtaaagataaggcccacctctacatgagaaatggcctagaaattgggcagaggtgagcaggggccaaggaagggaagcaagatagggccaggctgagctcaggaacrctccccagctgtcatcatcatcaacccaagcccattctttctccaaaaaaaagcttaatgccttttgcagctgcaactgggcgggccaggggtccggaaatggagttcacccccgacccagagcaaccccagcctccctgggtgggaactgcgttgggtggagaatacagcttggcaggccttgagggctgacccctgctaatgaggaatgtcaggggcaccggaaaacaggagaccccagagagggcagaggcctgggacagagagggattgtggccaggagccctacccttgcacgggttcaaagctctcagcttatatggcatgcaggaagagtggacatggttctcccctacccactaccaacaagggactgaattaaagctgcatcaagaggaatgccagttagattttggggggacctagagggcataagacacaataatttgaagcagttatttgg

SEQ ID NO: 72375 - DNA, 664 bp, Homo sapiens
ttctccagactcaccacttggtgggcactgtcccctcctctgagcacctggggcttccgcggctcactaacgccctgacatgcagtgggtcaggtgcacttctatggctcccatttttggaacgataagggatttgttcattgtctcccttcccctttcctcatttggtcagtgcccagcacaaggctgacacatartagagtctcaataagtgtggaatgaataaatgaatgatgaagagatggatggatggataatcagttcatgattgaatcaaagggcattttaaaatgcttaatacagcactaggctgtaccaaagatactcatatgaagacttttatttttgaagctatataatcgcaggcagaaacacaggctttgctaggacccaggacatcccagacacatcccacaaaggtctgtgacagattgggctgggagacggggcgacctggaagacccctcctccagccactctcaggagactttggaggttacactatccatcccctaccccatcatcacccctctttccagcctgcctgctccagcacctgggtatagaactataaacccagcaagtcccttgaaaccttaagaaaggaagtcaacaagctagaggatttcacagaaaaagagcagctttcctccttaattctaag

SEQ ID NO: 72376 - DNA, 606 bp, Homo sapiens
cccctcactgctgggcgacattgaatttgaagttccattgcccagcacctccaaccccgactcccaagttccctaaagaaatgagcaaaacacacgcacacacatacatccacacttgcacatgcgcacacacgtcctgtgttaccactggccaaggaaacgcgagtctcaggattccagggcctggacctggggtaaagggctgctctgggactctgccccccaacctcttggaggaccccgagtgtgggggcaggattgggtgtctgccttgactcacaggatctccccaggtcctaaagctgaaaaaaaaagtgggagaagatccaggaggcaggggtggtggacaaaagtaggagtgagactaaaaagtgggagtgagactagatttgatcacactcaccacccttctgtgycccctggacagcatgctcccctggagcccctgcacaggctcatcagaacaaggcagaatctcctactcactaacctcctgagagccgtttatagggggatcacacttgtccaggagggctgcccctcctgctttcacacaaccactggccccaccatccctctcctggccagtctcagaagacccaggga

SEQ ID NO: 72377 - DNA, 1765 bp, Homo sapiens
ctcgttcacatctgggggtgccaggaaaaacaggagggatgaaagcggaggaggagcccagagcctccactctacctgggctggtcaagaagggagcgcccccacctcacacctccctgcccaggacccaggagcctggcccagcccagcctcaccaacacaggagcggttgttaggccccagctggaagcccggctcgcactggcagcggaaggagccaggcaggttcacgcagcggtgctggcagtagcggtagcggcactcgtctatgtctagggatagaggcaggagaaggagggcggagggcagagggcagagggcaggtgggctcgagccggctgggactcaaggcttcaccacccataatcctgtgtccgaggagctgaattaggcagggtcagccaggacacctcccaaacactccccgctacagtcctctgtgtctgatgacggagggtgaggtggcaggggccgggggtgaagcctggcttgaatgggggtcaggtgctagggcaagggccagaccagggacacaaagccgggactasagaagctgcttcctggactcacccacacactcgggcccgatcttgcggtaaccatcagggcaggtgcactgataggagccaggcaagttatggcagtcctggctggggcgacagtcgtgcagggcctgggcacactcgtccacatctgcgagagacaccactcagcccctgcctgggatcccgcacaccacccaacatgacagatagttccaacacttgtattcggttctctcaacagcacgcgtaagagttcaccagcctggagccatcaggaaaggcacccctaacctctaaaaccacatgttgggggttgcacaggaaataaggtcctgtccaaacatccccagcaacactgattcctggactgtccttcctccaaggcctgtggctcccaggggacagacactggaaggcagacttcctgcagtgtctctgcagcaaccgaggggaggggcccggagctggctggagcagtggcacacaagctggggccacctgcggcaggtcctaaacaacatgagtgtctggatgagggtgtggacatcaccagtggcccttttgagctggggaggaacatgaggtctgagtttaagacgcctggtgagaggactggaagccaggcaccagagcagtccccactcacccacacagctgtcctgatcgtcgggctcatagcctggtgggcaggggttggggtgttgagcgggaggcactggtggcgggggtccctcgccgtgtaggtcgttgatgacggcagcggagcggggcaggcacaagtagcccccgtagtggttgatgcacttcatttcccccttgcaggcctcagggatggtcagacactcgttgacatctgcagagaggggcctgctgggcacagccagtctcctgggctggccctggagggagcggaggcaggaacccagctcggccttctctgagatgtgtggccccagcaaagccttcccactctgctcaacaagctaagtctgcctgctcaggacccctccccagggttggccaaggctggagatggggcagctgttcccactgttgccctcattctcggcctgcaagtgggtctctatccctccccacggccctagccctagctcagcccaagatggggggcctccttacccacccctggggacgctaccctcccaggttgtgatgagacaaagagctgggacaggagagtggttcagagaaggcgtaca

SEQ ID NO: 72378 - DNA, 1278 bp, Homo sapiens
tgaagaactcctggggggcccaatggggagagaaggtgagtgtgatctattgggggagggggcaaggcagaacaggcctcttcccaccttcccgcccctatgtcccctaacctcctagggctatttccggctgcaccgagggagcaatacctgtggcatcaccaagttcccgctcactgcccgtgtgcagaaaccggatatgaagccccgagtctcctgccctccctgaacccacctggccccctcagctctgtcctgttaggccaactgcctccttgccagccccacccccaggtttttgcccatcctcccaatctcaatacagcctgaataaaccaagacaagacctctggcttgtgagcagactcttctggtggatgggctgagcacagacaccattccctgagatatgtctcagttcccaaggagccactgtacacatccatccttgtacacggacaccaggtgctcagagacagacacaggcacatctgcacgccccccacttgctccccggagcgaggaccagtctccaaactcagagcaactttattgtcagcgtgggcggagcgttgggaggcacctcagtcatgatacaggcgcaggaggcagccgcggagggtgcccatgtagcggtcccagagggcctggtgtctgtaagaacatgaacagtgacagctgagttttcacaacactcaccgtgatggaggccctgccctgcgtgctttctacaccttcattcattttgcccttagaaaatccttacaattcttctcatgatgaaccctagtttgtacatgaggaaactgaggcatggagaggttaagaaacctgccccaaatcacacagcttctaagagggagagccagagctttggtccagagactttggtcccacccccagggtagcagaatggggaaccttgagtctgcaggaggcgaggtcctggcaggtggcaggctggggcaargccaagctggacaggaggacagggctgctcaccggaagccatcgagggagtggacagacgctgaatactgattcaggaagaaccgcacgtcgctgagtggccagtggtcggagcggcagggttccacaaactgcgggcccaagagaatacttagcacttgtataggccagggacagaccaggttgggtgtcagagagcacgacagctcaccttctccacgaggtccacaaacaggtctctgacatctttattgtgggtcagcttggcggccacgttcaccagcccccgggacaggttctgtggggcag

SEQ ID NO: 72379 - DNA, 639 bp, Homo sapiens
ggatcccttggcctgaaatttttgagtgaggttagggttttgcatttctgaatcgaagcaactattgattagcctggaatcccgacctaaagcaaaggaaatcacaagtatgaaggcgtcgtcagtcggataaacactagtactctgcatgtgtaaagccactctcgtctcctgaaaaaaggccatgtccaacgtcagtaaaacaagaataggaggaaaaggcacaggggaaaggtacaaggaaatctctgagagctttgttcttgtttaaagatgtttggcaaagtcatgaggcgttaaagggtaaagacgagggtttgtgcattcaattcaaggcttctttacatgcctttacgtgccaatgagaagaaatagatattaaaccagacttgaacccagctctcgagttgatagccaggtacatggttattctaacatccgmaaaactgagacaagttctgtggtagtatatgccttaaaaaaaaaaagaaacgagcgggggactccgggatgattttgttgttctagaacagtgaccacagcctcacactctgcaggaaaagactgggtcgcaaacaagtcagaggcaaacccagaaagggaactgggggccctaatcctataaacggaattaagggt

SEQ ID NO: 72380 - DNA, 1100 bp, Homo sapiens
aggtggttgatacaccttgcagacagctttgaatccttccctaaggtcagttttggatgtaatctgggagtattcrtcgttttacgccatctgccatggatttctacattgcttaattgactgtaaaatgagttattcttgtgaagtgggactttgttggaaaacattcaaacaatacggaagtgcaaaagataaattattagagatgatattagagatagagcaatcatttccttctgctggcctctcttcagccctttcctgtctcactggcaatctgtcgagaatctgcacgcacagcagtgcaactgcgttacatggatttactttttttgtggctgttacttttataaaaatggaatcataccagacaatactattctgtaagttatgtttttcatccagtgataataaccactatcatcatacacagctataccagatggcattttttaagcatttgcaaatattagtttagggtgaggattgagaggaatcgttgtaagtcggcctggtgtccacgagctgcagtgtgtcctcatccgtgccccgtgtgcattgcagctggcggtgtggttgaacggtctttgtgtgctttccagggtgatgctgagaacacacccatccttcatcttctttccgttctgctcccatcttctcctgtgccctctgcctctttctgactcttcgttgtagacattgctcctaatggtcagacgtctgccaagactgtggtcattttcttggtcgcgtttttaccccaggctgttttttacatgtcctgttttgaatgctttctctccggaagctcttcctcagttcactgtgacgcctcaggacagagtcgttattgagggccagaccgtggatttccagtgtgaagccaagggcaacccgccgcccgtcatcgcctggaccaagggaggtaagacccaggccggccctttgcctgctccctccgcggccacagacgcaggaagcacacatttccactgtgcccaggcaaccccagcgtgttctggacagggctgagctgggactggattccacaggaccaaggcactgggaagcgcagaggtgtctgcacatcccccgcggct

SEQ ID NO: 72381 - DNA, 1100 bp, Homo sapiens
aggtggttgatacaccttgcagacagctttgaatccttccctaaggtcagttttggatgtaatctgggagtattcatcgttttacgccatctgccatggatttctmcattgcttaattgactgtaaaatgagttattcttgtgaagtgggactttgttggaaaacattcaaacaatacggaagtgcaaaagataaattattagagatgatattagagatagagcaatcatttccttctgctggcctctcttcagccctttcctgtctcactggcaatctgtcgagaatctgcacgcacagcagtgcaactgcgttacatggatttactttttttgtggctgttacttttataaaaatggaatcataccagacaatactattctgtaagttatgtttttcatccagtgataataaccactatcatcatacacagctataccagatggcattttttaagcatttgcaaatattagtttagggtgaggattgagaggaatcgttgtaagtcggcctggtgtccacgagctgcagtgtgtcctcatccgtgccccgtgtgcattgcagctggcggtgtggttgaacggtctttgtgtgctttccagggtgatgctgagaacacacccatccttcatcttctttccgttctgctcccatcttctcctgtgccctctgcctctttctgactcttcgttgtagacattgctcctaatggtcagacgtctgccaagactgtggtcattttcttggtcgcgtttttaccccaggctgttttttacatgtcctgttttgaatgctttctctccggaagctcttcctcagttcactgtgacgcctcaggacagagtcgttattgagggccagaccgtggatttccagtgtgaagccaagggcaacccgccgcccgtcatcgcctggaccaagggaggtaagacccaggccggccctttgcctgctccctccgcggccacagacgcaggaagcacacatttccactgtgcccaggcaaccccagcgtgttctggacagggctgagctgggactggattccacaggaccaaggcactgggaagcgcagaggtgtctgcacatcccccgcggct

SEQ ID NO: 72382 - DNA, 1100 bp, Homo sapiens
aggtggttgatacaccttgcagacagctttgaatccttccctaaggtcagttttggatgtaatctgggagtattcatcgttttacgccatctgccatggatttctacattgcttaattgactgtaaaatgagttattcttgtgaagtgggactttgttggaaaacattcaaacaatacggaagtgcaaaagataaattattagagatgatattagagatagagcaatcatttccttctgctggcctctcttcagccctttcctgtctcactggcaatctgtcgagaatctgcacgcacagcagtgcaactgcgttacatggatttactttttttgtggctgttacttttataaaaatggaatcataccagacaatactattctgtaagttatgtttttcatccagtgataataaccactatcatcatacacagctataccagatggcattttttaagcatttgcaaatattagtttagggtgaggattgagaggaatcgttgtaagtcggcctggtgtccacgagctgcagtgtgtcctcatccgtgccccgtgtgcattgcagctggcggtgtggttgaacggtctttgtgtgctttccagggtgatgctgagaacacacccatccttcatcttctttccgttctgctcccatcttctcctgtgccctctgcctctttctgactcttcgttgtagacattgctcctaatggtcagacgtctgccaagactgtggtcattttcttggtcgcgtttttaccccaggctgttttttacatgtcctgttttgaatgctttctctccggaagctcttcctcagttcactgtgacgcctcaggacagagtcgttattgagggccagaccgtggatttccagtgtgaagccaagggcaacccgccgcccgtcatcgcctggaccaagggaggtaagacccaggccggccctttgcctgctccctccgcggccacagacgcaggaagcacacatttccactgtgcccaggcaaccccagcgtgttctggacagggctgagctgggactggattccacaggaccaaggcactgggaagcgcagaggtgtctgcacaycccccgcggct

SEQ ID NO: 72383 - DNA, 864 bp, Homo sapiens
cctgatgacctcatttgtaaatacttatctccaagtaaagtcacattctgactttaaaaccacatcctgggggttaggatttcagcatatgaatttggaagtgggggacagagttcagctcataatacttcactctctccccaccagaatacatgtccttcacccaatgaaaatattccatcccaacaaccccaaacgtctttcaracatcaactctcaagtccaaaatctcatcttaaatatcataaaattgggtatgcgtgacactcagggtatgagtcatcctgaagcaaaattgttctctagctgtgtgtgaacctgggaaaccagacaaaaagttatctgcttccaaaacagaatggtgggacaggcatagaatatacattcccattctgtaagggagaagttgcagggggaaaaaaaaagaaagaatcatggttcccaagcaagtctgaagctagcgggggaaattccattccattttaaggcttgaaaataatcctctttggctagatgttctgtcctcagggctcacaggggaggggatgcatagccctgccttccaggcacagggtcacaggagccccacccccacagccctgggcaatagttctaccctctacaaccaaggaggagccagtcgctgaaccatctttgaagccattggtccttcatttcatcctgtctctgtccctttcagtccatgctgtcaatgtttctgctggtataaaattctcaaaaaccttattggcctcccatgcaagtcatgggggtccaagcagtcagacaagagggcactccgcggatctttttcagataaccacctctctatttctggcatctactgtggaggttgattggatc

SEQ ID NO: 72384 - DNA, 864 bp, Homo sapiens
cctgatgacctcatttgtaaatacttatctccaagtaaagtcacattctgactttaaaaccacatcctgggggttaggatttcagcatatgaatttggaagtgggggacagagttcagctcataatacttcactctctccccaccagaatacatgtccttcacccaatgaaaatattccatcccaacaaccccaaacgtctttcagacatcaactctcaagtccaaaatctcatcttaaatatcataaaattgggtatgcgtgacactcagggtatgagtcatcctgaagcaaaattgttctctagctgtgtgtgaacctgggaaaccagacaaaaagttatctgcttccaaaacagaatggtgggacaggcatagaatatacattcccattctgtaagggagaagttgcagggggaaaaaaaaagaaagaatcatggttcccaagcaagtctgaagctagcgggggaaattccattccattttaaggcttgaaaataatcctctttggctagatgttctgtcctcagggctcacaggggaggggatgcatagccctgccttccaggcacagggtcacaggagccccacccccacagccctgggcaatagttctaccctctacaaccaaggaggagccagtcgctgaaccatctttgaagccattggtccttcatttcatcctgtctctgtccctttyagtccatgctgtcaatgtttctgctggtataaaattctcaaaaaccttattggcctcccatgcaagtcatgggggtccaagcagtcagacaagagggcactccgcggatctttttcagataaccacctctctatttctggcatctactgtggaggttgattggatc

SEQ ID NO: 72385 - DNA, 572 bp, Homo sapiens
ttgctatttttctaacagaatctggctcaggactgtctcattttcattttcacctctctgtccttggttttgttaattccatgtattttaactttgcacttcttgaagcatagctggctctctcgctctctctctctctctctctctctctctstgtgtctttctctgtctctctctctccctcacacacatacacctgtgtgcacatcttccacagaaaaattaactccatggcagatagttgtgcagaatagaatacattttgccagaccaacaaatcagagacaagccaactctcaggctccagatccggtgtcccactaactcctttatttagctcaatgctggagtaacacacttcagataaagattttgccctggtggctatagactatgaatctgctacactagtcttcacaaaccaataagcactaggtagccggactagagcattaaatgttcaagatattgtcattcaatctccataataaatagataacaaagccaaggtcttactaaggggttacttgatagttaggaggtgaaatgagactagatcccaggtcttctta

SEQ ID NO: 72386 - DNA, 600 bp, Homo sapiens
tgtgagctcaatcttcctccccttagaccccaacttgaacaactccactggtttgtctctccctttgagcttcaatgtccatgtcagaccgtctcctcattcacccccttccccaagtgaatctgagaactgtaagagcagctagattgtctatggtatcaattccttgacagcaagaactgcatcttgtttacttttcaatctcacacagagtaggtattgatggtactggaygaagacagtgaaagaaagaggcagaaggaaggaaaagagttgctggactcagtgacttgtcatacccatccagtgtaggcagtcatgtgatagagaaatatatggaatgccagttaagagacatggttgtttgtccagctgtattgctggttggctctgaaatattgagcaaataatttagtttatcttagcctttgtttcctcagctatgaaatgaagatttggcccaagtgaccactatgataccttgctgattccacattctctgattttatattcacgtcaaaggtgtttctttccagtccactagtgaccatgataaacctgtcttgccccaaaaccccttccatgtgccaagcactttgt

SEQ ID NO: 72387 - DNA, 947 bp, Homo sapiens
aataacacacacagacacacacacgtactcatgtctttttaacaaaaactatttttcatcataattgcagcttagcacagtggttcagggtatgggctccagaggcaaacgacctgcattccaggtgctgctctgccacttactaactgtaggacattgggcaaagttatctaacatctctgtgcttcatttgcctggagtatatcataaagataatagtagaacccacatcaaggaggctccatgagaactatatttggagagaacagtgtctaggactcagtgggcactgcataaacattagctaatattgttattttcttgtctgaaaataggaataataatagtaccttttattgagacagtmtctcactctgtcacccacactgcagtgcattggtgtgatcacagctcactgcagccttgacctcccaagcaatcttcccatctcagcctcccgagtagcttggattacacgtacacaccaccatggttgactattcttttttatttttagtagagacgaggtctcgcattgttgtccaggttgttctcaaactcctgagctgaagtgatcctcccacctctgcctcacaaagtgctgggattacagatgtgagccaccaagcccggccaatagtatcttctctatagggtagttgagaatattaaatgagttaaagcatttaagcttttagatgctgtcattatcaccagcattaaaaatatatcatcaaaatgtataaggaagcacagagggggtagggccggggaaatttaaatctaaagtattggcaaagttatcagaaatgaagtgaaattcaaaatggtctgaaaagaatgagtaagattttgataggcagagaagagagaggagagattttctggaaaaaaaaaaaaaaaaaggcttttctggaaagtatgagtaatggtcctgaaagataata

SEQ ID NO: 72388 - DNA, 655 bp, Homo sapiens
acactatgctaaaagaataataaattttgagaaaattatttttatttctggcagatgaattgtataatgtaccacagcaacgtcaaagtatttaaaaaaacactaccagttgagaggtgttgtaaaagaatttgataatatttaataatccaattccttaaatactaaaaacatcaataacagcacacacaatacttaatatcataataaatgtgaaatattggaatcattttcattaaattcaaaaacataataagcctaatgtttaataattatttatttatattctagaggttcttatgcaataatacatgtaagaaaaaggagcataaacaatgaaaaatttgaaagtgtataccatgtaataacttgcctataagtgtaataaggatggattactctataagtggatgagtacaatttcctaatatttagaaaaaataaatttcacagcatactccaagtacattagcagtaaattaarctttatattaaaagtaaagaagcataaagccactcaaaataataataggtcaaaatatatataatttcatggtgatgaaaaattttgtaaattcaaatccatagaaaagaactttaaaaaactaaaatttagaacaactagagatctctaaaataattaaaatttatcaaa

SEQ ID NO: 72389 - DNA, 1549 bp, Homo sapiens
cgggcccaggctcacttgggcttaggctgcgctcctgcagcctccctcccatcccccagcctgggcaaaccttggcagactccaggttgcaagcctgtgcctccccactgatgtggaaatcattggactcagtggtggtttaagtgtgttgttgatgctttcatcaaagcgtcgtgctcccacctcatgctaagtaaagcagctggtgaatgttatgtcgtgcactgcagatggattggtggtggcaggcccagagctcaccacatctacttaaacaggtgtttgattctgcattttccaggtagccagaaggaacctgattattcggtgagagtaggagccacgcgggagaggaattgctccccagcattggcaaggcaactagccagccgcttggctttaattcatctgttcaccagacatggtcttaaagccagaatatttccttttggggcccgtgcttactttgaattttagtggacaataaggggattctgctcccagctcatactcttttgttgagtgtggtcttttagtctggggtgggttagaactaggtcaccagaaccagtggccactgcagtttgcagtcaaggcatctctgctataccagccctgctaccaggtacagcatgagaagctgaagttgcttcacagtgttgtatttctccagaaccacacatccaccttcatgaacagagggcagtgtgagggatcctttctagtcaccgggaatgacagacatmatcaacagttagccaggaaatcacaaataaaacagctacccctaagaaggcagaaaccaaaaaagcatcaaagcagctttttgcagcaagaagatccacaagtgagttttccatacaatctagagcaaaggaaactgaaaccctccatccactggggctttttatgaaatgagcctcaatgccaatgcagtgtacaatgatacttctaaaatgaacccaagaaactcaaaagactttaacgggaaaaaaaacaagggaaaatagcacaatactaagaggaaaaagcacacaactgtagaaaccaagactagaagaaaccccggcaaggacttcccaagagaacacaaaggagaaaaagcaagctgttgcactccccttgtagcttggagcttacaaatccccgaggaaaccctgcgaataaacagggcactctaaaacgagctacaagcggggcggtggaaccatttctcagcagtcttggagtgaattgagtaaatctgtcacagcttataactgggggggagtagtgggaagggccctcctcatggggccacctgccccagagctggcactgcggggctgctgctccttctcttggctcctgtgaccctgcagacttcagggggcaggaaggcagctgtcagctttcacatggcactcgctcctggcaagcaagcaagtccagtggcagccaaatccttgtcatgttccaatcagccccacaatggtggagcctccactgactggtggcaggtcacaggagtgtgggagctcatctgcctcccacatctgactccctaaac

SEQ ID NO: 72390 - DNA, 2031 bp, Homo sapiens
aaatatacacctaagtctagaaaagaagaaattttgagtaacaaggcagtgtgttcagactcagggggccacttttcattacgtacgggacttttttatgatctactttctacttttctaaagctccattcaatcaataaacatggctagtgagagtaataattgtttctatttatgcgacactaagtactcatcagtctcttatttatgttgtcttaacttcttaaactcttccaactattctgtacagtaggtactatttttaatcctcattttctaagtgagaaaactgaagtttagagagcgtaagaaacttatcctggttaatggtatagctgggatttgaacctagaaagacttcagaactgctgacaaggattagcgaaagcaaacgtactttgagtgttctgaattacttactttaaaatattctgtgtaagccaagattgcgaaatgtccctattctagattgtgtaagaaaaaataactactcctattaaagaatagaatttctccttctagctttaagttcatagcttgttgtttcattttctccattatcaaggaaatagagtaaaaaaagtacttattgtgcagcatgcgggtccttgtttgaatctacttgcccttcttccttactgaaaaccagactaaacatttctgaatgtctgcatttaaaaatttccaacagtaatgaatcgactgtacttgggttrctctagccggatcccctcactgttagcaggtctaaccttctactgatataattgcatcaccacactcatggcctttctggtcctttccttggattttccaatataattaaagtccatgtaaagcactggctgttcttaaaattgttgttggaagactggcaagaaggcaacgaactctcaaggcatcatatcttaaaggaacctataaatgaaataggtcaaggatgaggcacgtaagtggctgggaaaaaaaaaaatctccgtttagtttatacaacttcagcttccctgtctgtccagattccatataaggaatagcaactttttgagccagcaggcctggacatatttcttggccttataactcacagttctagacattccaaggtagagggtcattcaaactgagttgtaatttcttgtgtatatttatttccaaagtatctaatgcatagtttcccagtgaaatcatagatgaaggctaggggaatgctaactgggttgtttttcaagcgtgcctacaagaggcagtctaaaagaactgctctgagcttatcaagcagaagtgccagatgagagctggaccaccatagcaggagctctcacaccactttgcagttcacctgaactccagctttgtctgggagatgatataagaagagaagaaggagaaaagacattcatgagatttaaggaataaattcccctattgtcactagtagagtgacatgcataacacactaaccaggttgatagggtagtgtgatagagtccaacaagaatgtgctgggaggtcaaccatcggtatttaggtgtctcttccaaatcccaaccacttatcagcagagcagtcctgagcacacaaatggcaacttagtgcttggattgccttgtgtgtgaaaacaagtgggacagaggaagatggcagcacattctctttgcatctgacagtcaccaaaaattagaagtcaaatttttcatatttgagtttttttttgtacttgcaaagtgaacaaatagtatatttagttttacatctttaggtgaaaattaggaaggcaggacagataataaaatgagcacagtttttaaaaagatctagagttgatcgttattaactttaagataatgagaatagtttaatcaaaagcatttcttaaactttcttataaatactgaattatctgagaaaaagttaagttaccctctagtcattcaacaaatattttttgttgtctgttagttcattcattcaggctttactgaacagatgcacttcttggtacttgcaatatatccatgaataaaagagatg

SEQ ID NO: 72391 - DNA, 2031 bp, Homo sapiens
aaatatacacctaagtctagaaaagaagaaattttgagtaacaaggcagtgtgttcagactcagggggccacttttcattacgtacgggacttttttatgatctactttctacttttctaaagctccattcaatcaataaacatggctagtgagagtaataattgtttctatttatgcgacactaagtactcatcagtctcttatttatgttgtcttaacttcttaaactcttccaactattctgtacagtaggtactatttttaatcctcattttctaagtgagaaaactgaagtttagagagcgtaagaaacttatcctggttaatggtatagctgggatttgaacctagaaagacttcagaactgctgacaaggattagcgaaagcaaacgtactttgagtgttctgaattacttactttaaaatattctgtgtaagccaagattgcgaaatgtccctattctagattgtgtaagaaaaaataactactcctattaaagaatagaatttctccttctagctttaagttcatagcttgttgtttcattttctccattatcaaggaaatagagtaaaaaaagtacttattgtgcagcatgcgggtccttgtttgaatctacttgcccttcttccttactgaaaaccagactaaacatttctgaatgtctgcatttaaaaatttccaacagtaatgaatcgactgtacttgggttgctctagccggatcccctcactgttagcrggtctaaccttctactgatataattgcatcaccacactcatggcctttctggtcctttccttggattttccaatataattaaagtccatgtaaagcactggctgttcttaaaattgttgttggaagactggcaagaaggcaacgaactctcaaggcatcatatcttaaaggaacctataaatgaaataggtcaaggatgaggcacgtaagtggctgggaaaaaaaaaaatctccgtttagtttatacaacttcagcttccctgtctgtccagattccatataaggaatagcaactttttgagccagcaggcctggacatatttcttggccttataactcacagttctagacattccaaggtagagggtcattcaaactgagttgtaatttcttgtgtatatttatttccaaagtatctaatgcatagtttcccagtgaaatcatagatgaaggctaggggaatgctaactgggttgtttttcaagcgtgcctacaagaggcagtctaaaagaactgctctgagcttatcaagcagaagtgccagatgagagctggaccaccatagcaggagctctcacaccactttgcagttcacctgaactccagctttgtctgggagatgatataagaagagaagaaggagaaaagacattcatgagatttaaggaataaattcccctattgtcactagtagagtgacatgcataacacactaaccaggttgatagggtagtgtgatagagtccaacaagaatgtgctgggaggtcaaccatcggtatttaggtgtctcttccaaatcccaaccacttatcagcagagcagtcctgagcacacaaatggcaacttagtgcttggattgccttgtgtgtgaaaacaagtgggacagaggaagatggcagcacattctctttgcatctgacagtcaccaaaaattagaagtcaaatttttcatatttgagtttttttttgtacttgcaaagtgaacaaatagtatatttagttttacatctttaggtgaaaattaggaaggcaggacagataataaaatgagcacagtttttaaaaagatctagagttgatcgttattaactttaagataatgagaatagtttaatcaaaagcatttcttaaactttcttataaatactgaattatctgagaaaaagttaagttaccctctagtcattcaacaaatattttttgttgtctgttagttcattcattcaggctttactgaacagatgcacttcttggtacttgcaatatatccatgaataaaagagatg

SEQ ID NO: 72392 - DNA, 2031 bp, Homo sapiens
aaatatacacctaagtctagaaaagaagaaattttgagtaacaaggcagtgtgttcagactcagggggccacttttcattacgtacgggacttttttatgatctactttctacttttctaaagctccattcaatcaataaacatggctagtgagagtaataattgtttctatttatgcgacactaagtactcatcagtctcttatttatgttgtcttaacttcttaaactcttccaactattctgtacagtaggtactatttttaatcctcattttctaagtgagaaaactgaagtttagagagcgtaagaaacttatcctggttaatggtatagctgggatttgaacctagaaagacttcagaactgctgacaaggattagcgaaagcaaacgtactttgagtgttctgaattacttactttaaaatattctgtgtaagccaagattgcgaaatgtccctattctagattgtgtaagaaaaaataactactcctattaaagaatagaatttctccttctagctttaagttcatagcttgttgtttcattttctccattatcaaggaaatagagtaaaaaaagtacttattgtgcagcatgcgggtccttgtttgaatctacttgcccttcttccttactgaaaaccagactaaacatttctgaatgtctgcatttaaaaatttccaacagtaatgaatcgactgtacttgggttgctctagccggatcccctcactgttagcaggtctaaccttctactgatataattgcatcaccacactcatggcctttctggtcctttccttggattttccaatataattaaagtccatgtaaagcactggctgttcttaaaattgttgttggaagactggcaagaaggcaacgaactctcaaggcatcatatcttaaaggaacctataaatgaaataggtcaaggatgaggcacgtaagtggctgggaaaaaaaaaaatctccgtttagtttatacaacttcagcttccctgtctgtccagattccatataaggaatagcaactttttgagccagcaggcctggacatatttcttggccttataactcacagttctagacattccaaggtagagggtcattcaaactgagttgtaatttcttgtgtatatttatttccaaagtatctaatgcatagtttcccagtgaaatcatagatgaaggctaggggaatgctaactgggttgtttttcaagcgtgcctacaagaggcagtctaaaagaactgctctgagcttatcaagcagaagtgccagatgagagctggaccaccatagcaggagctctcacaccactttgcagttcacctgaactccagctttgtctgggagatgatataagaagagaagaaggagaaaagacattcatgagatttaaggaataaattcccctattgtcactagtagagtgacatgcataacacactaaccaggttgatagggtagtgtgatagagtccaacaagaatgtgctgggaggtcaaccatcggtatttaggtgtctcttccaaatcccaaccacttatcagcagagcagtcctgagcacacaaatggcamcttagtgcttggattgccttgtgtgtgaaaacaagtgggacagaggaagatggcagcacattctctttgcatctgacagtcaccaaaaattagaagtcaaatttttcatatttgagtttttttttgtacttgcaaagtgaacaaatagtatatttagttttacatctttaggtgaaaattaggaaggcaggacagataataaaatgagcacagtttttaaaaagatctagagttgatcgttattaactttaagataatgagaatagtttaatcaaaagcatttcttaaactttcttataaatactgaattatctgagaaaaagttaagttaccctctagtcattcaacaaatattttttgttgtctgttagttcattcattcaggctttactgaacagatgcacttcttggtacttgcaatatatccatgaataaaagagatg

SEQ ID NO: 72393 - DNA, 1076 bp, Homo sapiens
aaatcatttataaatgggtgctgttatgtatttttatcataaaaacagcgcaattctattatgtagatttttagaaataaagagaagcatagraaacataagttcccctctcctacaaacattgttaaattttgattataccttactaatggtttttaattaatcttattttttaacaaaattagaaacatgttgcattcattgtcttgtaatctgatttgttcattttacactataatacctgttttgtttttaaactcctctgattgtaaggttaatatatatatatatatatatatatatatatatatatatatatatgttgaaaaggttaaaaaatgcagcaatgtaaatgaagaaatatactgaatactttcctcagggaacatttttattttagctttctgtatatttctatgaaatattttctttacatatacaaccatatagatgatataatatagttacatatactgttagtgtggtgtttttactttataatatatcttggctatctttccaaatcagtacattgaggtctgtttcatttcttttaaaagctgcattttattataggaatataccacactcattaagctactactttattgctggacatttgggttgtttccagtgattttttttttcacttttaattgcatttattttatgctgaatgtattcccatgccataagtttttgttccttcattttcttcggagatatctttttcttctgtgcaacttcctcttctggtttaagaacaatttgtttctattcagtaaggatgatttcaatgcagcaaggagggcttctttatgtatgagttaatctgaccattagctaaaggcatatcttgggtgcttcattcaccggaatatgctcgatgaccatctgcttgtaaagccttaagttcagcatgactctgtgcatatttaagcatgtgcagcaaaaattcaagccaccgatcctatgtccagctccactgtttggcctgggcacacctaccaactccaccattgtaatgttggaatggtacatgctgtttctgtaaagtgacatctttcaggtcactt

SEQ ID NO: 72394 - DNA, 1076 bp, Homo sapiens
aaatcatttataaatgggtgctgttatgtatttttatcataaaaacagcgcaattctattatgtagatttttagaaataaagagaagcataggaaacataagttcccctctcctacaaacattgttaaattttgattataccttactaatggtttttaattaatcttattttttaacaaaattagaaacatgttgcrttcattgtcttgtaatctgatttgttcattttacactataatacctgttttgtttttaaactcctctgattgtaaggttaatatatatatatatatatatatatatatatatatatatatatatgttgaaaaggttaaaaaatgcagcaatgtaaatgaagaaatatactgaatactttcctcagggaacatttttattttagctttctgtatatttctatgaaatattttctttacatatacaaccatatagatgatataatatagttacatatactgttagtgtggtgtttttactttataatatatcttggctatctttccaaatcagtacattgaggtctgtttcatttcttttaaaagctgcattttattataggaatataccacactcattaagctactactttattgctggacatttgggttgtttccagtgattttttttttcacttttaattgcatttattttatgctgaatgtattcccatgccataagtttttgttccttcattttcttcggagatatctttttcttctgtgcaacttcctcttctggtttaagaacaatttgtttctattcagtaaggatgatttcaatgcagcaaggagggcttctttatgtatgagttaatctgaccattagctaaaggcatatcttgggtgcttcattcaccggaatatgctcgatgaccatctgcttgtaaagccttaagttcagcatgactctgtgcatatttaagcatgtgcagcaaaaattcaagccaccgatcctatgtccagctccactgtttggcctgggcacacctaccaactccaccattgtaatgttggaatggtacatgctgtttctgtaaagtgacatctttcaggtcactt

SEQ ID NO: 72395 - DNA, 610 bp, Homo sapiens
ccttcccttctttcttttctccttatttagaaacagggtttcactatgtcacccaagctggtctcaaactcctaggctcaagcaatcctctggcctcagtctcccaaaatgctaggattacaggcagaagccaccatgcccaaccagaagagtaaattttatatgcttatttttatgaaggcctctctgatatggtaacatttaggagatttgaatgaagtatatcatatgaatatggtaagaaagatttttcaagcaaaggaaatgaataccaccagagtctatacttttttgtagcaaaaacataacatttattcagtatttttatgtcagacgcatgaaaaacattttctaattatatgagtaaaaatttttaaaaaatatctttagtgataaaattctggatttggtatatttggcagtagagatagcataagaaggagatactgtgtactctagccrggaggcttcagttcaaattctgtttcagacacttattagttgtgtatgtcctcgggtaagtcacttacaagcttctgactcattttccttctgtgagaaatattcaaaccatacaaacctcaggcgtttgcagtgaggtttaaatgaa

SEQ ID NO: 72396 - DNA, 867 bp, Homo sapiens
agctgggtaaaataccaacatcagatattcattcaacagcacgagaggtcacggagcaattcaggataatgtttcttcaggaagaactaggatatgaaatcccwtgagtgcaggctagcagagagggcaatgtcctggactggactggaaacacttctctgaagactgaggctaccattgacattaatgacagatgaaactgagaggggaggaagagcttggacaatacgcgcaaaagctcaggcaaaggagttcaggatgtgcttcctaatagatgtcatattaacaaatgacaaggcgtcgaagcggggtgtataacatttttcaagtcaaatttaaggctggttaggctagtagtggagaatggctcggcccaccctgaaaactcaaataatcagaactaaaagttataacaaaatattaagggaagagttcaaggaaataaatccctcaaatctacagtattaggatagaatgagcaaaactattcctttcccacaataacgcaattgctatgagattacatgcaaaccttaagtcttacaattttaggcatttgtagtgtatttgatttatgaaaaacagttcaaaaattcttattggcagtgtcaaaaaattattttcttaagataaaatctggatgagggtacagcagcctgggttgagatgaaaggtattagtgtacatctgtcccaattacatttattgtcactgccaaggaaacactcatacttacacctcagccctggctgtgtaaaggggcggctgcctttctaagtacaaccctgcacttggaaagcacggggctgccaggttaaggaaaacagatactccgttggactttttaatggtgtaacacttgtgtaa

SEQ ID NO: 72397 - DNA, 717 bp, Homo sapiens
ctgggatagagtgcaggacatttggctgagtgaaaaagccaacctcaaaagcctacatacaggttgctctggtggctgtgcagatctgcactggtgatacagtgccatacgcctatacacacacattgtactaaagtcaggttcttggctatgagatcatactggacttatgaaagctagaccattgacggaaactggatggagggtgcacagtgccgtctgtactatagtggtatgccctgtgactctacagtcatttcacaataaaacatcttttgttttgttttgttttgttttttgggcggggggtgttttgagacagaatcttgctccatcgcccaggttggagtgcagtggagcgatctcagctcactgcaacctccgcctgctgggttcaagcagttctcctgcctcagcctcctgagtagctaggactacaggtgtgtgccaccatgcccgcctaattttctgtatttttagtagagacaggatttcaccatgctggccaggctggtcttgatctcctgaccttatgatctgcctgcctcagcctcccaaagtgctgggattgcaggcgtgagccaccgcacctgccaataaaaacatattttaagrccctaggggagaaggtatggcaatttgacaacttttggtggattgcagtttgttttagatgtgtatcgtggttatgttttttaaagaaagagagatgggatc

SEQ ID NO: 72398 - DNA, 759 bp, Homo sapiens
atgagatagcatcctatccatggtggattcccaccttaagccctgagctgctgggagagggtccagccacccatgggccatgaactgaaataactaggtaattattttacttgtctttattaatcttacatgtatgtatggctcacattaatttcaatggttaatattagaagtggtgatgtttttgtgaccagaaataagcaacagaaacttaactcttgtttataccaattagtctaccataaaattggtttcatcatatgttgtttcatggaaagtaacagtttccaagaatctactgttgatgttaagtgaggacttactgtaattcaaacaaatgtatttgtgctaggctcacaagacaatggacaaatatttaatctgtcataattactttttttttttttttttttttgagacggagtcytgctctgtcgcccaggctggagttcagtgtcgcaatctcggctcactgcaagctccgcctcccgggttcatgccatcctgcagcctcagcctctggagtagctggaactataggtgcccgccaccatgcccagctaatttttttgtatttttagtagagatggggtttcactgtgttagccaggatggtctcgatctcctgacctcatgatccacccgcctcagcctcccaaagtgctgggattacaggcgtgagccaccgtgcccggactacttattatcattttaatggttttcaacttgacatgaaaaaaagtcaagcaaagcaggatc

SEQ ID NO: 72399 - DNA, 759 bp, Homo sapiens
atgagatagcatcctatccatggtggattcccaccttaagccctgagctgctgggagagggtccagccacccatgggccatgaactgaaataactaggtaattattttacttgtctttattaatcttacatgtatgtatggctcacattaatttcaatggttaatattagaagtggtgatgtttttgtgaccagaaataagcaacagaaacttaactcttgtttataccaattagtctaccataaaattggtttcatcatatgttgtttcatggaaagtaacagtttccaagaatctactgttgatgttaagtgaggacttactgtaattcaaacaaatgtatttgtgctaggctcacaagacaatggacaaatatttaatctgtcataattactttttttttttttttttttttgagacggagtccygctctgtcgcccaggctggagttcagtgtcgcaatctcggctcactgcaagctccgcctcccgggttcatgccatcctgcagcctcagcctctggagtagctggaactataggtgcccgccaccatgcccagctaatttttttgtatttttagtagagatggggtttcactgtgttagccaggatggtctcgatctcctgacctcatgatccacccgcctcagcctcccaaagtgctgggattacaggcgtgagccaccgtgcccggactacttattatcattttaatggttttcaacttgacatgaaaaaaagtcaagcaaagcaggatc

SEQ ID NO: 72400 - DNA, 759 bp, Homo sapiens
atgagatagcatcctatccatggtggattcccaccttaagccctgagctgctgggagagggtccagccacccatgggccatgaactgaaataactaggtaattattttacttgtctttattaatcttacatgtatgtatggctcacattaatttcaatggttaatattagaagtggtgatgtttttgtgaccagaaataagcaacagaaacttaactcttgtttataccaattagtctaccataaaattggtttcatcatatgttgtttcatggaaagtaacagtttccaagaatctactgttgatgttaagtgaggacttactgtaattcaaacaaatgtatttgtgctaggctcacaagacaatggacaaatatttaatctgtcataattactttttttttttttttttttttgagacggagtcctgytctgtcgcccaggctggagttcagtgtcgcaatctcggctcactgcaagctccgcctcccgggttcatgccatcctgcagcctcagcctctggagtagctggaactataggtgcccgccaccatgcccagctaatttttttgtatttttagtagagatggggtttcactgtgttagccaggatggtctcgatctcctgacctcatgatccacccgcctcagcctcccaaagtgctgggattacaggcgtgagccaccgtgcccggactacttattatcattttaatggttttcaacttgacatgaaaaaaagtcaagcaaagcaggatc

SEQ ID NO: 72401 - DNA, 759 bp, Homo sapiens
atgagatagcatcctatccatggtggattcccaccttaagccctgagctgctgggagagggtccagccacccatgggccatgaactgaaataactaggtaattattttacttgtctttattaatcttacatgtatgtatggctcacattaatttcaatggttaatattagaagtggtgatgtttttgtgaccagaaataagcaacagaaacttaactcttgtttataccaattagtctaccataaaattggtttcatcatatgttgtttcatggaaagtaacagtttccaagaatctactgttgatgttaagtgaggacttactgtaattcaaacaaatgtatttgtgctaggctcacaagacaatggacaaatatttaatctgtcataattactttttttttttttttttttttgagacggagtcctgctctgtcgcccaggctggagttcagtgtcgcaatstcggctcactgcaagctccgcctcccgggttcatgccatcctgcagcctcagcctctggagtagctggaactataggtgcccgccaccatgcccagctaatttttttgtatttttagtagagatggggtttcactgtgttagccaggatggtctcgatctcctgacctcatgatccacccgcctcagcctcccaaagtgctgggattacaggcgtgagccaccgtgcccggactacttattatcattttaatggttttcaacttgacatgaaaaaaagtcaagcaaagcaggatc

SEQ ID NO: 72402 - DNA, 759 bp, Homo sapiens
atgagatagcatcctatccatggtggattcccaccttaagccctgagctgctgggagagggtccagccacccatgggccatgaactgaaataactaggtaattattttacttgtctttattaatcttacatgtatgtatggctcacattaatttcaatggttaatattagaagtggtgatgtttttgtgaccagaaataagcaacagaaacttaactcttgtttataccaattagtctaccataaaattggtttcatcatatgttgtttcatggaaagtaacagtttccaagaatctactgttgatgttaagtgaggacttactgtaattcaaacaaatgtatttgtgctaggctcacaagacaatggacaaatatttaatctgtcataattactttttttttttttttttttttgagacggagtcctgctctgtcgcccaggctggagttcagtgtcgcaatctcggctcactgcaagctccgcctcccgggttcatgccatcctgcagcctcagcctcyggagtagctggaactataggtgcccgccaccatgcccagctaatttttttgtatttttagtagagatggggtttcactgtgttagccaggatggtctcgatctcctgacctcatgatccacccgcctcagcctcccaaagtgctgggattacaggcgtgagccaccgtgcccggactacttattatcattttaatggttttcaacttgacatgaaaaaaagtcaagcaaagcaggatc

SEQ ID NO: 72403 - DNA, 759 bp, Homo sapiens
atgagatagcatcctatccatggtggattcccaccttaagccctgagctgctgggagagggtccagccacccatgggccatgaactgaaataactaggtaattattttacttgtctttattaatcttacatgtatgtatggctcacattaatttcaatggttaatattagaagtggtgatgtttttgtgaccagaaataagcaacagaaacttaactcttgtttataccaattagtctaccataaaattggtttcatcatatgttgtttcatggaaagtaacagtttccaagaatctactgttgatgttaagtgaggacttactgtaattcaaacaaatgtatttgtgctaggctcacaagacaatggacaaatatttaatctgtcataattactttttttttttttttttttttgagacggagtcctgctctgtcgcccaggctggagttcagtgtcgcaatctcggctcactgcaagctccgcctcccgggttcatgccatcctgcagcctcagcctctsgagtagctggaactataggtgcccgccaccatgcccagctaatttttttgtatttttagtagagatggggtttcactgtgttagccaggatggtctcgatctcctgacctcatgatccacccgcctcagcctcccaaagtgctgggattacaggcgtgagccaccgtgcccggactacttattatcattttaatggttttcaacttgacatgaaaaaaagtcaagcaaagcaggatc

SEQ ID NO: 72404 - DNA, 907 bp, Homo sapiens
tgcatattttatccccctagaattaatttatccaaattaatcctttccaaatgtatgactcttcttatttttggcttcygtaatttcaattaattatttccagagttaccttcaaatactagctgaaactatagcaagtgcatatgttctctgatttgtctttctgtgttggctgcaattaacctggttaatgtcaaatactaaaactgtttataatcaatttcaagaacaaaacacaatatttagcatcaattttaagagcaaaattaataatattagtaaaaatactatcacgaaagtttgcatatattgcattaatgcacaaatgtgagtgctcaccaggtgccagacattatgctgtatatgctgatgctcatctaatttaaattacagttataattatcctgttgtatcgatgttgttttttctcactttaaagttgaggaagtgaggtcttattttaagccttacttagaacggattgacttaggaatttttgagtttacaatggtgggaaagcaatacacattcaatagaaactatactttgaattttgatcttttcccagtctagcaatatgcagcatcatactctattgtgatactgggcaggggctgagagccacagttcccagatagccatgtgatcatcaggttaaataaccgctacagtatactctgttgccagtggttttgggatattgtgttttgtgtttttgcatcccatcatgtgtacaaaatgtccatctgtgtctcatgcttttcctggtgagaagaagaagaaggcaattactcttgaggtgaaacaatgtaattgctcagcacaaagtgggcaagccagtaatggccattgcacatgagttaggacttccacaatccacaatcctgattatcttatcttgtaagtc

SEQ ID NO: 72405 - DNA, 907 bp, Homo sapiens
tgcatattttatccccctagaattaatttatccaaattaatcctttccaaatgtatgactcttcttatttttggcttccgtaatttcaattaattatttccagagttaccttcaaatactagctgaaactatagcaagtgcatatgttctctgatttgtctttctgtgttggctgcaattaacctggttaatgtcmaatactaaaactgtttataatcaatttcaagaacaaaacacaatatttagcatcaattttaagagcaaaattaataatattagtaaaaatactatcacgaaagtttgcatatattgcattaatgcacaaatgtgagtgctcaccaggtgccagacattatgctgtatatgctgatgctcatctaatttaaattacagttataattatcctgttgtatcgatgttgttttttctcactttaaagttgaggaagtgaggtcttattttaagccttacttagaacggattgacttaggaatttttgagtttacaatggtgggaaagcaatacacattcaatagaaactatactttgaattttgatcttttcccagtctagcaatatgcagcatcatactctattgtgatactgggcaggggctgagagccacagttcccagatagccatgtgatcatcaggttaaataaccgctacagtatactctgttgccagtggttttgggatattgtgttttgtgtttttgcatcccatcatgtgtacaaaatgtccatctgtgtctcatgcttttcctggtgagaagaagaagaaggcaattactcttgaggtgaaacaatgtaattgctcagcacaaagtgggcaagccagtaatggccattgcacatgagttaggacttccacaatccacaatcctgattatcttatcttgtaagtc

SEQ ID NO: 72406 - DNA, 907 bp, Homo sapiens
tgcatattttatccccctagaattaatttatccaaattaatcctttccaaatgtatgactcttcttatttttggcttccgtaatttcaattaattatttccagagttaccttcaaatactagctgaaactatagcaagtgcatatgttctctgatttgtctttctgtgttggctgcaattaacctggttaatgtcaaatactaaaactgtttataatcaatttcaagaacaaaacacaatatttagcatcaattttaagagcaaaattaataatattagtaaaaatactatcacgaaagtttgcatatattgcattaatgcacaaatgtgagtgctcaccaggtgccagacattatgctgtatatgctgatgctcatctaatttaaattacagttataattatcctgttgtatcgatgttgttttttctcactttaaagttgaggaagtgaggtcttattttaagccttacttagaacggattgacttaggaatttttgagtttacaatggtgggaaagcaatacacattcaatagaaactatactttgaattttgatcttttcccagtctagcaatatgcagcatcatactctattgtgatactgggcaggggctgagagccacagttcccagatagccatgtgatcatcaggttaaataaccgctacagtatactstgttgccagtggttttgggatattgtgttttgtgtttttgcatcccatcatgtgtacaaaatgtccatctgtgtctcatgcttttcctggtgagaagaagaagaaggcaattactcttgaggtgaaacaatgtaattgctcagcacaaagtgggcaagccagtaatggccattgcacatgagttaggacttccacaatccacaatcctgattatcttatcttgtaagtc

SEQ ID NO: 72407 - DNA, 907 bp, Homo sapiens
tgcatattttatccccctagaattaatttatccaaattaatcctttccaaatgtatgactcttcttatttttggcttccgtaatttcaattaattatttccagagttaccttcaaatactagctgaaactatagcaagtgcatatgttctctgatttgtctttctgtgttggctgcaattaacctggttaatgtcaaatactaaaactgtttataatcaatttcaagaacaaaacacaatatttagcatcaattttaagagcaaaattaataatattagtaaaaatactatcacgaaagtttgcatatattgcattaatgcacaaatgtgagtgctcaccaggtgccagacattatgctgtatatgctgatgctcatctaatttaaattacagttataattatcctgttgtatcgatgttgttttttctcactttaaagttgaggaagtgaggtcttattttaagccttacttagaacggattgacttaggaatttttgagtttacaatggtgggaaagcaatacacattcaatagaaactatactttgaattttgatcttttcccagtctagcaatatgcagcatcatactctattgtgatactgggcaggggctgagagccacagttcccagatagccatgtgatcatcaggttaaataaccgctacagtatactctgttgccagtggttttgggatattgtgttttgtgtttttgcatcccatcatrtgtacaaaatgtccatctgtgtctcatgcttttcctggtgagaagaagaagaaggcaattactcttgaggtgaaacaatgtaattgctcagcacaaagtgggcaagccagtaatggccattgcacatgagttaggacttccacaatccacaatcctgattatcttatcttgtaagtc

SEQ ID NO: 72408 - DNA, 907 bp, Homo sapiens
tgcatattttatccccctagaattaatttatccaaattaatcctttccaaatgtatgactcttcttatttttggcttccgtaatttcaattaattatttccagagttaccttcaaatactagctgaaactatagcaagtgcatatgttctctgatttgtctttctgtgttggctgcaattaacctggttaatgtcaaatactaaaactgtttataatcaatttcaagaacaaaacacaatatttagcatcaattttaagagcaaaattaataatattagtaaaaatactatcacgaaagtttgcatatattgcattaatgcacaaatgtgagtgctcaccaggtgccagacattatgctgtatatgctgatgctcatctaatttaaattacagttataattatcctgttgtatcgatgttgttttttctcactttaaagttgaggaagtgaggtcttattttaagccttacttagaacggattgacttaggaatttttgagtttacaatggtgggaaagcaatacacattcaatagaaactatactttgaattttgatcttttcccagtctagcaatatgcagcatcatactctattgtgatactgggcaggggctgagagccacagttcccagatagccatgtgatcatcaggttaaataaccgctacagtatactctgttgccagtggttttgggatattgtgttttgtgtttttgcatcccatcatgtgtacaaaatgtccatctgtgtctcatgcttttcctggtgagaagaagaagaaggcaattactcttgaggtgaaacaatgtaattgctcagcacaaagtgggcaagccagtartggccattgcacatgagttaggacttccacaatccacaatcctgattatcttatcttgtaagtc

SEQ ID NO: 72409 - DNA, 785 bp, Homo sapiens
ttttctgccacaaattgatcagggccacactgtacaaactcaagtaacagttaccactcaaaaaaataaatccacattggcaggtgattttgttttgtctttttaacaattgtaatagaaattttatcaataggttttaaaaattacctcccttaaatgctaaatgttcaaaaatatcagtgttccacatgctgatttatgctagcaaaaatattgctgtccatcttgattaactagtttagaactgcattttggaaaacattagtcactagctacatgtggctattgagaacttgcaaggttggtaatccaaataaggatgtgctgtaattgtaaaataccagattttaacaatttaggatgtaaaaacttaaaatttcttactaatattttcataattattacttactaaatgataatatcataaacatattgggttaacaaaaacatattaatacaatttttacttttytcctttacatagttaaatgtaactactagaaaatctaaaactgtcatatttccattggacagcatttgtttgagtgttgaaattattgaataatctcatattatgattctgaaatatagatgtactttttcttaccttctatttcttgaatcgtagatgtaaaaaaatttttatgcttaaaatttgaatatgtggtttttagttattgattaatctatatgggtcaagaaaagctgaaggcattttggtttaaaatataaacttttgacaatttggtgattgcttgtaattggtctacctcaatgtgtttgta

SEQ ID NO: 72410 - DNA, 785 bp, Homo sapiens
ttttctgccacaaattgatcagggccacactgtacaaactcaagtaacagttaccactcaaaaaaataaatccacattggcaggtgattttgttttgtctttttaacaattgtaatagaaattttatcaataggttttaaaaattacctcccttaaatgctaaatgttcaaaaatatcagtgttccacatgctgatttatgctagcaaaaatattgctgtccatcttgattaactagtttagaactgcattttggaaaacattagtcactagctacatgtggctattgagaacttgcaaggttggtaatccaaataaggatgtgctgtaattgtaaaataccagattttaacaatttaggatgtaaaaacttaaaatttcttactaatattttcataattattacttactaaatgataatatcataaacatattgggttaacaaaaacatattaatacaatttttacttttctcctttacatagttaaatgtaactactagaaaatctaaaactgtcatatttccattggacagcatttgtttgagtgttgaaattattgaataatctcatattatgattctgaaatatagatgtactttttcttaccttctatttcttgaatcrtagatgtaaaaaaatttttatgcttaaaatttgaatatgtggtttttagttattgattaatctatatgggtcaagaaaagctgaaggcattttggtttaaaatataaacttttgacaatttggtgattgcttgtaattggtctacctcaatgtgtttgta

SEQ ID NO: 72411 - DNA, 785 bp, Homo sapiens
ttttctgccacaaattgatcagggccacactgtacaaactcaagtaacagttaccactcaaaaaaataaatccacattggcaggtgattttgttttgtctttttaacaattgtaatagaaattttatcaataggttttaaaaattacctcccttaaatgctaaatgttcaaaaatatcagtgttccacatgctgatttatgctagcaaaaatattgctgtccatcttgattaactagtttagaactgcattttggaaaacattagtcactagctacatgtggctattgagaacttgcaaggttggtaatccaaataaggatgtgctgtaattgtaaaataccagattttaacaatttaggatgtaaaaacttaaaatttcttactaatattttcataattattacttactaaatgataatatcataaacatattgggttaacaaaaacatattaatacaatttttacttttctcctttacatagttaaatgtaactactagaaaatctaaaactgtcatatttccattggacagcatttgtttgagtgttgaaattattgaataatctcatattatgattctgaaatatagatgtactttttcttaccttctatttcttgaatcgtagatgtaaaaaaatttttatgcttaaaatttgaatawgtggtttttagttattgattaatctatatgggtcaagaaaagctgaaggcattttggtttaaaatataaacttttgacaatttggtgattgcttgtaattggtctacctcaatgtgtttgta

SEQ ID NO: 72412 - DNA, 785 bp, Homo sapiens
ttttctgccacaaattgatcagggccacactgtacaaactcaagtaacagttaccactcaaaaaaataaatccacattggcaggtgattttgttttgtctttttaacaattgtaatagaaattttatcaataggttttaaaaattacctcccttaaatgctaaatgttcaaaaatatcagtgttccacatgctgatttatgctagcaaaaatattgctgtccatcttgattaactagtttagaactgcattttggaaaacattagtcactagctacatgtggctattgagaacttgcaaggttggtaatccaaataaggatgtgctgtaattgtaaaataccagattttaacaatttaggatgtaaaaacttaaaatttcttactaatattttcataattattacttactaaatgataatatcataaacatattgggttaacaaaaacatattaatacaatttttacttttctcctttacatagttaaatgtaactactagaaaatctaaaactgtcatatttccattggacagcatttgtttgagtgttgaaattattgaataatctcatattatgattctgaaatatagatgtactttttcttaccttctatttcttgaatcgtagatgtaaaaaaatttttatgcttaaaatttgaatatgtggtttttagttattgattaatctatatrggtcaagaaaagctgaaggcattttggtttaaaatataaacttttgacaatttggtgattgcttgtaattggtctacctcaatgtgtttgta

SEQ ID NO: 72413 - DNA, 785 bp, Homo sapiens
ttttctgccacaaattgatcagggccacactgtacaaactcaagtaacagttaccactcaaaaaaataaatccacattggcaggtgattttgttttgtctttttaacaattgtaatagaaattttatcaataggttttaaaaattacctcccttaaatgctaaatgttcaaaaatatcagtgttccacatgctgatttatgctagcaaaaatattgctgtccatcttgattaactagtttagaactgcattttggaaaacattagtcactagctacatgtggctattgagaacttgcaaggttggtaatccaaataaggatgtgctgtaattgtaaaataccagattttaacaatttaggatgtaaaaacttaaaatttcttactaatattttcataattattacttactaaatgataatatcataaacatattgggttaacaaaaacatattaatacaatttttacttttctcctttacatagttaaatgtaactactagaaaatctaaaactgtcatatttccattggacagcatttgtttgagtgttgaaattattgaataatctcatattatgattctgaaatatagatgtactttttcttaccttctatttcttgaatcgtagatgtaaaaaaatttttatgcttaaaatttgaatatgtggtttttagttattgattaatctatatgggtcaasaaaagctgaaggcattttggtttaaaatataaacttttgacaatttggtgattgcttgtaattggtctacctcaatgtgtttgta

SEQ ID NO: 72414 - DNA, 1179 bp, Homo sapiens
gcatgtgttttctttttttgatagaatgacttattttcttttggatatttacccagttttgggattgctcggtcaaatcatagttgtgttttatgttcttggggaaatctgcaaattgcttttcacagtaggtgaattaatttacattcccaccaacagtatgtaagcgttcgcttttcttcacagcctcaccaacatcatcaacatctgctgttttttgactttttaatagtagccattctgatttgtgtgagatggtatctcattgtggttttggattacatctctctgatgattaatgatattaagtatttttcatgtttgttggctacttgtatgtcttcttttgagaagtatctgttcatgtctgttgcccatttttaatggagttatttgattttgctcattcaactctttaagttttttatagattctggatattagacctttgttggatgcacagtttttgaattttctcccattctgtaggttgtctgtttactctgttgatagtttatttgttgtgcagaagctcttcggtttaattaggttccaactgtccatttttgtctttgttgcaattgctttggatacagcctaaatgtttctgtttttgcatatacccacagaatttgaaacatgtaatttctttcttttccttttttattgcaaactaaaaataatctgacagataaatgattgttcaagtccagatgatttaaaaaaatatatatatatatatagccttcttaattagcaacaataatgaaaaagggttaaaataacacaaaatcttgtaattatttttcatttggaaatttcaaacycccaaaagatgaataaaattcagttagggctcattacaagcacaacccatccagtgagagagattgcaatattggtacattaactttggtcatttttgactcagtaaataatgatctacttagaactgttactaggtacatccacaatttaataataataataatacacacacatatttacaataaatatttattttagcgaaaaaaattgtgacaaataagagtgaagaatacaatgaaatttctatgaagttttgcttcagtttttgattatgctttttgatcacatgaaaattgcattaatatataaaaagataagcatgagaattcatcattgctgacaaatatttct

SEQ ID NO: 72415 - DNA, 977 bp, Homo sapiens
cactaggaaagtgtatcctagccatacctgagtttcaatgaggagagattgtaagataactaaattgaagaatagttatttttatattaagacccatatactggcttcaagataggtataagccctgakagtatatgaaaagattacatttgtatgcacaaaaagtagaaaaaataggaatgacagattcaataatgttttaaactgttttttagtcattataattggtggtggttgtattaatattgcttttctctgattgttatgtgtatcatatgagagaatgtaaatgaataattatacagcattctaactgtattttcccctgtatccttcagaactgggattgtcagtgtgaaagaaagaaaatggagatgtagtatagaagaggttaaataaaaatccgatatttctgaatttaatgaaaacaccagaataaatagcacatactcacaacatattctacccaactatatctatccatccgtccactgaaaaggccagaagccatgacctattcattaaaatgtctgtccaaatattaccccatttttaattcttctttgctattgactgaattgagagttttaaaatatatattctggatatatcttttgtaagtagcactaagcatatctgtactaagattgtggtcttcaaatgccattgcatattcaaagaaatcaacatttcttgaatatgttgattctagatatgaggcagcaaatgaagaagatgaatctgaaacatcttgatatactacataccaaggaaactattaagaaaaccactagagtcctgtgtaaaggctcagaagctaactcaatgaggttcacctattctgttctgttctgttctgttccgttccgttccgcccattccactctactctactctattctattcccatttcttattgccgaagatagaacaatttgactttcaacaaagataagaattgcaataaattggaaccc

SEQ ID NO: 72416 - DNA, 977 bp, Homo sapiens
cactaggaaagtgtatcctagccatacctgagtttcaatgaggagagattgtaagataactaaattgaagaatagttatttttatattaagacccatatactggcttcaagataggtataagccctgagagtatwtgaaaagattacatttgtatgcacaaaaagtagaaaaaataggaatgacagattcaataatgttttaaactgttttttagtcattataattggtggtggttgtattaatattgcttttctctgattgttatgtgtatcatatgagagaatgtaaatgaataattatacagcattctaactgtattttcccctgtatccttcagaactgggattgtcagtgtgaaagaaagaaaatggagatgtagtatagaagaggttaaataaaaatccgatatttctgaatttaatgaaaacaccagaataaatagcacatactcacaacatattctacccaactatatctatccatccgtccactgaaaaggccagaagccatgacctattcattaaaatgtctgtccaaatattaccccatttttaattcttctttgctattgactgaattgagagttttaaaatatatattctggatatatcttttgtaagtagcactaagcatatctgtactaagattgtggtcttcaaatgccattgcatattcaaagaaatcaacatttcttgaatatgttgattctagatatgaggcagcaaatgaagaagatgaatctgaaacatcttgatatactacataccaaggaaactattaagaaaaccactagagtcctgtgtaaaggctcagaagctaactcaatgaggttcacctattctgttctgttctgttctgttccgttccgttccgcccattccactctactctactctattctattcccatttcttattgccgaagatagaacaatttgactttcaacaaagataagaattgcaataaattggaaccc

SEQ ID NO: 72417 - DNA, 869 bp, Homo sapiens
tttttaagagtgattggattaggttgcatacacttctcctgaaatattaagtgcatacaatccacattcacatgcattgggcctatagttatgatctatcatttcaaaaatccacacgttaaaaaagagcagaacaggccttgagtgctatgaagtattaggtccaaagaaccccttgccattcatcttttcactaatgcagggactaacgagatcccagagttcctttctcattggcaaatcctttgtcttaaaaccactgaaactacacacacccacacacacacgcatacacactcacacacatatgcaaactcacactcatctgctcacatccactttgtatatctaagagaactagttcatttcataatgagtaagttactgcatagtcaagcaggagaaggacacctgattagtgtgccattcctcaratttctagaggggatatggtgtcagcacaaatgtcaatccagatatggagctttgtccccaggactattttggggaaaaaactagatatagaaatggttgggcaagacatcatttttaatgccaaattgactctacctgatgttgcctctccctcaatactatttctcccttatgatcttgatcattaaatactcccagtgtcaaaagttccactgctgggtcttccttctttattctttccctctcactctttgaaaatataataaggcagattttcttgtgtagcttatgaaaatcagtcttcctgctttaggtcaagccatgtttgtttgcagtataatttcctggctggtagtgtctcactgtgctagtgtcctcaacacccgcttgccttcattgggccagcaattttttccacttctatccaagcaatt

SEQ ID NO: 72418 - DNA, 1253 bp, Homo sapiens
tgcatcataatgatagagtgaatagagatgaagaaacgccagcgtccgctgcaagtttaaagagagagacattgcatgtattttcatctggggaggctgctgttcagcgaagtgttctctgagatgaaacaaagctgccttcccacttggcattcacattaattgtgggcttgccaaccggccagtttcattggtgtataaattagtagggaataattccacctgtctgaaaaaccagaatatctgaggaatgcttcctgagatggtgacttatttgtttttctgtggtttgcactcagctcttagaaaacctccaggatctgctaaacacaaaaaaaatctgtgttctgccctggcatacctgtgtgagaggtaatggctatcattacaacaaatagaagttttattattttcaacagcgtatttttgagatgtattaaaataaatcattttcaaatcctcattattgtaaaatgaaagtccactgaggtcccctgagagaaaatttaaacttatggatttctattaataacaataataggaaatattagttgagagtcaacgatggtctaggagctgccatttgggatgtatcagtggggtgctaagataggtgactgcgaaggaaaaaaatatttagttcattttttgttatatttatttgttattgcagtgtgggataaatgctttctcagtgactaaaattttttttaaataatccaaatttagccaaacgtagttgacactgccttctaaaatgtcctgtatttcttagttctaggacaggcaattacaaggactataaatatggrgtccagggctttcaatgcccttttaaccttttacaattaaaattaactgaatcttaaacattcagtttttcattccataattgtgagctggttgtgtgctttgtattgtgttggcaccagggatataaatgtgaaaaagcagacctggactctctctccttgcagcttacagtctagaggtggatacttcattacaccaaaacaacaaaaacaaaaaccgaatcacaccaaaccttgacacttcttgccatacgggggttttcacatttgcatcaatactattctaatagtcactttttgttggaccaatcagccttgaacttactgagaagggccacattgatcttaatatttgttgtgtagctttaagccttggcagaaaagaaaagaaaagaaaagaaaaaaacaaacaaaaaacaacagcaacattaaaccagttag

SEQ ID NO: 72419 - DNA, 1253 bp, Homo sapiens
tgcatcataatgatagagtgaatagagatgaagaaacgccagcgtccgctgcaagtttaaagagagagacattgcatgtattttcatctggggaggctgctgttcagcgaagtgttctctgagatgaaacaaagctgccttcccacttggcattcacattaattgtgggcttgccaaccggccagtttcattggtgtataaattagtagggaataattccacctgtctgaaaaaccagaatatctgaggaatgcttcctgagatggtgacttatttgtttttctgtggtttgcactcagctcttagaaaacctccaggatctgctaaacacaaaaaaaatctgtgttctgccctggcatacctgtgtgagaggtaatggctatcattacaacaaatagaagttttattattttcaacagcgtatttttgagatgtattaaaataaatcattttcaaatcctcattattgtaaaatgaaagtccactgaggtcccctgagagaaaatttaaacttatggatttctattaataacaataataggaaatattagttgagagtcaacgatggtctaggagctgccatttgggatgtatcagtggggtgctaagataggtgactgcgaaggaaaaaaatatttagttcattttttgttatatttatttgttattgcagtgtgggataaatgctttctcagtgactaaaattttttttaaataatccaaatttagccaaacgtagttgacactgccttctaaaatgtcctgtatttcttagttctaggacaggcaattacaaggactataaatatggggtccagggctttcaatgcccttttaaccttttacaattaaaattaactgaatcttaaacattcagtttttcattccataattgtgagctggttgtgtgctttgtattgtgttggcaccagggatataaatgtgaaaaagcagacctggactctctctccttgcagcttacagtctagaggtggatacttcattacaccaaaacaacaaaaacaaaaaccgaatcacaccaaaccttgacacttcttgccatacgggggttttcacatttgcatcaatactattctaatagtcactttttgttggaccaatcagccttgaacttactgagaagggccacattgatcttaatatttgttgtgtagctttaagccttggcagaaaagaaaagaaaagaaaagaaaaaaacaaacaaaaaacaacagcaacrttaaaccagttag

SEQ ID NO: 72420 - DNA, 934 bp, Homo sapiens
tacttaaaagttggctaaaaaggtaagggcatgtggtaacagccagtaagaagccaggactctcagtcatacagccacaaggaactgaattctgccaacgaccaggtgaactttaaaagaggaccccaatctcacaccctcactgaccccgtgattgcagctccatgaaaccctaagtagagaaccgagctaatgtgctcagacccctgacctgcagaaactgtaaaataattaatgtatactattttaaggcacttaatctgtggtaatttgttagacagcaacaaaaactaaggcaactgtactctttataaaatattccatcataaaacttttaaatggaaaagtccctgggcactgccataggattcaaagtacctgtataaagttgcagcttacacacaatttctgacctataatcatgacagcatcaagcaaggtgtgactgtacttctgttgccacctgattgcctctacctccaaggaagtccttcgatggtggaactgtcttgtgtctatcccatagcatcaccgctsttcctgacccccttttcagttgtcttagcacagagacatttgatccaagtaggaattattagccctgaggggcctaggaggaggggtagaaaataacaatcccctttccctactaacagccctaaccctcccagaatttcaactaaagctgcacattgagaatctacaaggttatccaggcagactttcatgctggccctttcctgtttcgcccgagggagaatctggccaactatatattcattgctattttccccattatttattacctagacagaatagcatgattaattattgatcacagaccagtaactgattaaagtgtggttctgatcagcagtcaaaagtcatttgtttccaggcattcatagttcctgcatagagagtggcagaacaa

SEQ ID NO: 72421 - DNA, 934 bp, Homo sapiens
tacttaaaagttggctaaaaaggtaagggcatgtggtaacagccagtaagaagccaggactctcagtcatacagccacaaggaactgaattctgccaacgaccaggtgaactttaaaagaggaccccaatctcacaccctcactgaccccgtgattgcagctccatgaaaccctaagtagagaaccgagctaatgtgctcagacccctgacctgcagaaactgtaaaataattaatgtatactattttaaggcacttaatctgtggtaatttgttagacagcaacaaaaactaaggcaactgtactctttataaaatattccatcataaaacttttaaatggaaaagtccctgggcactgccataggattcaaagtacctgtataaagttgcagcttacacacaatttctgacctataatcatgacagcatcaagcaaggtgtgactgtacttctgttgccacctgattgcctctacctccaaggaagtccttcgatggtggaactgtcttgtgtctatcccatagcatcaccgctcttcctgacccccttttcagttgtcttagcacagagacatttgatccaagtaggaattattagccctgaggggcctaggaggaggggtagaarataacaatcccctttccctactaacagccctaaccctcccagaatttcaactaaagctgcacattgagaatctacaaggttatccaggcagactttcatgctggccctttcctgtttcgcccgagggagaatctggccaactatatattcattgctattttccccattatttattacctagacagaatagcatgattaattattgatcacagaccagtaactgattaaagtgtggttctgatcagcagtcaaaagtcatttgtttccaggcattcatagttcctgcatagagagtggcagaacaa

SEQ ID NO: 72422 - DNA, 3315 bp, Homo sapiens
tccttgcaggatttcagaatgtcatgagaataaatatcttctttaattcagaccagctcagggtcaatgcatagaagccagacctttgtactcatttttaccccacatctcactcataagggttgttatttgccttgattgaaagcattcttctctagggtgtggcttttagagttgtgaagaataggcaaagaagaggtttatgaagaaaggagaagattttatagaattcctactctgtgcctggtactgagctaggcaggttttaaatacatttgtagttcctcagaggagccccagtctctatacctgacctctgtgtccccaggacttactctttacattaataggtgggattatgccaaataatcccaggctttgccaaaaaaaaaaaaaaagaaacaaacaaacaaaaaaacacacaaacaaacaaacaggtattgggtataagctaggacatcaggcccaagctatcatatccatcttacagatatggtggaaaggtggttttaaggtccctgggcagaaattctcgacatttggcttaggtttctctttggtgcctttaattcctcccctgcaagtgtacctaatccaactgctaattaagggaaaaaatagagacagcagatgagcagtatgattttttttctccttttgaagcaatttaaacctttggaaggtacacaaatgtagccctatttttcaagttaatttataatccctcccgccttcaccacaaggaatttacgaacctggaggagctggaagtcccttcgcaaagtaaacaaactataactcaaggttgcatacttacaagaatcctctatcagcaggttttattttcacaccagaggtgaaacgataatttggtgagccgcattttgtcccattgagagcagccaagagactacatgcgtgatgcaggaagagaggggttgatggggcagctgtctgcgcgttagcacacagcagctgtcctcgtcctggtgacaacaatgatgacaacaagagctggcacttgctgagccaataccatgtgtcaggtaccgttcaaacatgtctcagcctcaccacaaccctttgaaacagacattgttatctgttatctcatctccattttacagatgagaaaactgaggtttctagaagtttggaagttttggatatttttcctttggaaattaagtgagaatatgacctcacacaatttatctacatataggaagttatctgagtgcagagaatagactctggtaaggagggtttagaattggctagtgttttctttttagaaagggagagatttcctgttcttcttttccctttgcattccccgtcttcccctttcaaaatagagagtgtacactgtactcaagtcaggaggcctgtgttctggtcctagccctaggagtcaatgcattcttgaacaaatcccttcccctcttctgacatcagtttccttacttgcaaaatgaagggatgggcaagctgatgtctaggacccgtgttcctcaatttcaatggttccatgattccataaaccagggtggtaaatctttccctctcaactcctcatccacccttgtgtgttggacagcaatgcttctctctcaaatgtgcaaggcactgaaaagaaagcaagttgttttttttcagtgctgtataccagacgaccttgatgtgatagactacaggatctggtgacactgcacactcagtactattcaacactttgcctgaaagggaggaaggaatggatttattgacttgcgactttgactcgggcctgtgtatcaggtctgttattatgtggaatgattaggctgcagtggcagggacaagttaaactagaacaacaaaagacctccttaacctttacctggacacaaggccattcataatgacttgcatggtttggaaaaccaagtctgtcctggagcactcagtacttttgcagccccagcaaatgagcaggaaaggggaagatggatgggtgagcgagatgaaatgtaatccaattctgcatagtcctgtttagaattctgagttcaggtctgtgtcaaaaaacagctatgacttagagatcatcatcattttctttggcttgaaaaaggaatttgaaaccagatacaatggttgctcgctgagaagacttccaactatttgttatccactagagcaaattatgctgtttctgaaagatattttccctcgtgaaggaaccatgtgccttctattaatgtgaaaggaactgaatatgtggacctttcaaacacacacacacacacacacacacacacacacacacacaatcaaacacaaagtgtccttgaaaagctaaaaaagctgcagccatctcaagcttctctcacttctgaaggatyctttcccctctagcccagctccctggctcagtctgataagtcatgtttttggcagaatcgctgcagtagcaatcatttcaaaatcctgggcaggatggatttttttcagatacctttccctaaaaatggtaagctttaatgcatctggctatgacacaagaattagagaatcagggtattacagcttgaggagaccttatccatcacctaacctaaaggtaagccagccttttctttaaaccaggtagtaaatattttagatttttccagccagtcattctctgtcacaactgagaatgcagccatagacaatacataaccgaacggttgtgtctatattccagtaaaactttactttcagaaacaagttggcccataggctgtatgtagctaactacatacaggttgactccagcctcctcgctacatacaggttagactcctagctcaaggttacactcctgatctaatcttgatcaagtggtagaggctaaaggccagagaagtcaagaggcttatctgagccaacttggtcagctggcagcaaagctaggagtggagatatgtagaggggaatcagatacttaattctggggtcccggatctggagactccagtccacctgaaccccttaatatttcaatgcaatttattgtgaaaattagtttataacatagaatgtgaaaatcatgcttgattaggagaggctgtggctggagtggaaatgaactaaatccttcccagcattgagattcagatttcggcgaccatgcctgggagacttgggaagggctggttctgacagatgccagattgcagaaaaggacagtggggctttgtgagaaacacccccatctcaggcaggcactcatgcatacaaacacacatgtatacacacacatatggggagtaagtctaggaggagtgg

SEQ ID NO: 72423 - DNA, 1612 bp, Homo sapiens
tctcggtgagccggcatgagaatttccctcagagcaacaatcagcaggcgctttaagccctgttctaacgggaaatgtaggatatctcagagagttccacccattcatagtctcgataatgaaatatgataatctaatttggtaaaaataaactgtgaaatcagagatttgaggcaaaaactttaaagatgcaattcagactagcaatcaatgctcattcagtttctgtaccatctcagctttctccttgtgcagatgcttaagtgatgctaaattaaataattgacaaatttttaaaactgctgaaaattaccatctgtacttaattttggaatataaaaaggtccatagaaaacaccctttatgattattttgtctaataacagatatgaaacaatacaaacatcccagtcataaaatataatgcgtttctagcaggctggctttacatatttaaacatagtttttcaaaacaaaagaccacaggaggagtgaaatgctgggtgacaaatacattttttaaaaaaacaattgccaaataactgagtttttcatttcaratctactcctctaacccttcacttccccgtaaaacaaaaccaaaaaaaaaaaaaaaacccaaataaacaaaactcacgcacaggcttcctgcagacagttatgacaaccattacttttttttacatttctctcctggataaacactgggttaaactgttctctgttaagaactttattaggttgatattacatttacacaaaatgaagtctacttctgtaaataaacatgcttgaggcttccatgaaaacacagagaagagaaacaagctccctgtatatgtgaacacactgctaaatacatggataaaacaagctgaaacttacaccagacacttctcccaggtccaccacggcaggagccctaggggtacattctagttttttttaaatccatgttctcctcttctcactgatgggactactcaggcaacatggtcaagttgcaatcagcttctcccttagtgatgtatgagagctggactgatttatcttggcttttctgcagcatattagcactaatgtttctgcgtatgcatcctacctttctttagccgtagccccggctttatcattggtaatctaaattaaagagccagtgaacagagcagggttgttgtcccccacccctccctgttttccatgaaacaattgccaggcagtcactcccggacaaggattccactgtttattctaccgagcctcctcttcaatattccattgagacaggaagtcagagtcgcaaaaggataggtccagcaagactgtcttagttcaaaggtatatttatgatttatgctcgaaaacagtagatggcctcaggaaatactagagagagctgtcatttaccagtttttcagcccagaattcagaatcgacactatttataaaaacagagcaacttgatacttcaccttactgcccagggtgcactttaccttcagggcactctttctgagaaatctcttcctttttccaccaatatttgttttatatacacatgcttaaatgtttattttaatgagctatattgagctatgacttagcaagttcc

SEQ ID NO: 72424 - DNA, 688 bp, Homo sapiens
ggatcccaaacagcacataaaatagaagtctaccataattgtccctctgaaatacacttgccctactagcattaagttaaaaaataatttcatttggctccttaaaatttagaacaacttctgggatgactcagataaccgaggcttctttaaaatgctttccggatgggtttcaactgatggctttttttcctctgtgtaattttcaccatagtaagcaaaggctctcaaaaatcatttcgtagtacttagtgctacactcaaatttgagatgactctgttaaaaaattgccactgttgcccctaaatagtaggagagcccacggagggctttgggttgaaagagttagagaaggggactctcttgagtcaggtccttctgacagtcttctcttagctctctctattcctgggtaactagagggagacccttcgaagagaaagaacatggaaaaaaggaagcacactgagcatggcgggaggggaagcgactaagaactttacctggaacagtgattctctgccttttatccctcccagcccacctaaggcacagcatgcacagccaggactagcaacacatggaacacatttttaacagggaaggtttgamaaagactttctccaactgaatcagctggttaggaagctctagctttaagaaagaagtagtttatgagttaatgat

SEQ ID NO: 72425 - DNA, 1100 bp, Homo sapiens
aaaaggattaaatagggctgggcgtggtggctcacacctgtaatcccagcactttgggaggctgaggcaggtggatcgcctgaggtcaggagttcgagaccagcctgaccaacatggtgaaacccagtctctactaaaaaatacaaaaattagccgggcatggtggtaggtgcctgtaatcccagctactkgggaggctgaggcaggggaattgcttgaacctgggaggtggaggttgcagtgagccgagattgcgccatcgcactccagcctgggtgacagagcaagacactgacgcaaaaaaaaaaaaaaaaaaaaggattaaataaaatatagttattttttctactattacaaaattacctcactccttcaaactttattaattagaaatttgtgactaggctagaaaaattaatttactcgaggaaaaaggggattattaacccatttagtagtgtaagaaactgtaaaaagaatgattaaactaattaagagaataaattgtttcaagcaggccatagccatttaaagtcacctattgatatagaaataatttgtgaactaagttacaaataacatccctctacctattcattaaattaggtccctgaggatgtctattaaataatgctttgttagcctggttcacttagctgtttttacttgaaatattacataaatcaaccttttattaatttaaaaggtgaaacctgaaagcatatacagagttaacttataaacataaatgatcttaaatatataacatataataggggccaaaacaaacctgataaaattcttgctgatttatgtctcactatttcatttctttcagacacattttaatttcattcatgccccgggcatgtcctactcagtgcaaatccctatcatctatctcattatcactctctagtctaatgtttatcattattagctattgactgcacccaggtacggtgcaaaatctaattacacttcattcttggatactgcccagtacagtgaccttgaaaccaggtctccaaactcactctactctcatccttccctccctcggttgatggcagttgcatccttccacgtgttcaagccaa

SEQ ID NO: 72426 - DNA, 1100 bp, Homo sapiens
aaaaggattaaatagggctgggcgtggtggctcacacctgtaatcccagcactttgggaggctgaggcaggtggatcgcctgaggtcaggagttcgagaccagcctgaccaacatggtgaaacccagtctctactaaaaaatacaaaaattagccgggcatggtggtaggtgcctgtaatcccagctacttgggaggctgaggcaggggaattgcttgaacctgggaggtggaggttgcagtgagccgagattgcgccatcgcactccagcctgggtgacagagcaagacactgacgcaaaaaaaaaaaaaaaaaaaaggattaaataaaatatagttattttttctactattacaaaattacctcactccttcaaactttattaattagaaatttgtgactaggctagaaaaattaatttactcgaggaaaaaggggattattaacccatttagtagtgtaagaaactgtaaaaagaatgattaaactaattaagagaataaattgtttcaagcaggccatagccatttaaagtcacctattgatatagaaataatttgtgaactaagttacaaataacatccctctacctattcattaaattaggtccctgaggatgtctattaaataatgctttgttagcctggttcacttagctgtttttacttgaaatattacataaatcaaccttttattaatttaaaaggtgaaacctgaaagcatatacagagttaacttataaacataaatgatcttaaatatataacatataataggggccaaaacaaacctgataaaattcttgctgatttatgtctcactatttcatttctttcagacacattttaatttcattcatgccccgggcatgtcctactcagtgcaaatccctatcatctatctcattatcactctctagtctaatgtttatcattattagctattgactgcacccaggtacggtgcaaaatctaattacacttcattcttggatactgcccagtacagtgaccttsaaaccaggtctccaaactcactctactctcatccttccctccctcggttgatggcagttgcatccttccacgtgttcaagccaa

SEQ ID NO: 72427 - DNA, 2840 bp, Homo sapiens
tataaatgggctaacttctgctcactgcacttctagatgtgaaacttacctgggacgttggtatgcacccctagctgcacagacacatagcagctcctgttttacctgtcaatatcactttctgtaaatactatctgcctgaaaaatgaagatgtttactttcctcatggcctgtgtcttctaggctgatccccaagcaatggtagcagggtgatatttagagtactctccattattccacaggagcactagaccagtcaaggctatgctacttgtgaatactgtaactagtatgaaatgcaagtttttataggaggaatcatgttttatttttctttgtagccctatagttcagcaatattctggaattccaggagaatccccagtgtgttcgttcctagtgtatcacacacggagcagctaaaacaacagaaatttgtccactcacagtattggaggctggaagttcgaaaccaaggtattgacaggactgtgctccatccaaagcctctaggggaggatccttccttgcatcttcaagcttctggtagtcccaggctttccttggcttatggcagcatcactccaatccctgtttccatcttcacatggctgtttcctctctagatgtatctctatttctttgcctcttcttataaggacacaagtcatattggattaaagctcactctaattgtgacctcatcttaacttgatcatatctgcaaagagcccrttttcaaataaggtcacatttatagtcaggatctcatagtaaataaatgggcagaacaggaaatggagctaaggtcttccaattccgaatcctgttctcttttccttacatcagatgcttgctatagaatgaatctgtgtgtcccctcaaaattcatatgttgaaaccctaatccccaaggtgatgggatttggaagtggggccttggggggtaattggtcaagaaagtgtagccctcatgaatgggattagtgctctctcagggttaagacttgagcatatattttgggtggaaacaattcaacccataataccagcaaatattatgagttaattaaaaaatagagaataaaaattaaaggtactccactttttgtctgtctgcatgcagataggagtgcctagaatacaagaatgaatgaagggctgggacaatttcttggaggttcttgcaggcacagtctgggctagaggtctctgaggttaatataatagacagtacagtttgggaggcttagcatgatgggtcaggctcctttctgtgaggcccttcctcagcctctacctatcaatctcatgtgggtcttcagagcctgggtttgcagattaggggctatggggatacctatgctcgctggatgggacaccccaggggccatctcccactgctgttgactcacctccagtcaagtcctagtttaccttcacccttaaatccaacttagatttttaattttaatacctaaaagctgccatattgctgaggccatctgtccttataattgcatttgtagaccactttacagtttatgcagtgtggcaatttagaagaagttagttatcttcacgaccctttgtttctatttcacatatgagaaaacagaggttcaacaggtgaagtgacttgcctgggggatctcatagtaaataaatgggcagaacaggaaatggagctaaggtcttccaattccgaatcctgttctcttttccttacatcagatgcttgctatagaatgaatctgtgtgtcccctcaaaattcgtatgttgaaaccctaatccccaaggtgatgggatttggaagtggggccttggggggtaattggtcaagaaagtgtagccctcatgaatgggattagtgctctctcaggaagatacaggagagagattgcttcccccctctctctcttccatgtgaggacacagcgggaaaacggctgtctatccaccaggaagctggtcctcaaaaaacaccaaatctgccctcattctgatcttagacttcgtggatccagaactgggagaaaccaacgcctgttgtttaagccacctcgtctatgatattttgttacaccacccgagtggactaaaatcatgcttatcctttaaaaactataacagtctgggtgaagagaagtttctccttgaagaaggaagaagatttaggtgttcaaaggcttctgtccaaatctggttgaattgtgattaagttcaaggaaagttgaaaaattcattcagcttcaatgatattttcatctcctctctattcccttgggtctgggagctccagaaaacattcccagaatgggtgggaagaagagaggaggggttctgttaatagctcccaggttttagtatttgtgtctctttgccgagaggtatcagcgtggaacagctttggggatggtgacaactgggtttaaataaaagattcaccatttattagctgtatggcctccttcgattcgtttaacctctctcaggctcactttactcatttgtgaagcttgctacctttcttgaaagactgatctgtgggttaaatgaatcttggttcctattttgtctttcccttcatctcttaggaaaggtctttgtttcagagtttggttcctacagtggtgtcatatatatggatggggattcaagtgcacagaaatgacacctacctgacaaggggcatttatgggctcagtgagggatgcaggctccaaatttgaattttttggccctcgtttgctgttgggacactggacaattatccaacttgtatacatctaagagccacagatgatgaataggcacactttttaagacatttgatgt

SEQ ID NO: 72428 - DNA, 573 bp, Homo sapiens
tggcagtagaaggtcaagggcagaaaaacaagtgtcaaatggcatcccctactcccctcccccgcacyccaacgattcaacagctaagactgcttgtttatgaagcttcctggccaggagctgaggtttgctttcgaaaggaaaaatgggtctggctctctttttatcccagaaaattgtctcggctttagtctgggacatctggtcaacaacctgccctgcccaggccgccagcgcagggccttgcccgcggcgcgttgatggaggccgcagctggtgccctctgcagccaaggcgctcagcccgcctggaggggcgcagtctcggctcagcgctgaccgctcggcccaccgaggcgcagctctgaaaatgcaccacagtggcgaagcggcgagtctggataacccgtctccgcccatgctcaggacccacccaatgtccccaggcgctgctctcactccgggagctgccccggcccgggtaggacagacgcgctcgctcgaagccagaggctcccccggctgaggtgcccaggccgctcctccagcccgggaagagcgtgtgcccctgggg

SEQ ID NO: 72429 - DNA, 1019 bp, Homo sapiens
cattcctagtttttctctgagagtgcaagccattttactttaaaagcttgaaaacaatccttcacgcaactgaatcttggctggggttgtgtgggatgatgcagcaaaggctgtaatgaacgattccgacatcccagaacwgtgtatgcctgacagagcaatgtatacaaacccgttcttggcttttattgggctgcaccaagcgtacaattctccagtgagcccaggagttagaaagtgtcaattacaaagaaatggctggcagattgaatgaatattggtgtgtaattaccacagcatccaccagcagcaaagactccagaatagtgcacacaaatattagtgtcctttccctgaataaaacacccatctttacactgtgtgatatcaatgcctaacagaggtgacgaggcagggtgcaggcaatttattttgccagccacatgtgacccaagatgttactcatcactgagcaacaaccgcttttgccaaaagcattattttcaaaaatttaagagaatcccagctctcttttggccatcctagagcccctttctcctctagctttacagtccaaaagaaatatagtcagggcatgcttttaaacagttgtgagctgtcaagccatgagctttcctagagtcacttttactcatggacaaaaatggagaagctgatagatatcctggctcagatatttataatgttgttacactgatattttctttcagtaaaaccttcagagtgtaagctcccaaacttgatcgctttgtgactgcattgcaggtggcaccagcaattcaacagttttgcatcaactccttccgttgttcaaagaagagaccaaaaagagtattatcacctttcttgcacagtgatgaggttctttgctgagctacaatccttctaaaacagcatcttttcacctttttacgaagtcaggcactccttggaaaatctgaaaaagagttatatgctcttgccagaaaaaaaaagtttaagaaatgtaataatatgca

SEQ ID NO: 72430 - DNA, 1019 bp, Homo sapiens
cattcctagtttttctctgagagtgcaagccattttactttaaaagcttgaaaacaatccttcacgcaactgaatcttggctggggttgtgtgggatgatgcagcaaaggctgtaatgaacgattccgacatcccagaacagtgtatgcctgacagagcaatgtatacaaacccgttcttggcttttattgggctgcaccaagygtacaattctccagtgagcccaggagttagaaagtgtcaattacaaagaaatggctggcagattgaatgaatattggtgtgtaattaccacagcatccaccagcagcaaagactccagaatagtgcacacaaatattagtgtcctttccctgaataaaacacccatctttacactgtgtgatatcaatgcctaacagaggtgacgaggcagggtgcaggcaatttattttgccagccacatgtgacccaagatgttactcatcactgagcaacaaccgcttttgccaaaagcattattttcaaaaatttaagagaatcccagctctcttttggccatcctagagcccctttctcctctagctttacagtccaaaagaaatatagtcagggcatgcttttaaacagttgtgagctgtcaagccatgagctttcctagagtcacttttactcatggacaaaaatggagaagctgatagatatcctggctcagatatttataatgttgttacactgatattttctttcagtaaaaccttcagagtgtaagctcccaaacttgatcgctttgtgactgcattgcaggtggcaccagcaattcaacagttttgcatcaactccttccgttgttcaaagaagagaccaaaaagagtattatcacctttcttgcacagtgatgaggttctttgctgagctacaatccttctaaaacagcatcttttcacctttttacgaagtcaggcactccttggaaaatctgaaaaagagttatatgctcttgccagaaaaaaaaagtttaagaaatgtaataatatgca

SEQ ID NO: 72431 - DNA, 1019 bp, Homo sapiens
cattcctagtttttctctgagagtgcaagccattttactttaaaagcttgaaaacaatccttcacgcaactgaatcttggctggggttgtgtgggatgatgcagcaaaggctgtaatgaacgattccgacatcccagaacagtgtatgcctgacagagcaatgtatacaaacccgttcttggcttttattgggctgcaccaagcgtacaattctccagtgagcccaggagttagaaagtgtcaattacaaagaaatggctggcagattgaatgaatattggtgtgtaattaccacagcatccaccagcagcaaagactccagaatagtgcacacaaatattagtgtcctttccctgaataaaacacccatctttacactgtgtgatatcaatgcctaacagaggtgacgaggcagggtgcaggcaatttattttgccagccacatgtgacccaagatgttactcatcactgagcaacaaccgcttttgccaaaagcattattttcaaaaatttaagagaatcccagctctcttttggccatcctagagcccctttctcctctagctttacagtccaaaagaaatatagtcagggcatgcttttaaacagttgtgagctgtcaagccatgagctttcctagagtcacttttactcatggacaaaaatggagaagctgatagatatcctggctcagatatttataatgttgttacactgatattttctttcagtaaaaccttcagagtgtaagctcccaaacttgatcgctttgtgactgcattgcaggtggcaccagcaattcaacagttttgcatcaactccttccgttgttcaaagaagagaccaaaaagagtattatcacctttcttgcacagtgatgaggttctttgctgagctacaatccttctaaaacagcatcttttcacctttttacgaagtcaggcactccttggaaaatctgaaaaagagytatatgctcttgccagaaaaaaaaagtttaagaaatgtaataatatgca

SEQ ID NO: 72432 - DNA, 1053 bp, Homo sapiens
tgcattttatggtttatctgtctttggttgtgattttcaagagaatagtattcgtggtggttgtttgtgccctctttaagcaagttagttgtataataaatactgcttgaaattaatagtggtggttactcctatatccatttgtcttcagtattagcgtaatggacctgatttggagctggctgattttgggtttgaatgtgactctggaaatgtcttagtgagtctccatacaataataaaattttcagcttgaatgccaaacagtttttttgacaaagaggtacaggataaatagagcttcagaaaatgcctgagaattcacagaaagaagcaaaatgtgaagatgcaggacagaggattcaaattacactggagagacagcagtgttgcaacaccaggtggtcattgctagaggaggaagcaaagccaacaatatgcgccctgcaaagcttcctggagaaaagggaaagctccttaacagcccttatgatgaagattcttaccttaaaaggaattttcagcaagagcctaagatcaagaagctttttgacaataatgatacagcgaatactttatcctagctcacgaaaataaagggcagaaactcagttgttagaaaaagggaaagattagatgtgtttgggagatggagaaagttagttcacaaggaaatagcctctacttagtgtatagggaggataaatctgcctgacacttgggacccagggattcctgaaacttcaggtgtgtggtaggatgggaggtgggaatggagaggaatgaatctgtgagagtttcaagtatctggcacaagggtagggaaatactctgttgaaaagcttcttgaggtggctttgactggcgggaacagtggagacamgagcaggtggcaatggccacctgccacacaagatcttaattgttctactttttgctcaaaccctctgcatgtgggatattactctaggaacaggtggttgctgtggcagcgagggtggcacctgttacttcaattggagacaagatctcctgggcctgcagagatagaca

SEQ ID NO: 72433 - DNA, 569 bp, Homo sapiens
gggaatgttaggcagtataaaaaaactaaagaacaaatcaagctatagataggaatgccagagactctaatattatcccactttttaaaagaacttgaggggcactacctcttacagtattcatggttgtctgaaacgtgaaattgaatatcaagtcctaaaaaattcaaattccctttcttcatgcaatcccaattcccctaaataggaagcacttaaaaataatttgtaaccaaaaaaatctcagtaatgcccaggtttcagtaatatgccaggtcagagagaggtggatccattcctttatttaaattaagttkgtgtcatgatatcttcattatactaagggaaaagtaaggtttaaaaatagaaattcatggttgttttgtgttgtttttagttgtagctgttgtttgctctccatgttttatttttacgtactttcaaatttacagaaaagttgtaagagtgctgttatggatgggatgtttgtatcccttccaaattcatatgttgaaatcctaatccccaatgtaatgtattggggagtagggatttggggaggcattgag

SEQ ID NO: 72434 - DNA, 2532 bp, Homo sapiens
atgataatattaaataaaagcaaatactctcataactttcaaggaaacatgcgatgactgatgtagtatcaaagggatatgttttggaagatgctctcttctatgtgactgaaaatatggggacatgctatacattctattttttcttattgattgtgaatttgttagtcatcaattttgctgagtctattcaaaatttccacttacataaactctttgagtaatgagtttcatagatatattgtgtgctatgcgaactagtacctctatttcttggttccattattcttgtactataggatattgtaaataaacctatgttttctgtaacatatcttttgaaaaaataatgcatcttctcagaaaacttttcctatcaagaatttttgttgttgctcttcatcagtctaagaaaaaactgtcttttttgtccttttttatttttgcccatattttcctcttcatcctccattcctatgctcatagcccatcctcactggcaccaattctgtgtttaatgtaaacgtccttgaaaaatagtgttgtttcatttcgaggatatactgaagttacctaaatttgaacatgatatggatttcattatttcttatcttgcttttgtgaagatgacattttatggagacaaaagataagttcacacataaaatttcaggtagtggtaaatgtaacaaggaaataaacacggtgattcagtagtgattgggttactttataaaagatggtctcttctcagaatgttttatttgagctgagaatagaaacatataaaagatactgttactaggggcatccagaccaagaaaatgttggctctaaagcaagaatcagtttgatacacgagacaaatccaggaggcaactactctgtctgaagcacactcagcacagaaaaggtggtcctagatgaggcaggagaaattggcaaggagtgggtcatatagggycttgcaggctacaaccagaagcaagaattttactctaagaacaatttgagagccattggaaggttacaaagcagaggagcaatgttgttttttatttaaaaagataggttgctgtgaaaaaattggaaatcatcgaagaattaatgggatttcttgtcaagagtatcagattctatcttcattttcttctgctgtcttccaaaatcccattaaaatgacagtaaagatatagggaaaaaaatatatatccatggggagaagagtaggagaagtttaatgacaacactgttttgaagcctggaaagcaaattaattagtagttagtccaaagctatcattggagaaagcagagtagtaatgcatttcatactacagaaccacagaaagaatcaagaactggtggaaccaagcgcctccaaaagtgagaaagatacagttggggaggagaagtagttgacgctccatttaccaatcatttagactcctcgttcctctcctacacccaaacagaagcttagacattcattcactggagaggataagatagagtgtctctagaacaggggctaccagcacagttaagaatcttatactgaaaattcatccccagtcctcttctcccaatgattctcaggtttacaccttccagggtgattggaagattcttctctggggatctaacttgtcattttgttttccagcacaatggccgcacttgggtcagcctacaggaaagaccatagtcaataagccctcctcagactcaagagctttttaataagtattcaatcctctgttcaatatgaacaattaaaaatcaccagactttagaggaaagcatctgttatgaaatgcagagagtaaatagggggaaaaaaagcagcttggaggaaatagactatgcaagtagatgaaacctttaaaaaaagaactaccattaatatttttattgataatctcagaaagacaaaagaaaaaaatcacattcacaaaataatagtggtattcaagaaaaattcagagaacaagaatgtgcttttggaaattacaaatgacagaaaagaaaaactcaatagaaggcttaaaggagtacattaagaatacatcctggatatgcaaagatacggaatatagatcagaaaagctgccctcctatatagactagagaatcaatatgttaatggtctgatataataagattcccagagagaaactgagaatacaaaggataaaattaataaatatttggaaaagatttcataatttaattacgtgagtatttaaagagcacagtaaagcatactgtaatataagacttacagtgaaatttaacacattgtggcaaataggatatctataagtattcagagtgaaaataataaaatcactaacaaagaaccaagaatcaaaaatagactggagttatcaatactgaaatttagaaaaacaaacaaacaaaacttttaaaatattgaaaaaaaatccatccaagaaatctatactcagctaaccttctaattgtgagggtagaatacaggtattttggatataagggtctcaaaaactgt

SEQ ID NO: 72435 - DNA, 1808 bp, Homo sapiens
gggcacttccagaataatagggcagcaacctcacctatggggttccggaagataagaatggtcaaaatgttggggtctcacaggaaagtggttcccagttgatgaactacaacctcatcccctctaactgtatcttgacaaaaggtagatattcatcaacctgtgttcacctcctttctgttcctgaggggactaccaaaaatccccttccccagggctatcgagtgacagtcaatttttctgcagctagaagtaggctaaattaggaatttgagaagaattgagctggactccctattttgacagaacatggaaaaagagttcagagaaagcacagaataggaagatatgacagaactagattcttctacagtagtgatagttttcccaaaacattttatgtcagaaatcatacttgtggatagggtgggaattgaaaagaaggatagaattaatgacgcagatagaagatagttctttttagaataaatcataaactagaggaattgttcatcagaatgacagtaatcctatcattgtgagtgcatgtgtatctatgtaaagacccattcaattagtaggttttagtttgggatgcttctgataaaggagtcaaggaaagctcatgagagacatggatagcatcttattcatggctgtttttctggcccttaccacaatgttgataacatagtaggcacccagaaaaatttattgactggaaaaaggaagaaagaggaccaagatttcatcagaaacaacaacaaaaacaaaacttaacttgtgttaaatgttgactaggtctctggtattaaataacatttaatacataagttctcattctcccagcaatattgtgaagtattcttcttcttctctcttttttttttttttttttttttgtagagatgaggtctcactatgctgcccagccaggctgatcttgaactcccaaactcaagggatcctcctgtctcagcctcccaacgtgctgggattacagccatgagctactgcgcctagcctttgtaattccaattttactgacagacagggagagtcaaagagattaagtggcttggccatgccagttcagtttaagaccagcatttttctaactctgttcaaactcaagttcaatgtaaaatcctgagcttttaactgaaattatctaaaataaaatgtttaagagtcaagaactgmtatcctaaataaaaggcgataagaaaaaaaactgaggaaaaaccataaaaactacaaatagcttcctatcattgggtaatattttacaaataaatgatttttaaaaacttttcaaagcaccatttcagtaataaagattgaaaataagattgtagatcttaaaatggaagattaagaggttgagaaccttacagaggcagagcctagaagtaggaagatgatgttttgatcttttcagactatttctgaagggattaatcttctcttatcaaccctgatcacttaaagattccaacattgatgggattttcattatgacttttctgtactttgctgttaatgtgcaatattaggcttccattaatgctgaatgacactcaacactaagcatctccatcagctgtcttcaattctggatatacattagtgaaaagctcttaaaaaaataaagtgccttaggcttcacctctgatttaattgatgtgggggcagggcatatactctgcttttgttgttactttaagctctccagataattctaacaagcagcaagggttaagaattacttgtctagatcacaatattttgggcaaatcaaaactagc

SEQ ID NO: 72436 - DNA, 1808 bp, Homo sapiens
gggcacttccagaataatagggcagcaacctcacctatggggttccggaagataagaatggtcaaaatgttggggtctcacaggaaagtggttcccagttgatgaactacaacctcatcccctctaactgtatcttgacaaaaggtagatattcatcaacctgtgttcacctcctttctgttcctgaggggactaccaaaaatccccttccccagggctatcgagtgacagtcaatttttctgcagctagaagtaggctaaattaggaatttgagaagaattgagctggactccctattttgacagaacatggaaaaagagttcagagaaagcacagaataggaagatatgacagaactagattcttctacagtagtgatagttttcccaaaacattttatgtcagaaatcatacttgtggatagggtgggaattgaaaagaaggatagaattaatgacgcagatagaagatagttctttttagaataaatcataaactagaggaattgttcatcagaatgacagtaatcctatcattgtgagtgcatgtgtatctatgtaaagacccattcaattagtaggttttagtttgggatgcttctgataaaggagtcaaggaaagctcatgagagacatggatagcatcttattcatggctgtttttctggcccttaccacaatgttgataacatagtaggcacccagaaaaatttattgactggaaaaaggaagaaagaggaccaagatttcatcagaaacaacaacaaaaacaaaacttaacttgtgttaaatgttgactaggtctctggtattaaataacatttaatacataagttctcattctcccagcaatattgtgaagtattcttcttcttctctcttttttttttttttttttttttgtagagatgaggtctcactatgctgcccagccaggctgatcttgaactcccaaactcaagggatcctcctgtctcagcctcccaacgtgctgggattacagccatgagctactgcgcctagcctttgtaattccaattttactgacagacagggagagtcaaagagattaagtggcttggccatgccagttcagtttaagaccagcatttttctaactctgttcaaactcaagttcaatgtaaaatcctgagcttttaactgaaattatctaaaataaaatgtttaagagtcaagaactgatatcctaaataaaaggcgataagaaaaaaaactgaggaaaaaccataaaaactacaaatagcttcctatcattgggtaatattttacaaataaatgatttttaaaaacttttcaaagcaccwtttcagtaataaagattgaaaataagattgtagatcttaaaatggaagattaagaggttgagaaccttacagaggcagagcctagaagtaggaagatgatgttttgatcttttcagactatttctgaagggattaatcttctcttatcaaccctgatcacttaaagattccaacattgatgggattttcattatgacttttctgtactttgctgttaatgtgcaatattaggcttccattaatgctgaatgacactcaacactaagcatctccatcagctgtcttcaattctggatatacattagtgaaaagctcttaaaaaaataaagtgccttaggcttcacctctgatttaattgatgtgggggcagggcatatactctgcttttgttgttactttaagctctccagataattctaacaagcagcaagggttaagaattacttgtctagatcacaatattttgggcaaatcaaaactagc

SEQ ID NO: 72437 - DNA, 976 bp, Homo sapiens
tagacattattagccccacagaacagatgagattatcatctcaagaagtcaggtgacttgctcagtcacttgactattcatttgggatktttttttttttgttgttgttgttttttttttctttttctttttaggttttcctcaacttaagggctgttcacccccaccaatacctacggcatgattctgtgcaaatctcaaatttctagcacagtaaattttatttatatatacatctaatacaacgagaaatatattacaattctttatagaatggtgaagctggaatagaacctgggaactttttaaaaggtaatctccacattttatggtggaagaaacaagttcagggatactcagtgacatgcgtaagatcacccagcaagcttgtggcagagcaagactgaaatgttctggactatccaaatcatctcctatttttaattctatcgctgcttttagaaaagtacatttgttttattcctgcctaagtgttgagcttgaaaccactcagcaagtaagtttgttcctatcgctattatcctgggtggcttttgtttacccttctattgtttgagaagatttggccagaaggaaaactgttaaatcttcacattggcagtgatatttaagacccataaaagattaatcatcgagggaacccataactttgcatgatcaaagtaaaaattcagtttttatgactgcctgtgttttatcctctataaattttataacaatgattaggctcaaagtatgggcataatttacatacatcaaaatgcctcacactgtccttacagccagttaaacacctgcagcaaatacaaggaagcatattagaaagcagaaagctgccaggctctctcaggcattaatcagtggaacctctttgagggagagaaggagagagagggagagaggggaagagggagattgagaaagaattgcgatggtggcctcctgtaaccaaatt

SEQ ID NO: 72438 - DNA, 976 bp, Homo sapiens
tagacattattagccccacagaacagatgagattatcatctcaagaagtcaggtgacttgctcagtcacttgactattcatttgggatttttttttttttgttgttgttgttktttttttctttttctttttaggttttcctcaacttaagggctgttcacccccaccaatacctacggcatgattctgtgcaaatctcaaatttctagcacagtaaattttatttatatatacatctaatacaacgagaaatatattacaattctttatagaatggtgaagctggaatagaacctgggaactttttaaaaggtaatctccacattttatggtggaagaaacaagttcagggatactcagtgacatgcgtaagatcacccagcaagcttgtggcagagcaagactgaaatgttctggactatccaaatcatctcctatttttaattctatcgctgcttttagaaaagtacatttgttttattcctgcctaagtgttgagcttgaaaccactcagcaagtaagtttgttcctatcgctattatcctgggtggcttttgtttacccttctattgtttgagaagatttggccagaaggaaaactgttaaatcttcacattggcagtgatatttaagacccataaaagattaatcatcgagggaacccataactttgcatgatcaaagtaaaaattcagtttttatgactgcctgtgttttatcctctataaattttataacaatgattaggctcaaagtatgggcataatttacatacatcaaaatgcctcacactgtccttacagccagttaaacacctgcagcaaatacaaggaagcatattagaaagcagaaagctgccaggctctctcaggcattaatcagtggaacctctttgagggagagaaggagagagagggagagaggggaagagggagattgagaaagaattgcgatggtggcctcctgtaaccaaatt

SEQ ID NO: 72439 - DNA, 1866 bp, Homo sapiens
tcccagaagtctgaagtcaaaatattgtcagggcctcattacctctgaaggccctaggggagaatccttgtttcttccagcttctgctggctgttggcatttcttgcttgacgccacattattccatttccaatgttttcacatggccttctcctctgtatgtgtgtcaaaatgtcctctgtcttacatgtcattggatttagggtccacctggataatacaggatgatctaatctcaactcttaatttaattataccttttccctaaattaggtaatgttcactgactccgtggattagagcatgtacatttctttttggggaccaccccaaaatccattcaacccactgcaaggggaaaaaaaggtggatgaacagatacagaaagttagccttggagcatggcatagaagaataaataaatatgattgctgaaaagagacaaaggccaagtcagagttggacacgtgactttttcttaggccaagactgcatgattccccagtggcttttggcagactggaagcaggagcaggcagtggggtaacccagaatagggtgtttataggtgggcttaacagagggttagggagatgaaaggcttgacctttcctacttccagctgcagaacattagatgtctgtttattggagtgaaataatacatgttaaatcaccttgtaaactataaagcatttaatggaataaggaggtataatttttacttatatccctcactcctctctgtaccttattctttttttttttttttttttttttggagacaaagttttgctcttgtcacccaggctggagtgcaatggcacaatctcagctcactgcaacttccgcctcctgggttcaagcaattctcctgtctcagcctcccaagtagctgggattacaggcacccaccaccacacccagctaacttttgtatttttttagtagagacagagtttcaccatgttggccaggctggtcctgaactcctgacctcaggtaatccacctgcgttggcctcccaaaatgctgggattacaggcatgagccctcacgcctggccaccttattcttatatcccagagatattcttactatccaattcgacactccttcctatcctctcctaaatccccagtgaataaaactttaaacaaaatctctattccagtaaacccaaactttttttttcatgatgatgcctgcggtgaccataggatccaagtaaaaaagtcattgataaatactctgaaaaaaaataccggctctccagtaccgtgattgcagagagtatatggctgtatcacragtttctaaaaaacatgttacagaattttcatctattggtaggaccaggaagagctcacaaagcaagcctccaggtcacatttccagggcaacactcaatggtcccacctcatcggagaaggtttgctgccaaagtgaaaaagcacgggttacttcacaaaccactagatctgggatttttaaagttcatttccccctttatctttttctatctttttatttttcttacaaagcagcagagctctctcttccaacaaaaatttatgtcaaaacagatcaaagtggagctgccatagttgttgggggaaggcaagcaagaatagcccccgcagcccgcctccccagcctctggtgtcttttctgacaggcccttggagagaagcccctggacacttctagaaatgattttgaagccgttggagtaggcttcaaggacaagagcagctcttctggtcccagaaagttcagcatctcttctgtgagtagcctgactcagactgagccttcatcaattaactttactactaaatagcagaatcaccaaatatttacatgg

SEQ ID NO: 72440 - DNA, 728 bp, Homo sapiens
aaaaaaaaggaaaaagaaaaaagaattgagaagaatagggtcttaagttgaccttaagagagaatgtrgcttgaatcatctccatccagtgacttataagaaagtggacaagattttcaaagaaataaggataaagatagaaagggggaagagacaaaagcactgtggagaagagagtttcacaaagaaaacacaaaagcatccaaacttccaaagaggatgaagaagaggaggacccgtaccttgttgaagctggcaattagcaagcagaccactggaaacttttatgagtgctgtttgaagaggatagtaagttttccttacctcattgatctgtttactccaaacttctgctacctcataatctgagtttgcgatggtcctgacttgacctcacagcatctctctatgcaacttttcaactctctctgctagttgctttcttatttcctcagaatttttgaattcaaattcccaaaagaaaaaattcagtagtactggaagttcatcttcattgtgtgcaggcatcacaagttgctggccaacttacagattgcctttgggttgggtacctcttgggagccgatggtctataacgggggatggcacccctcaccagcataggactgtctcttcagcacaagctggggtggggtcagcaccaaaacaaacaaacaaacaaaacagtgcactgtgtccccaatataaccctctgtgtcaaagtgtaa

SEQ ID NO: 72441 - DNA, 728 bp, Homo sapiens
aaaaaaaaggaaaaagaaaaaagaattgagaagaatagggtcttaagttgaccttaagagagaatgtggcttgaatcatctccatccagtgacttataagaaagtggacaagattttcaaagaaataaggataaagatasaaagggggaagagacaaaagcactgtggagaagagagtttcacaaagaaaacacaaaagcatccaaacttccaaagaggatgaagaagaggaggacccgtaccttgttgaagctggcaattagcaagcagaccactggaaacttttatgagtgctgtttgaagaggatagtaagttttccttacctcattgatctgtttactccaaacttctgctacctcataatctgagtttgcgatggtcctgacttgacctcacagcatctctctatgcaacttttcaactctctctgctagttgctttcttatttcctcagaatttttgaattcaaattcccaaaagaaaaaattcagtagtactggaagttcatcttcattgtgtgcaggcatcacaagttgctggccaacttacagattgcctttgggttgggtacctcttgggagccgatggtctataacgggggatggcacccctcaccagcataggactgtctcttcagcacaagctggggtggggtcagcaccaaaacaaacaaacaaacaaaacagtgcactgtgtccccaatataaccctctgtgtcaaagtgtaa

SEQ ID NO: 72442 - DNA, 728 bp, Homo sapiens
aaaaaaaaggaaaaagaaaaaagaattgagaagaatagggtcttaagttgaccttaagagagaatgtggcttgaatcatctccatccagtgacttataagaaagtggacaagattttcaaagaaataaggataaagatagaaagggggaagagacaaaagcactgtggagaagagagtttcacaaagaaaacacaaaagcatccaaacttccaaagaggatgaagaagaggaggacccgkaccttgttgaagctggcaattagcaagcagaccactggaaacttttatgagtgctgtttgaagaggatagtaagttttccttacctcattgatctgtttactccaaacttctgctacctcataatctgagtttgcgatggtcctgacttgacctcacagcatctctctatgcaacttttcaactctctctgctagttgctttcttatttcctcagaatttttgaattcaaattcccaaaagaaaaaattcagtagtactggaagttcatcttcattgtgtgcaggcatcacaagttgctggccaacttacagattgcctttgggttgggtacctcttgggagccgatggtctataacgggggatggcacccctcaccagcataggactgtctcttcagcacaagctggggtggggtcagcaccaaaacaaacaaacaaacaaaacagtgcactgtgtccccaatataaccctctgtgtcaaagtgtaa

SEQ ID NO: 72443 - DNA, 517 bp, Homo sapiens
aaagacaagttcatattacctcacttagatcatgctgtttatgaataataagggatctactcactgctactcaatgctgttcctccttgctatcaaaaaattcatatttaaaacctaagacctgctgtgatagtattaagaggttggacttttgcgaagttattaagtcatgaggctccaccctcgtgaacagaattaatgcccttcttaaaaaggcacagaaaaacctcccttcttccttctcccatgtgaagacrcagcaaggcattatctatgaagcagagagcaagcccttaccaacaatgactctacaccttaaccttaaacttctcatcctccagactgtaaactagttcaaccattgtggaagacagtgtggcgattcctcaaggatctagaactagaaataccatttgacccagccatcccattactgggtatacccaaaggattataaatcatgctactataaagacacacgcatacgtatgcttattgtggcactattcacaatagc

SEQ ID NO: 72444 - DNA, 517 bp, Homo sapiens
aaagacaagttcatattacctcacttagatcatgctgtttatgaataataagggatctactcactgctactcaatgctgttcctccttgctatcaaaaaattcatatttaaaacctaagacctgctgtgatagtattaagaggttggacttttgcgaagttattaagtcatgaggctccaccctcgtgaacagaattaatgcccttcttaaaaaggcacagaaaaacctcccttcttccttctcccatgtgaagacgcagcaaggcattatctatgaagcagagagcaagcccttaccaacaatgactctacaccttaaccttaaacttctcatcctccagactgtaaactagttcaaccattgtggaagacagtgtggcrattcctcaaggatctagaactagaaataccatttgacccagccatcccattactgggtatacccaaaggattataaatcatgctactataaagacacacgcatacgtatgcttattgtggcactattcacaatagc

SEQ ID NO: 72445 - DNA, 755 bp, Homo sapiens
agaggcccatgtttattaactgacagatgttggagtgggatggaattggaggtgatagggaagtctattaataagattccagaacattctggggaagattcaaagggcccagtgagaaaattgtagaaagtgtctttataacttaaaagcataatctccttccagtttttgctctctctcattaatacatacattaagacatggtagagcatgctgaggcattttgggacagaggttgaatagcggcagctcccacacttccctgccatgtagatgagggagatcactccatgccagttgagtgatcagcctaatgttgtctctcaagcaggactttcctttggtacctttataatgaaattttttttcttgagatggagtctcgctcagctgcccaggctggaatgcagtggcgcgatctcggctcgctgcaactactgtctccccagttcaagtgattcttctgtctcagcctcctgagtagctgggattacaggcactcgccatcatgcgtggctaaatttttttgtattttagtagagacgtggtttcaccacgttgaccaggctggtcttgaactcctgacctcaggtgatccgaccgtgttggcctcccaaagtgctaggattacaggcgtgagccaccgcrcccagctataatgaatttttaaacctataagcagaccatgagtttaacacttcatgcctgagcccaacatacagatacagaagtgctggtttcctctgtctccttat

SEQ ID NO: 72446 - DNA, 735 bp, Homo sapiens
atgtgagaaattatgaaaacaactaagacaggcaatgaaagaaattttctggcattaaatrtctatttgacaaaaaataaaaatggaaagaaaatgtattgcataatcaattcagaaagctagtgaaagaaaacccagaaaagtaaagcaaatgaaagcaggactcaaaaaatacttaaaatattggctttatagagtaaatataacatcaatccacaaatctgaaaaaaaattcatcccaaaatacaactgcagaagaatttcatttgtgaatatccatgcaaaaaaatcttaaattggtcagcagaatccaagagcatattaaaaattaatacatcatgaagtataatttagtcccagagtgcaaggcagtttatattaggaaatacactgctgattcataacattaatagagctaatgagaaaaatcatattaaatctccatacatatcaaaaattagatatttaacaaaattcaacatttacccatattaaaagaatgctcaataaaataggatatataattcctagcccaaagccagtgatttttcttcatggagaagcattagagattttcacaataaaaccagaaacaagaaaagaaagcccactacagacaatcctcaacttgcaacggttgcacttatcatttttcaactttttgatgatgcaaaagtgatatgcactcagtagaaaccgtactttgagtccccatacatccattctgtttctcat

SEQ ID NO: 72447 - DNA, 434 bp, Homo sapiens
actctcgaagaattgctctgtggttacgagagccgttttgacagctcacacacaactggaagtgcctggaaatttacatccctctggagtggcccttagccaatgactgattaaaacctagctcctttgcctccagttggaacagactgtaaagtayaatttacacctcagagcttcctgctccagcaggctggggcttcatctgaaatcacacatttgcagcactgcttctcctttgtcatactttcctcattcccttactggttactcttgcgaacacttccttaatagattgcctgcacacgaatcctctcaaggtttgtgtctagtgaacttgccccaagatgccatttattgagtttgaatcttctctttgtttctctctctctctcacacacacacacacacacacacacactctctctctctctctc

SEQ ID NO: 72448 - DNA, 583 bp, Homo sapiens
tttagcaggccattcctcataaattaatgtgaaaaagccatcgtactatatcatgctcacctcttcattcctactttcttttcagtcaggtttcctgtgttcaaatttcttcttggtaataatagcagagattgttgtaatgaatgatcacgggtcagacaggagtaggcccactccgccaggaagcacagcatggttactgtttgagtttgccagagctgctgtaacaaattgccaccaacttggtgccataaagtaataaaaacttaatttcttatagttctggaagtcagaagtccaaaatgggtcttacccactagcagggttggcagagctgcattccttctgctctgacagtttccttgycttttctaggttgctttagaggcaacctcccattccttagcttgtggcttcatgctccatctttaaactctatcactccaacttctgcttctctcatcacatgttctgtctttcctctctgctttcatcatcagatcattttcttttactttgactcttttgccttcttcttacaaggtcctttctgattatattacctgaataatccaggactgat

SEQ ID NO: 72449 - DNA, 1080 bp, Homo sapiens
acgaaaaattataatgaatctatattgtgaacttatgtatgttgcaaaaggttatgctggcttttcaggtaatcattcactctgagcttctgccacctctgggatttccacaagctgcaacattttagtttcaactcagcttagcaatgccattgcaaaaaccatttcaactagcgttcagatagaatggagtatgcgtccattgccaaatcaactcactcagcatgtgctctcgcgattcagttctagagcagctgtggtctactctggaggaagggtaaatgagatcacttagattgaagtagcttccaatctacatacttaaatgagaaacatacaaattaaccatgcccagatgatcccaagtatgttcaggattcaggaggttgaagccaactcaccttggtaggtaattaccgtctttctggtaggcagaatcgtaaggtagatctcaagattcccacccccattgcacatgctctgtataatcttctctccctgaatatgagtaggtccgtgaatatgagggatcttactcccatgattaggttaaattagctgacaaagctgaagggattttgcagatttaagtaaagtgccaagtaaatcaacattgagttaatcaaaagggagattatcctaggtaaacctgacctaaccaggtgatcccataaaagggactggacccttctggaagaaagagctttgaacccacagagattctcctgacagccttaggaaagcaaatagtcatgttatggagaggaccagatggcaggtaaattcttttcacaaccatttctggcagtatccttcctgtccgtgggtttaatgcattctcatcaacacacatgatgtatccatcagggcccaggcaagagacagaaaccacatcagttatttgaacagggaaaatttaatacaaagatgccttaactagataagtagttgataactagaaaaatcaaagaataaaaagagatctctraagtataatgagaatagtacctgcaagaggcagctatcactccaaaagccagggaacaaaaggaagagattggaagtattaaaacctacaag

SEQ ID NO: 72450 - DNA, 1165 bp, Homo sapiens
gacaaatagctaatgcatgtggggcttaaaacctaagtgacaggctgataggtgtagccatgaactatggcatgcatatacctatgtaacaaacctgcacattcttcacatgtatcctgcaacttaaaaaaaaataacttaaaattctagcatccaaaaaaaacgaccttgaatacttccaaatcagatttttgaaccaccttcttgtaccaaatttccttctcatttaaatggagagagtattgtacattgacacttattaattaaggtgagtggagggcacttaagtggctacaccacagagcatgactatcatgaagcacagccatggcctattgtgtcagtcatcgctgcgactgtgcttaacgtgcttaatgtagatgtggaattatttgatggaattatgatgaaaaaatatcaagccttatgggagacgctgggtaatgataatgagccaagtgttgtagtccattgstgctggctgcctgatttgtccagatgggcttctgcctggagggttagcattagccttttgacaacatctccattaattctcactttacaaagagtgatggcatggaaacccgtctcagttcttgtgcttatgagatgtgtgacagtaaggcatgcctgccatttcagggaatggtagggacaacacttaaaatgtgtgctcctgaaaaacagtcaaatgagaaggcacaaacatcttcagaacttgaaaataattttttaaagtgcctttattaaactcagcatgggagacaatctgaaccgagatcttcatcaatcagattaactactttccaagatgaaaacagacgaggcacagtgtgaggctgagcagatatttatcaaaagccatattaataaccactttcagctttttcttgacagtttcatctgaggttccatgtttaacatttgagtatcatatgtttttgtcagaatgaggctgctaagagcatcaattaattaattcttttgaagtacagttcagaaaggtaataaagtaactgtctctaaggccaaaccagtaatggtaagcaacattctggagctacacaatttgttacttggaagagaaattaaaagcaaaatgtcttcttgaactcacctgagaataaatacagatatattttgcaaagtggcaataaggtatata

SEQ ID NO: 72451 - DNA, 1165 bp, Homo sapiens
gacaaatagctaatgcatgtggggcttaaaacctaagtgacaggctgataggtgtagccatgaactatggcatgcatatacctatgtaacaaacctgcacattcttcacatgtatcctgcaacttaaaaaaaaataacttaaaattctagcatccaaaaaaaacgaccttgaatacttccaaatcagatttttgaaccaccttcttgtaccaaatttccttctcatttaaatggagagagtattgtacattgacacttattaattaaggtgagtggagggcacttaagtggctacaccacagagcatgactatcatgaagcacagccatggcctattgtgtcagtcatcgctgcgactgtgcttaacgtgcttaatgtagatgtggaattatttgatggaattatgatgaaaaaatatcaagccttatgggagacgctgggtaatgataatgagccaagtgttgtagtccattggtgctggctgcctgatttgtccagatgggcttctgcctggagggttagcattagscttttgacaacatctccattaattctcactttacaaagagtgatggcatggaaacccgtctcagttcttgtgcttatgagatgtgtgacagtaaggcatgcctgccatttcagggaatggtagggacaacacttaaaatgtgtgctcctgaaaaacagtcaaatgagaaggcacaaacatcttcagaacttgaaaataattttttaaagtgcctttattaaactcagcatgggagacaatctgaaccgagatcttcatcaatcagattaactactttccaagatgaaaacagacgaggcacagtgtgaggctgagcagatatttatcaaaagccatattaataaccactttcagctttttcttgacagtttcatctgaggttccatgtttaacatttgagtatcatatgtttttgtcagaatgaggctgctaagagcatcaattaattaattcttttgaagtacagttcagaaaggtaataaagtaactgtctctaaggccaaaccagtaatggtaagcaacattctggagctacacaatttgttacttggaagagaaattaaaagcaaaatgtcttcttgaactcacctgagaataaatacagatatattttgcaaagtggcaataaggtatata

SEQ ID NO: 72452 - DNA, 540 bp, Homo sapiens
acaactttcagatcaaggtgtgttaaaataatttattttccctaaaagggtattaattctaagacttattcagattcttagaaatatttgggccaatggcactgtaagtatgttaacaaattacccattttgagtgccttaaagtactttaagtrtatgcactattactcaaaaactatggataaaattttatataataccagtaggatattttcccttatagggattgaatactatgtagctaaaacaattatcagtctatcatctatctatctatctatctatctatctatctatctatctatctatctatcaatcatctttctataaatctactgatctttcatctttctatgatattctgcctaatgttcagcagcccattgtgcatgccacacttactaaaatcttatcataacgtggagttctttctctgataatgaaaaagaaaagtatgctgtccctccttgaaattctatgatttttcactctctattacacacatttactcattcaatcatttattaatctttcatattc

SEQ ID NO: 72453 - DNA, 1363 bp, Homo sapiens
  misc_feature (1)...(1363): n = A,T,C or G
ctgattctagagaacacagcttctagggagctcaatataaatgacagttattgctagaaattgtcccataaagcagactctaaagatttaattctggagttgaatcagaccccagcttggtagtaaggatgaccccaaacctagtggtaagtagagtatttatagtttcttgaatgttctaacagtacaattgctaaagtgttggagatgccrtagcttttacagtgtctttggcatttgagagaagtaggggaaataataagattatggaacgtggaatttggtgttagttgttgtgtgccttttggttactcaggagaaaaaaaaatgactaatcattaatttaaaactaagtgcaaaagtcagaggttatttctggaagtctttaaagagacttttctcacttgcagcttgggagcatgttgagccggtgaaccataggccttagttgtgacaagagcaaaacttcagaaaagcctaaattcatgcctaggtaagactctggatgccataataaggcagatgtgcttcagagagtgggagttaagccatgcagattcagtggcttgccacatatacgatgcttttagggatccagtgggtctggtgcatactcgaacatccctttcaaggtaaagggcaaagntatggcatcttttgtatactaccattaaaaaagaagtaaaacacagcacatacaacacttgggaatactacaatgaatgatttagcaagtgctgtggaaagttccccgttttcagtgaggccctgagcaagaaagggcatgttcaggccatatagcacaagctgtcctaccacatggcttatgtggcccaacagatcctatagttgcataaaagttatctctaggagataaaggttttgtgtggagtctctgacaagccccaacagaagggtttcataacaggctgctgagattgtggagcaaggccatgccatctgcagcagagcatgtgatttaaaatgcagttgcatcaagacatgagacaaaagctgttcgccaagaactggacgctggcagtccaagtaataaactacagcagccccaacagcaattatttataaaatagaagtgttacagaatggatcacccttaaaatatccaaagggcatatgtaagctggatgaacaaatattccagacttctttgtcaccagcacagtctcacctgacaccactcaatcagctcacacttgtaacctcatgggagaatccttatgagcagctaatagaggaagaaaacaacacaggcttggtccatggattgttcatctcagtatgttggtgtggacaatggactgctgttgtaatatagccccacttggtaagtcctggaagacag

SEQ ID NO: 72454 - DNA, 603 bp, Homo sapiens
gaataacagatgacctataattgcacatacaaaagataatgcaatattttaaatgctataataatatggacaaattcctgtgggatttcaggrtagaaagtgataaatgccagctagagagacttgggtggtgggaggctaatgaaaaaacagaagtctttaaaatggggcttgaataataagtagaagtttgacaggttgagagcaaggagttattctcattagtataattagtatataccaggaagagaaaactcaaatgccttaaggaaccaagtagccagcgttcacgagagaggcaggttgggtaggatctgtggggaacctggtgagcctgagctccacctaaatgggagcagccactccttcttgccagttgttgctttgtgagactggtgagttcaggtacccagaatgaccaagtttctaagggaaccctgaaatctgaactgttctgtaaaatctctacacatttttggcaactaattaagagattttttgctttcctcatgcttgtgacttctactttattattgtaccttaaataaacctacctctctccatttagcaggtaatccactcttcacttttgggaacaataga

SEQ ID NO: 72455 - DNA, 512 bp, Homo sapiens
tgcatgaattgataacagattctgattttcttacagatattcctgaaagaggatagagcttggtgttgagaataaactgggcagtaatggtgatgaggttacatcatggccttactaggaaatgtttttgcttttttttttttttttaactaaaaacatagattttttttttttagttcatactgtgccakatgttggaaacacagtcgtaaccaaagataatttagatgttcattaaaaaatatttaaaagacgaagacaattttaattactcataattaacattattttcagaaaaatggctaaaaatcttataaacttccttccagtccatttttgcatatgtaatacttttttttttttttgatactgagtcttgctctgtcgcccaggctggagtgcagtggcttgacgtcagctcattgcaacctctgcctcccaggttcaagcgattcttgcgcctcaacctcccaagtagctgggactacaggtgtacgccaccatgcctggtt

SEQ ID NO: 72456 - DNA, 641 bp, Homo sapiens
cctacacagggcccttcctctagggttggcagagtttgggaaaagcaaaggccttctagggccctgggctggaatgctggctggggtatggctggcaggctttgtggttgggactggttgggagcagcagctctgctctgctcagcctgcaggtcagcactggaaggcccaagttgggcaggggccccaggacaggagggagggagccgctactcaatgctttcctgatatcctcttactgcctcagttacctcccaattccctactcataaaaatctagccatcctgcagccctattcattctacatgtccagatgagaaaagctgataaccagaaaatcgactcctggggtaggtggagggtggttctcctatgaagtaatccatcttccacacagctggaattctaaaacatagstgtggtcgcaggcctccctcaagtcaaacatttcaatggctttctgtgtgctgactcccaagtctggctgcttactaaaagcacctgaggtgcttgataaaatgaagattcctacacccttctcagatagactgactcagaatatctgggaatagggcctgggaatctgtatggctaaaagcccctaaaggggaatctgatccaaagaccagagctggagaag

SEQ ID NO: 72457 - DNA, 1097 bp, Homo sapiens
gggccaggaaaggaaggaaaacctggtaggatgacatcagtgggaaacttgagtttgaatctctatttgaccacagcacagctaggtgatctttgacaattacataaactctcagagactccatttcttcatctaaaaaatagagataataatatctaccttggagggattagaccacataccaggtgcccastagttgctaccattatcttgtataccagatactaatattttattgataatttattttaaattattttattgaaggccttaattgaggctgttcttgcaaaggatgtgatgagataagtagaaatgaactcagagaagatgaattcaaaatcctcgatgggagcatccaagtacttcctggtttctggtgagtatagtgcccttacctgcctgttttctcatctataaagtgggatagccatcatgcctgtgtcttggagttgtcgtgaggttgctatgtgtaaagtgcctagagcagtgcctggcacatgggaggtaccgtatgagggttctcactggggaagctggggggcagggggatccctactctacacagtccttaccaggttccaagtgttttacatgctttatctggttcctcttcatctcattcctgacagataattgatcctttgggtcacacaccttttctctagtcgggcagcacacggttcccaaggagtttccagggaggtacaggcagaacctctctgttggccagtgaggacagggcttgaacagccaaaaggagtcaaatggatagagaagctggcaatctgccttcagcagtaaagtatatggctaaactcgagatattcccatagacagcgcagaacaagtctcctccaggtcctgatgggagaaggccgtgggagaacacaagagcaaattggatctgacagaactggcatttggtagtaaatctaccaggaagtgagcttcctgagagcaggaccttagttagttaatgctcaataaacatttattgagcaaattcaataaacattgactgagtaaatgtacttcaattcctcgattccatatttattgagtgcctaccatgtgtatgtgaataatcatccctt

SEQ ID NO: 72458 - DNA, 1097 bp, Homo sapiens
gggccaggaaaggaaggaaaacctggtaggatgacatcagtgggaaacttgagtttgaatctctatttgaccacagcacagctaggtgatctttgacaattacataaactctcagagactccatttcttcatctaaaaaatagagataataatatctaccttggagggattagaccacataccaggtgcccagtagttgctaccattatcttgtataccagatactaatattttattgataatttattttaaattattttattgaaggccttaattgaggctgttcttgcaaaggatgtgatgagataagtagaaatgaactcagagaagatgaattcaaaatcctcgatgggagcatccaagtacttcctggtttctggtgagtatagtgcccttacctgcctgttttctcatctataaagtgggatagccatcatgcctgtgtcttggagttgtcgtgaggttgctatgtgtaaagtgcctagagcagtgcctggcacatgggaggtaccgtatgagggttctcactggggaagctggggggcagggggatccctactctacacagtccttaccaggttccaagtgttttacatgctttatctggttcctcttcatctcattcctgacagataattgatcctttgggtcayacaccttttctctagtcgggcagcacacggttcccaaggagtttccagggaggtacaggcagaacctctctgttggccagtgaggacagggcttgaacagccaaaaggagtcaaatggatagagaagctggcaatctgccttcagcagtaaagtatatggctaaactcgagatattcccatagacagcgcagaacaagtctcctccaggtcctgatgggagaaggccgtgggagaacacaagagcaaattggatctgacagaactggcatttggtagtaaatctaccaggaagtgagcttcctgagagcaggaccttagttagttaatgctcaataaacatttattgagcaaattcaataaacattgactgagtaaatgtacttcaattcctcgattccatatttattgagtgcctaccatgtgtatgtgaataatcatccctt

SEQ ID NO: 72459 - DNA, 1361 bp, Homo sapiens
catttcctggcttcacaattttgtccaggccagagtaatagagctccattttactcgggctaactttagcagcctacatatgaacacaagggacttgatttttttattttaaaaaagggattccactgattataccaattgagcatctcaatgatactgtaagggagcaaaggcacatatactcattagctgcatttcacaggtcccaaaccacagtgaatgtctgctgtcttgtctacccagagcagaattcctctactctgcttcattgggaaatcttcccgaatgggagttgccatatttgttgcccaggcagctccagggctgggcagtrgagctctcctggaattttacaatgggggactagccagagcagccctcacttgcttttgggtggtaagtgggaggatgtctaggagtgctgcctgcagtcatgttgtgatggttgaatttatggttcaacttgaccaggctaagggctgcccagatggctggtaacatattgcagggtgtgtctgtgagggtgtctctggaagagattatcatttgaattggtggagtgagtaaagaagatcaccaatgcagtgggcgtcatcctatccattggggatccaaatagaacgaaaggcagagaaagactggattctcttgctctcttcttgagctgggacagccgtcttctcctgccctcagacactggtactcctggttctcaggccttcagactcagactgaaacttataatgctggcctcctaccccaacctcacatccaggcctttggactcagcctgaaccaccagctttcctggttctccagcttgcaggtagcagatcatgggactttggcctccataattgtgtgagccaattcctgaaataaatctcctcttcatatatctctatatatcctattggctctgcttctctgagaaccctgactaacgcacatgtgcaggaagcctgtctgcaagtaggaagcacaggcactggcagagtaatgaagagatggtcctgtcctccaaccagaagagagccccctgcacttggcccaatgccttagagggtctgctctagcttctcagggaggagtctgcagggccaaggggatgtgctcccctgaggtctgtgtccctctcccctttgagtccccgaaattctgtgcccaaatggccctgggcctcttccagaggctgcttgtgtgtcttctctaggtccatcctgctgagggcaggcaatgatgcaggtgcgcacaccccaaggatggccatgggccagctgtttgggggcagctatttggggagtccattgtcatgggggcgagaaaagaagttggatgtgcaggttggggtgtccacatcc

SEQ ID NO: 72460 - DNA, 675 bp, Homo sapiens
tacaattaagtagctttaagttatatttatacacacatatacttatatatgtatgcatatacacatacacacatatacatatatatgtatgcatatacacatacacatacacacatacgtatatatgtatgcatacacacacacacatacacattagatatattaggccccaaaattgtgtcctatgtcaaacaatatattccaagctttgattcagaaaacttggccagtctaacattagcaaaagtgcgggtatgtgaaatacatagaatttggtaaaggttgtatgttttttaaagtaagtaagaggaaaatgtcaatttgagactctcaactagttcaagctgtaagtcactagaagacagcggctccaaatagctgctcggtagcctgtgcaaaatgagtcaattttctaaattaggtctgccgaggccaatggaggtcatactgtgattaaaatgggctgtgatgcctagtcacacaggtggagccagctgtgtgggcaactgtcaggggcaggatttccagcmccacacaatccaaaagaaaataaaaaatagacaatagcttattttctcagaaaatcttgattccatgggccatgaataattcccatcaaaagcataccccaaaactagccctaaatctctgcaaaccacccacatgagattaatt

SEQ ID NO: 72461 - DNA, 984 bp, Homo sapiens
ttcttgtctggaatgtaaaactgatttgtcttctaaacataaaaacagtatcaaatatagaaaagcaccagcatatgttccctctaccaggctccttcttgtcccactcttcaaattctttttctccaacctcatccaaaaacctgaataaaaaggaaagcagctctcattatttatcaactatgagcaaggcaagcaaaatgtaggtgatttacatacattattccctttartaataacaatcagtccattaagcaagcattatcttcatgttactaatgattcatataaggtttgggaaaattgaatcatttgaaaacagacatacagctagtaaaagttggacccatttttttaaccttgtcttgtatgatttcaacaggcagaatgaagacaacagtagtcagctctttatgatcagatctagtccaatggagactaaactggattctgatgtcttaagtcctggtcctctctgaactcttccctcctccatatggcatcctccagatggttgggagcttgagagagtgatctgtggcaatcagtttttctctcttcccaacaatgcaggttcatgtattacttctccataatcccctggactccaagagaactgccttctgtaggcacaaattaaaccttctctataacagcatgaggaagctaagcttaaaattctaaaaatgagctgcagaaaaagtatatttaatacaggaataaggttccagattgtgtcctgtttacaaaggcacatattgtgctaatagtaaaaccaagtgagttctacttttataatggtagcctaaaatgaataccacccacccacacccccagtctacccacactcatggtccatcagagcaattaaatcttaaattcaccttgctctgaactacacagacaaatggaattttgtgcacatatttgtgtggtttgtttaccatcttctccaaactgctttaccaattgcaatgaaagaac

SEQ ID NO: 72462 - DNA, 578 bp, Homo sapiens
aggatacaacaaaaagttggcagtgtataactcaggagaggaacctgcacaaccaggcgggtactctgatattgaacctacagactccagaaatgtcagaaataagttcctgttgtttataagccacccagtttatactattttgttatagcagcccaaactaagatcattacaattgcaaaacatttatgaaatagcttactgagttgtgttttgtaaattttgttcaagcaaagcactaaaatatagtttytaacctccaaaaagtgacttttttttataccagagaagaaacagaatttagattaaagggtccactatgtctttttaaaaaatcatataggtgcttcctatctctgatttaagtttatgtacttattataaataagaatagtggaagctcctgtttatatctgtttaagatttgcagccaatatctacaaagtaccaaattgacaacactgataagatgatgggggccaatcatcttgttgaaatgaagagaaagagatggctaaagatttttcatagaaattactccacccacatacaacatctaaaaaagttacatttatgca

SEQ ID NO: 72463 - DNA, 2192 bp, Homo sapiens
gctttataaaaacaacaaataggtgaataagacattttatacctatttctaagactgtagaaacctaaggcataatctacactagattgcctgttctaatttacagtagcattgctatgaataaaataagaaaattgataattctaaaacattgtttgattcataattcccctctacacacacaaatgcacacagacacacaaacacacacccacgtgcatgtgtgtgcacagacacctgcctctaaaattggattttgttgaagataaattttaattagtttgccccccaatacacatactctaggtttagcaatatgtgtgataacgatcggtaaggatagcctggggtttttaattgtcatagttaatcaaaaggtgactatatacaggagaacagattagagttggaaagagtagtagaagaaaaaaaagaattgggactagaagagaagaaaaaaatagaaaaccaaaaaagaaggataggccaggtgcgctggctcgcacctgtaatcctagcactttgggaggtcgaggcgggtggatcacgaagtcaggagttcgagaccagcctggccaatattgtgaaaccctgtctatactaaaaatacaaaaattatccgggcatggtggcacatgcctgtagtcccacctacttgggaggctgaggcagaagaatcacttgaaccagggaggcggaggttgcagttagctgagatcgcaccactgtactccagcctgggagacagagcaagactctgtctcaaaaaaaaaaaaaaaaaagaaggataacaatctttattagtagatasgagtgtcagttagtggtctcaattctttcccatactgattgtcagtacatattcaacacataaacacctccagagtaggggcagttcagatttgaggaggaccttaaatagctatatacattatcctaaaggagcttttactttctgaaactgcaggctgctttcttatcaccagagcctgcagttatgcatcaacattaaatgtagaaagtttgctacagctataatcaaaactctggttagtatctacattagctagttgatattaatattagccactcagagctcttttgaaacttaaaattagttggaagagaaacaaaatgacagcatttcttattattgatataacttaagggcccacacagagcctgaattgactttactcaaggattccatatatagaagcctttcaattgctggaaagttagatcacttataactgtgaagtatgattgaatgaccttgtgtgaaaatggcaagattattctgtgatgtagccttcattggaacgttccatccctgccagagaggccacttgttcattacgtgggagaaattgctaaaacaatagtcagtcctgccctcactgatcaaaacatctccagggatcctctatgctgcttgggcccaaaggacccgactctatgtgccttgattaactttctttggccctagttcatcactcagaaatgtctgtctttagcggaatcttagcttgtgactttttttgggtaaagtcaaggtaaataattttggagcccaacatactttagaaattgtaggtcactattccatcaataaaaacataaataaaagaaagcctcattcggaagaataaaccagtatgtcctcaatgtaacagacacaaattagaagagttagaaagatcttgccttttttgaggtctaggtcttcaaatctctctcctcagtatctcaattccttcaaaaaaaaattcaagtactgaatttggaaagattaaagtctagggaagaaagagtaggggaaagcaagaccagtagcttaggagaaggggggagaggagaagaggggccatatcatgattaaagcttccatcatgcaatcaatcaaatgcaggatataaaaggcaaccataatgaaaagtacaaacactcgctgcatacacttagaatctaacacttgtagaaaaaagtaggatataagtcatcacttcaactgtccatttatagatttatagaaactaaggctcaaggctctcaagtgactaatgagctgttttagagtacaagagaagccaagccacaaccagaatttaaaagccaagatctgaaaaccaagcaaatgtatgaaattctcttcttttttcttaaaaagcattcaaagagagaaaaaacta

SEQ ID NO: 72464 - DNA, 726 bp, Homo sapiens
agctaaagaaagcacacacacctcccctcacaccactttccaacgagacagccaaagcctatagaaacgaaaaagtgagtcaagtaatgccacttcatgcattttgtccaatgaggtgactgtctgaaatccatagtttctgatgcccagtgtccccctcatgagatgccccatctccatctgaacttggttggagccagaaactaagactgagattgtagtctcccatcctcattcaagctcgtgagcctcccaaataggaaacactccctgtcccttggccacagaataggcagccacttgatcagaaaagcaagcagccagctagtgcaaatggcaaatccatcagcaccattatccaaatggtaaggttggcagtattgtcgtcacaaattaaaaatgacacatcacaacaattacatggcttctcactgcctgacatgctggttcagcctaattcccagactgtttcagacacccaaacaaattaacacgttttctaatgatataaaattgtgttgctctgtgtgtgtgtatgtatgtgtaaacctccatacaaccacatcatcatcaattaaatatttatcagagttccactgacctgtgacaagcatcagcaattggcccttggagcatcagygttggctattttttaaagccagcttctagcctcggtcagtggaacatgttaaacctcaatgaacagctctcactatcttttgtact

SEQ ID NO: 72465 - DNA, 2014 bp, Homo sapiens
ttcatgcatgttttaacacctagtataagacagcacagcacttgtagacatgatctttgaattattgtatttactctgttttctgatttagtccctttttctttcattttttgccatttagttctctctctaatgatgggtccaatttttctgttgtaattatgtctgatcttgtcaagatacattccatcacagataaaatcactactcatatgtagttaaatggaaaattcctaagacatacaattatattgtgtccccaaaagccttttctgaattatatgtatcttcttttctttctctggactatgtctgtaaatcttttcaaattgacacagatccagatgatttgttttgatccaatgttcccagtgaagcattcaggaacacaagtaatagctatcttttactgggcctttaccaggtgtcagccagtgttctaggcactttactgttttgtaataaaataactggagattttaaatgaaaatgagtcatagagaagtttagtaagtggcccaaagtcacacagtaagtggtgaagctagggttgtagctgaggtattgtggctccaatgtccacattattcaccaaatgctatgctttctctccaaggatatcttggataaataggcacaaattgagtgggaaacttgtagtcataatttactcactctaattatgaaacatctaccactgactgtcattattcatgtaatagccatgagcttggaaattgctatttaattataatataagaaaaatgaaaaaaagtcagcagaatagaataagggagaggtgcactaatagttttgtagatgattgactggaaaggattctcagttcatctaatttaatcacattgttttccagtgagaaaatgaagacagacttgtaaatgcattcagaaaatgactcacattcatgtcatcttacagtgaagttcaaatttctctttgaggtttttttttttttkgggatacgaacactaagtttctatttttgagtactctctgtatctaaataatgttaaaaataaaaccatgtcccactgttctgtacctctttgtacagtgtctattttcttttctctcactatctagttcaccccaagaattcagaaaaaaataatcacagctaatgtggcagttggtgatagtcatcagttagttttcttgagttcaaaattagttggtgaaaatcaggatactgtatgtgtatatgatacaaaattgtggaataggcaagaataagatgcagagatgtgcagatccttacaaggcaaacagagggtcagaccaagtaatcactacagggaataatgtgataaataatattttactatttatacagattaatgtctagtctcttaacatttaatgagatagtcataaagactgaacatctttcgaggcatgaaggtccgaatgtgtaactgtggaatgccacagtactgattgagatatttcagaaggtgctatttttgatgctacacagatcataaagataccacaacactacaaactcaaagcactgaatatatgccaatttatttatttagagtttattaccaccacaggaaagtaactttcttgagaccaataatctgttgtctattcatcatagctgacttctgtgccaagaaatatgttttaaataaggagttatgaaatacatgaatggctgttgggcctttaactcttcttctgtacagaatattcactaaaacttagaggcagaagctgttacctgtaggctcaaactaaaatcttgaggacatgaggaactcaatagagacttaacaaaatgtttatcatgtgtgtaaaccactattgaggatacaaagtgaagatgtgctctgtgacatcatggatgtattcatattcctgttcatgatttcattacaggtcctgttctcccaagttctttactctgatacaagccttagagaaaagtaaatgggactgagtaacaatgttacagaacttttcctcctgggcctcactcaggatc

SEQ ID NO: 72466 - DNA, 793 bp, Homo sapiens
caaggacaggatttagatgctcccacctcaattaagaagtcatcctgtcatgatatctgattgaagttcaggatctcaacttctatatccagactgagtgtggatggggcttcttgggtgcaggtcttattttgcacgttttaaattatggcttttcctatttacagatgtttgaggcagggcatttcttccacatgctcagcacacaatggagacagggaggaataggtaataaaatagatgctcctgttcaaaagggaaagctgtggtgcttccttctgcacaatttatttaaagactttatgaaatatacaagcaccrtattcacaaatatctttaaaactggcccttctcagacttgagctgaaattgtatatgcagtcatataatactcttaagtatcttagaattatgttttctagtttaaggtacttacgagacacaccatcaaatttttctgtagtctttacaagtgtcttaacatccataattttgaaatagcatttattttgatgacctttcttacttttagagtacttagctctttgcagagactggaaaggggaaccagttttatgtttgaaagcaacaatttctggttcttttatgtttcctgcaaattctgtctgaaaatgttacagttaatattttcagtaatttttaaaaaatctatgccttattatatgatacactgctctaagaaacagctgcaattttaaatattctatttggaaattttagccaaatccacctattcacttaagcacattttttattttctaccttcctatag

SEQ ID NO: 72467 - DNA, 793 bp, Homo sapiens
caaggacaggatttagatgctcccacctcaattaagaagtcatcctgtcatgatatctgattgaagttcaggatctcaacttctatatccagactgagtgtggatggggcttcttgggtgcaggtcttattttgcacgttttaaattatggcttttcctatttacagatgtttgaggcagggcatttcttccacatgctcagcacacaatggagacagggaggaataggtaataaaatagatgctcctgttcaaaagggaaagctgtggtgcttccttctgcacaatttatttaaagactttatgaaatatacaagcaccgtattcacaaatatctttaaaactggcccttctcagacttgrgctgaaattgtatatgcagtcatataatactcttaagtatcttagaattatgttttctagtttaaggtacttacgagacacaccatcaaatttttctgtagtctttacaagtgtcttaacatccataattttgaaatagcatttattttgatgacctttcttacttttagagtacttagctctttgcagagactggaaaggggaaccagttttatgtttgaaagcaacaatttctggttcttttatgtttcctgcaaattctgtctgaaaatgttacagttaatattttcagtaatttttaaaaaatctatgccttattatatgatacactgctctaagaaacagctgcaattttaaatattctatttggaaattttagccaaatccacctattcacttaagcacattttttattttctaccttcctatag

SEQ ID NO: 72468 - DNA, 853 bp, Homo sapiens
  misc_feature (1)...(853): n = A,T,C or G
tccacttccacactgggtgttggcattagtagttgtttgaattcagctgtaagggacatagaggattaggttttattctcatatattagttcttcatcttggagtcacaatttaaaccacggtatctttgattatatctgatagttctctagaaataaacatatgtttgtgcatgttttaccacrtaccagtaagacagcacagcgattatagacaggcttttcaaattttagcagtaatacatattacatttgtggtggatgaatttaaaacatttattaggtaggttgaaaatgaccaacatttagtggagcccgttatgtgataaagacgttagctcgttcagttaggtatttatgggactctatctaaggctcttatgacagannnnnnnnnnnnnnnnnnnnnnnnnnnnnnnnnnnnnnnnnnnnnnnnnnnnnnnnnnnnnnnnnnnnnnnnnnnnnnnnnnnnnnnnnnnnnnnnnnnntttacaacattataaaagaggcatattcgcagatatatttgcaactgactcttcttgggtttgagctgacagtctgtgtgtgtgcagcgggataattcccataagagccttagaattatttttgtttaagtggtagggtttatgagacacatttaaaaatctttctgaagtctcaaagaagctttcattgacgactttaagatgacatttattctgacgtttaaagcatgtggcattggctttaatatcagaagctaggtgacattgcttatattgagtctttagatctttggagagactggaaagggaaaccagttttatttttgaaactggcacgttttggctcatttttcttgtacattttgc

SEQ ID NO: 72469 - DNA, 517 bp, Homo sapiens
caaggcagaaggatttttcttagtacagaacaaaatggagtctcctatgtctacttctttctacacagacacagtaacaatctgatctctctttcttttccccacagtcaatgacaytggggccagagaaagggagattgtacacaacaacagtttgaaacatagaatgtacaaaacctcctgtcacagccaacaccaacagaaggatgcaaacctgtcaattcatgatggtcaaatagtgcagtggcttacagatgtccacatagtgatcacaggccatcatcatcagaatgaagatctcagtaccaccaaacaagtgttctataaatagctggcccatgcaagctcggaaggaaatagtctttttatcaatgagtaactctacaatcagtttgggagaaatggtagtggaatatgcagcatctatacatgacagacaggcaagtcagaaatacactggggagcccaaggaagggctggcaataatagtcaccacaatgagcaggttccccactgt

SEQ ID NO: 72470 - DNA, 517 bp, Homo sapiens
caaggcagaaggatttttcttagtacagaacaaaatggagtctcctatgtctacttctttctacacagacacagtaacaatctgatctctctttcttttccccacagtcaatgacattggggccagagaaagggagattgtacacaacaacagtttgaaacatagaatgtacaaaacctcctgtcacagccaacaccaacagaaggatgcaaacctgtcaattcatgatggtcaaatagtgcagtggcttacagatgtccacatagygatcacaggccatcatcatcagaatgaagatctcagtaccaccaaacaagtgttctataaatagctggcccatgcaagctcggaaggaaatagtctttttatcaatgagtaactctacaatcagtttgggagaaatggtagtggaatatgcagcatctatacatgacagacaggcaagtcagaaatacactggggagcccaaggaagggctggcaataatagtcaccacaatgagcaggttccccactgt

SEQ ID NO: 72471 - DNA, 517 bp, Homo sapiens
caaggcagaaggatttttcttagtacagaacaaaatggagtctcctatgtctacttctttctacacagacacagtaacaatctgatctctctttcttttccccacagtcaatgacattggggccagagaaagggagattgtacacaacaacagtttgaaacatagaatgtacaaaacctcctgtcacagccaacaccaacagaaggatgcaaacctgtcaattcatgatggtcaaatagtgcagtggcttacagatgtccacatagtgatcacaggccatcatcatcagaatgaagatctcagtaccaccaaacaagtgttctataaatagctggcccatgcaagctcggaaggaaatagtctttttatcaatgagtaactctacaatcagtttgggagaaatggtagtggaatatgcagcatctatamatgacagacaggcaagtcagaaatacactggggagcccaaggaagggctggcaataatagtcaccacaatgagcaggttccccactgt

SEQ ID NO: 72472 - DNA, 358 bp, Homo sapiens
gtacactaacaccagcatggacctgcttttcattgtgtctgaaatgtgagccacgtagtgtcggcctgctgtgaagttaacattgccaggacgattcttctacagaaataatttcaawttttttcagcatttagtagtgaaagatattaatacattaatggtaatacatttctggtttaatataaattaaggatgttttctagttgtgcatgaatgctggcaacttagtaagttttgacaattgtttaaatatgtaatgttaagcttaggtttaaaaaagtaaagctggtaaactgggtctttgtcatttgctttaaaaaaaaaaaaagaaaataaatgcgaatgtgttggtgcattc

SEQ ID NO: 72473 - DNA, 358 bp, Homo sapiens
gtacactaacaccagcatggacctgcttttcattgtgtctgaaatgtgagccacgtagtgtcggcctgctgtgaagttaacattgccaggacgattcttctacagaaataatttcaaattttttcagyatttagtagtgaaagatattaatacattaatggtaatacatttctggtttaatataaattaaggatgttttctagttgtgcatgaatgctggcaacttagtaagttttgacaattgtttaaatatgtaatgttaagcttaggtttaaaaaagtaaagctggtaaactgggtctttgtcatttgctttaaaaaaaaaaaaagaaaataaatgcgaatgtgttggtgcattc

SEQ ID NO: 72474 - DNA, 358 bp, Homo sapiens
gtacactaacaccagcatggacctgcttttcattgtgtctgaaatgtgagccacgtagtgtcggcctgctgtgaagttaacattgccaggacgattcttctacagaaataatttcaaattttttcagcatttagtagtgaaagatattaatacattaatggtaatacatttctggtttaatataaattaaggatgttttctagttgtgcatgaatgctggcaacttagtaagttttgacaattgtttaaatatgtaatgttaagcttaggtttaaaaaagtaaagctggtaaactgggkctttgtcatttgctttaaaaaaaaaaaaagaaaataaatgcgaatgtgttggtgcattc

SEQ ID NO: 72475 - DNA, 638 bp, Homo sapiens
tccaaccactgtttgaatgacagctgcctgcttgaaaatttatgtaagcaagatatctacttctacttgagtgtgtgtgtgtgtttgtataaatatatatagacacacatawttacatatatacacttgtgtttatagatatatgtgtgtgtgtatatatgtaaacacacacacacacacacacacacacacacacacacacacacacacatatatatatatatatatatatatatatatatatacatatagtctaagtcctttttgtggtgctataagagaatagttgagactgggtaatttaaaagataagaatttatttcttacagttctagtggctgagaagtccaatgttgaggggcgagggctttcttgctgcatcatctgatggcagttggtagaagggcaaaaaagcatacttgtgggagagaaaggatgccaaattcattttttttttttttaattaggaactcactcctgtgacaacttactcctgggacaaagacgttaatccatttctaaggattcctcatgacataattacctcttaaaggccccacctctcaacagcattgcattggggattaagtttccacacctgaactttggggaacacattaaaaccttaatatgtatct

SEQ ID NO: 72476 - DNA, 887 bp, Homo sapiens
tttggcttcttcttatcggtttaatcccttagttttttcaggcatctcctaaaaccttgctactcaaagcgtaggtcactggcaggcagcactggcatcaccagggagtctgcaggagacgtggagtgtcgagcgccacctgcaggtgacttgttacacataaagatttgagaatcagttctctaaacatcaagagctgtttgggctggatatagacttctagattgggaattattttcccgcaggattttgaagacattatcatcatcccaaatcagatagctgataaaaaaatatctgtcactattctatccaagctctttggtgtgatgttccatatttttcttctctcctattgccccattgtttggaagtttcaaaataatattcttatgtccccgtgtgtgtgtgtgtgcatgtgtgtgcacgtgtgtgcttgtctctgtgcatgtgtgtatatgtgtgtgcacgtgtgtatatgtgtgcgcatgtgtgcacgtgtgtgcatgcctgtgtgtgggcatgatttattatgctgagcactcaagagctctggagactcacaagcatccttccattctgagaattttctcacattatttctttggtaatttttgtctgttttatttttcttggactcctagttgaatgttggactctatttatccttagtttatttttattatctttctactattcttcttttaatttgtttcactttctgggagattttcttaattttatatttccaccttttattcttactttagttatatttacaacttctctttctggtttgattatttcatttaacagcactctgcctcttgtgatggattcartattttcgatttgttctgaggaaacactaatcacgatgttttgaa

SEQ ID NO: 72477 - DNA, 695 bp, Homo sapiens
atatactgtcatggagacctctgccctgtgaattctcatcatatcacctaaaagtccagtgtctaaaagaataaacatgacttaagaacctacagtgtgtcaaactctaatctaggaaacttgcatatgtttcactgaatacttctattttcatacagagattgacactcttattgtcttcatattggtgaaaaaactgagattcacagctgtttaggtgactctctcaaggtcacaaagccagtgataggatgggaagtgactgtgggactttggaaagtaaagtgtgtggctagaacaaatagcaagaaggcagagagaactggaaggcttccaagaatcctaaataactttcaattgcagttggagctctcaatcaatgtgtgactcttccgatagatacagttttgcacattttgtmatgtatgcaacatttgtgtgggttttattttcttcaatagaaaacttttcttggagaaaggagctttatctcccaggggacatcattacacttctcagttttgtcaacctatgtaaggctaatggcccaaatgtttcacaaagacttgctgatggatatttttgtcatctgcagaaaagtgcccgaaaatgaagtcaatccataagaaaacaaggtcaaaaaatgggaaggggtagattctcaatgacattgtcttttcactttttgagcatct

SEQ ID NO: 72478 - DNA, 488 bp, Homo sapiens
acacacacacacacagcagcctttctgtgagttttgttgccctggagggggatggggtatgtacacagcagaagcatgtatggttatatttgcatggaggtgaattccagaaagagatgctggggaaaaggtgtttcatatcaggacattttgaactgtaagtcattattttctccactttgatgcccaacccctgggaaacttgtccttgtgtatagcccctctggatgtacaagtaaaagaaaaatgtctctatttgggaccatttgttcctccagaggaagcatttttttggtattggctgttgctgcgagaagcytttgttcctatggtggccccaggccggtggatatgaattaatgcatctcatataaccctctgtggtagaggccttttgactgaagctaaaggaagtgggagccaggaaggcggactgtggtctaatattgcttgtgatccaaccattcctgtgggttcctttgctttga

SEQ ID NO: 72479 - DNA, 1145 bp, Homo sapiens
tatagtaaaaaaaaaaaaaaaagaaaaaaagaaaaaagttattttaatacctggatagtgtattctttccagagcagcttgccattctccaaaccagtgacttgcgttagcctccaatgcttgcaaaacattgatttaaaatgacgtttttcatgttaacacagtatcagtgtggaaggagtaaacttataggccrtttttataatttgagattatcttatttaagtaagaaacttataattatctcatttatcctaggagaaaaaatagcttccccccgccccacccttgtctggttattatgataaattattttgctttaaataagaaaaatgaacgtttatagaaaatatctaaaaggagatagggccaggcacggtggctcacgcctgtaatcccagcactttgggaggccaaggcgggcgaatcacgaggtcaggaggtcgagaccatcctggctaacatggtggaaccccgtctctactaaaaatacaaaaaattagctgggcatggtggcgggtgcctgtagtcccagctactcaggaggctgaggcaggagaatggggtgtacccaggaggcggagcttcctgggtagtgagccaatatcgtgccactgcactccagcctgggcagcagagtgagactccgtctcaaaaaaaaaaaaaaaaaaaaaaagatataaaaggagatgaatctttgggaggccaaggcaggtggatcacttgaggtctggagttccagaccagcctgaccaatatgacgaaaccccgtctctactaaaaatacaaaaattagccgggtgtggtggcatgcgcctgtaatcccagctgcagtgagccaagatcgcgccattgcactccagcttccagcctgggaaattagagcaaaactcggtcacaaaaaaaaaggagataaataatgctccaggaaaaagcaaatagaattactaaagggaagaagaggcaggaaaagaaagaaatttggaaacagactaaaagattcacttgtcctcaagtgaaagatctttcatcaagaaaaatgaagaattatcagaatttagttatataaaacacacagggttaagggaaatgctcatgtttaccaatcctagaacattagaaatactttaaaagaaatactgttg

SEQ ID NO: 72480 - DNA, 1145 bp, Homo sapiens
tatagtaaaaaaaaaaaaaaaagaaaaaaagaaaaaagttattttaatacctggatagtgtattctttccagagcagcttgccattctccaaaccagtgacttgcgttagcctccaatgcttgcaaaacattgatttaaaatgacgtttttcatgttaacacagtatcagtgtggaaggagtaaacttataggccgtttttataatttgagattatcttatttaagtaagaaacttataattatctcatttatcctaggagaaaaaatagcttccccccgccccacccttgtctggttattatgataaattattttgctttaaataagaaaaatgaacgtttatagaaaatatctaaaaggagatagggccaggcacggtggctcacgcctgtaatcccagcactttgggaggccaaggcgggcgaatcacgaggtcaggaggtcgagaccatcctggctaacatggtggaaccccgtctctactaaaaatacaaaaaattagctgggcatggtggcgggtgcctgtagtcccagctactcaggaggctgaggcaggagaatggggtgtacccaggaggcggagcttcctgggtagtgagccaatatcgtgccactgcactccagcctgggcagcagagtgagactccgtctcaaaaaaaaaaaaaaaaaaaaaaagatataaaaggagatgaatctttgggaggccaaggcaggtggatcacttgaggtctggagttccagaccagcctgaccaatatgacgaaaccccgtctctactaaaaatacaaaaattagccrggtgtggtggcatgcgcctgtaatcccagctgcagtgagccaagatcgcgccattgcactccagcttccagcctgggaaattagagcaaaactcggtcacaaaaaaaaaggagataaataatgctccaggaaaaagcaaatagaattactaaagggaagaagaggcaggaaaagaaagaaatttggaaacagactaaaagattcacttgtcctcaagtgaaagatctttcatcaagaaaaatgaagaattatcagaatttagttatataaaacacacagggttaagggaaatgctcatgtttaccaatcctagaacattagaaatactttaaaagaaatactgttg

SEQ ID NO: 72481 - DNA, 1132 bp, Homo sapiens
tgcacatgcgtcgagatgctccttgagaggttgtagaaagtccactttggccactggcmtcaccatagcatatgagacagtatggtgagcctgaaagagcactgttcttagagtcaaaaacattaagttctctttctagaccctcatttagcaagcttcatgactctgggcgcatattcagtggttcttcaccagccgtgtgtagaattgtccaaataatccaccagccctgatgtctcccatagattcaggcctggagtggcactttggcatctgtatttcttagggctctgcaggagattctgatgcacaccctggggtgagatctgaatttgagactagccccctcagagaagtcaggatagtgaagtggaaaagagcgagtggtcattgccacacagaccagggtttggatttcagctctgtccacgtacagcagcatggtcttaggcaagctgctaaaccctgcctctgcttcctcatctgcaccacaggcaccatagcaatgacctcacagggctgctctcagcactaaatgcgatcatgtggatgaggcatgtggcaaatgcctggcatgtgagtacaccgtaaatgttacatcttgggtgtgagtatgtctgtgtgtgttttctgctgtactgttatatatggatagaatcctctcaagaaaagtccaaggcagaactcaatcaagaaatgagatggcagtgctctattatattagtgtaatttggtaataaggaaaccaattaattcattctttgttattaatagcaaggaacgtatgcagagaaaggtcctatggggcaagagagagatgccaagagtgcaccccttccttcatgacagtagttcttaaacttcaatgtactcaggattacccagggagcttgttaagtgtgcagaatcatgggccagagcatcagagagtctgattttgcagatctggggtgaggtccaagaattcatatctttgaaaaatatgaccaagtgagtgtgcataagatggtctgtagccttcactctgacaaagactggtctagattagaagatgaaattggaagactgagggaaggagggaactgggtgacttggagcaagcaggaatgggatcctagaagatgggagagga

SEQ ID NO: 72482 - DNA, 1132 bp, Homo sapiens
tgcacatgcgtcgagatgctccttgagaggttgtagaaagtccactttggccactggcatcaccatagcatatgagacagtatggtgagcctgaaagagcactgttcttagagtcaaaaacattaagttctctttctagaccctcatttagcaagcttcatgactctgggcgcatattcagtggttcttcaccagccgtgtgtagaattgtccaaataatccaccagccctgatgtctcccatagattcaggcctggartggcactttggcatctgtatttcttagggctctgcaggagattctgatgcacaccctggggtgagatctgaatttgagactagccccctcagagaagtcaggatagtgaagtggaaaagagcgagtggtcattgccacacagaccagggtttggatttcagctctgtccacgtacagcagcatggtcttaggcaagctgctaaaccctgcctctgcttcctcatctgcaccacaggcaccatagcaatgacctcacagggctgctctcagcactaaatgcgatcatgtggatgaggcatgtggcaaatgcctggcatgtgagtacaccgtaaatgttacatcttgggtgtgagtatgtctgtgtgtgttttctgctgtactgttatatatggatagaatcctctcaagaaaagtccaaggcagaactcaatcaagaaatgagatggcagtgctctattatattagtgtaatttggtaataaggaaaccaattaattcattctttgttattaatagcaaggaacgtatgcagagaaaggtcctatggggcaagagagagatgccaagagtgcaccccttccttcatgacagtagttcttaaacttcaatgtactcaggattacccagggagcttgttaagtgtgcagaatcatgggccagagcatcagagagtctgattttgcagatctggggtgaggtccaagaattcatatctttgaaaaatatgaccaagtgagtgtgcataagatggtctgtagccttcactctgacaaagactggtctagattagaagatgaaattggaagactgagggaaggagggaactgggtgacttggagcaagcaggaatgggatcctagaagatgggagagga

SEQ ID NO: 72483 - DNA, 1132 bp, Homo sapiens
tgcacatgcgtcgagatgctccttgagaggttgtagaaagtccactttggccactggcatcaccatagcatatgagacagtatggtgagcctgaaagagcactgttcttagagtcaaaaacattaagttctctttctagaccctcatttagcaagcttcatgactctgggcgcatattcagtggttcttcaccagccgtgtgtagaattgtccaaataatccaccagccctgatgtctcccatagattcaggcctggagtggcactttggcatctgtatttcttagggctctgcaggagattctgatgcacaccctggggtgagatctgaatttgagactagccccctcagagaagtcaggatagtgaagtggaaaagagcgagtggtcattgccacacagaccagggtttggatttcagctctgtccacgtacagcagcatggtcttaggcaagctgctaaaccctgcctctgcttcctcatctgcaccacaggcaccatagcaatgacctcacagggctgctctcagcactaaatgcgatcatgtggatgaggcatgtggcaaatgcctggcatgtgagtacaccgtaaatgttacatcttgggtgtgagtatgtctgtgtgtgttttctgctgtactgttatatatggatagaatcctctcaagaaaagtccaaggcagaactcaatcaagaaatgagatggcagtgctctattatattagtgtaatttggtaataaggaaaccaattaattcattctttgttattaatagcaaggaacgtrtgcagagaaaggtcctatggggcaagagagagatgccaagagtgcaccccttccttcatgacagtagttcttaaacttcaatgtactcaggattacccagggagcttgttaagtgtgcagaatcatgggccagagcatcagagagtctgattttgcagatctggggtgaggtccaagaattcatatctttgaaaaatatgaccaagtgagtgtgcataagatggtctgtagccttcactctgacaaagactggtctagattagaagatgaaattggaagactgagggaaggagggaactgggtgacttggagcaagcaggaatgggatcctagaagatgggagagga

SEQ ID NO: 72484 - DNA, 1132 bp, Homo sapiens
tgcacatgcgtcgagatgctccttgagaggttgtagaaagtccactttggccactggcatcaccatagcatatgagacagtatggtgagcctgaaagagcactgttcttagagtcaaaaacattaagttctctttctagaccctcatttagcaagcttcatgactctgggcgcatattcagtggttcttcaccagccgtgtgtagaattgtccaaataatccaccagccctgatgtctcccatagattcaggcctggagtggcactttggcatctgtatttcttagggctctgcaggagattctgatgcacaccctggggtgagatctgaatttgagactagccccctcagagaagtcaggatagtgaagtggaaaagagcgagtggtcattgccacacagaccagggtttggatttcagctctgtccacgtacagcagcatggtcttaggcaagctgctaaaccctgcctctgcttcctcatctgcaccacaggcaccatagcaatgacctcacagggctgctctcagcactaaatgcgatcatgtggatgaggcatgtggcaaatgcctggcatgtgagtacaccgtaaatgttacatcttgggtgtgagtatgtctgtgtgtgttttctgctgtactgttatatatggatagaatcctctcaagaaaagtccaaggcagaactcaatcaagaaatgagatggcagtgctctattatattagtgtaatttggtaataaggaaaccaattaattcattctttgttattaatagcaaggaacgtatgcagagaaaggtcctatggggcaagagagagatgccaagagtgcaccccttccttcatgacagtagttcttaaacttcaatgtactcagsattacccagggagcttgttaagtgtgcagaatcatgggccagagcatcagagagtctgattttgcagatctggggtgaggtccaagaattcatatctttgaaaaatatgaccaagtgagtgtgcataagatggtctgtagccttcactctgacaaagactggtctagattagaagatgaaattggaagactgagggaaggagggaactgggtgacttggagcaagcaggaatgggatcctagaagatgggagagga

SEQ ID NO: 72485 - DNA, 880 bp, Homo sapiens
atggaaacttgttttataatttgaattattaccaatcctgactcatttaagagcctgaggaggatctgagtgaaaaactgaggctgaatagaccagcttagccatccaccttagccctcatagcaaagacagggcagatggcagccttgacagatggcatctgtttctaaaaaccatttctggcaggatgagtcataaagcataataggatatgctttttctttaaaccttgaaggatgagtatttagatacaccagaactttgaggacgttgagtgacagcgtaagaaagctgtactgcatgctgtgggtaatggtggaccatagaacatcctggagcaaggagtgaccttatttcataataactcggatgcacagtgattaatccaagatattaaccaattaaatraagcctattagaaaaaaatgccacttgtccccctacaatcccagctaacagaagccttcattcagaatctacccagggtcaggggctttgaggagtgcttggaggaatcttggtttattacaagtgtcctcgggaccatcctcattccagggctgctccggtctgaagccagcagagctgacatgcagggtgggttcttgtggggtcctgggtcaaggcagcctccatcccagcccctctgcagaggtgctgaggatgtgggccaagggtcagctgtgagggctgcacagttggatatttctctgaataaactgtgatatgcagtgaggaatcaaggcttcccccagaccctagcatccttgattgtctaagcttaggtttttggacaaagaactattggttttcccctcttttcttccccccactccacgcccaccactgcccttttctcccttagcttcccaagtaacac

SEQ ID NO: 72486 - DNA, 879 bp, Homo sapiens
atttctctagcataagttaatggtccagaggtaggttcatgacacgaactgaccaaaatagactttaaaaatgactcttgggctgggtgcaatggctcatacctataattccagcactatggaatgccgatgcaggcagatcactttgtgccaagagttcgagaccagcctggccaatgtggcaaaaccctgtctgtactaaaaatacaaaaattagccagacgtggtggtacgtgtctgtaatctcagctactcgagaggctgagtcaggagaatcgcttgaagccaggagtgggaggttgcagtgagccaagatcacgtcactgctatactccagcttgggcgacagagtgagactgtctcaaaaaaaaaaaaaaaaagaaagaaagaaaaaaacaaaaagaaaaaaaagactcttattccatcatagtagcattctcttctctttctctctctctctctctctctctctcaacaatgaagcatgtaaccttactgcactattagtaatggtatcatctgattaccgcaatgaaattatgcttatgatggcattcaatctatatatggtagactaaaggagcagaaaacaacctgggtttttgatgccatctctgtgctgctgaatcaaccagctttaaagctcaccctacttctgaacttctagctatgtaagatagttgcatcattgcttaagatagattgagaaaatsttctctaacttatgtttaaaagtgtccaaactaatacaagaggggaaagaagctctgacttctgagaatccaggtctggctctaacttacatgatttactcagacaaagtccctaccttctgtctttagaaggcagtataccaatcacctgtgaggctaattgagc

SEQ ID NO: 72487 - DNA, 879 bp, Homo sapiens
atttctctagcataagttaatggtccagaggtaggttcatgacacgaactgaccaaaatagactttaaaaatgactcttgggctgggtgcaatggctcatacctataattccagcactatggaatgccgatgcaggcagatcactttgtgccaagagttcgagaccagcctggccaatgtggcaaaaccctgtctgtactaaaaatacaaaaattagccagacgtggtggtacgtgtctgtaatctcagctactcgagaggctgagtcaggagaatcgcttgaagccaggagtgggaggttgcagtgagccaagatcacgtcactgctatactccagcttgggcgacagagtgagactgtctcaaaaaaaaaaaaaaaaagaaagaaagaaaaaaacaaaaagaaaaaaaagactcttattccatcatagtagcattctcttctctttctctctctctctctctctctctctcaacaatgaagcatgtaaccttactgcactattagtaatggtatcatctgattaccgcaatgaaattatgcttatgatggcattcaatctatatatggtagactaaaggagcagaaaacaacctgggtttttgatgccatctctgtgctgctgaatcaaccagctttaaagctcaccctacttctgaacttctagctatgtaagatagttgcatcattgcttaagatagattgagaaaatgttctctaacttatgtttaaaagtgtccaaactaatacaagaggggaaagaagctctgacttctgagaatccaggtctggctctaacttacatgatttactcagacaaagtccctaccttctgtctttagaaggcagtwtaccaatcacctgtgaggctaattgagc

SEQ ID NO: 72488 - DNA, 2405 bp, Homo sapiens
tgcatagcctagggaagtgtttctcaatctaatccagtcagtttttcaattcctgggaactcctctcaaatgttaatttatagtacactcttattcattcccagtactgtcaaaaattttatatatcctaagtattttttttaaagaaaaatctggagaagacagcatgccactacattgcctcagaattttcagtgatctcttgtaacagactttgtatgtgtttccatttttttacttcctccaactgacagtcactacatataatttccccacctgtcttgcctttaagtttaaaaatctaataccatatattaagagtaaatagaagattattgagagagtcccttacttatcaaattaaaatcctaattctcagtgatggagcgcaatctctgaaaatagtaaacattgtagtgtatgcacaaaccagtccctttgcacagaatcctctgcctatctgcagactagtcggcaacagagaacaaaaaagtgcagaactgtagacattttttaacctgaaaataaaatctcttttaagaaacatttaacttttttttttttatcttgcacagaccaacttcaagccatctccttcaagaaatacttcccttctgattcttccttcctgtgcttagcaacaaggtcagacagtttaacttgaaaaagcaaaattgagtaaagtacttgttaatagtatgttgctatgttggatttggaatacactgagacattttatcttgtttttttaaaaataaaattctaaaatattattttattactttttcagataaaatgattaaaatcattaaaattgaattgtgttctttgttcctcaaactctggaatcaaccaataaaataaggataaagtagtgtcttcttcagagtgctactgtgaagactaagacaagatatgtaatgtacttaaataaaaataaaactatcaatattactgatgagaagtgctaactataagcacagaaccacaaatttatttgtgtatactacagagaattataaagaaaaaggaaagcaataagtatagtttttgacccaataattataattttttaacattgtggctgtattgttttttctctattccacaaaatacaaagcatgatattcaacccagaggaaaaacactgttgtcttgataggtacaatggtaatttcaaacctgcttcgttagactataaattcttaaaaagtagagattacacctagttaattctgcctataaccaagtccaaaaccatgcatatgggcaactcaatgagccacgttctatcctgattggacattacctaggtaatcccttagttatattttcagttcctacttttcagttgaattttgcaatttgtgaaattgatgtgtccactatgcccagatgattaaatattcatccaatatttattgagcacattctaggagtcagccaatgtggtaattgcctgggagacaatcccaagtcaccacttctatcttcaaagatctcacagcctagcagagggaatagactattttaaaaaatcacaactcagtatgacaagtgccgtggatactatggaataaaatttgggaatcccctagctgaactgatggggtcatggttaacctgaaaagcaagtaggagttagctatggaatgaggagtcccacctgcagccaaccttatactgcagaggggttgatgccttgacactggcaacagacgcttgggtttggattccccctcagccaattctgagcttagtgagctttaacaaatcccttaaccccttggagatttttctgcaaaatgaggattataatagtttctaattaatggagtcgtggggaccaaattggttaagtagagcttttaccaggccctgctacacagcaagccctagctcagcgtgaacttttattatcattattattggtttgctgctttctcccggtggccttccctgaagtttccaatcaagttataagtttccttgtatgtgctcacatctcaggcacagtaggacagcagcatcaaggccattcagcaaaggttccgatcagagctcataagatctcacttaagccttatctgaataatgtgctagaggaactttcctgttgaaaaaggaaggagcttacctcttcagagtgccactagatgattagaggcaaaatgtcacgttgatgtaaatatgagaatttagttatggaaggtgggagtgtttgcttaaaatgacastaaagctgaatttttatgaatggctttttattatacaagacatctatgttcagtgaagaaacttagaaagtatagacaatcaataatttatacaaattataatcagctgtaatcccactgcccattaaaaaaagtactatggcattttgatgcaaatgtttctacaca

SEQ ID NO: 72489 - DNA, 537 bp, Homo sapiens
acttgagcagaatttctagggcccgtgtgaattctctccagcccagagaatgacttaaagaaagaaaaaataaaagccctgtaatttacatctgttgttttagtcctcacctgttgttttagtcctcacctkatggaattgtcaatcacatattccttcctccctcaccataacagaaggcatgtgacgagactgtctaatcaaagtacctcatgcttcaagattggcccagaggcacattcatgactcaagtatagccaataacagtcatttatcaaaagtttatagggagctgagagagaatttctctcctgcagagagcatatgcccatggaccatgtaaaacacagttctgtcaggtggcatcttagtcattacatagaaaaagcctctcaagatactcaagttctctcttttagttacctctctttgaagtaaatttattttgcagctaaaagaattcccacctaaaactcctaggatcatttgattcctaaaaagatcatctgagtctaaagaaaaggtgaatgtgaaact

SEQ ID NO: 72490 - DNA, 585 bp, Homo sapiens
catccttctcttttggccttgttctcactttaacctgggtgtctaaccccagaacacccaagccaaggtggagagatttggggactggaatttctctttaaaatgtgtgtgtgttttacttttgcagcaactctgtgccattccggagatcgctaacagtgaggaggtgcaggagttccttgctctgaacacagatgctcgtattgcctttgtcaagaaaccatttatggtctctagaatagacaaggtaccagcagggccactgtgctcagctttagttttgatctataaatggggaggattcatcagaatggaggcagtccttgaaaaataagagcagtagggtgtgggaagggrcagcacagagccgtcaatagaacatggacttaaattgtcaagacctgttgccaaatattggttgaatcatcagcttgctgaatcacaggaaacagctgctgggaaacagtaccccaacactcttaagtgtacacatatctcctgggggtatcattatattgttgtactgttggaggcatgtgaagattgatctgtgtcttcacagatagctggcatgaggggtggtct

SEQ ID NO: 72491 - DNA, 638 bp, Homo sapiens
tggagatatttatatcagcactttgagggaaagaacacagaggagcgtcaaagcagtgttgatagcatctatgagaaatctgaggtaatggacagagaaacctgaagcaatgacttggagaaaaagctgctgaacggcaatgaagatggatttgtgcaaggtttcagtactcctgcttgaggaagggactagactgcttgcagttatgyagatgagggctcagtacaataatttggttctataatttatatccacatgagtgataagccccacctgcctttggagtctggggagagaatttactcatactcattctttctgttttctggcttctaaccagttaagtgtggatccaaggatcctcatgaagatagaaatacagcatttgctttattactgacaaatctagtttggagtatacaggagaattctgttcttttaaaccttggaacctgcaggattctggcaaggactattaagttgcagcaggatgaagtagaaatgaatataaagccattttcaggtatctgcaatagacaccgttttagtttatttcctcgtgacctaattgctcttagtgggctccacctcccaatattgttgcattggtgattaggtttccaacacataaattttgg

SEQ ID NO: 72492 - DNA, 863 bp, Homo sapiens
ttatatataatgtcagtaatagtatttcattagcattcattataaaaaaactcgtttttaatatttgactaattcaagtcacagtacttttgagatagctgaaaaggaaaataaatgtgttttaakgtgctactacttatacttgaattattttatgctcatatttgtttttagaaataaattgtgccagctattttgaaatcttagaaattgttcatattaatattgtcatattttcttttctataagaaatataatttgatatataaatatacttccccacgcatgtttaacgtataagatcaaatgttcaaagcattaaacattaattatcttggaattttattatgtgtataatatctactaatacctctatgtaaaccagtggttcttaatctttgagatcacagacccccctctgtgattaaaaaaaaactgacaaaaaatattaactgccctgaaaaaagttttagaactacgttttcaaaattttctattttatgttaggtggttcagagacccaccgcaaagtgctaccagtgacccctatttcaaatcccctgtaatgttaatgtagttattttatattagcatatgtttcttaattaaagtgtgtgataattgctggtagatattttaatatttctaagttactacagaacaaaatgtattttaccagaagaccacttggtaagcatttattacatgtttttcttttaaggcaacagtggaagttaacttacaaacatgctgtgaatatttttctagcttcatgtaccaatatgtagaattgtgcttttatttctaattaattttttcctaacactattattataattagctaatatgcagtattgtaaata

SEQ ID NO: 72493 - DNA, 609 bp, Homo sapiens
ggatccacattaataaatcatacactggccctctctggcttagaaccttcaaatctcatcctcattattcttaattattattcattacccatgtttgggtcatgaatcctttatagaatatgatgaaagctaaatttatgcacaaaagtttccttacaatgtcaggggagagtacactggacttggaaggcaacagacttcaagaatccttgacctgcaaggtcaagtttcccccttttgtaaaatacacacagccrtcatggctggacctgtcgcccctctccccactttgtctctggtcatacccacctgtcccactctttggtgtcccagcatcatgggacttccgaagttccccacatggatcatccatccatccatccagtgaccgttaattaagtttatatatatatatatatatatatatatatatatatgtatgtttttttttgaaacaatcttgctctgtcacctaggctggagtacagtggcatgatctcggcttgctgcaacctctgcctcccaggttcaggtgattctcctgctttaccctccccagcagttgggattagaggtgcccgccaccacacctggataatttttgtattt

SEQ ID NO: 72494 - DNA, 705 bp, Homo sapiens
ggtccagatatttggtttctaaaacaaccacatttgcagttagttaggagattacgtaaaaatgaagactctctgaggccgatgacagtgcacctccacacactggacacttgctgctgtcagagacatctgtatgccattacttaaaaagagagtgataatggtgactgttgacagacggatggcaaattgtgttactggaagttcattttgaaaagggaagtctcccactcctctgtgtgtatgtgtatttacatatatgtgtggacaaacacacatatactccctcccttaaatctgaggccgaaatataatattgaaaaaagtaataattaaaatttacattcttaataaaagagagcaccatctctggaaacattttcaatataaagtagaaattrcaccatgatagggttaaacagtcaaacaagatcatctaggcctcggtggattctttgaaccccgttttgtttaataggttaaattaaaaacataatacccattccattaccatcttcctttaagccagatcatcatggagtgagactatatttggtacattcagttctctgagagctaccattttaatatattttctttctttccttctttcttttttttgagacagaggcttgctctgtcagccaggctggagtgcagaggcacaattacagctcactgcagccttgaactcctaggctcaaa

SEQ ID NO: 72495 - DNA, 705 bp, Homo sapiens
ggtccagatatttggtttctaaaacaaccacatttgcagttagttaggagattacgtaaaaatgaagactctctgaggccgatgacagtgcacctccacacactggacacttgctgctgtcagagacatctgtatgccattacttaaaaagagagtgataatggtgactgttgacagacggatggcaaattgtgttactggaagttcattttgaaaagggaagtctcccactcctctgtgtgtatgtgtatttacatatatgtgtggacaaacacacatatactccctcccttaaatctgaggccgaaatataatattgaaaaaagtaataattaaaatttacattcttaataaaagagagcaccatctctggaaacattttcaatataaagtagaaattgcaccatgatagggttaaacagtcaaacaagatcatctaggcctcggtggattctttgaaccccgttttgtttaataggttaaattaaaaamataatacccattccattaccatcttcctttaagccagatcatcatggagtgagactatatttggtacattcagttctctgagagctaccattttaatatattttctttctttccttctttcttttttttgagacagaggcttgctctgtcagccaggctggagtgcagaggcacaattacagctcactgcagccttgaactcctaggctcaaa

SEQ ID NO: 72496 - DNA, 605 bp, Homo sapiens
aacaagtaaagcaggcaacctgcagtttggtgagataagcaaatatctctgcaaaggttcaacatgaagtgctctttaagatttttgcacacaggaagaccaagaatgtatcaacaagggccctgaaatcagaaacccacaactggtatgaaagaaacgaagcagggcattttcagcaaaccaaagaagctccaagaaacagaaacaataagagaggggaagagttgagactgagatagcatagccaatattccttggccatgaaaatgaagagatttttaacagatccttacttagataggcatgaagatggaaaattgaactctgctgactgatatttatggttgttctatagtaaatatagtccccatggtaactgaatactaaaattcatatagttctctcattccagagagtaggtttaaaccttcaacaaatccttctatgatttttaaaacatcctgagttaaaaatcacatcctsgtactgtaattgatagaaatttgaatggactataaacctgactattacagttaagactctggtgtcctgagtaggcaaaaccaggcaagatgctctcttcatcttttggatgaataaagaaa

SEQ ID NO: 72497 - DNA, 1139 bp, Homo sapiens
gggccatgagtttccaggtttgctgggggacctctgccggggaaccaccctcttctacccagtatttccctgtctcctgtgtgtatcaatttggtcgtaatgttatcattatattatgatactgtccttaaagaaaacttgtggaaaatagggaagagagaaaataaacaatacatacccatcatcccaccacagtaatacagcaactcttcattttaacctatccctgcttggggcttaaccatacctacatctgtttcacactgataattatggtgtatatcagtttgaactctatacttttgatttaacatagaatttttcttagcactaattttagcccctgcataatattccttctttctatgtgttacctattgctgaaccgttccccttttatcaaatgtttagattgttttcagtttagtaagaggctttttttcactttttattttttactattctagtttaaattttcaacttaaaaaacatggtattttagaagtcaaggcatgtcctccccctcagcatatgttcatgtaccccattcacgctccatatctgtgacaaatatcgccactttcaaaaggttgtgttcraaatgtacgacagctcacctcggacgcagttacatcagccatgtgctggcaacacaacacagattgggggatggggcttaaacctaaaagcactttggactcatgataaatgcacagtgatcacctttctcttcccttccccctcaaggaaaatgtgtaatccttgtgcaaaataaaataaatagttacgcatgacagttttcatccctgcatgcacatttccttcattcttcacccacctctgttcatgctgcccatctgccctggaagggcaggcttgctcatctacttcctccagacagcctgacccccacccccactcccaccctgctaggtggaacagggaggcaatgatcacttctaaaagaagagatgacgtcttcttagtcactgtaaggatgacctgggagaaagggccacaagccttgggggaagccagcgcataccagtggggggctggatgggatgctctgttctttgcgggtcccaaggatgaatatgattatatttgtgttagtgcacatattattatgttctgta

SEQ ID NO: 72498 - DNA, 1139 bp, Homo sapiens
gggccatgagtttccaggtttgctgggggacctctgccggggaaccaccctcttctacccagtatttccctgtctcctgtgtgtatcaatttggtcgtaatgttatcattatattatgatactgtccttaaagaaaacttgtggaaaatagggaagagagaaaataaacaatacatacccatcatcccaccacagtaatacagcaactcttcattttaacctatccctgcttggggcttaaccatacctacatctgtttcacactgataattatggtgtatatcagtttgaactctatacttttgatttaacatagaatttttcttagcactaattttagcccctgcataatattccttctttctatgtgttacctattgctgaaccgttccccttttatcaaatgtttagattgttttcagtttagtaagaggctttttttcactttttattttttactattctagtttaaattttcaacttaaaaaacatggtattttagaagtcaaggcatgtcctccccctcagcatatgttcatgtaccccattcacgctccatatctgtgacaaatatcgccactttcaaaaggttgtgttcaaaatgtacgacagctcacctcggacgcagttacatcagccatgtgctggcaacacaacacagattgggggatggggcttaaacctaaaagcactttggactcatgataaatgcacagtgatcacctttctcttcccttccccctcaaggaaaatgtgtaatccttgtgcaaaataaaataaatagttacgcatgacagttttcatccctgcatgcacatttccttcattcttcacccacctctgttcatgctgcccatctgccctggaagggcaggcttgctcatctacttcctccagacagcctgacccccacccccactcccaccctgctaggtggaacagggaggcaatgatcacttctaaaagaagagatgacgtcttcttagycactgtaaggatgacctgggagaaagggccacaagccttgggggaagccagcgcataccagtggggggctggatgggatgctctgttctttgcgggtcccaaggatgaatatgattatatttgtgttagtgcacatattattatgttctgta

SEQ ID NO: 72499 - DNA, 1171 bp, Homo sapiens
ttaaaaaggttgtgtttagggttttggctgtacttggaagatggaagaagggaggcttcacttgagcggcagtgtggtagacaaagcatctaacctaggcttgtggcttttgaaaaaacagtttgttggggtacatgtagctctttgctctagatgtttattccaatgggcttggcatttggttatcttttaaggaagtcataagcagaggtaacatttgtaatgtgaaattacttgaaattctataaaaagcaatccatagcaattggcgttgcttttagttcatgaaagcttaaaaatctctcgccctgtgtattgtggcagccagtcaaaagtgagagcagaacataaacctcgttcagaaaccaggcccgcatttttgctccatttgcaaatcctttacaatcccagaaaacagttgccctctttctgttgcccaccctaaatgcaggtgatatttacctattatatcagtttaatgagcaggccatctcacactcattaagtcgatttgaaaaatgatcagaagaatcaggactgtgtcctccgagaatataaatgcctctaaggctatatccattttaggaaaaccaggtcttttacctttgctctggcctcacctcagcgttttcttctacagcagaaataatgcatttagtcatttcagaacactggtttaatgcattaataactgcaggtgcttttcctagaattttggctccgcaagtgtttcacggtgagtgggtcaaaggcagcaagcaagggtcatataaagtgagtattttatgaagccaggatacattgcagtgtgtaagcagaagcacccaatataattaaagtaaatgaggaatatgagccatgtagactgtcaaaggcgtatgtggtgatgtggtggtgcggtgggctgggagaaaaggagggtagagtggaaaggctttaaaactataggaaakcagagaaaatgctggccttctgttccttagcttctggaattagggagttgttatataatccaagccagcagctagaggggatttggctaatagttaacttaatttttctggaatgtcttttttttttctgtaaatcagcctaagtggaaagaaagtgggactctcgtcaatgaatcaaatggcaggaggggccagctgggaggaccgattccccctgg

SEQ ID NO: 72500 - DNA, 1059 bp, Homo sapiens
tgggactccaaagaagtctaaagtagattcctcactctaaagcaacagagtttggttagggtaacgaagcatctatactttagctacaaaaggagatagtgagagatgctgaccgtgggaccttcaggagttgaagggacaggaagaatcttaggggcaggaatgactggggaagacgtcagagaaggtggatggagctcttggaaacctgaataaatgaacagagagaatcagcctagtgaactacggctgtctgtccattgaggcctgcaaaagcaggcaaagatgcggtacaccttctgcagaaagtgcctcaaacaatgcctgtggttctggatcttaaaagcataaagccctgaaatcttgagtggtttggtggacctcacagctcctgagccacagtgaagtggtcaagatggatgatccttgtgtgataatacattatgactcattatgataaagtggcaatacagaaaatgtggggaccaacttgtaggcagaactcccgcttgtatgcagacagatttcaatgctatgagatgaggggaaggagggaagcagctaatgtgtttagtgttacaggattactactaaatttctcagttgacttatatgttatgatattcttatgcaataaaattttaaaagattttaggaaacaaagcaaaacaaaatttcctcagccctggtgattatgaactgacgtaaaaggcatcatcatgatacatcatctgtgamtatgggttgccatatttgtagccccaagatagtttgtccccaaattgttcaaatgcagctgaggtggctgctgacagtgcataaaactaaattcaatcctcaataataggaggagtcacaacttgtctttgtctccaaagaaagatgatccattgaagaatgtgtgtcaatttttgtagtcatttcgttaccacgatcatgctttaactcgaagaaagcaccactgaatcctggagtgcactttacattatgaaacattacagtaagcagttgatgtccaacatgattgcaattagagcttagtgaagcacaagaagggac

SEQ ID NO: 72501 - DNA, 867 bp, Homo sapiens
tgcatacacatatacatatacacacacacacacacacatacatgtgtatatatatatatgttagagagtgagaatatatatatttggtagagatggagcctcactgtgttgcccaggctgatctcaaactcctgccctcaagcattccttagccttggcctcccaaagttctgggattacagaaatgagccaccatgccagaattacctgatggcaaagctagacaaagacaatacaaagaaagaagattgtattaatcygctttcacatgatataaagacaaacctgagactttgtaaattataaagaaaagatgtttaattggctcacagttctgtgggctgtacaggcttctacttctggggaagccttagaaaacttataatcatggtggaaggtgaagtggaaaaaggcttatcttcacatggccagcagaagagagagcaagtgaagggggaaatgctatacactttcaaacaatcagatctcatgagaactctatcatgagacagcactagggatatggtgttaaaccattagaaaccacccttatgatttaatcacctcccaccaggcccttcttttaacactggggattacaattcaacatgagatttgggtagggacacagagccaaacaatatcaaagaccatagaccaatatctctcatgagcttagatgcaaaaatcttagaaaattaactccaacaaagtataaaaagaattatataccatcaccaagtgggatttaatccagagttgcaagcctgattcgacatttgaaatcaatcaatataatctacaaaaaccctacagctaacatcatacttaatggtgataaactgaatgctttccccccaagattgg

SEQ ID NO: 72502 - DNA, 1280 bp, Homo sapiens
gtgtgtatgtgcggtacatatgcacacacagactcacacataggtgcatcagagtggaaaagacctttcttaacataatacaaatacagaagccataggagaagaccaataaacttgactgcagaccaattttaaaatttaataaagaaaaattatataataaaggtatgtgagggatttcttggccaaatatcagaggatatgccctttcctttggtacattttaatataaatatatggcaataaaaaaaatcagaattctaaaaggcatcagtcaaaatctagtactcaaatgattaatatctactcaaattattattaagcaataatcaggtatcacaaaagctgctttctcaaacttctgctgagagggggtctttcttttcatcgatatgtctggatgatggagacctccctccacccatcttaagaaggaccaacggagaggtttgtccaccacctaagccccaaggatgagaatggtttcttcttacccaacagtaaagttacccaacccccttttagattcaagtggataaggaggatgagatgaaattatagctcttcttactaggctcacttaaacctgcctgagctttctctaacagtgatattacagagtaataattcctcagtgagcaaaagactttaggaatttggagtatattttattcttctgttattttctcttcttataacttgagtaaatttatttttcagaatgaaattgctcaggtcttgctctaagaacaaaaaatgacagtctgtgaagactgtctctctctccagggaaaaaaagactgtcaagtgtataataaggcaaagaaatgtaaaaggccaataccgtatgccctggccatgcaggatttttccagaaagagtctcctcacacaaataccaaattgtcagcttgaataacaacctttccatgagccctgaaggccccaggagaggtctgacctgacttaactacctacagacrtaacactgagaagttaaaacacaggagagtgcagaacagggaaacctgtgacaccaaactgagaagacaaagcttagtaaaaagctctgtaggagccggggacaggaaactatgccatgcttgagcagtgacctctgggtaacttaacctctcctgacagaaacacttgatcccaacaagatgagcccctccctgaaagcaggaatggtggaggagaaattcccttcataacagcaaaaattacaatggagaagccttcccttcaccactaccaccagtagcacctcccaattcacac

SEQ ID NO: 72503 - DNA, 1028 bp, Homo sapiens
ttcttctgagtatgacagtaatgtgctgtccccgttctcacactttcctatcacacctccaccctcaacattcttgctcatgtccctgcaattttgttgaaattgctcttattttagctcctaaagacctcttcttgctgatttgaaagggcatttgatttttctgaaacattttacatggagtgtcatcttgaatcattttctttctctgtcttcctgacaatatattctctacatattcttttggtttgtctcttacccctttggtcattctttctcagcccccctcaaggtgaccttttctctgccaaattttattaactttaaaacttaaagctctttttctttacccttctccttcatccatacacatcttccctaaatsatcttcatcttcttccgtggcatcattaccatccacatgctgatgactcccaaaagccagcatctctcttgagctcacacttagatgtctgtggtaaatatctaagggattttctgttgaggactcattttctaggaaagaccctccctttccatctgcatgttgaagttgtgctattgtatgacttttccttgtaccacagttaatctgtccaggcgtgggcacttgattcaagcttggccaacaaatttgtgtcatgagatttttgggttagagactgagagtcaggtcagcctttctctgagattttggactggaatcaaagtggttgctcaggtcaaatgtgcatcagtgttgtgaaataatcccatccattcagattggtggttgaatgttttaaatgtcacctctaattgtagggtacaaaatttgggaattgtaggcagccatgtgtactttcatgtataccatgtaagcagataggaccagtctataaatgagagatggtgaagtttattctatgtgaattatatcttaataataatcaacttttaagcttaaaaaattaatcataagtagagaaaaagagatgagaagtgctaagagaatcctgaaggtatttaggtccccaaattctctggtt

SEQ ID NO: 72504 - DNA, 978 bp, Homo sapiens
ccattacaaatccctctgtcttcaataaagctcttggatcagttcaactataagagacttttcatcctctgaactctatgagtggacttacgatatctcttctatatagctataattttgtctttggattatagttaaaacacatatttatatgggattttgaagttattaaattcaggggctgcatcttagtcatttctgcaccccacagtgactagcccagggccatacgtagtaaatactccaaaaatataagttgcattcaaaatgagatagttaccaccattctagagagccttatccacaaaatcctaaatccccaaaggcaagyggttataatgtttcttctgcactgtttgtacttctagtgccttctatttttcttttgaaaattcatcacaattgtaattaaggtgttaattttcataattatttctttattgttggtctttgtaaggacagatattaagtctgcttaactcctcattgtatgctcagaacaaggacagtacttggaatgtggatgtcatgcagcaaatattaactgaataagttagtaagttttctagcataacctatttcccaaacacctgaaacaatagctatgtgttcaaagatatatattggacacttactatattgagcacatgctagggctggggaaacaagcaaaattgaaagtgacttcctgcatactcatgagtgaaagtttcattcaattcaatcaattgacaaaataagatgagccaatttgtctggttttagttgacagcagatcaatccctgccatacctggtccataaaggaatcacaaaatctcactaactaaggctgacttacattcctggcaaaaccaacatggccagccttacaaggaagggttatttgacacctttaatttatgcctaatttttcagatatctggaactatttcttctgtgtagtagattttgcctcacatgaataatgtcagtggac

SEQ ID NO: 72505 - DNA, 978 bp, Homo sapiens
ccattacaaatccctctgtcttcaataaagctcttggatcagttcaactataagagacttttcatcctctgaactctatgagtggacttacgatatctcttctatatagctataattttgtctttggattatagttaaaacacatatttatatgggattttgaagttattaaattcaggggctgcatcttagtcatttctgcaccccacagtgactagcccagggccatacgtagtaaatactccaaaaatataagttgcattcaaaatgagatagttaccaccattctagagagccttatccacaaaatcctaaatccccaaaggcaagcggttataatgtttcttctgcmctgtttgtacttctagtgccttctatttttcttttgaaaattcatcacaattgtaattaaggtgttaattttcataattatttctttattgttggtctttgtaaggacagatattaagtctgcttaactcctcattgtatgctcagaacaaggacagtacttggaatgtggatgtcatgcagcaaatattaactgaataagttagtaagttttctagcataacctatttcccaaacacctgaaacaatagctatgtgttcaaagatatatattggacacttactatattgagcacatgctagggctggggaaacaagcaaaattgaaagtgacttcctgcatactcatgagtgaaagtttcattcaattcaatcaattgacaaaataagatgagccaatttgtctggttttagttgacagcagatcaatccctgccatacctggtccataaaggaatcacaaaatctcactaactaaggctgacttacattcctggcaaaaccaacatggccagccttacaaggaagggttatttgacacctttaatttatgcctaatttttcagatatctggaactatttcttctgtgtagtagattttgcctcacatgaataatgtcagtggac

SEQ ID NO: 72506 - DNA, 1054 bp, Homo sapiens
gttgtttagaactgggttttcaaaacttgctgtatagaatcatttatgatagatgaatcccccactgccaaaaaaccacacaggaagtcacagacagatggcaataacagaagctctagggagcacataatgatgttccatatggcatattgtgtgtggctcataaaagtggctctaacatccagaaatgaattaaccagaaatcacataggaaataaatctttttgtgaccttcattacagtccaggagtccattgcaaatcagcacacattgcagcaagartaagtatgacagaggtagggaaaaaaacccacaaatttaaacgaaaatgaaatgcaaattaaacaatcagcaacaatttatatatacttgtaaagctttagtaggctagtagagctagattatagttctaactattggttggagggatgtcaagattttacacaaatagaattttaacatgggagcaatattctaaggggtgagcacactgtatcccataagccaaatagggtctgctgcctgtttttgtacagcctgtaagctaagaatggatttgacatttctaaagggttgggaaaaagcaaaagaaaaataatgtttcatgacacataaaaattatatgaggctgggcatagtagcttacacctgtaatcacaatgctttgaaaggctgaggaaggaggatcacttgagcacaggagtttgagcccagactgggcagcacagtgagactccatctctacaaaaatttttttaaaaattagccaggcatggagacacacacctgcagtcccaactatttaagaggctgagatgggaggattgctcatgcccaggaggtaggggctgcagtgagccgtcattgtgccactgtgctccagcctgggcaacagagtgagaccatgtctttaaaaagtttatatcaaattcaagtttctattggggctcccaatagacttccaaaacttccaataaagttttattgaaaaacaaccaggctcatttgtttatgtgttgactacagctgcttttgtgctgcaacaacagagtt

SEQ ID NO: 72507 - DNA, 1054 bp, Homo sapiens
gttgtttagaactgggttttcaaaacttgctgtatagaatcatttatgatagatgaatcccccactgccaaaaaaccacacaggaagtcacagacagatggcaataacagaagctctagggagcacataatgatgttccatatggcatattgtgtgtggctcataaaagtggctctaacatccagaaatgaattaaccagaaatcacataggaaataaatctttttgtgaccttcattacagtccaggagtccattgcaaatcagcacacattgcagcaagaataagtatgacagaggtagggaaaaaaacccacaaatttaaacgaaaatgaaatgcaaattaaacaatcagcaacaatttatatayacttgtaaagctttagtaggctagtagagctagattatagttctaactattggttggagggatgtcaagattttacacaaatagaattttaacatgggagcaatattctaaggggtgagcacactgtatcccataagccaaatagggtctgctgcctgtttttgtacagcctgtaagctaagaatggatttgacatttctaaagggttgggaaaaagcaaaagaaaaataatgtttcatgacacataaaaattatatgaggctgggcatagtagcttacacctgtaatcacaatgctttgaaaggctgaggaaggaggatcacttgagcacaggagtttgagcccagactgggcagcacagtgagactccatctctacaaaaatttttttaaaaattagccaggcatggagacacacacctgcagtcccaactatttaagaggctgagatgggaggattgctcatgcccaggaggtaggggctgcagtgagccgtcattgtgccactgtgctccagcctgggcaacagagtgagaccatgtctttaaaaagtttatatcaaattcaagtttctattggggctcccaatagacttccaaaacttccaataaagttttattgaaaaacaaccaggctcatttgtttatgtgttgactacagctgcttttgtgctgcaacaacagagtt

SEQ ID NO: 72508 - DNA, 568 bp, Homo sapiens
tcatcactgcctccattatgcttctgactaacccttcagtagtcaccatctgtaattagccttcccaatgttcgtattttcyctttttggaaattccttttttcttccctggatacctgtgataggctgaataacgaccacccaaagatgtcaacattctcatcctcagaacctgtgaagatgttatcttatatggtaaaaaggatgattaaattaatgttcttgagatggagagaatagcttgacttctccaggtgggcccactgtaaccacccagtgtttttatgagagggaggcagtggagttagggtcagagaaccatttactgctgtctgaccttaggcaactgacttcacttcccctgtgacttgggttcattatctataaattggggtgaaccattatacctaactcaaaggttcttgtcagggccaggtgcggtggctcatgcccataatctcagcactttgggaggccgaggtgggcagatcacttgaggtcaggagttggagaccagcctggccaacatggtgaaaccccatctctactagaaaaaaaaaattagcct

SEQ ID NO: 72509 - DNA, 760 bp, Homo sapiens
aaaggttggttcagtccattactggaagggatagtgttggacatatttaattatgccctccctccttttggaattcaggaaaatctgaccagcatttaacatcaacatagaccttaagtctgataggaaacatttacaatctattctctctgaagcctgccacctggaagcttcatctgcatcacaaaaacttggtcttcacaacctcttaaaacctggacagtcctttctatagataataactgtttcaaccaattgccatcagaaaatttttaaatctacttataacctgaaagcccacttgcttcaaactgtcccatttttctggaccaaaccaatgtatatcttaaatgtatttgattgatatctcgtgtctccctataatgtaaaaaaaaaaaaaaaaaaaaattgagctgcatcccaaccaccttgggcacatgttctcaggatcttctgagggctgtgtcctgggccatggtcactcatatttggctcagaataaatctcttcaaatactttacagaatttgactttttctgttgacataartattagagctatgctttcttttcccattacatcaagctacaagtaagaacaatatgattatttataaaatcaggtaaaaaaatcaaattagctttttccaataaagtggttgagcccagagtaattatgacatctaggaaagccttccctccatttgtgttttttagaaattctattacctgaatcccttgtttgaactgggtctgtctta

SEQ ID NO: 72510 - DNA, 1092 bp, Homo sapiens
catataaggaaaggatgagattttctggaggtagaaagctctgagaagcttaaattctgtgccttggggagtaggagtttgaggagcagactctttgaggagaacaggacagtctgcagcagtgattgagcagcagcaagagcagtgaggcctggccaacaactcaggagaagcctcctaacattgccctgtcccaatgccagccacccacaacctcccttggcttggctacttgccaccactttttcacatttcagcttgtacatcagcgccctggcacccatcctggtagcaaccatcctggtattgaattcacaccatcttctgggatccttcctggggtatcaaatcttgtattacagaagaatgcccacaaatcaatacattctgcattcatcaattttatgttagccttcttgactgaccaagcacccttagaatcctttcccatttataggatcttgtcttttgctgatacgtggtgactcagtcttgcaacgcctttgaggtatattccctttcctccgttattaggcccagagcttcccagctggattctgctgagacttgactctaggtctgtctaggcctcaaggccaggaggagacataggggaagatcctgggtgggtcgaggagtgggggtggggaacacactgactttgaggagaggggcctttgcattgtctccaggcatgtagaggggttaattcaggggaatctgggtgctcaagatttggagatggagggaatcccctgakatgtcaccagtctatatgtcagggttccattctatctcaaccagggggctcttacctttgtatagcccacctgcctaggttagtagtttaaacctttctggagctgagttgctctgacaattaagtcctgggcgggtccacagctttatctgatctccctcttcaaaagatgagagcctctttgtaagatacacaggccctctggctttcacatttgattttcaattgcctattaaatgctttcagcttctcataatttttagagcatccatcaaattcacctacagccatcaaattccattgttcttaaagtttacatttcctctgtactt

SEQ ID NO: 72511 - DNA, 1092 bp, Homo sapiens
catataaggaaaggatgagattttctggaggtagaaagctctgagaagcttaaattctgtgccttggggagtaggagtttgaggagcagactctttgaggagaacaggacagtctgcagcagtgattgagcagcagcaagagcagtgaggcctggccaacaactcaggagaagcctcctaacattgccctgtcccaatgccagccacccacaacctcccttggcttggctacttgccaccactttttcacatttcagcttgtacatcagcgccctggcacccatcctggtagcaaccatcctggtattgaattcacaccatcttctgggatccttcctggggtatcaaatcttgtattacagaagaatgcccacaaatcaatacattctgcattcatcaattttatgttagccttcttgactgaccaagcacccttagaatcctttcccatttataggatcttgtcttttgctgatacgtggtgactcagtcttgcaacgcctttgaggtatattccctttcctccgttattaggcccagagcttcccagctggattctgctgagacttgactctaggtctgtctaggcctcaaggccaggaggagacataggggaagatcctgggtgggtcgaggagtgggggtggggaacacactgactttgaggagaggggcctttgcattgtctccaggcatgtagaggggttaattcaggggaatctgggtgctcaagatttggagatggagggaatcccctgatatgtcaccagtctatatgtcagggttccattctatctcaaccagggggctcttacctttgtatagcccacctgcctaggttagtagtttaaacctttctggagctgagttgctctgacaattaagtcctgggcrggtccacagctttatctgatctccctcttcaaaagatgagagcctctttgtaagatacacaggccctctggctttcacatttgattttcaattgcctattaaatgctttcagcttctcataatttttagagcatccatcaaattcacctacagccatcaaattccattgttcttaaagtttacatttcctctgtactt

SEQ ID NO: 72512 - DNA, 1092 bp, Homo sapiens
catataaggaaaggatgagattttctggaggtagaaagctctgagaagcttaaattctgtgccttggggagtaggagtttgaggagcagactctttgaggagaacaggacagtctgcagcagtgattgagcagcagcaagagcagtgaggcctggccaacaactcaggagaagcctcctaacattgccctgtcccaatgccagccacccacaacctcccttggcttggctacttgccaccactttttcacatttcagcttgtacatcagcgccctggcacccatcctggtagcaaccatcctggtattgaattcacaccatcttctgggatccttcctggggtatcaaatcttgtattacagaagaatgcccacaaatcaatacattctgcattcatcaattttatgttagccttcttgactgaccaagcacccttagaatcctttcccatttataggatcttgtcttttgctgatacgtggtgactcagtcttgcaacgcctttgaggtatattccctttcctccgttattaggcccagagcttcccagctggattctgctgagacttgactctaggtctgtctaggcctcaaggccaggaggagacataggggaagatcctgggtgggtcgaggagtgggggtggggaacacactgactttgaggagaggggcctttgcattgtctccaggcatgtagaggggttaattcaggggaatctgggtgctcaagatttggagatggagggaatcccctgatatgtcaccagtctatatgtcagggttccattctatctcaaccagggggctcttacctttgtatagcccacctgcctaggttagtagtttaaacctttctggagctgagttgctctgacaattaagtcctgggcgggtccacagctttatctgatctccctcttcaaaagatgagagcctctttgtaagatacayaggccctctggctttcacatttgattttcaattgcctattaaatgctttcagcttctcataatttttagagcatccatcaaattcacctacagccatcaaattccattgttcttaaagtttacatttcctctgtactt

SEQ ID NO: 72513 - DNA, 2092 bp, Homo sapiens
agacataatagaggagtgacaatcctttctcctttgccatgtatttggctcatttttctcctctagtattttttccaacatacccatgaattgattcttgttgtgatagaaattctgccttcttcactatcactaccaggttaacacagttcaattttaatagagttgttaagtaaaagtacaaaattcttaaaactttactccagttgcctaaataggaataggaatagatttcatacttcaaactatagtttaaggaggagctgctattttgtctatttaaggaattaatttgctcagtgctatgatgtatttggaaatgtcatgcatataaaaagtgctctayaaaatgccaaattatcttgctaaactaactgagaacacaatgcagtgtaggttaggattacagttggcctcccatagaaaatgctaacataggtgatcttcaccagaaaatcaaatcccatttggccatttaaaaagacacttgcaatcgcctagcctccccaactgagtttcattgcctccttcagaataaacacagttatttccttacagttaaatctcagattcatactgacaggcaaattccctagaatacaaaaacatcatgagtagatttctatgaataaaatgtttccccatatgatttcataataattctagcactttactgctgctatatctatcacacagcaagtaagcattttccaatgaaactacagacgggccaatccaagacatgattttaacttctgaggttgagtttcttttctatgttgcataggaactaacacagaatttttaaaattatcaaaagccttgatatacgcacactcttttgcccttaagtaataaagaaaacatacaccaaaattttattggctttccatctggcatctttcgtactaatgaagatgggaagcttcaaagcatgctgaagtttggacgagtgtcagaggcctaactacaagtgccaatcaacttaaaggacttatgaaaggtccttgatcaagtagaccaagagctctggagctaactatcagaggtgaaagttcaagggttacatctttaagttatgagggagaaggtaatttcaaagtagaatttgagttattttattttgcaacttaactatcataagggcttttcataaaataggatggttttaaaatatggcattttattatgatatcaagtaacaacagagggaaaaccttcaaggaaaaaattaactgtagtaaatatagaagaattgtaataatcagaaatagaatggattctatgaagtctattttatgctccttagtaaaatgacacaaaagatgtattgaataagacagttgtataagtaaaataaattctgtacacaaagctttgtgtaaaatatattcaatagaatacattttcattaatagtgattctcatatccatatttaagaacaaaaatgaggaaattaggatcttaatccactttggtacaacctatattccatccacatgcatatttatgaatatgacttaatcaggtttaatcattcctcatattcagcctcctcattagacaatcattattaagaaattcttaaattctactggtaagctttgaagttagttgttaatacagaacatgaaaatggattactataaataacataaatccccaagacacctgattgaatttgattgttctctgaatattttatgctgagataaaaatggacataactaaaacagttcttgactattaaaatattttaagtcaaagaatagccatgagtgcctatgccatcaacactttatgtgtatgtttggtttccttctgaaaaggcctcatgaatttgtgagagatgcaaggcctaaaacaaaaacaaaataaaaataaagaacaatgttagccaatacataatacagtgttacactgcaaatggcactgattatgccacagttgctcagagaaaagtgttgagaaaaggttgtcagaaaagtgaaattttaatttaactttaaaaagtcaataaaaggctgggtgctcatgcctataatcccagcactttgggaggccaaggcatgtggatcacctgaggtcagg

SEQ ID NO: 72514 - DNA, 836 bp, Homo sapiens
ttcaatctatgtctttctttggaaattctccaagaatgtatttcagtatatgaaatgttcatgctggctgactttagaatctaatacttgtgaatgatacaatttttttttttattttacaatactgtttattaggcagggcgcagtggttcatgtctgtaatcccagcactttgggaggccaaggaggacagatcacggggtgaagagattgagaccatcctggccaacatggggaaaccccmcctctactaaaaatataaaaactagctgggtgtggtggtgtgtgcccgtagtcccagctacttgggaggctgaggcagatgaatcacttgaacctgggaggcggaggttgcagtgagcagatattgcacaactgcactccagctggagacagagcgagactctgtctcaaagaaaaaaaaaaaattagtaataataataataatgtttataaattgccctgctcatcacctctcacacattaatgacattcagtcacattagaggtttattattcatcattttattatacaataaaataaccacaactgctaggtgttttagctccttgatggtttatcatgtttcttacagtgaaatttccagttttctcaagtcctctgtttatttctctcctttcttttgtaacagattttcaatatccattgtcactcttcaaattaaggttatccagcatgaatataccttttttacatgtttccatgtcaaagcatttcattatatttaaccccctctcttacattggctagtctctgaggaagaataaagcttgtccaacttaagtcaatgacccaagatctgtgtctggatcct

SEQ ID NO: 72515 - DNA, 836 bp, Homo sapiens
ttcaatctatgtctttctttggaaattctccaagaatgtatttcagtatatgaaatgttcatgctggctgactttagaatctaatacttgtgaatgatacaatttttttttttattttacaatactgtttattaggcagggcgcagtggttcatgtctgtaatcccagcactttgggaggccaaggaggacagatcacggggtgaagagattgagaccatcctggccaacatggggaaaccccacctctactaaaaatataaaaactagctgggtgtggtggtgtgtgcccgtagtcccagctacttgggaggctgaggcagatgaatcacttgaacctgggaggcggaggttgcagtgagcagatattgcacaactgcactccagctggagacagagcgagactctgtctcaaaraaaaaaaaaaaattagtaataataataataatgtttataaattgccctgctcatcacctctcacacattaatgacattcagtcacattagaggtttattattcatcattttattatacaataaaataaccacaactgctaggtgttttagctccttgatggtttatcatgtttcttacagtgaaatttccagttttctcaagtcctctgtttatttctctcctttcttttgtaacagattttcaatatccattgtcactcttcaaattaaggttatccagcatgaatataccttttttacatgtttccatgtcaaagcatttcattatatttaaccccctctcttacattggctagtctctgaggaagaataaagcttgtccaacttaagtcaatgacccaagatctgtgtctggatcct

SEQ ID NO: 72516 - DNA, 840 bp, Homo sapiens
gttaaatatattcgtatgccttttctcatattaatcaatccaccatatgtctgtgatttttagtgamtctttagtgggccaagagcctacagctcccccacattatcttcactagagctaagaaaacctgaacacaggagcaaggtgtgaaatttctttggctcacaagatcagcaaaactgcagttggatggtaaggagattgattctgtgtgactgtgacacacttcccacaaagatattttgatgtcacacattaaaagtcttctggactcccagtttctatactgaaaaaatgtgagctagaggcagacattggcttctttaccatcctggatctctctgtgaaagactcgctcctgattgggccctcagggaacaccacaaatactggcagtgctgaaccacatgagaccagctaggaataacgaggatggtagggttagtggtattcagcccaaagaagttggaaatagatctccatttctaccagaggtgtcccaccaaatagtctgtataggggcaccatgtcacaagacgcgtggtttatagttctcaatgacatgagtgcacagttggctctcccacaactggagacagccagttcattgttctcaatggttcatagttctcaatgacttgagaagtgggaggctctctgtggatcagctgcagaatcataacaactcatgtctcacctgggctaaggtaaccctctagtagtaaaaaggaatacaacagtcagtcgcctcagaatttctaaaaaagcccaccaaaacagaatggtaaccgaaagtcccagaccacaaagactggaataaataactaattcatcaatcaa

SEQ ID NO: 72517 - DNA, 840 bp, Homo sapiens
gttaaatatattcgtatgccttttctcatattaatcaatccaccatatgtctgtgatttttagtgactctttagtgggccaagagcctacagctcccccacattatcttcactagagctaagaaaacctgaacacaggagcaaggtgtgaaatttctttggctcacaagatcagcaaaactgcagttggatggtaaggagattgattctgtgtgactgtgacacacttcccacaaagatattttgatgtcacacattaaaagtcttctggactcccagtttctatactgaaaaaatgtgagctagaggcagacattggcwtctttaccatcctggatctctctgtgaaagactcgctcctgattgggccctcagggaacaccacaaatactggcagtgctgaaccacatgagaccagctaggaataacgaggatggtagggttagtggtattcagcccaaagaagttggaaatagatctccatttctaccagaggtgtcccaccaaatagtctgtataggggcaccatgtcacaagacgcgtggtttatagttctcaatgacatgagtgcacagttggctctcccacaactggagacagccagttcattgttctcaatggttcatagttctcaatgacttgagaagtgggaggctctctgtggatcagctgcagaatcataacaactcatgtctcacctgggctaaggtaaccctctagtagtaaaaaggaatacaacagtcagtcgcctcagaatttctaaaaaagcccaccaaaacagaatggtaaccgaaagtcccagaccacaaagactggaataaataactaattcatcaatcaa

SEQ ID NO: 72518 - DNA, 769 bp, Homo sapiens
caggctgcctagatttgaatccttgcactgtttattctgcgtgaccttaggtaggttatttaacctctctgtgcctccatttccaaaatgagaataatattaatagaagagcttttcataaggcatgtgaggattacatgagttagcacatgtaaaaaaacataaaacatgsctggcatatcccaaaggtgtggtaaacaggagctcacaccatgagtgattgaggactatgtgctcaatgagtgaatcccatcctttctgtaaggggcagtcagtagtagtaggaagagtgtgggttttaaggaaagacctgagtttgcatatcacctccagtttgtgtttaactttaaataaattctagacttcccataccctcagtgtcctcatctgttaaatgggaacactttctctaccttcgaggctgactgtgaggactaaatggaagtatgtattttaaaggctcaacacagtgcctagcacataatcagcttctgaacatgtgagctcctgacacagcccagctcaaaacaggagccagggtctccccagggtttttagaggcaagcactgtttcatttattcctagtgtttgctttattgctgccaacctagtcttcacagttcctggggtttgggtcatcaaagccattttaaaagtctctattttcctccagcgtctccctcctggtggagagatgcctgccacctgctcgggtagcctgtgtgtttttgggtcacactgcaggtttccagtgccttggttgctttg

SEQ ID NO: 72519 - DNA, 769 bp, Homo sapiens
caggctgcctagatttgaatccttgcactgtttattctgcgtgaccttaggtaggttatttaacctctctgtgcctccatttccaaaatgagaataatattaatagaagagcttttcataaggcatgtgaggattacatgagttagcacatgtaaaaaaacataaaacatgcctggcatatcccaaaggtgtggtaaacaggagctcacaccatgagtgattgaggactatgtgctcaatgagtgaatcccatcctttctgtaaggggcagtcagtagtagtaggaagagygtgggttttaaggaaagacctgagtttgcatatcacctccagtttgtgtttaactttaaataaattctagacttcccataccctcagtgtcctcatctgttaaatgggaacactttctctaccttcgaggctgactgtgaggactaaatggaagtatgtattttaaaggctcaacacagtgcctagcacataatcagcttctgaacatgtgagctcctgacacagcccagctcaaaacaggagccagggtctccccagggtttttagaggcaagcactgtttcatttattcctagtgtttgctttattgctgccaacctagtcttcacagttcctggggtttgggtcatcaaagccattttaaaagtctctattttcctccagcgtctccctcctggtggagagatgcctgccacctgctcgggtagcctgtgtgtttttgggtcacactgcaggtttccagtgccttggttgctttg

SEQ ID NO: 72520 - DNA, 654 bp, Homo sapiens
tattactgacagcatcagtgtgtgtgtgtgtgtgtctgtgtgtgtctatktgtgtgtcattgaaagactcaaggagatctgacgggttctgaacctgcaagttttcagagcacaagtggcccccccaggtctacaagagcctccctgggctcttggctcagatcaaatgtgtcctatgtccctgtagttagttccttctacttctctgaggaccaagacaattccaggaagacacaggctccccgggactgtgactttctattctctcctttgacttgtcttcctgtgtagtgatcaaagtcctcccatttctggggggaacgtcacagtttacacagcactttcttcacgacaatagcatgaagaaaataatacctgccctttatctccacatgagacacagacaggtcaaggacgtgtgcaagttcaaagagcaagagtggaatccagcccgaaccagcaccccatgatggaaggggaatgaccgtggctggcccagtcacttacagctctttgaccaggggcagctcacgaaaagctcaggttcttcacctgctaaaagatggcagtgatagtgcttactgcacagggctgttttagaaataaaatagatttctaaaagtgctcagcaaaatgactagcatgtaataaacg

SEQ ID NO: 72521 - DNA, 654 bp, Homo sapiens
tattactgacagcatcagtgtgtgtgtgtgtgtgtctgtgtgtgtctatttgtgtgtcattgaaagactcaaggagatctgacgggttctgaacctgcaagttttcagagcacaagtggccyccccaggtctacaagagcctccctgggctcttggctcagatcaaatgtgtcctatgtccctgtagttagttccttctacttctctgaggaccaagacaattccaggaagacacaggctccccgggactgtgactttctattctctcctttgacttgtcttcctgtgtagtgatcaaagtcctcccatttctggggggaacgtcacagtttacacagcactttcttcacgacaatagcatgaagaaaataatacctgccctttatctccacatgagacacagacaggtcaaggacgtgtgcaagttcaaagagcaagagtggaatccagcccgaaccagcaccccatgatggaaggggaatgaccgtggctggcccagtcacttacagctctttgaccaggggcagctcacgaaaagctcaggttcttcacctgctaaaagatggcagtgatagtgcttactgcacagggctgttttagaaataaaatagatttctaaaagtgctcagcaaaatgactagcatgtaataaacg

SEQ ID NO: 72522 - DNA, 654 bp, Homo sapiens
tattactgacagcatcagtgtgtgtgtgtgtgtgtctgtgtgtgtctatttgtgtgtcattgaaagactcaaggagatctgacgggttctgaacctgcaagttttcagagcacaagtggcccccccaggtctacaagagcctccctgggctcttggctcagatcaaatgtgtcctatgtccctgtagttagttccttctacttctctgaggaccaagacaattccaggaagacacaggctccccgggactgtgactttctattctctcctttgacttgtcttcctgtgtagtgatcaaagtcctcccatttctggggggaacgtcacagtttacacagcactttcttcacgacaatagcatgaagaaaataatacctgccctttatctccacatgagacacagacaggtcaaggacgtgtgcaagttcaaagagcaagagtggaatccagcccgaaccagcaccccatgatggaaggggaatgaccgtggctggcccagtcacttacagctctttgaccaggggcagctcacgaaaagctcaggttcttcacctgctaaaagatggcagtgatagtgyttactgcacagggctgttttagaaataaaatagatttctaaaagtgctcagcaaaatgactagcatgtaataaacg

SEQ ID NO: 72523 - DNA, 917 bp, Homo sapiens
gtagtttcccctgtgatgttggggaatcatttgtaaaatcagttttcacggtgttattgaattttcaacttctgtatactactttttgtaattaaaaatataactaggttgggcacggtggctcatgcctataatcccagcactttgggaggctgaggcaggcagatcacctgaggttaggtgtttgagaccagcctggtcaacatggtgaaaccccgtctctagtaaaaatacaaaaattagctgggcgtggtggcaggcacctgtaatccaagctacttgggaggctgaggcaggagaatcacttatacccaggaggcagaagttgcagtgagctgagattgtgccactgcactccaatctaggcaacagagcgagactccgtctcaaaaaaaaaaaaaaaaaaaaaaaaaaaatatatatatatatatatatatatatatataatttaaaaatatawaaacatatatatatatatatatataaaactaaaacactctctttaggagtccatcacaacccatttgtaatatagcttttattaatgctatcttgacccagttttgaggcaccctggccagaggctgattagttcccctttttgagtagccagttaaatccacacccctacatggccatacttattgggctctcacactcctgggccaataaataccagtcctaattaccccaaggccaaggagcagtcaaccatggacaatcccacatactgtgctctgttcttcccacgcaactgtgaataaaaccttttgtaccactctgtcttgcttctctctcttgatctgcatctggcctcccaattcctcacccagggtaacatggttgaaatactagtaaaacaagctcagccatgttttcacagaatactccatggtagatggccagagctcatggaa

SEQ ID NO: 72524 - DNA, 555 bp, Homo sapiens
ttttgcttatggcccaatacaataccttaatgtatcatattaagtaaacctggagtgatcgtaagttttttagctgtggaatattcatataacttctcaaatttttacttttatttggaaaatttttttttttttttttacttagaacctttaaggacattttcctttttgataatgctttttgaggggaaaggaaaaacagccacatgtttttcaatgctttgaatgtatttattatcagatttttaaaattttaaataagagacagttggccgctatgttggccaagctggtctcgaactcctggsctcaagcattcctcccacctcagcctcccaaaatgctggggttccaggcatgaaccactgggcctggctgaatttattgacatagttggaaaccagttaactcagctatcttgttccatttataccatctttttttttttttttttttttgagatggagttttgctcttgttgcccgggctggagtgcagtggcgtgatctcgggttactgcaacctccgcctcccaggttcaagcgattctcctgc

SEQ ID NO: 72525 - DNA, 600 bp, Homo sapiens
catggggtttggtcttatcgatgggacagggtgtcaacagtagggtgttggtctcttgccgaggtttgctatgtgtgaagtaaagaagagcagataccagaatacagggggtccagcaaagagacagctgatgcatgtcaaagaggtgagaggttatcaggaaaccaaggaggtccactgggaggctagtagggtatgtatttctcactcataagtgggagctaagctatgaggatgcaaagtcataagagatatataatggactttggggactcggaggggaaggttggggaggtgggagatgaaactacttatggggtacagtgtacattctcgagtgatgggtgcactaaaatctcakaaatcaccactaaagaacttatctatgtaaccaagaacaatctgtacaccaaaaacttaattttttaaaagaagtaacaccatgaacctttttgctgatagctttctaaatcatacctaaaaaattttaaattgttttacaattatatataataataaaattatgcacataattttaattatgtaaaatataatttagatataacctattacataaatataattttaaaaaataagaat

SEQ ID NO: 72526 - DNA, 903 bp, Homo sapiens
gtgtatgcaagtatttatgtatccaactacatatatttttatctcagttttttaacaaggaagatatgctttttaacccattgagttcatgcttaaactttgatttctaagtcctattttctaactcctatttaaataacagtggcagtaytattatgggattatttttcttttaaaaattcattccactgttcttgttgcacagcaggagtgtaagtgcagccaatactttcttgtgctgacagccctgattaaggcataagtcttaatttatagaaatgagtgatttgtttgacaaaaaaattttgatggaactctggtctataaatctactaattgttcctccctgctgcgaacattagatacgagacagtgtgttaactgtgcatgttgttggctcataggcacacgtattgtttccctgtatgattttactaatggtttttttttaaatgagatctaataggaacattcaaaacattgatcttagcactgtgtgtgaaagaagtactgctgccctgaaactgtccataaatttgggattgcaaggctgcagtgaactgcagaggacgtgctttgcctcaaaagggctgaaccaagtgtcaccataaggaaatgtggcccaggattgctgcagcttccagattttccaaattgaaaattcaggtttctatgtaaaaccttgccatatttaaatgtgggctcctaactgaactttatcagaagcattctgaagaccaaacacatttcatttgtaggcaggcagagtcacaggtggcaccagtttgatacctctgcctagaataatcctggaaattcctagacatctaattctacatctaactctatccagtcattctgggtgatgagccaaggctggagattggtggtggtggtggtgtg

SEQ ID NO: 72527 - DNA, 903 bp, Homo sapiens
gtgtatgcaagtatttatgtatccaactacatatatttttatctcagttttttaacaaggaagatatgctttttaacccattgagttcatgcttaaactttgatttctaagtcctattttctaactcctatttaaataacagtggcagtactattatgggattatttttcttttaaaaattcattccactgttcttgttgcacagcaggagtgtaagtgcagccaatactttcttgtgctgacagccctgattaaggcataagtcttaatttatagaaatgagtgatttgtttgacaaaaaaattttgatggaactctggtctataaatctactaattgttcctccctgctgcgaacattagatacgagacagtgtgttaactgtgcatgttgttggctcataggcacacrtattgtttccctgtatgattttactaatggtttttttttaaatgagatctaataggaacattcaaaacattgatcttagcactgtgtgtgaaagaagtactgctgccctgaaactgtccataaatttgggattgcaaggctgcagtgaactgcagaggacgtgctttgcctcaaaagggctgaaccaagtgtcaccataaggaaatgtggcccaggattgctgcagcttccagattttccaaattgaaaattcaggtttctatgtaaaaccttgccatatttaaatgtgggctcctaactgaactttatcagaagcattctgaagaccaaacacatttcatttgtaggcaggcagagtcacaggtggcaccagtttgatacctctgcctagaataatcctggaaattcctagacatctaattctacatctaactctatccagtcattctgggtgatgagccaaggctggagattggtggtggtggtggtgtg

SEQ ID NO: 72528 - DNA, 549 bp, Homo sapiens
  misc_feature (1)...(549): n = A,T,C or G
annnnnnnnnnnnnnnnnnnnnnnnnnnnnnnnnnnnnnnnnnnnnnnnnnnnnnnnnnnnnnnnnnnnnnnnnnnnnnnnnnnnnnnnnnnnnnnnnnnnataaagttcagttaggagcccacatttaaatatggcaaggttttacatagaaacctgaattttcaatttggaaaatctggaagctgcagcaatcctgggccacatttccttatggtgacacttggttcagcccttttgaggcaaagcacgtcctctgcagttcactgcagccttgcaatcccaaatttatggacagtttcagggcagcagtacttctttcacacacagtgctaagatcaatgttttgaatgttcctattagatctcatttaaaaaaaaaccattagtaaaatcatacagggaaacaataygtgtgcctatgagccaacaacatgcacagttaacacactgtctcgtatctaatgttcgcagcagggaggaacaattagtagatttatagaccagagttccatcaaaatttttttgtcaaacaaatcactcatttctat

SEQ ID NO: 72529 - DNA, 780 bp, Homo sapiens
ttaagattcatccatatctttttacatataataattcttgttattgccaaacagtattttgttttataaatgtaccaatacatttatccattcacttgttgaaagatatcatggctgtttctagtttttctgacaattttgaataaagtttctgtaaatatgcacttgtaagtttttgtgtgacataagttatctggagaggccaaactgacaaatgaagactcttcygtttggagaggcttataaagtttatgcacaaagaaaaatgtatcatgggtcaataagaggctgggaaagtagggggtatatttttgtgatggttgatactgagagtcaacttgattggattgaaggatgcaaaatattgatcctggatgtgtctgtgagggtgttgccaaaggaaattaacatttgagtcagtgagctgagaaaagcagacccacccttaatctggatgggcaccatctaatcagctcccagcacatctagaatacaaagcaggcagaaaaatatgaaaagactagactggcctaggctgccagcttatatctttctcttgtgctggatacttcctgcccttgaacatgagattccaaattttttcagttttggggacccagactggctctccttgcttctcagcttgcagactgcctattgtgggacctgtaatcatatgagttaatactcaaaaaactcccctttttatacatacatatatatacacatatatatatatatacacacacacatatataatatatatcctatttatatata

SEQ ID NO: 72530 - DNA, 841 bp, Homo sapiens
cagaaatcttttttttaagtggagataaatttctaaattggtggtataggtagtagtatgcatgaaaaattagggaaatgaatattgcaagataatagacagtcaaatcattaggatttagtggcagactggacatgttaattgaaagaggatgatgtgacaatgatggctcgagagtttctagctaccataaccatgtgaatgatagagtcatttattgggacgggtgaaatagaaggagggacacatttgggtatgtggtaagagagagatatgagttcagtctcagatgatttgtcttttcgacttttaaagagctataataggccaggggacatgtgacttacatgtcttcaatgaatggaggcctacctcgcttacctgctaaattatatcctgtcctattaattctatattaattcctcttttctttatttgttttcttatcacagattagttactgtgacttayttgtctatagaatgattcttctatcattctctttcttctcaactagaatggatttatcaaaagcattaagttacttccaactcttttcttccctttctcattccttcaaatgaatattcattgagtagctaatatgtttcaagaatgttgacaagtgcttggaatatagcaagcgtactagatgaattctggcagcaattgagcttctgggagccagtgccgtgactagaaaccaggtatttttacaattagttggtgcttttccaaataccataccagctcctcacattgacacagatctgccttctcatcaaacaagcaatctaggaaaataaataatcttggcagaagtaatggtggagataataaa

SEQ ID NO: 72531 - DNA, 1045 bp, Homo sapiens
tggaactggaggccattatccttagcaaacgaacacaggaatagaaaaccaaatactacatgttctcacttacaagtaggagctaaatgatgagaacacatggacacatagaggggaacaacacacaccaggcctttttgtaggttggagggtgggaggagggagaagatcaggaaaaaataactaatgggtacttggcttaatacctgagtgatgaaataatctgtacaaccaactcccatggcatgtttacctrtataacaaacctgcacttgtaccccaaacttaaaaattaaaaaaagaaaaaaatgtaaatgaacaaacaaaaaaagcttgtaaaacattgcaaaacttatcttgcatattcccaactaaagcttggtctttgcagtaggtagttcttggtgcaaacctaattttttttttttttttttttagactttatcttgctctgttgcccaggctggagtgcaatggcccgatctctgctcactgcaacctccgcctcctgggttcaagcgattctccctgcctcagcctcccgagtatctgggattccaagctcccgccaccatgcccagctaatttttgtatgtcttagtagagacaaggtttcaccatgttggccaggctggtctcaaactcctgacctcaggtgatcctcctgcctcagcctcccaaagtgctgggattacagggatgagccaccgcgcctggcccagaaacctgatttgacctatgacaagatctttaatcttaggcaagctatctagtcttagcaaaggcatttgtgaaatagagattgtaacagtataaattcctataggcactttaaggattacatgagtcaaatcaaataaatttttagtaagacatctggtacttcatataagctcattaaatgatattaaatgttatccctatttatcatcacaaacatcttaatttaggtgttttctattttaagtttctttaactagcatatttccttgcacacaaatatttattaaaagtacataaaaactagtctgtttagagaaaactg

SEQ ID NO: 72532 - DNA, 1045 bp, Homo sapiens
tggaactggaggccattatccttagcaaacgaacacaggaatagaaaaccaaatactacatgttctcacttacaagtaggagctaaatgatgagaacacatggacacatagaggggaacaacacacaccaggcctttttgtaggttggagggtgggaggagggagaagatcaggaaaaaataactaatgggtacttggcttaatacctgagtgatgaaataatctgtacaaccaactcccatggcatgtttacctatataacaaacctgcacttgtaccccaaacttaaaaattaaaaaaagaaaaaaatgtaaatgaacaaacaaaaaaagcttgtaaaacattgcaaaacttatcttgcatattcccaactaaagcttggtctttgcagtaggtagttcttggtgcaaacctaattttttttttttttttttttagactttatcttgctctgttgcccaggctggagtgcaatggcccgatctctgctcactgcaacctccgcctcctgggttcaagcgattctccctgcctcagcctcccgagtatctgggattccaagctcccgccaccatgcccagctaatttttgtatgtcttagtagagacaaggtttcaccatgttggccaggctggtctcaaactcctgacctcaggtgatcctcctgcctcagcctcccaaagtgctgggattacagggatgagccaccgcgcctggcccagaaacctgatttgacctatgacaagatctttaatcttaggcaagctatctagtcttagcaaaggcatttgtgaaatagagattgtaacagtataaattcctataggcactttaaggattacatgagtcaratcaaataaatttttagtaagacatctggtacttcatataagctcattaaatgatattaaatgttatccctatttatcatcacaaacatcttaatttaggtgttttctattttaagtttctttaactagcatatttccttgcacacaaatatttattaaaagtacataaaaactagtctgtttagagaaaactg

SEQ ID NO: 72533 - DNA, 1045 bp, Homo sapiens
tggaactggaggccattatccttagcaaacgaacacaggaatagaaaaccaaatactacatgttctcacttacaagtaggagctaaatgatgagaacacatggacacatagaggggaacaacacacaccaggcctttttgtaggttggagggtgggaggagggagaagatcaggaaaaaataactaatgggtacttggcttaatacctgagtgatgaaataatctgtacaaccaactcccatggcatgtttacctatataacaaacctgcacttgtaccccaaacttaaaaattaaaaaaagaaaaaaatgtaaatgaacaaacaaaaaaagcttgtaaaacattgcaaaacttatcttgcatattcccaactaaagcttggtctttgcagtaggtagttcttggtgcaaacctaattttttttttttttttttttagactttatcttgctctgttgcccaggctggagtgcaatggcccgatctctgctcactgcaacctccgcctcctgggttcaagcgattctccctgcctcagcctcccgagtatctgggattccaagctcccgccaccatgcccagctaatttttgtatgtcttagtagagacaaggtttcaccatgttggccaggctggtctcaaactcctgacctcaggtgatcctcctgcctcagcctcccaaagtgctgggattacagggatgagccaccgcgcctggcccagaaacctgatttgacctatgacaagatctttaatcttaggcaagctatctagtcttagcaaaggcatttgtgaaatagagattgtaacagtataaattcctataggcactttaaggattacatgagtcaaatcaaataaatttttagtaagacatctggtacttcatataagctcattaaatratattaaatgttatccctatttatcatcacaaacatcttaatttaggtgttttctattttaagtttctttaactagcatatttccttgcacacaaatatttattaaaagtacataaaaactagtctgtttagagaaaactg

SEQ ID NO: 72534 - DNA, 1200 bp, Homo sapiens
ttaaccaatctcaattaataagaacctgtctcttaaaacttatctcccatcttacaaaagaaaaaacaaaaggaagcttagttcatatctctgataagaaggcatatggaactggctgccagtttttccattatcatcatagtttatttcattttgttgctacgtgggttaaaataatatttttgtatatattttatagaatcacctaaactgatcaatatattattgatttgaattgagagagaatattttacttttttattatgctaaggtaaaaagagaaataaatatagctgctgggggttgaatgtttaaggttagtactgttatatttagtaataatggcaacaaggcactgtgattacagagaacacttaaaaatcaaatagagggccgggtgcggtggctcacgcctataatcccagcactttgggaggccgaggcgggtggatcatgaggtcaggagatcgagaccatcctggctaacacggcgaaaccccgtctctactaaatatacaaaaaataacccgggcgtcgtggcggkcgcctgtagtcccagctactcgggaggctgaggccggagaatggcttgaacccagggggtggagcttgcagtgagccgagatcgagccactgcactccagcctgggtgacggagcaagactctgtctcaaaaaaaaaaaaaaaaaaaaaaaaaatcaaatagagataggacatattaagcgacttgaacttggtctgtttcatcgtttattaaatctctgctgtttgccatgaggtaatgagaaataacttgcaaggctggcgaagtcatattacttcagcccactagaacatataatttgtgtgactcctttgagtttaccttgtattccaacaaatgtaaattcatatattgtgtttggcagaaatagcgtaagtaaaaggaccttggttatttcaccaattcctagaattggtctgtgatgaaagcctcctcctcttgctttattgactggcacactaccgtcttaaaatctagtagacaccacacctcctcatggacgaagtggctaatatttaaagagctaagtgtcaaggtcttccagcatgccctaaatggcaacccttttttcccttctcttgttccacaacatttcctctgtttttaaacaaacctgtattttttgttgttgttatcccaacattttctctggatct

SEQ ID NO: 72535 - DNA, 1235 bp, Homo sapiens
gcatacagggttccaggcactgagctaaatgaatttctcatgaattttcttgtataatccttaaaaacctgatcaggttggtatttttttatcatcccttttctttttagttgagtactctgagacatacagtgtagttgagtgactttcccaaggtaacacagctgatgactgatatagctggaatttcaaccacattctctctgaccctagagccctaaccatgaactttatgctttattrtccttcatgatgcctgcaaatattatcacaggaaataccttcttggggtgctgaaattactataagaaacatattatcagtcctactacaatgagatagtggtaaagtatagacagatgctaaacatcaattttatggaaatcattcaccaccagacagaagtgagtatgacagtgagctcaattcaatcatgaaagtacattaagaaggtagtttaatgtatgaaatgcagatttcagatagttggaaactatttagcagaggctctggttttcaaacatttgtcaagggaaatgaagcaaccccacctctcatttaggtaaaaagggaaaaggaaattctcttagaaatacaatattaatgatttagctccctatggtaatgtacaatgatgaactgttatatatggaaagaatattacttgtttctaattagaaagtgtccctttccatcctgtagcactgagcgaaaacaagaaaagctaaatggttccaaaatgtttaaagtagcttttaaagtattacaatgtgcctgtaggatgtaaggtatggtataactatctcacaggaaagaatattagctagaatagagaaagaaacatgaaaaaatgtcaaatagataaatcttggatgcaaagaatatcttaaacacttgatctgtgtgttcgattcaaggcaagattgaatcacataagataaaacagattctaggggggtatgtcaaggaaaaattacatgtgaatgtttcagagcattaatttatttactttgggcatttacatttttagccctcataatattcttggtttatatttgtattttcattcatttactcagttacttattcaaccagtcaatagcaactcctcattgagtattcattaagcatcaggcacagttccaaaacacacagttgacccttgatcaggacagggtttaggatcactgattctcctcaacacagaatttttattgatttcaaaataaattatg

SEQ ID NO: 72536 - DNA, 1235 bp, Homo sapiens
gcatacagggttccaggcactgagctaaatgaatttctcatgaattttcttgtataatccttaaaaacctgatcaggttggtatttttttatcatcccttttctttttagttgagtactctgagacatacagtgtagttgagtgactttcccaaggtaacacagctgatgactgatatagctggaatttcaaccacattctctctgaccctagagccctaaccatgaactttatgctttattatccttcaygatgcctgcaaatattatcacaggaaataccttcttggggtgctgaaattactataagaaacatattatcagtcctactacaatgagatagtggtaaagtatagacagatgctaaacatcaattttatggaaatcattcaccaccagacagaagtgagtatgacagtgagctcaattcaatcatgaaagtacattaagaaggtagtttaatgtatgaaatgcagatttcagatagttggaaactatttagcagaggctctggttttcaaacatttgtcaagggaaatgaagcaaccccacctctcatttaggtaaaaagggaaaaggaaattctcttagaaatacaatattaatgatttagctccctatggtaatgtacaatgatgaactgttatatatggaaagaatattacttgtttctaattagaaagtgtccctttccatcctgtagcactgagcgaaaacaagaaaagctaaatggttccaaaatgtttaaagtagcttttaaagtattacaatgtgcctgtaggatgtaaggtatggtataactatctcacaggaaagaatattagctagaatagagaaagaaacatgaaaaaatgtcaaatagataaatcttggatgcaaagaatatcttaaacacttgatctgtgtgttcgattcaaggcaagattgaatcacataagataaaacagattctaggggggtatgtcaaggaaaaattacatgtgaatgtttcagagcattaatttatttactttgggcatttacatttttagccctcataatattcttggtttatatttgtattttcattcatttactcagttacttattcaaccagtcaatagcaactcctcattgagtattcattaagcatcaggcacagttccaaaacacacagttgacccttgatcaggacagggtttaggatcactgattctcctcaacacagaatttttattgatttcaaaataaattatg

SEQ ID NO: 72537 - DNA, 553 bp, Homo sapiens
tgctgactaaaagtaaattattatatggtaacagacaagtaaggaaaatatagcagtggtagcagatttcccwattcccagtgatctccaggaattatttccttccaatggcaaaggtctcattttaaaacaaattatatatttcctttatccaatgtacaattgtctttgctattccaagctcataattaaggcaaaaattgatcctgcttattgacaaatgatgtaaacatgaggggtcagtagcatcctcaaaggaaagatttgctgttaccaagcccctagttttccataatcctaaaataactggttttcttcaagttacttccttatttaaaaatgttatgcaaaggcagtgccaagagtacaaaaaaagagctataaaagcctaaagaaaaagtaccatcacaagacagcgttttcttctaaaacagtatttttaaaggtaggagctttgtcttgatgtgtgtgtgtccctagtctctttgactgtacctgatgagcacttagcaaatgttggctgaataatggctgaatgaataggaaagcacat

SEQ ID NO: 72538 - DNA, 553 bp, Homo sapiens
tgctgactaaaagtaaattattatatggtaacagacaagtaaggaaaatatagcagtggtagcagatttcccaattcccagtgatctccaggaattatttccttccaatggcaaaggtctcattttaaaacaaattatatatttcctttatccaatgtacaattgtctttgctattccaagctcataattaaggcaaaaattgatyctgcttattgacaaatgatgtaaacatgaggggtcagtagcatcctcaaaggaaagatttgctgttaccaagcccctagttttccataatcctaaaataactggttttcttcaagttacttccttatttaaaaatgttatgcaaaggcagtgccaagagtacaaaaaaagagctataaaagcctaaagaaaaagtaccatcacaagacagcgttttcttctaaaacagtatttttaaaggtaggagctttgtcttgatgtgtgtgtgtccctagtctctttgactgtacctgatgagcacttagcaaatgttggctgaataatggctgaatgaataggaaagcacat

SEQ ID NO: 72539 - DNA, 553 bp, Homo sapiens
tgctgactaaaagtaaattattatatggtaacagacaagtaaggaaaatatagcagtggtagcagatttcccaattcccagtgatctccaggaattatttccttccaatggcaaaggtctcattttaaaacaaattatatatttcctttatccaatgtacaattgtctttgctattccaagctcataattaaggcaaaaattgatcctgcttattgacaaatgatgtaaacatgaggggtcagtagcatcctcaaaggaaagatttgctgttaccaagcccctagttttccataatcctaaaataactggttttcttcaagttacttccttatttaaaaatgttatgcaaaggcagtgccaagagtacaaaaaaagagctataaaagcctaaagaaaaagtaccatcacaagacagcgttttcttctaaaacagtatttttaaaggtaggagctttgtcttgatgtgtgtgtgtccctagtctctttgactgtacctgatgagcacktagcaaatgttggctgaataatggctgaatgaataggaaagcacat

SEQ ID NO: 72540 - DNA, 578 bp, Homo sapiens
cacaaaaaacaaagtcccatctttaataaaaagatttagagattcaatctgtttcaaagattccctgattaactgtctggaaacatgaagtgtcagattaagcattaagttcagctcatgcttactgctttccatgtcttagaaagggaaagwactttaaaagaaccaatctgtaatatagaagacagggaaaatggctcttaatagaaacaaggaaatgctaagaaaagtaaaccataactgaacaacgctgaaaagtttaaagggaattaaaacataaatggctttagacaggaacagaaaaattatgataaatagaaaaaacatctgcaatactggatatataacattaacgtggatcttcattcatataattttctaagagttttggacaaagtgtaccctgtgactttcataaactgttgatagaaatgtaaaatggtaaaatctcttggaaaatgttcttcagcttcttaaaaaattaaatatagccctatcatctgacccaacaattctactccttggtatttatgaaagagaaaaaggaaatatatgtccttttaaggacttataccaaa

SEQ ID NO: 72541 - DNA, 1667 bp, Homo sapiens
agctgcactgacagctgattagacggtgcctacccagattgaacgtgtgtctgcccctcccagtccaccgactcaaatgtatctcttttggcaacactcccacagacacacccaggaacaatactttgcatccttcaatgcagtcaagttgacactcaatattaaccatcacaactactaatttttaaaaaaaccagtctcacataggttgataaaatcttgactgtcattttggggaaaattaaaagacctttttattatcatttgttttttccacagggaattactgccaaatccatatcatgaattccccaaaaaagtatttaataagacagcacttaaatataacagaaaatatatgttagagctaaactcactaatagtataatttacacttctgcaaaagatcataatttaatttttttattcaatgtggtagaagaccaaattaataattataaaattctctactcactgatttttctggatgtagcctctgttatggaagaataaaatataatactgttttaaaagatacttgagattaaaaaaatacttttgaggaagaaattaattcacaaaattatttcacttgtctagatatgcattttataaatggaaacattgaaggagaaaggttacatgacttgttaaagtttctttgtttttttgtttgtttgtttgtttgttttttgagacggagtcttgctctgttgcccaggttggagtgtagtggcgcgatctcagctcactgcaacctctgcctcccaggttcaatcgattcttctgcctcagcctctggagtagctgggactacaaatgtgagccaccacacctggctaatatttttgtatttttagtagagacggggtttcaccatattggccaggctggtctcgaactcctgaactcatgatcctcccgcctcggcctcccaaagtgctgggattacaggcgtgagccaccacgcctggctgacttgttaaagtttctaaagttgatttgtgaatggagaaagaaatagaatgtctttcttgcaatgtcaattcaatatcgaattcaatattttttttggtgctcatcttcttttaagatctgtaagactgaaatgtttatgtgcgcactgtaaaaaaggttctgtctaaagcctgaaaaataatttttttttgcaaagagtttctatgttcatttcaaacctttggcagtattatatctagaatttttttttgttctctttttctttttcttttttccttttttcttttgattaagatcctcacttctcacagggggaaaaagaggaaaagcgaaattttataaaagggcagttctgacctaggaagaggaaagaaggttttaacatagaggaaagctgaggtatatctttaaagtagagtaggaggttctcactacatcattttgctttaagtggatgtaaaggaaaagttaccaagtgttttcttgcttgaacaaagataggtattttctcatgaagctttgaaaggttttctagttgaaaagtaatgtgaaaaacaataacttctgccactgaatgattgytataagcctcagtaccttcaataaaaagatgcttctgttcaatttccagtcacatcaaattctcattacgagaagctaaatcccatctctccatgagccagactgta

SEQ ID NO: 72542 - DNA, 732 bp, Homo sapiens
agttataaaaagtgataaatgctgtgaaggagataatgtcagtggattaaggggagaagaaacttgttttatacagagtggtcaaagatggcctttcagagttagaaatatctcattcaaagcataagaaagagacaagtgtgcaaagaaggaaagaagagtggttccgaatcaaactatgatagttaattttatgtgtcaacttgactaagccatggagtgcccagatatttagttaaatattattctgggtgtttctatacagctggcttttgatgagattaacatttaaattggtaggcttagtaaagcagattgccctttgtaatgtgagtgggcctcatctaatcagttgaggaagtgaatagaataaaatgttagaccctccctcaagtaatggaggattctttctgcctgactgcctctgaatgggacattggctttttctccccttcagacatgaatggaaacatgtttcttcctgggtctcgtgactgccagccttcagactagaattaaactcttagctctcttgtgtctcctgcttgctgactcactcagataatcgtgggacttgccagactccaaatcacatgagccaattccttataataaattagatagattggatgaatggatagatagatagatagrtaggtagatagatagatagatagatagatagatagatagatagatagatagatagatagatatcctattgcttctgtt

SEQ ID NO: 72543 - DNA, 823 bp, Homo sapiens
cgtagtataaattgtttttttctgatttctttgtattatttttcacaattttttatcttactgagatttttttgtatgataagtttgaattctttttctgagattttgcaatttttcttttattaggatctgttgctaagaaattcttatattcctttggaggtgttattattttcttgctttttaatgcttcctgtgtctttatgttgctgtctgtgcttctggtgtaacagtggcttcttctagattttcgactttacttatatagaggaagactttttcctgaagttctaaaaattgtgttgtttgggtagggttctttggctttgattttggctgtgtgccatagcatattctctgtatgattttttgtggctgtaaatagcatcagtagtatctgtgatttcctcagtagtttagggtacagttattaatgaaggctatggtgaatctttgctgaagacaaagatgccaactaggacagtctttgggccccaattggtggcagcagtgggctaatattggatggcttatgttggcactggtgttagcagacagtcagactgatgctgagcttacctggatttcagtagtggcagcagtgggttgggtggctaagagggtactcaggaacctgggaaccattgtggtgtaggtgatggaagtagctgtggcaagatgatcaactgggtcccaagacatacttactggtattggyagtggctgtggtatggcgtcactactgacagccccagacacacaattatcaggctctctcactctctgtggcagcaatatcacaacactatacaaagtaggggat

SEQ ID NO: 72544 - DNA, 766 bp, Homo sapiens
gcatgtttaaaacaggaagtaacataaagagagaaaattgtgtgttgggttgtttcatgttaagactgctaatatttgctgagcacaatgtgacagatactaagtacctaacattgtttaactcatgtaatctacaaatgcaataaccctttgctgcttttgaagttagaaaattgaatcttagctagcacaactagtaagtggcaaagatgggatttgaacccaagtattttctccccacccagtcttctagtcctggggcctactttcttaaccacaatgctctcctgggtaattcctctatgtgtcagctactagatggcatcaaaaagagctggactattttcattccacagctccctccaccccattgcctctgtaccatattttcaagtcctcaaatagagcgaagtctgcgtatcttcccttgggggtctctgcatttgctggtttctatgtattagagtttcccagagaaacagaagcaataggatatctatctatctatctatctatctatctatctatctatctatctatctatctayctatctacctacctatctatctatctatccattcatccaatctatctaatttattataaggaattggctcatgtgatttggagtctggcaagtcccacgattatctgagtgagtcagcaagcaggagacacaagagagctaagagtttaattctagtctgaaggctggcagtcacgagacccaggaagaaacatgtttccattcatgtctgaagggga

SEQ ID NO: 72545 - DNA, 766 bp, Homo sapiens
gcatgtttaaaacaggaagtaacataaagagagaaaattgtgtgttgggttgtttcatgttaagactgctaatatttgctgagcacaatgtgacagatactaagtacctaacattgtttaactcatgtaatctacaaatgcaataaccctttgctgcttttgaagttagaaaattgaatcttagctagcacaactagtaagtggcaaagatgggatttgaacccaagtattttctccccacccagtcttctagtcctggggcctactttcttaaccacaatgctctcctgggtaattcctctatgtgtcagctactagatggcatcaaaaagagctggactattttcattccacagctccctccaccccattgcctctgtaccatattttcaagtcctcaaatagagcgaagtctgcgtatcttcccttgggggtctctgcatttgctggtttctatgtattagagtttcccagagaaacagaagcaataggatatctatctatctatctatctatctatctatctatctatctatctatctatctatctayctacctacctatctatctatctatccattcatccaatctatctaatttattataaggaattggctcatgtgatttggagtctggcaagtcccacgattatctgagtgagtcagcaagcaggagacacaagagagctaagagtttaattctagtctgaaggctggcagtcacgagacccaggaagaaacatgtttccattcatgtctgaagggga

SEQ ID NO: 72546 - DNA, 766 bp, Homo sapiens
gcatgtttaaaacaggaagtaacataaagagagaaaattgtgtgttgggttgtttcatgttaagactgctaatatttgctgagcacaatgtgacagatactaagtacctaacattgtttaactcatgtaatctacaaatgcaataaccctttgctgcttttgaagttagaaaattgaatcttagctagcacaactagtaagtggcaaagatgggatttgaacccaagtattttctccccacccagtcttctagtcctggggcctactttcttaaccacaatgctctcctgggtaattcctctatgtgtcagctactagatggcatcaaaaagagctggactattttcattccacagctccctccaccccattgcctctgtaccatattttcaagtcctcaaatagagcgaagtctgcgtatcttcccttgggggtctctgcatttgctggtttctatgtattagagtttcccagagaaacagaagcaataggatatctatctatctatctatctatctatctatctatctatctatctatctatctatctatctacctayctatctatctatctatccattcatccaatctatctaatttattataaggaattggctcatgtgatttggagtctggcaagtcccacgattatctgagtgagtcagcaagcaggagacacaagagagctaagagtttaattctagtctgaaggctggcagtcacgagacccaggaagaaacatgtttccattcatgtctgaagggga

SEQ ID NO: 72547 - DNA, 1099 bp, Homo sapiens
tgactattgtgagtactttatattgagaattttcataatgctgcaattaaccctatgaggtaggtaatgctatcatacccattgtacagagaaggtaactataacacagaaaaggtaactgagtgactcactgagggtcactgagctagtactatgtgacagatagattcagagatgaaactcaaccaatatctatgataaccaaagagaaaacgaggctaagtccatcatagagctcttttttaaatttttaccaaaaaggtaagttcttatgccaacaattacttatccatcctctagttctcagaaagcctcctttgtatgcaaatatgttcaattttcacatactattttatctagcctgtgcaaagaacaagagatattagatttaatacacacatatatatgtgtatatatatgtgtgtgtatatgtgtgtatatacacatatatgtgtatatatatacacatgtatatgtgtgtatatatatacacatatatatgtgtgtatatatatacacatatacatgtgtgtatatatatatatataaaatggtctgttgttcaaataattgaggatgcaaatttcagaaaaacatgactgggacattcatctttcaagaatcagtttcttttttatacatttttttaatttttatttttagttcagcagtacaagctcagatttgttacacaggtaaacttgtgtcatgggtgttttttgtatagattattttatcacctaggtattaagcctagtactgattagtgatttttccttatccccttcctcctcccactctctaacctttgaaaggacccaatgtgtgtgtygttcctctctatgtgtctgtgtgttctcatcatttagttcccacttgtaaatgagaacatgtagtatttgtttttctgttcctgtgtaagtttgctaaggataatggcctccagctctatctatctccctgcaaagaacatgatctcattgttttttatggctgcatagtattccattgtgtatatgtaccacatttactttattcagtctatcattgatgggcatttaggattatttcatgtctttgttattgtgaataatacaca

SEQ ID NO: 72548 - DNA, 584 bp, Homo sapiens
agttgggtgacgcttaaaagttaactatcatcctttaaaaacctccatttttataaagctcccaaatgggtgaattatttctgcaaaaatgctgatatccagccctagctgtaacaataataagaaaaaaaaaattatcttatcctaatgacactcctttacccaagaactgcaattaggagtctcataaatttacaaagctttctcccttatttagccagtattccatcttcgtcaataccatatacattagttacacatttaaaacatttttattaaatatacatgtcttttggcaggcccaacggtgatcttaacccacttgaacatttacaattactgctttaaatttttcatgagctatctttatagcaaacgattctaacatttttctgaggattaaagtctaattcacaattttatggtttgatakatgagactgcatgttttctcatttatgataacataagagttcaagcaaggggtggttagaggtgtaccactgggaagaagatctgctaaatttatttttttggtattgcttttaaaaagtcttacttaacctgtatgtatctatggtaata

SEQ ID NO: 72549 - DNA, 628 bp, Homo sapiens
ttacatactttctaaatagtcagatactaaatkatagcatcataagtattgacaagaatatggagaaatcaagttcaattcattgccagtgaacatatgaattaatattttgaagagcaaataagatcaggtaaagttgatcccacaattccacttacaagtatggggcaaaagaaatgaggaagaaaaagctagtctatgccaccatctagtggccttagaatataatagaagttgtgatttcttcagccgcgcttacaaaggagtcctgaaagtacctatgtaaggatggaccaaaaacttacaaacatatacagtatatatgcagttactgccctcactaactgttgggcccacattggctccacccatcctgcttccttctgaagatttgcatgaacctaaccacgtgacacaaccaagtagaaatatctcagacagagtgcttcctatgtccacctcatataatttttttcaccacccttcaaacaatacctattgtttcatgagtcttaaaaagatactactccaaattgaccagactagattggtaataacttaaaagttggtcaatactaagtattggcaagaatatgatgcaaagtgaagcctcatacacttctattta

SEQ ID NO: 72550 - DNA, 507 bp, Homo sapiens
tgctctcccctggactcccaggaatggtctgccgctatwcctgggccaagccagctgagagagaacatatttccactcagtcttgactatgcccaagggcctccgcgtcgaacagctcagaattgtgccgaatggagcaaaggtacactcctagagtattctagctggaagcaccacaaagatccttcataactttccccaggcatgtagaccattttgtcaacaaaagccaacaatcagcccattatagcaaataggagcagagctgctgtaattaggggtgggggctggagtccggaccagtgggcctttcctcagttgccgcccgctccctgaagtcttctctgaagagccctagagcatctccaagaccagcccaaagcgggtgaatttacccttgttcctcattttacacaaggctcagagaggaggagaggttgcccaagttacccagcaagtcaaagggggattccctgagagcttgcgctctcatcctccctagaagag

SEQ ID NO: 72551 - DNA, 725 bp, Homo sapiens
tcccccagagcctttggaaaggactgccgtcctggtagtaccttggttttaggccagggagacctgtgttgaacttctaacctgtaaaacytaatgaatttgcattgctttaagccattgagtttgttgaaatttgtttcagcagccatagaaaactattaaaatgtattaagtatgttaattccctcatttgaaaatccgactttaccaatgttacacaaacttgtccagagaataaagataaaacacttcctaactcttctgatgaagccagaaaaccctgataccaaaatcggataaggacattacaaaaaaagaaaattattggccaatctctgctatgaatgtagatacagaagtcctttacaatttaatagctaaccaaattcagtaatacacttaaaaagataattcaacacaaccaatatgactttattccaggaatgtaaagttggttagtcattagaaaatgagttaattataatttatcactttaacaggttaagtagaaatttcatacagtcatctcaatagatgcaaagaaagcatttgatgaagttctgttcatcaaaagacacaataaaaggaatgaaaaggcaagcaaaaaagtttatgactaaaataagagaaaccttaagaaactaggaagagaagggaacttccttaatttgataaagatattctaaaaaaataacaaatatcatatttaatgggaaaatattgaa

SEQ ID NO: 72552 - DNA, 584 bp, Homo sapiens
gtaatttacctgcccctcttctgtgcttccaatgtgtcttttatcatagtggttcctgtacaagtactaaggaaagaagacagcacggtatgaagtatgagaatgaacaaagtatgcacatggacaatcctttctttttttttagagacaagatcttgctgttttgctcaggctcttttgcagtgacaccatcactgcaacctcgtactcctgggctcaagggattctcccacctcagcctgagtagctagtactacaggtgtgygccaccacacccagctaatttttatagttttttgtagagacgaggtctcactatattgtccaggctggtcatgaactcctgggctcaatcctttttcaaaagacagctttgttgaggtataaatcacataccatacagttacccagttaaaatacacaattcaatggtttttagtatattcacagatatgtgcaaccattgccacaattagaacattttcatcacttcagaaagaatactcttcccctttagtgaaccaccccttgcctccagcaactactaatcaatctactttttgtctctatgcattttcctgctc

SEQ ID NO: 72553 - DNA, 584 bp, Homo sapiens
gtaatttacctgcccctcttctgtgcttccaatgtgtcttttatcatagtggttcctgtacaagtactaaggaaagaagacagcacggtatgaagtatgagaatgaacaaagtatgcacatggacaatcctttctttttttttagagacaagatcttgctgttttgctcaggctcttttgcagtgacaccatcactgcaacctcgtactcctgggctcaagggattctcccacctcagcctgagtagctagtactacaggtgtgcgccaccacacccagctaatttttatagttttttgtagagacgaggtctcactatattgtccaggctggtcatgaactcctgggctcaatcctttttcaaaagacagctttgttgaggtataaatcacataccatacagttacccagttaaaatacacaattcaatggtttttagtatattcacagatatgtgcaaccattgccacaattagaacattttcatcacttcagaaagaatacycttcccctttagtgaaccaccccttgcctccagcaactactaatcaatctactttttgtctctatgcattttcctgctc

SEQ ID NO: 72554 - DNA, 676 bp, Homo sapiens
gatcccataggagtagtctaccccagacttggtggaaatggggagtgtcagtcaaaacctttaggcagctgttctttcttactcaatctcactccttggagaagtagtcccaatatcttggctgtaatgtacccacagtagttctcttacccctctytgcaaattatatttatataactgctatttgcacactaaaggtgtgaggtgtaaaggggaaaacataatatagcagtcaagagtgtagactctgatcagacagcctgagttggaatctcaactgctgcttatctgtaacaccctatttaactctctatgcctccgtttccttgtctctgtgaagattaaatgatttttcatgagtaaaatcatagagtactgcctgacatgtagtaagtgctcagtgagaattctattattccatgactgtcttgtctctttcactacattgtcagtttcatagcagcagttattatcatatttatctttgtgtcctacccatgggctccatgggcctaaaccattcttcaacccctccagtgcctagcatggtcccctatgcagtacaagtgggataaaaaaaaaagttcgctgaattggtgagggcctacaggtggcatgtggaccaaatctgagttccctaggatcatttttaaaatgcagagacaccatcatttat

SEQ ID NO: 72555 - DNA, 1377 bp, Homo sapiens
  misc_feature (1)...(1377): n = A,T,C or G
agaaaggatgagtccacttttaaacatgacacatttgaaaaagctcaagaaggattaaaatgagagaaagaaaaagaaacaggacagaatttggggtaactccagcattttccaataagcaaagaagattgtgagaaggaacagccaggaatctttatctcctggatagtcagctgttgtctctgaatccataggatgagagttggttgaatttaaagacctgtgtaaacttatcatctaaattcaacattatttgggaagctgaagtgggaggaggcttaagcccaggagttcaaggctttagtgagctatgatcacaccactgcactccagcctgggtgacagagtaagaccctgtctctaaagagaaagagagagagagagagagagagagaaggaaggaaggaaggaagcacggaaggagggagggaggaaagaaagaaaaaaaaaaaaaaagaaggaaggagagagagaaagaaagaaagacggctgtgacattatacaatatgtctggtgactttttacaacaacataaaagctttagtgataatataattggcaaaactagattatttttccctcatttgtactcttaaaataaaattttttgggccaggtgcaatgtcttatgccaccaatcccaccactcctgggaggctgacggcggtgggattccttccattcaaggggtccacaacacccctggtgtgacttaagtggcaccccccttctttattttagaatactaaactatttccttgttccttgtgtgaataagcannnnnnnnnnnnnnnnnnnnnnnnnnnnnnnnnnnnnnnnnnnnnnnnnnnnnnnnnnnnnnnnnnnnnnnnnnnnnnnnnnnnnnnnnnnnnnnnnnnnatgcaatggagtggcctaataggactcaatttgttccatcactgactttggaagctaaaatacgtatacataattactgaataaactgtttgttgttgttgttgttgttgttttaaaaaaaaaaggagggaagggcgcagtggctcacgcctgtaatcccagcactttgggaggctgargcgggcagatcatgagatcaggagatggagaccatcctggctaacacggtgaaaccctgtctctactaaaaatacaaaaaattagccgggcgtggtggcaggcacctgtagtccccgctactcaggaggctgaggcaggagaatggcgtgaacccaggaggtggagcttgcagtgagccaagatcgcgccactgcactccagcctgggtgacagagcaagactctgtctcaaaaaaaaaaaaaaaaagaaaggggagaaattcagcgttttcttgtattcctgtatttagcctgagttgggtttgggttggttaaaca

SEQ ID NO: 72556 - DNA, 684 bp, Homo sapiens
tcctcttggtattatggtcaccaactgtcctaatgcgtctaggactgtcccctttttagcacagaaagtcacacatttcaggaaactcctatgtcctgggtaacccagggccaccctacccatggcagctagtgtaaccaccctacccccggcctctccttttttctgagacagagtctgctctgtgacccaggctggagtgcagtgcaacctccaccacccaaattcaagtgattctcctgcctcagcctccttagtagctgggattacaagcgtgtgccaccatgcctagctcatatttgtatttttagtagagatggcgtttcaccacattggtcaggctggtctcgacctgacctcaagtaatctgcccatcttggcctcccaaaatactgggattacaggcgcgaaccatggcgcctggccttggtgtaaaccccttttaagagaggttgagcaaggaagagctgaaagataagggggttgcttccaagtgtagcaaggtcaaggaaaggttttttattttttttgataaagaaaacttgcgtytgttaataaactgggagaggagattgggaagtacaatcgtcgttggacttgatcccagaggaagcgaaactgcattgttctgaaaggcaggcggcagtgtcccatgtttctcacagccctcactgtgctggctca

SEQ ID NO: 72557 - DNA, 791 bp, Homo sapiens
aatctttttccctgtttaaattcagactctttattaccaaacactcctaactcttagcagggccataagagtaactgttcttttaaaagtcttatgtactgccgggcttggtggttcatgcctataatgccaacactttgggaggccaaggcagagggatcacttgaggccagtagtttgagaccagcctaggcaacatagtaagaccctgtctctacaaaaaataggaaaaatttgctgggtgtggtggtgcacgcctgtggtcccagctactcgggaggctgagatggaaggatcacctgagcccagaaggtggaggctgcggtgtgctgtgattgcaccactgcactccagcctaggtgacagagcaagacctcacttcaaaaaaaaaaawaaaacaaaaaacctctcatgttggttctttcaaaaattgtatgagaccaacaatctttctaaggctaggaaagcgaacacccaatctaacaaaattgcagatcagttccagcaaaattagcaggtcctcagcccaaatcctgagggtccacaccagtacacaggaagactgagattacccaatgctcctcataccccaatggagactgtatcccaagggaatctttccctcctcagtcgtacctcgtgaagaaaagctggtggagcaattttttgaataagataaagtcttaaaaaatatcagaacaaaagggagggcattactaaagtgaactttggtgagttataaaaatctatggataaattaagtttcttcttcctataacatggccaaatga

SEQ ID NO: 72558 - DNA, 791 bp, Homo sapiens
aatctttttccctgtttaaattcagactctttattaccaaacactcctaactcttagcagggccataagagtaactgttcttttaaaagtcttatgtactgccgggcttggtggttcatgcctataatgccaacactttgggaggccaaggcagagggatcacttgaggccagtagtttgagaccagcctaggcaacatagtaagaccctgtctctacaaaaaataggaaaaatttgctgggtgtggtggtgcacgcctgtggtcccagctactcgggaggctgagatggaaggatcacctgagcccagaaggtggaggctgcggtgtgctgtgattgcaccactgcactccagcctaggtgacagagcaagacctcacttcaaaaaaaaaaaamaaacaaaaaacctctcatgttggttctttcaaaaattgtatgagaccaacaatctttctaaggctaggaaagcgaacacccaatctaacaaaattgcagatcagttccagcaaaattagcaggtcctcagcccaaatcctgagggtccacaccagtacacaggaagactgagattacccaatgctcctcataccccaatggagactgtatcccaagggaatctttccctcctcagtcgtacctcgtgaagaaaagctggtggagcaattttttgaataagataaagtcttaaaaaatatcagaacaaaagggagggcattactaaagtgaactttggtgagttataaaaatctatggataaattaagtttcttcttcctataacatggccaaatga

SEQ ID NO: 72559 - DNA, 791 bp, Homo sapiens
aatctttttccctgtttaaattcagactctttattaccaaacactcctaactcttagcagggccataagagtaactgttcttttaaaagtcttatgtactgccgggcttggtggttcatgcctataatgccaacactttgggaggccaaggcagagggatcacttgaggccagtagtttgagaccagcctaggcaacatagtaagaccctgtctctacaaaaaataggaaaaatttgctgggtgtggtggtgcacgcctgtggtcccagctactcgggaggctgagatggaaggatcacctgagcccagaaggtggaggctgcggtgtgctgtgattgcaccactgcactccagcctaggtgacagagcaagacctcacttcaaaaaaaaaaaaaaaamaaaaaacctctcatgttggttctttcaaaaattgtatgagaccaacaatctttctaaggctaggaaagcgaacacccaatctaacaaaattgcagatcagttccagcaaaattagcaggtcctcagcccaaatcctgagggtccacaccagtacacaggaagactgagattacccaatgctcctcataccccaatggagactgtatcccaagggaatctttccctcctcagtcgtacctcgtgaagaaaagctggtggagcaattttttgaataagataaagtcttaaaaaatatcagaacaaaagggagggcattactaaagtgaactttggtgagttataaaaatctatggataaattaagtttcttcttcctataacatggccaaatga

SEQ ID NO: 72560 - DNA, 791 bp, Homo sapiens
aatctttttccctgtttaaattcagactctttattaccaaacactcctaactcttagcagggccataagagtaactgttcttttaaaagtcttatgtactgccgggcttggtggttcatgcctataatgccaacactttgggaggccaaggcagagggatcacttgaggccagtagtttgagaccagcctaggcaacatagtaagaccctgtctctacaaaaaataggaaaaatttgctgggtgtggtggtgcacgcctgtggtcccagctactcgggaggctgagatggaaggatcacctgagcccagaaggtggaggctgcggtgtgctgtgattgcaccactgcactccagcctaggtgacagagcaagacctcacttcaaaaaaaaaaaaaaaacaaaaaacctctcatgttggttctttcaaaaattgtatgagaccaacaatctttctaaggctaggaaagcgaacacccaatctaacaaaattgcagatcagttccagcaaaattagcaggtcctcagcccaaatcctgagggtccacaccagtacacaggaagrctgagattacccaatgctcctcataccccaatggagactgtatcccaagggaatctttccctcctcagtcgtacctcgtgaagaaaagctggtggagcaattttttgaataagataaagtcttaaaaaatatcagaacaaaagggagggcattactaaagtgaactttggtgagttataaaaatctatggataaattaagtttcttcttcctataacatggccaaatga

SEQ ID NO: 72561 - DNA, 791 bp, Homo sapiens
aatctttttccctgtttaaattcagactctttattaccaaacactcctaactcttagcagggccataagagtaactgttcttttaaaagtcttatgtactgccgggcttggtggttcatgcctataatgccaacactttgggaggccaaggcagagggatcacttgaggccagtagtttgagaccagcctaggcaacatagtaagaccctgtctctacaaaaaataggaaaaatttgctgggtgtggtggtgcacgcctgtggtcccagctactcgggaggctgagatggaaggatcacctgagcccagaaggtggaggctgcggtgtgctgtgattgcaccactgcactccagcctaggtgacagagcaagacctcacttcaaaaaaaaaaaaaaaacaaaaaacctctcatgttggttctttcaaaaattgtatgagaccaacaatctttctaaggctaggaaagcgaacacccaatctaacaaaattgcagatcagttccagcaaaattagcaggtcctcagcccaaatcctgagggtccacaccagtacacaggaagactgagattacccaatgctcctcataccccartggagactgtatcccaagggaatctttccctcctcagtcgtacctcgtgaagaaaagctggtggagcaattttttgaataagataaagtcttaaaaaatatcagaacaaaagggagggcattactaaagtgaactttggtgagttataaaaatctatggataaattaagtttcttcttcctataacatggccaaatga

SEQ ID NO: 72562 - DNA, 750 bp, Homo sapiens
ttagtctctctaattctagagtcttcttggattagcctgggaaagaacgaagactttagattaattattgcgtgaagcatggtaagaattgatgtaccaaaggaatcctaagtcacagcgaaggccaattgaaactggatggcttaaactggaaacagttaaagwctaatggcctttcactttttaaatgaattcacatttaatatggcatagtactggttttaaaatatacacttaatacttaaatgtacatcaggactctttacatgtataacatttaaatatataccagaactcttttcacataagggtctaaataatggccccagtaatcttagatatttacactgtgctgccaggcactgcatttttttggagctggagttttgctctgtcgcccaggctggagagcagtggcacgatcttggctcactgcaacctctgcctcccaggttcaagtgattcccctgcctcatcctcaagagtagctgggattacaggcgtccaccaccatgctaggctaattttttgtatttttagtagaggcagggttttaccatgttgtccaggctggtctcaagtgatccacccacctcggcctcccaaagtgctgggattacaggcatgagccactgcacccagcccaggcactgcatattttaagtgcagtgtatagatcctatttataccaaaaatcttatgctacagaagccatctgttttttatcagataaaaactgattgatttcct

SEQ ID NO: 72563 - DNA, 750 bp, Homo sapiens
ttagtctctctaattctagagtcttcttggattagcctgggaaagaacgaagactttagattaattattgcgtgaagcatggtaagaattgatgtaccaaaggaatcctaagtcacagcgaaggccaattgaaactggatggcttaaactggaaacagttaaagtctaatggcctttcactttttaaatgaattcacatttaatatggcatagtactggttttaaaatatacacttaatacttaaatgtacatcaggactctttacatgtataacatttaaatatataccagaactcttttcacataagggtctaaataatggccccagtaaycttagatatttacactgtgctgccaggcactgcatttttttggagctggagttttgctctgtcgcccaggctggagagcagtggcacgatcttggctcactgcaacctctgcctcccaggttcaagtgattcccctgcctcatcctcaagagtagctgggattacaggcgtccaccaccatgctaggctaattttttgtatttttagtagaggcagggttttaccatgttgtccaggctggtctcaagtgatccacccacctcggcctcccaaagtgctgggattacaggcatgagccactgcacccagcccaggcactgcatattttaagtgcagtgtatagatcctatttataccaaaaatcttatgctacagaagccatctgttttttatcagataaaaactgattgatttcct

SEQ ID NO: 72564 - DNA, 974 bp, Homo sapiens
ttaaattcattttaaatcccacttcaaagcattcatgcacgtggattgtggatcactttgtgatcacttaacctacttgtaaaaatggcaaaggcatgggacatatcccagacctactaaattattacacgaggctatttcaaatacaactgtggtaagcttactaatggtcccccaaaatagccaggttctaatcataggaacccatcaatgttaccttatatgaaaataggggccttgaaggtgtcattaagtcaaagattttatcttggattatcagagtggatcctaaatgtagtctcaagtgtcctttaaagagggaggtagagggagattttactgcagaagaggagaaggtgatgtaatgatggaagtaagaaatcagagtggtgtgctttggaggtggaggagggggccacaagccaaggaatacagacagccactggaagctaaaaaaggcaaggaaatagatttttccctaaagcctccagagggaaaataactctgctgacctttattttagacttctgagctccagaactgtaaaacaataactttgtgttgccgtaagccacttggtttagggtaatttgttaaggcagcaatagggaaataatacagtcttcaatgaatgatgttctgccatgatttctcaaaaaaatatatatatacatatatatatacacacacacaaatataaatttgctgatgacttcacttatttattagtttattttttaaccaaaaatgtactaaatgcaaattatatataaagttatattttggcattaycatttcgagcaaagacaattttctgcatgtatgagtttttactcagagagtatcacatagaacaaatttgaattacaggccatatttgctttgtgaacacgcaccaagtgtggggggtggaaagggaacatctacagcccttgagtcaaggctcaagggtacaactgcaccattttcatgca

SEQ ID NO: 72565 - DNA, 529 bp, Homo sapiens
  misc_feature (1)...(529): n = A,T,C or G
ctgcctacctgtcaggccttccttatctctttgytctccactccttctttctgtctcacaccagttcctgtcagtgacaattagccaccaagaagccctgctctttctcacctctgggcaattcactgagctttcctgtttcctttccagacagcactgcttcctcagagaagcctccacccaccttggggttaggtcccctacccacaccctcagggcacaggcacccctctctctcctggctgtaaccactatacttctgtttgtcttctccctccctaggagggtaggcccacatctgcctccttcctcactgtatcctgcattcaatacctgattcaaggtagacactccgatgcaagtctgacaagttaatgatttaacaaatcaaagtgggcacgactcagagaaagagggcaaagaaaattccccgcctaaaaaagcgaaaaaagaaaggaaaagagaaagaggagaaggagcaggaggagcangagccaaggagcannggagagangancangaagannng

SEQ ID NO: 72566 - DNA, 650 bp, Homo sapiens
actccttggaataggcatctgcagccagcccacccttcaggatggagccacccactggaaagggctgaatgacaaaagcaagagagagagcaacagaggacagagaagtgacaagggtcaaaggcactgtgggcagtccttgtacttctccctttccactgaaatcctaaacaaaatcccccagtggccatcctcaggatgccatggtaatgctcagaccactctggctttagtccttgcatttatataacatggaaaattgattgtcctctcatttccctcccctgcccaggtgggaccctcaaaggaacagggatgccctgagttctctgagtacttcccgttgcacatggataagaaatacagaggtgagtacctctcaaaaaattcgaaaatgtggcctaacacaggtttattgattgattgattgagatggagcctctctctgttgcccaggctggagtgcaatggcataatctcggctcactgcaacctctgcctcccaggttgaagctatcttcatgcctcagtctcccgaatagctgggattacaggcatgcgccaccatgcccggctaatttttgtatttttgtggtagagatggggtttcactatgttagccaggctggtctygaactcatgacctcaag

SEQ ID NO: 72567 - DNA, 1075 bp, Homo sapiens
tgtataattagcttatttcgtacccatatggagcagctcagctcctgtgcctcagtggggaattcctcgtatgttgctagggtcgccttctgggattacatcttcaggggtgtgcaggaggaggagtcggctgtgctgataaatgaatcagagagacaggaggagagctggcagagtcccccaggtgagatggatgggggctggattgtgctcagggctgctctcttcccttggcctcttctccctctgacctgaggtggacccagtgggaaaatagtgcctgcttctccaggacttattgcttagtcataaatctccatctcggggctttgtatgggaagcgggggggtgggggggggttgggcattggagaggggagaccaggtgagggagggagactgagcagaaggaatatgggaggaggaaagaaaaagagacaaagatatctgataaaagttgaagggtcagcaaaacctctttaactcaggtttcataagttgagaaatattttatcacccttgcgagtcaaacctctgaaaatcaatagggcttgagagttgcatatattgatctgaatgcccgagatgtattgaaatattcatggctggatgtatgtgttcagagaagatgctgggggtggggcctggtgcagagagagggagatgggtaggtagatttctaagtaaaagccagtctccttttcattaaaaatagattaattctattagttggactaaaaccttacacttaaaaggaaatgagcttgtttgtcagacaaataagccactggcaaacccaggaaaaaaaaacatttatttattgctatttaatagcagaagagccagggagagttgataaaattagcacagtatccccaagcgggggagcaagggctgctttgtttgcaaagccaatttggacaccgcagctttgatcttcactttgagmatttgagcaggcatgttagtatcactcatttcacaggagaattgggattcaagtttccccaacaatctaaaaagcagtacattagaaggggattgtctgcctgtagtctcagagtctcaataccctt

SEQ ID NO: 72568 - DNA, 698 bp, Homo sapiens
atgcttttgctactagtagagtgatggggatgaaatggctaagatctcatcttccttaatgggtaggtcatataatgcctaaaactaagaagtcaagaaatggcactatgggtagctatttagatatatggagctaaatatcacaaaaaataaaaattcagttgtaagtggttgcctctggggaagaggacatcagtgacaaaaggaagcagatgtatggactatgtgttgtacaataagtctgtagaggaggaaattattatcctaattttgtagaggaagacattcaggcttagggatgacaagaatgtggctgaagtgaaacttgagtccagctctcctaactcaaggtcctttccttgtgtcatggctgatttctaaaacggctctctgagcctgagaatattttataaattcaagaytgccttactcctaggatgtcggtagaagtgctgttatttggtggtagggttgggaaggaagttagtgataatctggctcaatctcattctacatataaaaaacatgggtctcaagaaagatttttcaggtcaccaacatattattaagtgcacagaagggtaccagtgggaaatcactgactaaatttcttttgagttgctaattgcctttgtaacattccaacaaggtagggcttatttttatttcacagatgatggaaccaaggtgcataaaga

SEQ ID NO: 72569 - DNA, 698 bp, Homo sapiens
atgcttttgctactagtagagtgatggggatgaaatggctaagatctcatcttccttaatgggtaggtcatataatgcctaaaactaagaagtcaagaaatggcactatgggtagctatttagatatatggagctaaatatcacaaaaaataaaaattcagttgtaagtggttgcctctggggaagaggacatcagtgacaaaaggaagcagatgtatggactatgtgttgtacaataagtctgtagaggaggaaattattatcctaattttgtagaggaagacattcaggcttagggatgacaagaatgtggctgaagtgaaacttgagtccagctctcctaactcaaggtcctttccttgtgtcatggctgatttctaaaacggctctctgagcctgagaatattttataaattcaagattgccttactcctaggatgtcggtagaagtgctgttatttggtggtagggttgggaaggaagttagtgataatctggctcaatctcattctacatataaaaaacatgggkctcaagaaagatttttcaggtcaccaacatattattaagtgcacagaagggtaccagtgggaaatcactgactaaatttcttttgagttgctaattgcctttgtaacattccaacaaggtagggcttatttttatttcacagatgatggaaccaaggtgcataaaga

SEQ ID NO: 72570 - DNA, 559 bp, Homo sapiens
gttcaatttgccatgtttaatcaagagttcgggggtagggggtgtatttaaaatcagtgaggaaagcctggactattcaataagtgatattggggcaatttgataacaaacttggattcctacataccgtttcctaaatacatatttaaattttaaaaatgaaaagaaaattcacatattaatacaatcttgtgatagggaaggttttatggacatggaacatcatacaaagaccatgaaggaaaaattaatagatctgaacagctaaaagtgtaagtaaaagcgtcatctctaaagtaaaataaagttacatataaaatactagaaatatgtttctaatatacatgataaatataggattcaagtccttawagcataaaaatgcctcaataaaagagaaaaagataaaaacctaatttaaaaataggcaaaagacatgaagagtcgttcacaaaaatgaaatataaataaataaaatgattacaaattgtcaaccctctctgtaacaataaatactaactaaactacaggcactggtaaacttttttttgtttaagca

SEQ ID NO: 72571 - DNA, 559 bp, Homo sapiens
gttcaatttgccatgtttaatcaagagttcgggggtagggggtgtatttaaaatcagtgaggaaagcctggactattcaataagtgatattggggcaatttgataacaaacttggattcctacataccgtttcctaaatacatatttaaattttaaaaatgaaaagaaaattcacatattaatacaatcttgtgatagggaaggttttatggacatggaacatcatacaaagaccatgaaggaaaaattaatagatctgaacagctaaaagtgtaagtaaaagcgtcatctctaaagtaaaataaagttacatataaaatactagaaatatgtttctaatatacatgataaatataggattcaagtccttatagcataaaaatgcctcaataaaagagaaaaagataaaaacctaatttaaaaataggcaaaagacatraagagtcgttcacaaaaatgaaatataaataaataaaatgattacaaattgtcaaccctctctgtaacaataaatactaactaaactacaggcactggtaaacttttttttgtttaagca

SEQ ID NO: 72572 - DNA, 1234 bp, Homo sapiens
actttacactcccaaaaagtaaattttactgtatgtttgtaaaagtaaaataaaataataaacctattatatgcccctttagttggaattataagctgggatcgatggtcaacttcaattgagaccagtgcagctaattaaaaatttctgtgtaggtgcaaagagagcacttagacccaaagaaccaagcctatacctatttccttagctgcattctgcagctgaaatccagataaacacagagagattaccacctatgtaatcctgtctccacttcatgcttaaagcagagttgttgattcagtggtccaagctttcattccaagccccagtaacccctgatgatttctctgaattctccattgtacatgtaccagatactgaacttgatctgtctctgtagaataaatcagcaatggaaaaaaaaattatacaacccttcaactccaagtcttcaaaagattccccaagacttgcaaatgtgaagtactgtgggatactgcatatttatcaacaggagctctgcattctggcttttggttggggtgaggagatttcaggaggagcaaatatagaaatggtgaaaaaagagacaagttgtggaaagtgctctagtgtcataaggagaaagcagaagactccagagacacctgctatcaaagatcggagaaattcccaaactggagaaggtcctggaacaggagcagaagcaagaaaccacttggattcagcaggtcctgggctgtgggtggtcggggagacactcaagagcccagagcattttaaggccatcactaaccacatgtaaacaaagtgatatttgtagatgttctctataattaaggtccttctacaacatggtattcggagtgcattcataggttcaagttgggtgggctccctattcagcaggttgtattttaccagcagctgaatgggatttaatattaggtaaaaagacattaccaaaatagtaataaaatttagaccctccatgctaagatcaatgcttactcttgagttatagaaaacttgtgcaaaaaccacacctgccacctatactcttctattttcttggttccacctacyttataatcatcttttatctaccaccacctctagccctaaagctcctaatactccactaatctgtccctctgaggatgggctcattgacatatttgctgcaaaatcgccttgttttgtagccgccctttttcccatgggtaatgca

SEQ ID NO: 72573 - DNA, 669 bp, Homo sapiens
ccaccaacttgaaagaggcggcccttcagcttgtcctgggctcccacttgtccccagctcctgcccactctgtggagtgtgcagtcccagccctacctcctgtctgcattttccccagcagcagcagtggcagcccctggccaacctcaaacgagtgaacccgacactcctggggccagccctgtgaattctggctgtgccttcagcagggtgctcatggactcctgggatgcggcagggagtgaggttgaggcagcgacagaggctctgggcctgggagcacgtcctgcccagccatgcaagggtgcgggtcatgcagttggctgcctcagggacatggggtacaggggacccaccgctgccactgctgcttgtgcagctgctcctgctgccaccactcatgtctttctgctgcagccggcatgatggcagcggatgctccagatagcctgccgctgccatcactactactaaattctgccattacagagtgaacctaccaagataaaattaaacagacagctttggctgggtttcagyaaaacattgtttgaaaaacaggttggattggatttggttgggctggccttggcctgtgggccatagctaacaaacaccctgaggtggagtataaatatatcatgtaatattcttaggaaatgaaggagg

SEQ ID NO: 72574 - DNA, 1468 bp, Homo sapiens
catagagatttatattcttcagaactgaacttaataaatataatgtatgttaaaaacatcctaattctttactaattcttgaaatcctcattgaaaactgatgatcttgaatgcttcttagcaaagatttacttgcaaagagcttcagtaaggactcacattactcagagtataaaatatagtataaagtctgatcataaataatttagagtagtgtcatcacaataaatgaacaaagtacattttacaaaacaatcctactgatttttaaaaatatgtttcccacttggtaattcaaaaaagacaaattttctgagtttccatgtgtcctctggcattatctttaggttttaaaatcagttgttattttctaatctaatcagaaattattcagtgcaatgtgtacaaaagggaatataagatgcacatttggcttcattaacaactagttttctaatctagtcttggagaaacagttctatcaacaayggagcaaagtttacttttacttttaattttattaagatttaatgcaaaaaatttacaaagtttgttccacaaatatttcacttttgtagagaactcaaatgtataaaacctttttaaattcagttcttatttttaaaatgtggatccttataacaatttgggaaaggcaaggcatgatgaagatgagagaaggctttatgaagatagaaatgtctgagctaagtcctaaatattgcagtcatccaggcagtgagcactggatgggtgatgaggagagtggagggaggtattcccgacagaggcagcagcaggtgcgaagcctcagagctgggtaggtagcacatcaggaggtggggtacagctaaagcaaagatgtaaggctagcaaaagaagtgctagcacagaagggatgaattaaaaaatgtatggcatatgcatatgatgtaatatacaacaattttaaacaaactagctatacacatattagtatggatagaacttagtaacttaaaattcaacggaaaaaacaagctacagtataatatatgtcacatgaaacatttatgtaaagtttaaaagtacattcaataatactgatttttaatagttaaacacaaatgtagcaatatatatacttggagagagagagagagagagagagagagagagatggaccagaagaatatataccaatatcaggaagctattgctctggggagagtggaagataaataagactgcgcatgtttagataagtccaacaaatgacgctctcgttcagtcacttcaggactaagtaagaaataaacgaacaagcaaaatagcatctggagatgaaaatatcacctctattatgatcaggtctaggctgagggatgtgacttaggactgtagcaaaataggcttcttgatattgaaaacagacacagttgtccacactgccatgcacaattccagacttacacagacccactcctgt

SEQ ID NO: 72575 - DNA, 1468 bp, Homo sapiens
catagagatttatattcttcagaactgaacttaataaatataatgtatgttaaaaacatcctaattctttactaattcttgaaatcctcattgaaaactgatgatcttgaatgcttcttagcaaagatttacttgcaaagagcttcagtaaggactcacattactcagagtataaaatatagtataaagtctgatcataaataatttagagtagtgtcatcacaataaatgaacaaagtacattttacaaaacaatcctactgatttttaaaaatatgtttcccacttggtaattcaaaaaagacaaattttctgagtttccatgtgtcctctggcattatctttaggttttaaaatcagttgttattttctaatctaatcagaaattattcagtgcaatgtgtacaaaagggaatataagatgcacatttggcttcattaacaactagttttctaatctagtcttggagaaacagttctatcaacaatggagcaaagtttacttttacttttaattttattaagatttaatgcaaaaaatttacaaagtttgttccacaaatatttcacttttgtagagaactcaaatgtataaaacctttttaaattcagytcttatttttaaaatgtggatccttataacaatttgggaaaggcaaggcatgatgaagatgagagaaggctttatgaagatagaaatgtctgagctaagtcctaaatattgcagtcatccaggcagtgagcactggatgggtgatgaggagagtggagggaggtattcccgacagaggcagcagcaggtgcgaagcctcagagctgggtaggtagcacatcaggaggtggggtacagctaaagcaaagatgtaaggctagcaaaagaagtgctagcacagaagggatgaattaaaaaatgtatggcatatgcatatgatgtaatatacaacaattttaaacaaactagctatacacatattagtatggatagaacttagtaacttaaaattcaacggaaaaaacaagctacagtataatatatgtcacatgaaacatttatgtaaagtttaaaagtacattcaataatactgatttttaatagttaaacacaaatgtagcaatatatatacttggagagagagagagagagagagagagagagagatggaccagaagaatatataccaatatcaggaagctattgctctggggagagtggaagataaataagactgcgcatgtttagataagtccaacaaatgacgctctcgttcagtcacttcaggactaagtaagaaataaacgaacaagcaaaatagcatctggagatgaaaatatcacctctattatgatcaggtctaggctgagggatgtgacttaggactgtagcaaaataggcttcttgatattgaaaacagacacagttgtccacactgccatgcacaattccagacttacacagacccactcctgt

SEQ ID NO: 72576 - DNA, 1468 bp, Homo sapiens
catagagatttatattcttcagaactgaacttaataaatataatgtatgttaaaaacatcctaattctttactaattcttgaaatcctcattgaaaactgatgatcttgaatgcttcttagcaaagatttacttgcaaagagcttcagtaaggactcacattactcagagtataaaatatagtataaagtctgatcataaataatttagagtagtgtcatcacaataaatgaacaaagtacattttacaaaacaatcctactgatttttaaaaatatgtttcccacttggtaattcaaaaaagacaaattttctgagtttccatgtgtcctctggcattatctttaggttttaaaatcagttgttattttctaatctaatcagaaattattcagtgcaatgtgtacaaaagggaatataagatgcacatttggcttcattaacaactagttttctaatctagtcttggagaaacagttctatcaacaatggagcaaagtttacttttacttttaattttattaagatttaatgcaaaaaatttacaaagtttgttccacaaatatttcacttttgtagagaactcaaatgtataaaacctttttaaattcagttcttatttttaaaatgtggatccttataacaatttgggaaaggcaaggcatgatgaagatgagagaaggctttatgaagatagaaatgtctgagctaagtcctaaatattgcagtcatccaggcagtgagcactggatgggtgatgaggagagtggagggaggtattcccgacagaggcagcagcaggtgcgaagcctcagagctgggtaggtagcacatcaggaggtggggtacagctaaagcaaagatgtaaggctagcaaaagaagtgctagcacagaagggatgaattaaaaaatgtatggcatatgcatatgatgtaatatacaacaattttaaacaaactagctatacacatattagtatggatagaacttagtaacttaaaattcaacggaaaaaacaagctacagtataatatatgtcacatgaaacatttatgtaaagtttaaaagtacattcaataatactgatttttaayagttaaacacaaatgtagcaatatatatacttggagagagagagagagagagagagagagagagatggaccagaagaatatataccaatatcaggaagctattgctctggggagagtggaagataaataagactgcgcatgtttagataagtccaacaaatgacgctctcgttcagtcacttcaggactaagtaagaaataaacgaacaagcaaaatagcatctggagatgaaaatatcacctctattatgatcaggtctaggctgagggatgtgacttaggactgtagcaaaataggcttcttgatattgaaaacagacacagttgtccacactgccatgcacaattccagacttacacagacccactcctgt

SEQ ID NO: 72577 - DNA, 562 bp, Homo sapiens
gtttatggaaaggaaatattctgggctttgaaatgctaatttactagaattattattcaaattcaaagaaaaaacatgtttccaggaagctctgcttgaccccctgtcttccccaactcagaatgggttttgggtctctctccctacatttctaaattgattgcataaagctttcacagagcactcacaagatcatattgtaataatttttgtgtttatgacctactacttcttcaaggacagtgattatattttgaaacaactgtttaattccagatcttgtcatgatgtcagatgtagagtaaatgttyaagaaatgcttactgaaaaattaatgaatgaataaaaaatgaatagatctccaaatggccaatttgccattttatttccccagtactccatggctattttaaatgtttaatttgtaatcaagatgtctttaaaaataccttttatccctgtctttaattatatttttcatatgaccagaaatacttacttttgtatccttctctttcatttacccatatgtcctactaggaaggatgtggtgggatgagtg

SEQ ID NO: 72578 - DNA, 1689 bp, Homo sapiens
tttgggggtgatgcaaatgttctaaatttgattgtggtgatggttgcacaactctgagtttactaaaaacaatggaatggtaaacttcaaattagtgaattgtatgctatgtgaattatatctcaataaggttattattttttagaaaaagagagaatggcagattttggaatatggctccagtttaaacagacactaagggcataaacgcaggccacaagtaagcgaacaatacagggagtgcaggaagcagtttcaaaaacacaggacatcatagttgctctagagctgaggatatgctggcactcacrgagagagacagtgacctcctgtgtgatgacttaagggctgaagttccagtattatgtgtcggtattagaaattccttctttcttctttcttttcttctttcttttcgtcttttttttctctcctcccctttctttctctttctttatatctttatctctttctatcttctttttcttgacatgatctcactctgtcacccaggctggagtgcagtggcacgatcatagctcactgcagcctcaaattcctgggctcaagtgattcttctgtctcagcctcccaaatagctgggactgcagctgtacaccaccatgtatgccaccatgcctggctaatttttaaaaattttttgtagagatggggtcttgctatgtttcccaggctggtgtccaactcctggcctccaggatcctcccacatcagcctcccatagcactggaatgacaggtgaaagccaccttgccaggtcataaatttatttctttagattacaaacttgaaatacaagtaatccaatacacagtgtaaatccatgcatgaactttttccgattgacaacgagggcaagcagggttggattatggaggagatcagcctcagagggagcctgcagggacagacggcagcttgctgtgctctagagaactggcgatgaggacggccaaaatgagaggtccaaagaggccccacagcatagctaagggctgtcctaggggtctcctccattccagcctctgccctggccatagctccatagctcatcactttgggatgtagccttgtggttccatctgtctttttttttttttttttttgagacaaagtctcactttgttgcccaggctggagtgcaatggtgcaatcttggctcgctgcaacctctgcctcccaggttcaagcgattctcccacctcagtctcctgagtagctgggattacaggcgcccaagaccacaccaagaccacacccagctaaattttttttttgtatttctgttagatacggggtttcaccatgttggtcaggctggtcttgaactcctgaccttcaagtgatctgcttacctcggcctcccaaagtactgggattataggcatgagccaccgcacccggccatatcttgaactttctctatcaattaggaagtgggcttaggtttttcatgcctgtgacccactttcaaattcactcttattgccttattcttttggccatctttgggtatcatgatgctgttggaacagaactgcttcctgcgccatcgtgctggttgaattactcatgagataaagctcttttgtggtgcattcacttcagaccctcatgcatgtaactgcaggttatatccatgccatgttacaggaccctctcagctcc

SEQ ID NO: 72579 - DNA, 1056 bp, Homo sapiens
ccactgatctcatcactcaggtagtaagcacggtacccaataggaaactttttagccctggcccccaccccccgcccccctagtagtccccaatgtgtgttgttgccattgggtaatgtttggataactttggcttgtttttctagattgcatcagagaaatgggaatccccccagcatatccccatccccattcttcattctctttgtctcaagataggctgggatgctggaagaaagcccccttttgcagcagagcatctgggatccatttagggcccatagtgcactggcagaagaaagtgacctagcatgctggccacaactgcatctgttccctgtgcaggtatcagagggatcacggcccctccggtaattgctggagacagggtcaacagggctgaagcttccttctccttgggctccctccccgaccccaccacattccctcttgggaaaggcaagtygccaatcctgtgacaccccatctgtctgacttactgcagctcctcctccctctccactcccactctgccacccccatcccgagggcatgggctcaatcaatctctcccggcaccagggagagactgaagtcagacagtggaactaatggcttagctccccaggcacctggacaacatccagggctctggacacattccatggcggggccatccatctcctttaggggtgcctttgctaacccaaacatctgagcaagaagatccatcttaccctactccagggatatgggctagagggagcattacatctgctatgctgggtaagagccagctcagagccaatcactgcgggaagacctgggccaggtaggcaggaatagagagtagagaggatgtgaagggtctgatattcatggaaacctgctgggggttacctaagacacacggacgcctcactcccatgttactaaacaaaacattataaggcatattaaaaggcagaaaacacatttgaagagatggagcaagcatcagaaccggattcagacatggcagggatgttggaattatcagactgggaatttaaaaca

SEQ ID NO: 72580 - DNA, 1056 bp, Homo sapiens
ccactgatctcatcactcaggtagtaagcacggtacccaataggaaactttttagccctggcccccaccccccgcccccctagtagtccccaatgtgtgttgttgccattgggtaatgtttggataactttggcttgtttttctagattgcatcagagaaatgggaatccccccagcatatccccatccccattcttcattctctttgtctcaagataggctgggatgctggaagaaagcccccttttgcagcagagcatctgggatccatttagggcccatagtgcactggcagaagaaagtgacctagcatgctggccacaactgcatctgttccctgtgcaggtatcagagggatcacggcccctccggtaattgctggagacagggtcaacagggctgaagcttccttctccttgggctccctccccgaccccaccacattccctcttgggaaaggcaagttgccaatcctgtgacaccccatcygtctgacttactgcagctcctcctccctctccactcccactctgccacccccatcccgagggcatgggctcaatcaatctctcccggcaccagggagagactgaagtcagacagtggaactaatggcttagctccccaggcacctggacaacatccagggctctggacacattccatggcggggccatccatctcctttaggggtgcctttgctaacccaaacatctgagcaagaagatccatcttaccctactccagggatatgggctagagggagcattacatctgctatgctgggtaagagccagctcagagccaatcactgcgggaagacctgggccaggtaggcaggaatagagagtagagaggatgtgaagggtctgatattcatggaaacctgctgggggttacctaagacacacggacgcctcactcccatgttactaaacaaaacattataaggcatattaaaaggcagaaaacacatttgaagagatggagcaagcatcagaaccggattcagacatggcagggatgttggaattatcagactgggaatttaaaaca

SEQ ID NO: 72581 - DNA, 1056 bp, Homo sapiens
ccactgatctcatcactcaggtagtaagcacggtacccaataggaaactttttagccctggcccccaccccccgcccccctagtagtccccaatgtgtgttgttgccattgggtaatgtttggataactttggcttgtttttctagattgcatcagagaaatgggaatccccccagcatatccccatccccattcttcattctctttgtctcaagataggctgggatgctggaagaaagcccccttttgcagcagagcatctgggatccatttagggcccatagtgcactggcagaagaaagtgacctagcatgctggccacaactgcatctgttccctgtgcaggtatcagagggatcacggcccctccggtaattgctggagacagggtcaacagggctgaagcttccttctccttgggctccctccccgaccccaccacattccctcttgggaaaggcaagttgccaatcctgtgacaccccatctgtctgacttactgcagctcctcctccctctccactcccactctgccacccccatcccgagggcatgggctcaatcaatctctcccggcaccagggagagactgaagtcagacagtggaactaatggcttagctccccaggcacctggacaacatccagggctctggacacattccatggcggggccatccrtctcctttaggggtgcctttgctaacccaaacatctgagcaagaagatccatcttaccctactccagggatatgggctagagggagcattacatctgctatgctgggtaagagccagctcagagccaatcactgcgggaagacctgggccaggtaggcaggaatagagagtagagaggatgtgaagggtctgatattcatggaaacctgctgggggttacctaagacacacggacgcctcactcccatgttactaaacaaaacattataaggcatattaaaaggcagaaaacacatttgaagagatggagcaagcatcagaaccggattcagacatggcagggatgttggaattatcagactgggaatttaaaaca

SEQ ID NO: 72582 - DNA, 1038 bp, Homo sapiens
gggatttggtagtaaatgatggtaaagtggtaaatgataggacactaaatttgtcagataatactagaattgtagtagtgtaccgtacaatgtagcttagtgttttaaaataaacatcttacatttctatgtcacacctctcaatttcttacctgctttatcttacaacagcaggtatattataagtaaaaattaaggagtagtcgttgacaaagcctgctctcttccccggacagcatgagcttcaccactccctccaccttctccaccaactaccagtccctgggctctgtccagccgcccagctatggcacctggccggtcagcagcgcagccagcatctatgcaggcactggggggcttgggatcccagatctccatgtcctgttcyaccagtttctggggcggcttggggtctgggggcctggccacagagatggctgggggtctggcagaaatggggggcatccagaatgagaaggagaccatgcaaagcctgaacgaccacctggactacctggacagagtgaggaacctggagaccgagaactggaggctggagagcaaaatccaggagtatctggagaagagaccccatgtcagagactggggccattacttcaagaccatcaaggaactgagggctcagatcttcgcaaatactgtggacaatgtccacatcattctgcagatcgacaatgcccgtcttgctgctgatgacttcagagtcaagtatgagacaagagctggccatgcgccagtctgtggagagcaacatccatgggctctgcaaggtcattgatgacaccaatgtcactctgctgcagctggagacagagatgggcgctctcaaggaggagctgctcctcatgaagaagaaccatgaagaggaagtaaaaggcttgcaagtccagattgccaactctgggttggccgtggaggtagatgcccccaaatctcaagtcctcgccaaggtcatggcagacatcagggcccaataggatgagctgtctcagaagaactcagagaagctaggca

SEQ ID NO: 72583 - DNA, 579 bp, Homo sapiens
tgcagtcccagcaacccaagcacttgaggcggcgggaggctggtccgggttggccccgcccacctgggggccggccgctccgctgtgcggtccgggttgcactacccaagagcgtcgggagggggcgcccgccaccgcggccaaggggagcggcggtgtccgccccggggggtcccacccagaagtatgctgttgaaagcaggcygctgcagcctcctgggccgtctccacccacagctctcgtggctctttgggttcctccgtctttgcggggtttcacctgtggtcagtgtggtcattgccttcagaatctccagtatattccttttcatctttcttgagacagggtctcgttctggtgcccaggctggagtgcagtggcaccaccacagctcactgcaacctccgcctcccgggctccagcgatcctcccacctcagcctccggagtagctgggaccacaggccagcgccaccacgcccagttattttttaattaaaaaaaaaaaaaaaaagaactgtggcggggttgggggtggggaggttctccctatgatggccaggctggtctcgaactcaa

SEQ ID NO: 72584 - DNA, 1007 bp, Homo sapiens
aataaaattataaactaaactactacttaatgcacaaagtttgatagacaatacttggggtatgtgagaaaatgaaggtgttctttttgttttgttttgttttgagatgagttcttactctgtcacccaggctggagtgtmgtggtacagtctcagctcactgcaacctctgcctcctgggctcaggtgatcctcccacctcagcctcccaaacagctgtaaccacaggtgtgcaccaccacacctggctatttttttatttttttgtagagacagggtttctccatgttgccctggctggtcttgaactcctggactcaagtgatcctcccaccttggcctctcaaagtgctagaattacaggcgtgagccaccttgagtggcccaaaggaattcttaacagcaaaaataccagagcttattgaatttttttttttttttttgagacggagtctcgctctgtcacccaggctggagtgcagtggtgcgatctctgctcactacaagctccacctcccaggttcacgacattttcctgccacagcctcccaagtagctgggactacaggtgcccgccaccatgcctggctaatttttttgtattttttactaaagacagggtttcactatgttagccaggatggtcttatctcctgaccttgtgatctgcccgcctcagcctcctaaagttctgggattataggcatgagccaccgtgcccagcccagcttattgaattttaacattacctagatgggaaaggttgtaataaattagactagttcatcttcgtctggacctttcagaggtcaagggagcccttgaccactttttatttttttgagattattcctgcattaaaaaaaaaaagaattacaagattacaactgtggcatatggtacatgtgtatatttccaaaattgacaattttaacagaaaaaggggcagtatacacaattgtgctacttacaagataaagttttataaaaatgtcaaatattatttc

SEQ ID NO: 72585 - DNA, 867 bp, Homo sapiens
aacatactaagattgtacaaggcaaaatgaagagagccctagatgagactctgtgtttgtgtggcatgtgtacgtgtctgcatgtgttttaaaggtgaaaaagtacattaaaggactcaggggaaactctaagcacttggaagactccttctaactctaaaattctattctcttaaaaagccttaatcatagtgtacgctattacatggtttagtgatacatggaacggatgatattccgtcaagttctcyccatgagcacaatgacacagtaggaagtaaaagacacgtcataatgaggttctactttacccaaacaaacaattctgcagtacagttcatgtttaaccagggccaaatcatctccagatagcttagagagttttgttttgtttttaataaaagctaacttgtggtgacaagcacacacaagaaaagtgggtttttctttagcagaaaccacttagcaagttaggctagcctctgaagagcctagccacaacactcctcacaccaaacacaaaatagacacacaacagttgcctcctcctccctcctctatctttaggggtaatgatttaccatgacactcaaatgctgttattgcagtggtacttccataaactggacatgcataacaactattgtatttaggtcacaaactcacaaaagaaaagtccatcctgaaagtaagttgacaactatgtcatcatataaataacctaaacttccatgaaaactcaaagacccctaacatgaggacttgcttgttcccagcattccttggagaggcagaatatccccattttaagggtaggaaaattgaggaataagtactgaatttaccagtctttgttgagataaggaa

SEQ ID NO: 72586 - DNA, 867 bp, Homo sapiens
aacatactaagattgtacaaggcaaaatgaagagagccctagatgagactctgtgtttgtgtggcatgtgtacgtgtctgcatgtgttttaaaggtgaaaaagtacattaaaggactcaggggaaactctaagcacttggaagactccttctaactctaaaattctattctcttaaaaagccttaatcatagtgtacgctattacatggtttagtgatacatggaacggatgatattccgtcaagttctctccakgagcacaatgacacagtaggaagtaaaagacacgtcataatgaggttctactttacccaaacaaacaattctgcagtacagttcatgtttaaccagggccaaatcatctccagatagcttagagagttttgttttgtttttaataaaagctaacttgtggtgacaagcacacacaagaaaagtgggtttttctttagcagaaaccacttagcaagttaggctagcctctgaagagcctagccacaacactcctcacaccaaacacaaaatagacacacaacagttgcctcctcctccctcctctatctttaggggtaatgatttaccatgacactcaaatgctgttattgcagtggtacttccataaactggacatgcataacaactattgtatttaggtcacaaactcacaaaagaaaagtccatcctgaaagtaagttgacaactatgtcatcatataaataacctaaacttccatgaaaactcaaagacccctaacatgaggacttgcttgttcccagcattccttggagaggcagaatatccccattttaagggtaggaaaattgaggaataagtactgaatttaccagtctttgttgagataaggaa

SEQ ID NO: 72587 - DNA, 1036 bp, Homo sapiens
aaagaactttgtggccttcttgggtggcacaggccatggcagttccacagcatgacgtggttgctgtgggtggtagagcagacatgccgctccccgtcactgcctggctttgatgcttgctttcttcagctgagaggacgcagctgtgatatgaaggtcttgtgtgtacagtcgtgacctcacatttccaatttcctgctggcagaacccacagtctacaacgtacgagcaccagagttgacgtgagacagacagcatacagaggcttgtaacatccttctggaaaacactgtgtaagctttcagtgcgaataaacatgatcagtggcaagttctgttagatgtagtctgcaascatcctgattttactgggcaagactatgttgatttacaggcggctgatgattccatggatagcccactactagtatttttacaaatttcacaagacattcttactggaagattgccctgttcttatgatactgctgcccttttagcttcatttgctgttcagactaaacttggagactacagtcagtcagagaacttgctaggccacctctcaggttattctttcattcctgatcatcctcaaaattttgaaaaagaaattgtaaaaattacatcagcaacatataggcttatgtccttgagaagcagcagttaattgcctaaacacagcaagtaccttagaactctgtggagttgaattgcactatgcaagggatcaagtaacaataaaattatgattggaatgatgtcaagaggaattctgatttataacaggctatgaatgagtacctttccatggtcgaagattgtaaaaatttgttttaagtgcaaacagttttttattcagctttgaaaatgacttgcataaatctggagaaagattatcaggatttaatatggtgaattatatggcatgtaaacatttgtggaaagcaagtttagaacatcacatattcttctgtttggacagaccacttccaactagaaagaatttttttgcacattattttacattaggttca

SEQ ID NO: 72588 - DNA, 1036 bp, Homo sapiens
aaagaactttgtggccttcttgggtggcacaggccatggcagttccacagcatgacgtggttgctgtgggtggtagagcagacatgccgctccccgtcactgcctggctttgatgcttgctttcttcagctgagaggacgcagctgtgatatgaaggtcttgtgtgtacagtcgtgacctcacatttccaatttcctgctggcagaacccacagtctacaacgtacgagcaccagagttgacgtgagacagacagcatacagaggcttgtaacatccttctggaaaacactgtgtaagctttcagtgcgaataaacatgatcagtggcaagttctgttagatgtagtctgcaaccatcctgattttactgggcaagactatgttgatttacaggcggctgatgattccatggatagcccactactagtattttyacaaatttcacaagacattcttactggaagattgccctgttcttatgatactgctgcccttttagcttcatttgctgttcagactaaacttggagactacagtcagtcagagaacttgctaggccacctctcaggttattctttcattcctgatcatcctcaaaattttgaaaaagaaattgtaaaaattacatcagcaacatataggcttatgtccttgagaagcagcagttaattgcctaaacacagcaagtaccttagaactctgtggagttgaattgcactatgcaagggatcaagtaacaataaaattatgattggaatgatgtcaagaggaattctgatttataacaggctatgaatgagtacctttccatggtcgaagattgtaaaaatttgttttaagtgcaaacagttttttattcagctttgaaaatgacttgcataaatctggagaaagattatcaggatttaatatggtgaattatatggcatgtaaacatttgtggaaagcaagtttagaacatcacatattcttctgtttggacagaccacttccaactagaaagaatttttttgcacattattttacattaggttca

SEQ ID NO: 72589 - DNA, 1036 bp, Homo sapiens
aaagaactttgtggccttcttgggtggcacaggccatggcagttccacagcatgacgtggttgctgtgggtggtagagcagacatgccgctccccgtcactgcctggctttgatgcttgctttcttcagctgagaggacgcagctgtgatatgaaggtcttgtgtgtacagtcgtgacctcacatttccaatttcctgctggcagaacccacagtctacaacgtacgagcaccagagttgacgtgagacagacagcatacagaggcttgtaacatccttctggaaaacactgtgtaagctttcagtgcgaataaacatgatcagtggcaagttctgttagatgtagtctgcaaccatcctgattttactgggcaagactatgttgatttacaggcggctgatgattccatggatagcccactactagtatttttacaaatttcacaagacattcttactggaagattgccctgttcttatgatactgctgcccttttagcttcatttgctgttcagactaaacttggagactacagtcagtcagagaacttgctaggccacctctcaggttattctttcattcctgatcatcctcaaaattttgaaaaagaaattgtaaaaattacatcagcaacatataggcttatgtccttgagaagcagcagttaattrcctaaacacagcaagtaccttagaactctgtggagttgaattgcactatgcaagggatcaagtaacaataaaattatgattggaatgatgtcaagaggaattctgatttataacaggctatgaatgagtacctttccatggtcgaagattgtaaaaatttgttttaagtgcaaacagttttttattcagctttgaaaatgacttgcataaatctggagaaagattatcaggatttaatatggtgaattatatggcatgtaaacatttgtggaaagcaagtttagaacatcacatattcttctgtttggacagaccacttccaactagaaagaatttttttgcacattattttacattaggttca

SEQ ID NO: 72590 - DNA, 636 bp, Homo sapiens
tgcatacagcaaccaggcaaatgcctgatagaggaaagccatcttcaagcccgcaggaaagttttgtggcacatggtggcaacccagttcccagttcccagttcccttcctcaagctgcagggagcagaccagacatgatttgttctagtctagctgattcatacctgaaggattgatcctcatctccatctcacataacatgcaaggtgggcaagaraaagaggtgggcacagctcatgaaagccacagagaggcaattaaggtaaaaatagataaattgcactatatacaaattaaagacttcagtgcatcaaaggatacagtcaacagagtgaaaagcaatctatggaataggagaaaatatttgcaaataacgggttaatcttcacaatatataaagaactcctgcaactcaacaacaaaaaaaaaccccagtttcaaactgagcaaagaacttgaataaacatttcttcaaaaaagatgatataaatgtccaataggcaaatgaaaagatgcttaacattactaatcattaggaagatgcaaatcaaaaccacaatgagatagcacctcagcacctcacacccattatgattgctactataaaaaaaaaaaaaacccagaaaataacaagt

SEQ ID NO: 72591 - DNA, 995 bp, Homo sapiens
atgctctctctctcgttgtcctccaaccctcaagaggccccagtgtgtgatgaatcaaaaccacagtgagatatcatctcatgtcagtcagaatagcgattattaaagtcaggaaacaatagatgctggcgaggctgtggagaaataggaacacttttacactgttggtgggagtgtaaattggttcaaccattgtggaagtcaatgtggtgattcctcaaggatctagaaccagaaataccatttgaccagcaatgtcattattgggtatatgcccaatgtaaatttttaacagggaggttttttcgtcgaaaactatcaactttaggctaaaagcaagaattgttttatttttctttttttggctcagtttttcattagaaaagaaacctccccaaatgtaaggaagcaaatgaatgaaaggaaaattacaactgtggggagtcattacattggaaggcctctcttgggacagcgtgaaatagaattgctccattgctgcagccacggaaccattagagaatgcccctcccgggactggacaaactgatgcaggctaattttccatgggtgatgtctgcatagctgcggggatgggtcctattggcctctgaggcctgtgtttaagtgactgctgtctttccacttggaaaatcccatttgaatatgggaatcacggccatgraatccttcacatctcgtgatggtcaggcgcacttcctatttcattgccctgaagtcccagcggcaaaaggcattgacctgttgaaaacacgaaggtcagtctgatataaccagagcttttctgaaccccagccactggaaaaccttgctggtacgatacccatccattaccgttactggtactacggctccaggaatgaacagaatttagcctttgcatgggcaacatggctcaaagagccctggattcagggtcagaaaacctggttttaaatcctgttttacagactgtgtgatctgcagaaagttct

SEQ ID NO: 72592 - DNA, 995 bp, Homo sapiens
atgctctctctctcgttgtcctccaaccctcaagaggccccagtgtgtgatgaatcaaaaccacagtgagatatcatctcatgtcagtcagaatagcgattattaaagtcaggaaacaatagatgctggcgaggctgtggagaaataggaacacttttacactgttggtgggagtgtaaattggttcaaccattgtggaagtcaatgtggtgattcctcaaggatctagaaccagaaataccatttgaccagcaatgtcattattgggtatatgcccaatgtaaatttttaacagggaggttttttcgtcgaaaactatcaactttaggctaaaagcaagaattgttttatttttctttttttggctcagtttttcattagaaaagaaacctccccaaatgtaaggaagcaaatgaatgaaaggaaaattacaactgtggggagtcattacattggaaggcctctcttgggacagcgtgaaatagaattgctccattgctgcagccacggaaccattagagaatgcccctcccgggactggacaaactgatgcaggctaattttccatgggtgatgtctgcatagctgcggggatgggtcctattggcctctgaggcctgtgtttaagtgactgctgtctttccacttggaaaatcccatttgaatatgggaatcacggccatggaatccttcacatctcgtgatggtcaggcgcacttcctatttcattgccctgaagtcccagcggcaaaaggcattgacctgttgaaaacaygaaggtcagtctgatataaccagagcttttctgaaccccagccactggaaaaccttgctggtacgatacccatccattaccgttactggtactacggctccaggaatgaacagaatttagcctttgcatgggcaacatggctcaaagagccctggattcagggtcagaaaacctggttttaaatcctgttttacagactgtgtgatctgcagaaagttct

SEQ ID NO: 72593 - DNA, 995 bp, Homo sapiens
atgctctctctctcgttgtcctccaaccctcaagaggccccagtgtgtgatgaatcaaaaccacagtgagatatcatctcatgtcagtcagaatagcgattattaaagtcaggaaacaatagatgctggcgaggctgtggagaaataggaacacttttacactgttggtgggagtgtaaattggttcaaccattgtggaagtcaatgtggtgattcctcaaggatctagaaccagaaataccatttgaccagcaatgtcattattgggtatatgcccaatgtaaatttttaacagggaggttttttcgtcgaaaactatcaactttaggctaaaagcaagaattgttttatttttctttttttggctcagtttttcattagaaaagaaacctccccaaatgtaaggaagcaaatgaatgaaaggaaaattacaactgtggggagtcattacattggaaggcctctcttgggacagcgtgaaatagaattgctccattgctgcagccacggaaccattagagaatgcccctcccgggactggacaaactgatgcaggctaattttccatgggtgatgtctgcatagctgcggggatgggtcctattggcctctgaggcctgtgtttaagtgactgctgtctttccacttggaaaatcccatttgaatatgggaatcacggccatggaatccttcacatctcgtgatggtcaggcgcacttcctatttcattgccctgaagtcccagcggcaaaaggcattgacctgttgaaaacacgaaggtcagtctgatataaccagagcttttctgaaccccagccactggaaaaccttgctggtacgatacccatccattaccrttactggtactacggctccaggaatgaacagaatttagcctttgcatgggcaacatggctcaaagagccctggattcagggtcagaaaacctggttttaaatcctgttttacagactgtgtgatctgcagaaagttct

SEQ ID NO: 72594 - DNA, 1022 bp, Homo sapiens
ccagccccctttttttctgagtatttttggtctgtgcttggtggaatccatgaatgtggaatccatggatatggactgctcactrcacctgggctgtctcaaaaacgcctttattcccacagaattagaaaggcaggtaaaagaaggaaaacagcatagttaactcattttcccatattacataagatttgtaaagttatgatagcagaacatacccgatataataatctaaaacacaaacagaaagggaaagcgcttctattgctttataaatcacacaccctagcaataatcattgttttaaaatgtccagaggtattctaaatacttataaaataagtaggacattaaatacattagtcttttttctgagaacatattttcatgtcaatacatgtagatcttacttttaaatttcttccatgggccaaagtggtcctgaatggctcgctgaatacattacatcatgtacagttaagagtcaatgaaaaatagaagcttaaagtttcattgttaacctattacacttttaatcattttcacctggtaaagttaacccaggagggttaattaaaaacactgtactgtaaaacaaggaaaagaagaacaatgatagtttcttgagcagaaagtacatatttagagaataaaacaattggctaaaatttctgaatataattaaccacagaagacactttggatataacgctgtcaactgcccccttctatttccaacaaatataacagcatcatgtccacctgcacgtccgcatagtcctctacccctcccttgcttttctgcgcacactggcccaacagccagacctcacacagtaacaccactttatgtgacctgacaggtaggtccgggcatctgacactggaaagtttttttgtgtgtttgttgttgtttttaatttaatttgctatgttatcacatagtattgtccaagaaatactatcaatgcaagtagatgggcccactgtaacaagttcttttagactgatttgtacaagtaaag

SEQ ID NO: 72595 - DNA, 1022 bp, Homo sapiens
ccagccccctttttttctgagtatttttggtctgtgcttggtggaatccatgaatgtggaatccatggatatggactgctcactgcacctgggctgtctcaaaaacgcctttattcccacagaattagaaaggcaggtaaaagaaggaaaacagcatagttaactcattttcccatattacataagatttgtaaagttatgatagcagaacatacccgatataataatctaaaacacaaacagaaagggaaagcgcttctattgctttataaatcacacaccctagcaataatcattgttttaaaatgtccagaggtattctaaatacttataaaataagtaggacattaaatacattagtcttttttctgagaacatattttcatgtcaatacatgtagatcttacttttaaatttcttccatgggccaaagtggtcctgaatggctcgctgaatacattacatcatgtacagttaagagtcaatgaaaaatagaagcttaaagtttcattgttaacctattacacttttaatcattttcacctggtaaagttaacccaggagggttaattaaaaacactgtactgtaaaacaaggaaaagaagaacaatgatagtttcttgagcagaaagtacatatttagagaataaaacaattggctaaaatttctgaatataattaaccacagaagacactttggatataacgctgtcaactgcccccttctatttccaacaaatataacagcatcatgtccacctgcacgtccgcatagtcctctacccctcccttgcttttctgcgcacactggcccaacagccagacctcacamagtaacaccactttatgtgacctgacaggtaggtccgggcatctgacactggaaagtttttttgtgtgtttgttgttgtttttaatttaatttgctatgttatcacatagtattgtccaagaaatactatcaatgcaagtagatgggcccactgtaacaagttcttttagactgatttgtacaagtaaag

SEQ ID NO: 72596 - DNA, 410 bp, Homo sapiens
aactttctgcagatcacacagtctgtaaaacaggatttaaaaccaggttttctgaccctgaatccagggctctttgagccatgttgcccatgcaaaggctaaattctgttcattcctggagccgtagtaccagtaayggtaatggatgggtatcgtaccagcaaggttttccagtggctggggttcagaaaagctctggttatatcagactgaccttcgtgttttcaacaggtcaatgccttttgccgctgggacttcagggcaatgaaataggaagtgcgcctgaccatcacgagatgtgaaggattccatggccgtgattcccatattcaaatgggattttccaagtggaaagacagcagtcacttaaacacaggcctcagaggccaataggacccatccccgcagct

SEQ ID NO: 72597 - DNA, 2075 bp, Homo sapiens
ataggatgaacttcctgtgggttctggccaatattggggtcatttaactctgccacattcaacttgtgtggtcaacattacaaacatggaggagccttgttcccaagtcatctgccaaaaatctgttcaagtgtgtggtaacgccccttgacaagcactgttctgacttatgatgctggaattacactgatgtagttttcattacctttaaaaataagccatgtaacatcataaggaaaactatctctatctatttttgcaaaggttctaaggtaatctggcaccagaaattgtcattccaagtttttttttgataagttgatcaaaattgtgtccagaatgttccagcgataagccctcggttagctggatcactgactcccacagcacatggtcatcctggtggacactatctagtggggctttctccagaatgtactggaagtctgtctcattttctagcacttcttccactacatcatatgcagcataggtagaactagaagcatgagttccccagaatgtctctcacagttggctttaaaaagcaggacaacccaatcatgggtgtgttctgtaaagtcccaaccactgatcaatacaacttggtcttctcttcaatcgagagtcactgaggtcaaaggtgttcctggtgcttctcaggacacgatcacagacatcttctgatcatatccccctttgcattgactccaaaccttccattttcgtcaggttcactcggattagaacacgattatcatgtagaataccaccattaggagcagattttttaagagaagatagaacatcaacgtttcattaatatgatcttccagatcttgttgaaaatgtaaataatgaatttggttccaacagtttttcttagcttgtttgggtggtaaagctggaggctacccatctccaggggtgtcctgtaatagtgatgattccagaatgatgctattagcttgtgctgataatggtgatgtctgatttgcaaatatttggaagaagtgtgaaccacataatctaccaaatgaccaacagaagatggtcataatcaggttccctcttgtatgaatgcagaattttgatgagtaggaattcctgttccgggtgggaattgtgatggaaggctttatgtttctaatcttttcatcagatattgaattcctgcctactacttcccaaactattaatttccacgtcaatggcttacttgaggatcctgcaagtagtctgtctttatttgccttttctttgccatactgaactaactgaacttcagttctcccaccatgcattaggaattttgaacctaatgtaaaataatgtgcaaaaaaattctttctagttggaagtggtctgtccaaacagaagaatatgtgatgttctaaacttgctttccacaaatgtttacatgccatataattcaccatattaaatcctgataatctttctccagatttatgcaagtcattttcaaagctgaataaaaaactgtttgcacttaaaacaaatttttacaatcttcgaccatggaaaggtactcattcatagcctgttataaatcagaattcctcttgacatcattccaatcataattttattgttacttgatcccttgcatagtgcaattcaactccacagagttctaaggtacttgctgtgtttaggyaattaactgctgcttctcaaggacataagcctatatgttgctgatgtaatttttacaatttctttttcaaaattttgaggatgatcaggaatgaaagaataacctgagaggtggcctagcaagttctctgactgactgtagtctccaagtttagtctgaacagcaaatgaagctaaaagggcagcagtatcataagaacagggcaatcttccagtaagaatgtcttgtgaaatttgtaaaaatactagtagtgggctatccatggaatcatcagccgcctgtaaatcaacatagtcttgcccagtaaaatcaggatggttgcagactacatctaacagaacttgccactgatcatgtttattcgcactgaaagcttacacagtgttttccagaagga

SEQ ID NO: 72598 - DNA, 2075 bp, Homo sapiens
ataggatgaacttcctgtgggttctggccaatattggggtcatttaactctgccacattcaacttgtgtggtcaacattacaaacatggaggagccttgttcccaagtcatctgccaaaaatctgttcaagtgtgtggtaacgccccttgacaagcactgttctgacttatgatgctggaattacactgatgtagttttcattacctttaaaaataagccatgtaacatcataaggaaaactatctctatctatttttgcaaaggttctaaggtaatctggcaccagaaattgtcattccaagtttttttttgataagttgatcaaaattgtgtccagaatgttccagcgataagccctcggttagctggatcactgactcccacagcacatggtcatcctggtggacactatctagtggggctttctccagaatgtactggaagtctgtctcattttctagcacttcttccactacatcatatgcagcataggtagaactagaagcatgagttccccagaatgtctctcacagttggctttaaaaagcaggacaacccaatcatgggtgtgttctgtaaagtcccaaccactgatcaatacaacttggtcttctcttcaatcgagagtcactgaggtcaaaggtgttcctggtgcttctcaggacacgatcacagacatcttctgatcatatccccctttgcattgactccaaaccttccattttcgtcaggttcactcggattagaacacgattatcatgtagaataccaccattaggagcagattttttaagagaagatagaacatcaacgtttcattaatatgatcttccagatcttgttgaaaatgtaaataatgaatttggttccaacagtttttcttagcttgtttgggtggtaaagctggaggctacccatctccaggggtgtcctgtaatagtgatgattccagaatgatgctattagcttgtgctgataatggtgatgtctgatttgcaaatatttggaagaagtgtgaaccacataatctaccaaatgaccaacagaagatggtcataatcaggttccctcttgtatgaatgcagaattttgatgagtaggaattcctgttccgggtgggaattgtgatggaaggctttatgtttctaatcttttcatcagatattgaattcctgcctactacttcccaaactattaatttccacgtcaatggcttacttgaggatcctgcaagtagtctgtctttatttgccttttctttgccatactgaactaactgaacttcagttctcccaccatgcattaggaattttgaacctaatgtaaaataatgtgcaaaaaaattctttctagttggaagtggtctgtccaaacagaagaatatgtgatgttctaaacttgctttccacaaatgtttacatgccatataattcaccatattaaatcctgataatctttctccagatttatgcaagtcattttcaaagctgaataaaaaactgtttgcacttaaaacaaatttttacaatcttcgaccatggaaaggtactcattcatagcctgttataaatcagaattcctcttgacatcattccaatcataattttattgttacttgatcccttgcatagtgcaattcaactccacagagttctaaggtacttgctgtgtttaggcaattaactgctgcttctcaaggacataagcctatatgttgctgatgtaatttttacaatttctttttcaaaattttgaggatgatcaggaatgaaagaataacctgagaggtggcctagcaagttctctgactgactgtastctccaagtttagtctgaacagcaaatgaagctaaaagggcagcagtatcataagaacagggcaatcttccagtaagaatgtcttgtgaaatttgtaaaaatactagtagtgggctatccatggaatcatcagccgcctgtaaatcaacatagtcttgcccagtaaaatcaggatggttgcagactacatctaacagaacttgccactgatcatgtttattcgcactgaaagcttacacagtgttttccagaagga

SEQ ID NO: 72599 - DNA, 783 bp, Homo sapiens
gatcctgcccttaatgaatttacagtctagtgaagaagaaaagataggtacatgacaaataaaacagattagaaaatgaaaccttgttaaattttcttaaaggggctgtgaaattttggaacaggaaacttttatttacaactatgggaaatcagagaagatttcatagagataatgatatggaagctggaccttgaagacatagcagtgggaactctattgtttccacttagtattgctgtgaacctaaaactgcactaaaaaataaagttcaatgcggagcacggtggctcaagactgtaattccagcactttgggaggccgaggcagacacatcacttgaggtcaggagttcgagaccaacctggccaaagaagattatttaatctttcccttcctccactcatagtagcagcttctattggattgatacacactgaagaagtttgcctgggctccaccccaaagaactgcaatcagctttcacaattcagttggtcacagttagtgccatattggacactcctcagcccacctaccgccctgggtgagggaagtggggaagatctcttttgcagaactttcctggaggtacagaatttcaggttctyctgataatagttaggctcaaccagtttttagggcatcctcattaggcatatgcatggcatgggaaatgggatacagagacctcctttgagacactattcatactacagcttgctaatcagggtgctaaaatatactggtaaacagcaaatggattacaggcatgctgagaga

SEQ ID NO: 72600 - DNA, 562 bp, Homo sapiens
ttcgatttttcagatcttgccagtaaactaaattgatggattatctgcttatcttatatccagtattcaactatgtacctgggaagaatacgggggaaaaaatacagacacttagactttgaaccaaccttaaccacaagagttaaggaaygggggtcccagaagggaggttggaaatggtctaaaatggaacaggtgcatgagaagcaactttacacaaaagatgagggcaatgcagccccagagtaaattgtgacccactgtaagagagcaacttaaaatgcagctcacagcatatgaaatgtctccagctgaattcgaaggactaaagcccaggacaaagcaaagagagaagcctaggatcttggcctatgtcattttctgtgactccaagatcaagtaaataaataatgggcaataaccgacttcatttggagccatttaaaatgattgcctccttcagcagtggcgtaggacacccagcacacagataggacctgacaggcaggcggtcaggagatggcactgagcgtgaagctattggtaggaaggtatctgggaa

SEQ ID NO: 72601 - DNA, 562 bp, Homo sapiens
ttcgatttttcagatcttgccagtaaactaaattgatggattatctgcttatcttatatccagtattcaactatgtacctgggaagaatacgggggaaaaaatacagacacttagactttgaaccaaccttaaccacaagagttaaggaacgggggtcccagaagggaggttggaaatggtctaaaatggaacaggtgcatgagaagcaactttacacaaaagatgagggcaatgcagccccagagtaaattgtgacccactgtaagagagcaacttaaaatgcagctcacagcatatgaaatgtctccagytgaattcgaaggactaaagcccaggacaaagcaaagagagaagcctaggatcttggcctatgtcattttctgtgactccaagatcaagtaaataaataatgggcaataaccgacttcatttggagccatttaaaatgattgcctccttcagcagtggcgtaggacacccagcacacagataggacctgacaggcaggcggtcaggagatggcactgagcgtgaagctattggtaggaaggtatctgggaa

SEQ ID NO: 72602 - DNA, 679 bp, Homo sapiens
tggatcctaatttataaggctctatcaaaatatgtgcatcaaggacaccttgattcaagtctattgttttctattagacaaaaaaaaaaaaaacacaactcwgctctttatataaacacaatgctatccttaatattctctttttctttttttttttgtgtgatggagtctcactctgtcacacaggctggagtgcaatggcgcaatcttggctcactgcaacctccgcctcccaggttcgagcgattctcctgcctcagcctcctgagtagctgggattacaggcatgcaccaccatgcccggctaatttttagatttttagtagagatggggtttcactatgttggccaggctggtctcgaactcctgaccttaagtgatccgcccacctcggcctcccaaagtgctgggattacaggcatgagccaccacgcccggccaatattctcaatattctttaagtacagttgtcataattttctcaaatcttgggctctcaagttgcatatttattaatcacttcttaggaatggagctttctttgtgctaatgcattcttaaataatcaattgtatattgtacaaagcaagcagcttcataacaggcttaaaaataacagggtgtgttgaaaaaaagtgaaaaaatctatcaatctatcaatccaaaacaatgttactc

SEQ ID NO: 72603 - DNA, 679 bp, Homo sapiens
tggatcctaatttataaggctctatcaaaatatgtgcatcaaggacaccttgattcaagtctattgttttctattagacaaaaaaaaaaaaaacacaactcagctctttatataaacacaatgctatccttaatattctctttttctttttttttktgtgtgatggagtctcactctgtcacacaggctggagtgcaatggcgcaatcttggctcactgcaacctccgcctcccaggttcgagcgattctcctgcctcagcctcctgagtagctgggattacaggcatgcaccaccatgcccggctaatttttagatttttagtagagatggggtttcactatgttggccaggctggtctcgaactcctgaccttaagtgatccgcccacctcggcctcccaaagtgctgggattacaggcatgagccaccacgcccggccaatattctcaatattctttaagtacagttgtcataattttctcaaatcttgggctctcaagttgcatatttattaatcacttcttaggaatggagctttctttgtgctaatgcattcttaaataatcaattgtatattgtacaaagcaagcagcttcataacaggcttaaaaataacagggtgtgttgaaaaaaagtgaaaaaatctatcaatctatcaatccaaaacaatgttactc

SEQ ID NO: 72604 - DNA, 679 bp, Homo sapiens
tggatcctaatttataaggctctatcaaaatatgtgcatcaaggacaccttgattcaagtctattgttttctattagacaaaaaaaaaaaaaacacaactcagctctttatataaacacaatgctatccttaatattctctttttctttttttttttgkgtgatggagtctcactctgtcacacaggctggagtgcaatggcgcaatcttggctcactgcaacctccgcctcccaggttcgagcgattctcctgcctcagcctcctgagtagctgggattacaggcatgcaccaccatgcccggctaatttttagatttttagtagagatggggtttcactatgttggccaggctggtctcgaactcctgaccttaagtgatccgcccacctcggcctcccaaagtgctgggattacaggcatgagccaccacgcccggccaatattctcaatattctttaagtacagttgtcataattttctcaaatcttgggctctcaagttgcatatttattaatcacttcttaggaatggagctttctttgtgctaatgcattcttaaataatcaattgtatattgtacaaagcaagcagcttcataacaggcttaaaaataacagggtgtgttgaaaaaaagtgaaaaaatctatcaatctatcaatccaaaacaatgttactc

SEQ ID NO: 72605 - DNA, 748 bp, Homo sapiens
ttgctcatttttatttcattttaaccctcaaaagatttttttaagactcctaaatttcattctttcttttctctcattccatgtgtcctttccttcacctctattgttttcttatcattgtggctctcttcttatatccttaccatattcttttaaaggctgccatatggtgagtgggtgatataacccagtcactttatgcagaaaagccatttatctaaactttttttttttttttttttttgagatgaagtctcactctgttgcccaggctggagtgcagtggcgcgatctcagctctttgcaacatctgcctcctgcgattctcccgcctcagcctcctgagtagctgggattacaggcacgtgccaccatgcccaagctaacttttgtatttttagtagagacggggtttcaccaggttggccaggattgtcacgaacttctgacctcaggtgatctgcccgccttggcctcccaacgtgctggaattacaggcatgagccacgtgcccagccttatctaaacttttaatacaaatgttgasaagcagaagttaaataacatgatcaagacattcaggatttgaacctagatcatttttactatgaagcctagactctctctacttctactgtttttcttttttgtttttttagagacaggatcactctatgtggcccaggctggagcacagtggtgcaatcatagctgactacagcctcgagctcctgggttcaagggatcc

SEQ ID NO: 72606 - DNA, 789 bp, Homo sapiens
aaaaaaaaaaaaaaaaaaaatttatagaaaaacaccacttgtaaaccagaagggatggtaattattttttagatatttatgttattcaggaaaagaataaaactattgattaatgttatattttgttaggtcaaatatgaatattaaaaagtaaatgtaacctgcttttgcttgtggtaacagtggtggtaaggatatatatgtttttatatatatatatgccattgtatagttattagctatctctgcctctgggactttttgtatcccttgcactgagggatatacattgagggatacacacacacacacacacacacacacattttacacacacacacacatacgtgcacatagaacctacttgaaaatcagagaaatgcaagttaaaataacatgtcatttatatccgccagttaggcaaaaatacaaaccagaactgccagatgttggggcaaacaccttaaagagcaatttcgcagttcatgttaactcagagatccataacctgttataaacttagtccgtttgtgctgctgtaacaaaatatcatagacctgggtratttataagcaatagaaatttgtttcttacagttttggaggccaggaagcctaagatcaaggtgccagcaggtttggtgcctgctgacggtcccatctctctgcttccaagaaggcgtcttgttgctgtgtcgtcacgtggcagaagaagtgaaagtgaaagcaggggggtgaacccactgtcttgagtccttttgtaagggcactaatcccatccatgaggatc

SEQ ID NO: 72607 - DNA, 402 bp, Homo sapiens
cttgagtccaagagttcaagaccagcctgggcaacaaagtgagaccctatctctataataacataaaataaaataaaataaattagccaggtgtggtggtgtgtgtctgtggtccaaggtacttgggaggctgaggtgggagaatggcttaagcscaagagtttgaggctgcagtaagtggggtttgccactgtactccagtctgggcaacagagccagactctgtctcaaaaaacaaaaaaatttacagagggttggttacagaagcacaagaattctacctgttcctgatgatggacttccaaaacctttttctgaatcagaatttccagctgcctcctgaaacatttaccaggatgtgccaaagacccttaaattcaacagattcaaaattatattggt

SEQ ID NO: 72608 - DNA, 634 bp, Homo sapiens
agagtctagagaattttctaactgggtttgtaaggaaggactgatcttttatgtgactggcttatgggaaatattaacaattattcttggcttttgtctgtcttagcacaacaatcactgacattgtctgtgaactttaggtggaaatattacttttataagcttcaagacaccttctttagtttattctgtggaaccacatatggaaattgtcatttttccctttgtcacaactggaaaaacagaaaattgaaaatatacagaaaaatacaaagaagaaaaaaaatcattgcaattctactatatggagacagccagtttaaatattttcttactattaaaaaacatttagcctgtagctatctrtctaggtagctctctgtatctaaatatctaactagctagacatctacctatctagctatctagtcaactctatttatattatgtgttttcttaataaaaatgcaatcatatggtacttgctgtttgatgatctaacctttctccctttgcaacatatcattaactttttttatatcataaagatattctactacagcatcattttaatgaatgtattgtatttctttataagaatatactattagctatttctccagtctcaaatata

SEQ ID NO: 72609 - DNA, 796 bp, Homo sapiens
atgggagatgggaggaggtgggagatagagggagaggttggagataggggtagaaatatgagatagacggggaggtgggagatagaggggagaggagatgggactgggcataaaaatgagatgctggaggagataagagtgaatgggatcaagagcagttagaagtattagtcttggcagaaaagcaggacacttctcagatatgacagtgaaagaagttctggagatattttaatgagagctaggaaagctgagggaatttgcattaaattgtgtaagcttcatagtgaaagtaaaattacctatagaaagtgaggtggcacattggaattaagtgataaggaaacaggagtggctgctatgggcagtgccattcacagacactgccaagagagctgaatgaaagagttctagcragagggagggccctgctaggattagtatttgatcttaatagtttgtgtttgatcttacattgaaaggagctcagggttattttatcattctatttccatattttaggatacttagattttctggagaaagtcttgggaaagagatagcattgcttagctgtggaagggtcacatttgggtggcaaatgaggttctaggatggcaatgagtgcattattaaagtgagatgtgggcaaatggtccctgagagggggtgatggactgggaagttaactcagatgaggaaatggagatcacaagaggctagagaggtggagtaaaagtccgggaatggagacactgacagtttatagacatggtgtgatgctttgcagctattt

SEQ ID NO: 72610 - DNA, 766 bp, Homo sapiens
ctcaaactgcagtgtgtcccccatgtgagctctacccatgaggcatgtcttttcagaaaaaggttgagggtgtggcacagaggcacaaaaacttagctttgccttctttccttagcccaaatagtctcaaaccacaactctagcaggtaaatggactcccttactcattgtagcccacattgttaccaatgcaaaaaaagttattctattctacctgaagtgcaattttattcagaaaccctgaatttgtgcttcaggacaggtgagacctcaaatcccagctccagtgggtggatcatgattggtctaagtcaagcactgtggtccaagctcttcttgccagtgattggttaggtgtgggcatgtgaccccattcatccaatgagaaataaggagaggtcaattaaggacttcccaaaaagccgctcctccaattttagaagagatgtttgtgaatatacactctttcttctgctgctaaatatkgattttttttttcctaggatgcctggaactgtgggatttagtttaggaacatgaggggtgctaaattgcaggaagacactgggagtggcagaattgaaagttggaaaaataaacctgagtcttgataatatcattgacttcctggaatcatcccagacttcttgccctgggaggtaatattttatgagagctgattgttctgttacttacagaaatattcagctggtatgtacagatagggatataccaaaatatacacaacagataacaatcacacgag

SEQ ID NO: 72611 - DNA, 1080 bp, Homo sapiens
tttgagcaaaraggaataggatttggatacagttgtctaaggaatgaactacaggtttgacttttttggacaaaactgaaatatgtgatggatgttccctcccctttctatttttggctgtccaccattctactccttctatgtggggagattttcctaccctattgtgttttgtgttggtaaaacccagtgccctatttcctggtatagaagttgggaagaggaaacttgtctcttctcctgaattctggcagtgttggttagtgacctgtgcttagccaatcagatacttggatatgtaggacttggaatcttttcaatgtgacacaaggctgcaggtttacatggaaataggatcattgcagcgatagtggcacatcagtaatggtggtgacagcagcaggagataatggctatggcactggcagcatccacaacatgttttagacatgttcttcttaacacacgatcttgatcgtgtttgctattccctaactccctagagcagctcagctcttgcatttttccaagcctcgctctcctgccttcctgtctattctgtgaacttctctgaattcttccaatagatttatttcctgcttcagttaatctagagttgatttctgttgcttgtgtttaaagaatctagatcataccatgtgggtgagatgaattactccttctcaggactcttctaaatggaaccctagaaagtctcaatggtgtacgtaagtaactggttttagggaaaaaaaaaaaaggttggagaggtgcttgtatgaccaatgctcttcaaggagataggaggaattgtgggcattggtgactgtttattgtcaggtctacaggactatacaaatcatattaattgagtgatgaataaaatctttcttcagagaaagtttgtcttgtctttgagtttcctgcccgtgtagtgaacgtaagttggaaataatggtacataataccttttgtttttatggtgctatttgactaagtgccctggaatctcactgaacagcaaaaaatgctccttctttatctgataaatgtcttgagatgcacaagaaaattggatcc

SEQ ID NO: 72612 - DNA, 1080 bp, Homo sapiens
tttgagcaaagaggaataggatttggatacagttgtctaaggaatgaactacaggtttgacttttttggacaaaactgaaatatgtgatggatgttccctcccctttctatttttggctgtccaccattctactccttctatgtggggagattttcctaccctattgtgttttgtgttggtaaaacccagtgccctatttcctggtatagaagttgggaagaggaaacttgtctcttctcctgaattctggcagtgttggttagtgacctgtgcttagccaatcagatacttggatatgtaggacttggaatcttttcaatgtgacacaaggctgcaggtttacatggaaataggatcattgcagcgatagtggcacatcagtaatggtggtgacagcagcaggagataatggctatggcactggcagcatccwcaacatgttttagacatgttcttcttaacacacgatcttgatcgtgtttgctattccctaactccctagagcagctcagctcttgcatttttccaagcctcgctctcctgccttcctgtctattctgtgaacttctctgaattcttccaatagatttatttcctgcttcagttaatctagagttgatttctgttgcttgtgtttaaagaatctagatcataccatgtgggtgagatgaattactccttctcaggactcttctaaatggaaccctagaaagtctcaatggtgtacgtaagtaactggttttagggaaaaaaaaaaaaggttggagaggtgcttgtatgaccaatgctcttcaaggagataggaggaattgtgggcattggtgactgtttattgtcaggtctacaggactatacaaatcatattaattgagtgatgaataaaatctttcttcagagaaagtttgtcttgtctttgagtttcctgcccgtgtagtgaacgtaagttggaaataatggtacataataccttttgtttttatggtgctatttgactaagtgccctggaatctcactgaacagcaaaaaatgctccttctttatctgataaatgtcttgagatgcacaagaaaattggatcc

SEQ ID NO: 72613 - DNA, 1044 bp, Homo sapiens
gtcatgcatattttctaaattttctactttgagagtgtttatttctgaaacaacaattttaaaaggatataaagtaagtaggcaagtgccagggtccccagtcaccctcactcagacaggcttggcttgccacagctcccaggacagactgcacccattgcataaggcgggagcatttttctttccggtgaagcctaaacaagctcagacctgcagtcaggcagctgcagctgtggttttgctgcagtctgggaacagcagctccagtgcggggcactcctgggtcttcaatgtgcaccaaggaggaaaggctggatgccggaccccagtcttacagctggctcagctgagagtgtgtctggcaggtgggggcagaagccaagtctgaggtctgagatgcgggatgtgaagaagagggagataaagcctagttggccctcaggaaatctcccagtcccaggccgcacccttcaggaaacctcctagcccagttttatctttcaggcatgcacctctctcattttgctgctgcttgtccagtatgatccaaagcccttgagaccaatgcacctttctgtgttatcccacgaaggtgatctgccatgtgggaacctcccaaacttctttctgactacaagccagagaatcaagagtcttgtcaccagtaccasagagctggggcaatgacagaaccattgccctatgccacgtaccaaatgagtacgaagcacctgccccatggtgtggctgggatctgctatttcctgaagcaacatgtcctgaacatcagctgattgacgttgcttccctaaaaggcttgagtatggcaaatgccgtcatcacacactgaaggggcatgtccattaggacggtttccctcgtcctataacagagggtcttgcaaccttgtcacacagtggtgacaaacacagaaggaacaactaggtccaagagcatcacagaggagatggaaagaggaactgaatcctagctctgctcctcactaatctgccttgtaagctggtgatggaagcccctgagcct

SEQ ID NO: 72614 - DNA, 633 bp, Homo sapiens
cagatgtcaagcaaggaaccttggggacccgaatggtgagaggtcagtcatgggttacctgggagatgagcatctcaggtaggacaatgaacacttgcagaagccctggtgtgaaggggctcagcacattccagggtcagaaagaagactagccatctggagtatatgaaataaaaaatgagagaagaatgaggtgatagcactgaggtaggatgccactcagcctggattctttccaaaatatgacaagaagtcactggagggttttaagcaaagtgatgaccagagaggccgggttcttgtcagaaagatgaaagaaaatagcaattttccatttacagagcacctagctagtgcttgatacatggaagtacctaatatatcttcttgtgtattgcttgataaagcaccatgcttccaaggrgtcagcaaaccctggaatagaagagactctagaagatatctagctcacatcccctattttataaataagtaaattgaaacccagagaggttaaatgctttgcccaccataagtcatcagattgggactggaactctaaggagagaatttcagcagagaagcgtgcccagatgacaaagcatttgttgtgtgaaggacgggatgattttg

SEQ ID NO: 72615 - DNA, 633 bp, Homo sapiens
cagatgtcaagcaaggaaccttggggacccgaatggtgagaggtcagtcatgggttacctgggagatgagcatctcaggtaggacaatgaacacttgcagaagccctggtgtgaaggggctcagcacattccagggtcagaaagaagactagccatctggagtatatgaaataaaaaatgagagaagaatgaggtgatagcactgaggtaggatgccactcagcctggattctttccaaaatatgacaagaagtcactggagggttttaagcaaagtgatgaccagagaggccgggttcttgtcagaaagatgaaagaaaatagcaattttccatttacagagcacctagctagtgcttgatacatggaagtacctaatatatcttcttgtgtattgcttgataaagcaccatgcttccaaggggtcagcaaaccctggaatagaagagactctagaagatatctagctcacatcccctattttataaataagtaaattgaaacccagagaggttaaatgctttgcccaccataagtcatcagattgggactggaactctaaggagakaatttcagcagagaagcgtgcccagatgacaaagcatttgttgtgtgaaggacgggatgattttg

SEQ ID NO: 72616 - DNA, 1245 bp, Homo sapiens
ttctattagttggtaaaaactatcagtggtcctaaacagcccagtgctatggcaacacaaaggaagaccatacaaacacatgtaaaaaacaacatccctgctgttatatgcctgagtttaacatagctagaaaaaactttattctccattccattttcttccttttcttttcctcacccatcctcttccttttcyctttactctgacagcaatcccaagaaagacaccaatgtatatttcctccaaagaaagagaaattcagttactataagaacaataatcggctgggcggggcggctcactcctgtaattccaacactgtgggaagccaaggtgggtggatcacaaggtcaggagtttgagaccagcctggccaataacatgaaaccccatctctattaaaaatacaaaaaagtagccgggtgtggtggggtgcgcctgtagtccagcttactcaggaggctgaggcaggagaatcacttgaacccaggaggcggaggttgcagtgagccaagatcgtaccaccacactccagcctgggtgacagagtgagactctgcctcaaaaaaaaaagaaaaaaaaaaagaacaataatcaccatcattcatcaaactgtgataacaatcatatactaatcctagaaagtatgaaaatgaagatcctacatagagtgcctggcacattaacttctacatcttaacattgttttatgtttcatcacttgggattttatttggaaaatcctcttttgttcaacgttatatgatgcttaatttttaacttagggcatcgctttgaaagtgtgaacaacattttctatgcagctacattaactgcatagaagctgcatgttcactgaattcattaaattcaaactgagggtcaaattgtattcctgttctatccagggctaatccttcttgttttatatcttggaaatattatcaaaatgtactttttttctttctttattcatgatttatttttgtatgtgtttgttattaaaatgtatatatttcaaaatctcctagtatttcacaggatagtagcaatagtatgtaattttagtctttttaataataatgaatcatttaaaatagaactaagagagattattttattacattgtaaggtttcttttatgtatacgtttctaagtcaggaaaaaggctgatgtggtggttcatgcatttatctttttgattttgttccattttatatcccaaacttttcatgatttcctat

SEQ ID NO: 72617 - DNA, 1245 bp, Homo sapiens
ttctattagttggtaaaaactatcagtggtcctaaacagcccagtgctatggcaacacaaaggaagaccatacaaacacatgtaaaaaacaacatccctgctgttatatgcctgagtttaacatagctagaaaaaactttattctccattccattttcttccttttcttttcctcacccatcctcttccttttccctttactctgacagcaatcccaagaaagacaccaatgtatatttcctccaaagaaagagaaattcagttactataagaacaataatcggctgggcggggcggctcactcctgtaattccaacactktgggaagccaaggtgggtggatcacaaggtcaggagtttgagaccagcctggccaataacatgaaaccccatctctattaaaaatacaaaaaagtagccgggtgtggtggggtgcgcctgtagtccagcttactcaggaggctgaggcaggagaatcacttgaacccaggaggcggaggttgcagtgagccaagatcgtaccaccacactccagcctgggtgacagagtgagactctgcctcaaaaaaaaaagaaaaaaaaaaagaacaataatcaccatcattcatcaaactgtgataacaatcatatactaatcctagaaagtatgaaaatgaagatcctacatagagtgcctggcacattaacttctacatcttaacattgttttatgtttcatcacttgggattttatttggaaaatcctcttttgttcaacgttatatgatgcttaatttttaacttagggcatcgctttgaaagtgtgaacaacattttctatgcagctacattaactgcatagaagctgcatgttcactgaattcattaaattcaaactgagggtcaaattgtattcctgttctatccagggctaatccttcttgttttatatcttggaaatattatcaaaatgtactttttttctttctttattcatgatttatttttgtatgtgtttgttattaaaatgtatatatttcaaaatctcctagtatttcacaggatagtagcaatagtatgtaattttagtctttttaataataatgaatcatttaaaatagaactaagagagattattttattacattgtaaggtttcttttatgtatacgtttctaagtcaggaaaaaggctgatgtggtggttcatgcatttatctttttgattttgttccattttatatcccaaacttttcatgatttcctat

SEQ ID NO: 72618 - DNA, 641 bp, Homo sapiens
ttccctatagtattaggagggagcctggccctctcgagaccccgatattagacttttagactctagaactgtgagagaagaaatctctattgttttaagccatccagtttatggtactttgttacattagccctgggaaatgaatatagagaccccttacaatcgcatattaagtcatctctgtcttttatattgccttctaaatgagccacaatttctcctttatttgacccaatagttatctaagactatgctgcttaatattgtaagatttgggggtatcaactttttattctttttttcatacttttattttaggttcaggggtacatgtgcaggtttgttatacaggtaacttgcatgtcatgggagtttgcagrttattttgtcacctaggtaataagcatagtacccaatagatagtttttttgattctcaccctcctcccatcctccacgctcaagtaggtcctggtgtctgtttttcccttctttgtgtccaaatgtacccaatgtttagctcccacttataaatgagaacgtgcagtgttcggttttctgttcctgcgttagcttgcttaggataattgtctccagctgcatccatgttgcagcaaaggaaatgatctcattcttttttat

SEQ ID NO: 72619 - DNA, 1789 bp, Homo sapiens
aaagaatcttttgaggttgaaggatgaaggaaggaacagatataggatggaaaaagggaggcaggagggagctatgggcaaagggtgcactgtgagcttaatgaaaagtctgggttttttttccttgtccatatatcgcaagatgaaaccaccttatctctaatcgcatttagagtacacacacacacacacacacacacacagacacacacatggatttatcatgaggaatttgctcacatgaggctgagaagtcccataatctgccatctacaagctacaggatagtcagtgtagtcagtggtgtaatcccattctgagtctgaaggcctgagaactaggagggtctatcacatagatcccagtccatgggtacgagaagaccaataacccagcttaaacaggcagacaagaagtgaaaggggtgaatttgtttccttcctcctttttgtcctattcaagccttcaataaattggataaatgcacagccacactggggagggcaatattgagtctccgaattcatatgctaatctttgccagagacactctcacaaacacacccagaaaataatgcttaatctgggcaccctgtggcatagtctagttgacatgtaaaattaatcatcacagttatacaggagcttaagaaacactattttaaagagtgattctttactggctgaaaatttggaaaagttgacccataaaatcaagattgaggaatgggctagggattttgtctagttcacccaaataaaattttgctgagtgtctaatgtatcaggcactgggagtrtaaagatgaaaagagacacagtttcttctcttgaacagcttgttgtcgagtagaagattttaaaaagcccattctaaaatgtttcctgatgaagacatactaaatttccttaaagttttatgatcacttaaataatagctttctttgtgaagtaccttctaagtgctaggtataatgttggtctttttccagttcttatgacaaccattcaaggtagacattttattttttctgcttttcaaaaaggaaattgaagctcagaaaggacaggcatattacccaactattagtaagtggctaattgaaaattcaaagagtagctaaatgaatgagtaacatgttctaggcacttcacttgatgctggatgcatagtatcttacagagtcttcacaaccactggagaaaagagatactactgttatcttcattttatggctgagaaaacagagaccccctggaaaattaaacaaattgcccagggccacacagtcagtgtagagtgaggattcaggctcagccttcttggttccaaagctgatatttaaccgccatgctacccttcctcttgccttgtgccttacagttcacagcttcactctggctttgatttccatgtttgatgggttcttttgtactttcctctccctttaccaaaaaacaaactgaacaacaaaaccatcttgagcatcttcttgaaaggagtgaattcggctgaaggaaaatttccattagaattctgaggctcagcattaggccagggaggtaaaaatgccatgctaattaagtaattactgaaactcatgattaaaacatgcctttctaagagaatccccagaataaatggtattcttcattttgccttggagcttggttggcttggcttctaagaaattcaccttttttctggagatgtaatggggaagcaaagacttcttattccttatctttttgaatccttagaacaactctttggagatacatgaggaaa

SEQ ID NO: 72620 - DNA, 632 bp, Homo sapiens
gaattcaagagaatgcaaagtcacttcaggctgaactgagcaggaagagaaaccaggggaagctcaaggccaacagagtgtcaaggattctgtggcagtggggatttgtagtttataggaggaaacagaaataataatagtaaaaacaacgacaactattaacaactaacatcttctgagtgttcaatcagtgctacatgctatgttccacatgggttctttttttttttttttttccaggctgaagtgcagtggcaaaatctcagctcactgcaaccactcattgcctcttaggttcaagtgattctcctgcctcagcctcccaagtagttgggactataggcgcgagccaccacgccaggctaatttttgtatttttagcagaggtggggtttccccatgtttgccaggctggtctcaacctgacctcaagtgatccacccgtctcagcctcccaaagtgctgggattacaggcgtgagccaccctgccttgcccaaatgtgttctcttgttctcatgacagtcgtataagrcatatagaaatatccccattttacaaattaaaaactgggtagcatctctgggttgcttagcttgtgagtggaagagtcagcatccaatcaggtctgta

SEQ ID NO: 72621 - DNA, 632 bp, Homo sapiens
gaattcaagagaatgcaaagtcacttcaggctgaactgagcaggaagagaaaccaggggaagctcaaggccaacagagtgtcaaggattctgtggcagtggggatttgtagtttataggaggaaacagaaataataatagtaaaaacaacgacaactattaacaactaacatcttctgagtgttcaatcagtgctacatgctatgttccacatgggttctttttttttttttttttccaggctgaagtgcagtggcaaaatctcagctcactgcaaccactcattgcctcttaggttcaagtgattctcctgcctcagcctcccaagtagttgggactataggcgcgagccaccacgccaggctaatttttgtatttttagcagaggtggggtttccccatgtttgccaggctggtctcaacctgacctcaagtgatccacccgtctcagcctcccaaagtgctgggattacaggcgtgagccaccctgccttgcccaaatgtgttctcttgttctcatgacagtcgtataaggcatatagaaatatccccattttacaaattaaaaactgggtagcatctctgggttgcttagcttgtgagtrgaagagtcagcatccaatcaggtctgta

SEQ ID NO: 72622 - DNA, 1171 bp, Homo sapiens
acactcactaaaaatcataccttaaaaaaatatttgccaacatgaaaaaatttttaggttgaaatagaaacagaattttcaaaagaacaagccacaaaccagcatttgcacatgtttctagattttacaatcccatccacgtgtatatacatacattactgctacatcatgttagcaacatctttagctagtgagaatatgtttacaaatttcgttgtattcgatttttcattgcacaggtactattgcagtggaggaaggtggcctgaagccaaagtatgaagtcagaagcatggtcttctgagcagtgccctccttttcattcctggccttgcttcctgaacctggttaacagtttttctaacaaaaatagctctagcttcagtacccgccatgccatagctccctgctcaattccccgctatcttgtgctttgaacaggattcactaacactcaatggtatagcaggtcggatgtgagtaggaagcccagctttatgacctttggctaactatttcatctcactgaaacttagtgcccccttctagaaaatagaaacctaatgtctgtcttataaggttgctgtgagaattgaataagaacatgtgtataatgagcttggtcatataccagataaactaatattaactcgctgtaactcatgattaaatatcaggttaacatctactgagttcatcttaccacgtatcatcccactaactccagagggtgagaatttattccctgcttaatgcaaagtttccccatgaccagagattctggttctctgagggtgattggggctactgaaaaccataagaacaagcttgtgactggtggtattttaccctgctattctcttctctcatccagaagtgtctttagagcacagggaggggaggtgggaacatacagctgggttctgaactcactcctaccagcatccatcagggagctcaggctgacctttgcaatgtctttaagacacagggattaaggcataggtgacccatgaagcttaggtaactagtcaaggaaaggggagaggatgaaagaagcataggaaggaatatttttggggtggtgagtttgtagtgtccttsgagttaaattgcacattccacagaagcagatacctagtcacttaatgatcaaatcatttaggatgca

SEQ ID NO: 72623 - DNA, 693 bp, Homo sapiens
tgaacaatgtaagcagagaaatagaaattctaagaaattttggttaaccaaaaagaaacactagtgaagaaaaccactgttagagaaatgcagaatgcctttgatgagcttattattattaaatagtagactggacatagctgaaaaaagaatccctgagtttgaggatatcaraagaaacttccaaaattaaaaagcgaagagaaaaatgactgaaaacaatagaatggaattgagacaattatctgagacaactacaaaagaaacaatatatgtgcaatggaattcccgacggagaacaaagagaaaaaggaatggaagaaatatgtgaaacaataatgactgagaatttcctcaagttaatgtcagatatcaaaccacagatccaggaaactcagagaaccccaagcagggactggttatttaatttgctggaagacagaatatcaattattagaataatagaccaaattgaataatgtgatgtaaagaatgaagttaaaggccaatgactaagtacataataccaactccagaggaataaaatagagaagatctctccattctcaaattccatggattcctgagcatctcttcactggccagtggtggaaaccaggtgctgaattcctcaatagccctccaaaggattgttttcttgaatatcactagggagtatggaataattaggat

SEQ ID NO: 72624 - DNA, 883 bp, Homo sapiens
agtaatgtgttcattcctccagggatggttgtaatttaatttgtacatccaaataaaaacatagttaatagtagaattttctccactgcctctcaaatgataccaagtgtctttttttctttaacttataccagcaggcatccaactttgaataaggaaacttgtctattggcttatttttttttttcagtaaaggaatgatatttttaactgttttctgcttcctacagtacattagtctgctagggctgccagagcaaagtaacacagactgggtaatttaaacagaaatttgttgtcttggaataaatctggaaatccaagatttycagacttccacatttccaagtaatctggaagtccaagatcaaggtgtcagcagggctggtttcttccgaggcctctctccttggcttgcagatgtccatcttcttcctgtgttttctcatggtgttccctctgcatctgtctgtgtccacatctcctcttcttataaggacacactcatattggattggggcctgacttcattttaacttaattacctcgttaaagacctgtctccagacagtcatattcttagctactggcgtgaggacttcaaaatttgaattgtagaagcacacaggttagcccaaaacatagtgtcaatgaccaaaattgacttcctaaaacagacctaacgaggtagtaacagtggggtgtgtgaggatgcatcagcacacatgatgggaaaacagtgcttatgacgaaggcacggagtgagtggtgatgaagtgtatgccaatgaacattatctgaggggctcaacttgaccattctgattctgtgtctattgcattctgagagctactttaggagttcctgtattacttatgtgaat

SEQ ID NO: 72625 - DNA, 883 bp, Homo sapiens
agtaatgtgttcattcctccagggatggttgtaatttaatttgtacatccaaataaaaacatagttaatagtagaattttctccactgcctctcaaatgataccaagtgtctttttttctttaacttataccagcaggcatccaactttgaataaggaaacttgtctattggcttatttttttttttcagtaaaggaatgatatttttaactgttttctgcttcctacagtacattagtctgctagggctgccagagcaaagtaacacagactgggtaatttaaacagaaatttgttgtcttggaataaatctggaaatccaagattttcagacttccacatttccaagtaatctggaagtccaagatcaaggtgtcagcagggctggtttcttccgaggcctctctccttggcttgcagatgtccatcttcttcctgtgttttctcatggtgttcmctctgcatctgtctgtgtccacatctcctcttcttataaggacacactcatattggattggggcctgacttcattttaacttaattacctcgttaaagacctgtctccagacagtcatattcttagctactggcgtgaggacttcaaaatttgaattgtagaagcacacaggttagcccaaaacatagtgtcaatgaccaaaattgacttcctaaaacagacctaacgaggtagtaacagtggggtgtgtgaggatgcatcagcacacatgatgggaaaacagtgcttatgacgaaggcacggagtgagtggtgatgaagtgtatgccaatgaacattatctgaggggctcaacttgaccattctgattctgtgtctattgcattctgagagctactttaggagttcctgtattacttatgtgaat

SEQ ID NO: 72626 - DNA, 709 bp, Homo sapiens
acccctcaaattcccggtttaccaccaccagcctggagataacgtccttatcagaagttggaaatagggaaagctcaaacctacatgggaaggaccttacttagtgcttctaacaactgaaacagcagtccagaccagtgaaaagggttggactcatcacacctgggtcaaaagagcaccatctacttcaggacccaccccaaccacagtaacgttgaaaagaacagtttaatttgtctcttcctccttttcctcttctccccagctacctcacatcttattattaatataactaagtctagttcccctcaaaccattaccttgtcttgttatgccctgtggagatctccaaagccaaaggaagctagcctctttagaaaagtacctttgcccttccaggataaatagaactgcctataagagtgactcttgcaccaaacaagcacaaggcagttattggaagttmtgttttggctggggagatgtggtctgtaccaccaagtatcaaggctggacctctccaggaggaggttgtgctaacctaaagccttacttccactttaccaaagagacaactccctctaattgtaaactccaacaatgtaaccatgtgcaaatctctattactttccccacctctactgacactaaccccattataggttgcttctatggcctaggagctgatgttcctggaatagaccctata

SEQ ID NO: 72627 - DNA, 709 bp, Homo sapiens
acccctcaaattcccggtttaccaccaccagcctggagataacgtccttatcagaagttggaaatagggaaagctcaaacctacatgggaaggaccttacttagtgcttctaacaactgaaacagcagtccagaccagtgaaaagggttggactcatcacacctgggtcaaaagagcaccatctacttcaggacccaccccaaccacagtaacgttgaaaagaacagtttaatttgtctcttcctccttttcctcttctccccagctacctcacatcttattattaatataactaagtctagttcccctcaaaccattaccttgtcttgttatgccctgtggagatctccaaagccaaaggaagctagcctctttagaaaagtacctttgcccttccaggataaatagaactgcctataagagtgactcttgcaccaaacaagcacaaggcagttattggaagttctgttttggctggggagatgtggtctgtaccaccaagtatcaaggctggacctctccaggaggaggttgtgctaacctaaagccttacttccactttaccaaagagacaactccctctaattgtaaactccaacaatgtaaccatgtgcaaatctctattactttccccacctctactgacactaaccccaktataggttgcttctatggcctaggagctgatgttcctggaatagaccctata

SEQ ID NO: 72628 - DNA, 717 bp, Homo sapiens
aaactgcttgtgataatactggagaatccttctctggaaaagctgaacaaccaaaggaaacaggatttatagatattgacataggatatccttagtgaaaaggtagctgttcaccctgtcatcctgcagggaagctttctagtccaggagcgatacccactgacagagctaccaattcagtttggtgtctcgatcttaaatatatccacacagtcaaaaatcaatcaccagtcaaatgaggaaattctttaacaccaaaatagccacataataagtaaacagagaaaatacttagggaaaaaaaagaaaatgtaagtcaaagcaattgtatatactatccttagaaaggtaagagaaaatakagcattcattaaaaaaagcataaaaaggaaaattacaaaaagaaaactttgtgaattaaaaatacgatatctaaaataagaaatttagtataggagataaaagatacaatctaggacctctttaagaaaatagaaaaaaacaaaagacaaagattagaacaataacacaggcccatatatgactcctgactggcagctcaaaggaacatgaaaaaacgaatctccaggtatcccttggccagaggaagggggaactatttgtttttaatctctttatgcccaaagcttgcctccttttctcacttttctatactggtactgagaattcccattttcttaactgaatattctggca

SEQ ID NO: 72629 - DNA, 730 bp, Homo sapiens
gtgaccagaggatcacaggagcctaaccccatgactcccctagaagcaatggttcaggattcgttagttcagtgttagtggtgacgttatggaatataaccactgtgaataacaagagtcaactatatgcggctaaactgttttcatgtgaagtacaatttatactgttataacagggtctaggaatatcggttttaccgcacatctgccagcattaaagcattaaatgttatcattaatttttttttctaatttgataggtgaaaagagtatatagggttttgtttgttttttgagacagggtcttgctctgtcactcargctggagcgcagtggcgcaatcatggctcactgcagtctcgacctcctgggctcaagcggtcctcttacgtcagccttctgagtagttgggaccacaggtatgtgccaccacacctaggtaattgtatttttttgtggagacagggtttcaccatgtttcccaggctggttttcaactcctgggctcaagcaatccacccgcctcagcctcccaaagtgctgggattacaggtgtgagccactgcactcagcctaaaagtatgtaattctaatgtgtgttttttgactggcagcaaggttgaatgtttctccttgttggttaaagtccaggcccagtgcatttaagacaaattttcttgagtcctatgtgacaggcagaaaggattgaagtacttctgggtcatcctga

SEQ ID NO: 72630 - DNA, 955 bp, Homo sapiens
catggctttaagaccactttccagtctaagacttacaaactttgaggaccagtcattttgcaaaaactaacaggctttcacaaaacatcactatcaggaatacaagcatttccaagaaccaccccttcccactcacacatcatattccttgatacccactactaagtttgtaatgtaaatttgaaaaactatggagcgttacttccttagaaatagccactagttcagaatttcttttggattaacaagtaataaggaaattcctatgtgtcaagtacattttgagatgactaaacctcaatctctgatctcasagtattcagttagcagttattaacgctgtattagacattgagcatacaaggatgagaaaatacctctgtcctgtggaactcagaattgacaatgagaggaaggagttgaggactgagaataagaaaataaccaagagaaaataaggtaaatgctacagaagagtcatgtggaaggggctgccttgactcccaagagagctaagttaattctgcataatggagtaatatctgaggtcagaaagccaagacatgtagactaacaacatttaacaaggaagaaagagctaaatgtctcaagagaggatggaggaaagtgggaggtttttgttttttgtctgtttgtttgtttgtttttccgagaggtgtccaagagggatccaatgccacgggatatccaattacacttcgacaaggtttatgactggatgtgaggatggtaaaagggttccattatgatagaataaatccagtaaatagtgtctgtgtttagatccccaggacacagtgtttgcctttgtttaatggtttaactttttacttgttttccctttctttttttttttttttttttttttgccttttcgtagccagaggaagaatttgcagcagccagcacaccagcggctctggtgttggcttgg

SEQ ID NO: 72631 - DNA, 793 bp, Homo sapiens
gcagttagaaatctgtactttttcactccctccacaacaaatccttcagaaatttggaccacagaagctccaaaatactcatcagtttcatccttcattcatctctgctactacctccatattccaaacttgctattaccctatgttggatcataacaaaggcctcctaagtaccatccctgcctctcctggccctcttccatccactcttgtcataacaagcagagtagagttaacaacaacaacaacaactgaaaggagagtcactctcctgcttcaaacctccaactgcttcccattgcaygtgaaataaaagtaaaactccttatcatggccttcaagatactgtgttatctaattccctgacaccatgtctgctctcaaccccatcacaccctcctctcacaactttttaaccacacttgccttgtctctgtctcacagtcaagcccattactatgtaagggcatttgcatgagccaatccctgaacctgaaaagttcttacccaagatcccaaaacggctgcccgcctttagtcactgaggtctcagtttaaatgccacttcctcaaagggcacgtgtctaacttcacattctaaatagcagccagccattccatttctcactaccttgtcttattttacttttaccacttagcgctacttgattttaaaaatctgtttattgtctatccccagtctgtccttgttggaatctgaggaccacgcaagcagaagacttgcctgtcctgctcattggtatatccccaaaacctggtataaggtttaaca

SEQ ID NO: 72632 - DNA, 793 bp, Homo sapiens
gcagttagaaatctgtactttttcactccctccacaacaaatccttcagaaatttggaccacagaagctccaaaatactcatcagtttcatccttcattcatctctgctactacctccatattccaaacttgctattaccctatgttggatcataacaaaggcctcctaagtaccatccctgcctctcctggccctcttccatccactcttgtcataacaagcagagtagagttaacaacaacaacaacaactgaaaggagagtcactctcctgcttcaaacctccaactgcttcccattgcatgtgaaataaaagtaaaactccttatcatggccttcaagatactgtgttatctaattccctgacaccatgtctgctctcaaccccatcacaccctcctctcacaactttttaaccacacttgccttgtctctgtctcacagtcaagcccattactatgtaagggcatttgcatragccaatccctgaacctgaaaagttcttacccaagatcccaaaacggctgcccgcctttagtcactgaggtctcagtttaaatgccacttcctcaaagggcacgtgtctaacttcacattctaaatagcagccagccattccatttctcactaccttgtcttattttacttttaccacttagcgctacttgattttaaaaatctgtttattgtctatccccagtctgtccttgttggaatctgaggaccacgcaagcagaagacttgcctgtcctgctcattggtatatccccaaaacctggtataaggtttaaca

SEQ ID NO: 72633 - DNA, 550 bp, Homo sapiens
attttacaaacttaataccacagcagaaacttaatctcagtcaacattctcaattactgacacctggagcaaaagcatagcgttcttacctaagctaaaccaataggactattttcagaacgctcaatcattcagtcatcaatttttctgtgttaggcccagaaactgctgtgttaagcataatctggactaaactgatagaagatgttatccttgcctgttctcccttattctcccctgcccttcccctgtttaccaacacacaacacaagaatgggaayacaactttgcatcttctaggcagtcatagaaatacttggttcagtctgaagaatccattcaacgtggaagggctgggtcgtctttggcagtttttctccaatatgaaatcaagctaagaatcttcagacaaaccattatttcagccttttttttttttgtagttcacctggcacccagagtgatgtggaacttgtcaatgatcattttattgttatacatagaattttagtttatcaaacatatgtaaataaataaaatatgtgttgat

SEQ ID NO: 72634 - DNA, 607 bp, Homo sapiens
ttataggcctttctcatttgtcctctttccactttcccctgcaccaccttcctcctcactgctaatcctcactaaatttacttagccctttgagccagtgtcgtaatacttacagccattaagtgttagtggcaaagaaagaattgtaacccagtctcctgcagtcaaggttaactttatgtgtcaacttgaccaggttaatggatgctagatagttggtaacattatttctggatgtgtctgtgygggtgtttctggaagagatcagcacttgaatcagtggactgtgtaaagaagatcaccctcaccagtgtgggtaggcaccatccaatctgttgagggcccagatggaacaaaaaggctgagggagggtgaattccctttctctcttctagagctggagcatccctcttctcctgccctccagggctcaaggttctcaggccttcagactccagaaattagactggcagccccccaaattgtgaggccttagaactcagactgaattgcctcactaccttccctggttctccagcttgcagatagcatgttgtgggacttctcagccttcatcatcacatgggctaattcccgtaataaatct

SEQ ID NO: 72635 - DNA, 634 bp, Homo sapiens
ttctgtcactcccacttctaaggtaaatgcacatcagtaatttgacatgtgcaagggcctggtgtccagagctagcatggggtgaagtgggggactgtggggatggtggtgtctagcggaggaaaagcagattgtttcgaagattacatgacataagtgaatcaggagactgatgtctaaatacaggctggtaagtttgggggacagtggagatgttctagtcactaggagtggaaggaactgtgagcattggctacttttagtgactgagcttgttagagaggagtcttccactttaggaattgcagttagaggctgagaagtccagagtcagcctctgagtgtcactgcccctaacccgctcatggggtttgccagcagtctctggctgtaatatatgggattggtgattgcaccgccgaactctggcaaaacactcttagatcttgtcatttgcttaggaaaagagtctgattttttgtttgtttggttttttttttttttttttttgcaaaaatagttsataatgtgcatgtttcctctcaatcatagctggtttttctgtgtttctgttttaaagttggggtagaatgaaggtggaaaatagaaatttgttgcgtgaggaaatgagtgg

SEQ ID NO: 72636 - DNA, 880 bp, Homo sapiens
cttagatgcgcctcaaatcattatgctgagtgaaagaagctggacagagaagagggcatgctatatgattccatttctagaaatgcaaatcatacagtggattcccactaaatggaaatctatagtgaccaaaagtgataaaaagtgactcaccatctacagaaaaaaaagatcaagaattgcctagggatgaatggaaagctgggttgcaaactgaaacagaatctttggtggggtgatagaaattctctctatcttgattgtagtggttatttcatgggtataaacactgtcaaaactcagtggattatatgcttaaacagaaacacttacttatgtaagttaataaataacagaaacttatttatgtaagttaataaataactaagttgataaggtaaaaaataaaagatgatgagagcctgaacatgggcagtaagaggagagttagagagcgtgggacagatttaagaaaagyctttaaaaattaaattaaccgatttgatacaataaatcaagactatctccttcttagtcttgcagaatatgactacagtggaacgacaaagaatagcctcagactgctgcctggactgtgctacaaaaaagattgcttctgggattgagaagcaaattccatggttttcctgctttcaaacaccacccccttgtgtttatatgtgtaacgaataccaacccaatggcttgggaggcacatgtgcctttcacgaagggagaaaatgtgcagcacttctggacattttttggaaattatgtcacgaatgtttggcggtcacctcccccaccattcccctcaggcccaggggtgtgggcagctcgggggctgtagcacatacactgaatgtgtgttccataaaat

SEQ ID NO: 72637 - DNA, 880 bp, Homo sapiens
cttagatgcgcctcaaatcattatgctgagtgaaagaagctggacagagaagagggcatgctatatgattccatttctagaaatgcaaatcatacagtggattcccactaaatggaaatctatagtgaccaaaagtgataaaaagtgactcaccatctacagaaaaaaaagatcaagaattgcctagggatgaatggaaagctgggttgcaaactgaaacagaatctttggtggggtgatagaaattctctctatcttgattgtagtggttatttcatgggtataaacactgtcaaaactcagtggattatatgcttaaacagaaacacttacttatgtaagttaataaataacagaaacttatttatgtaagttaataaataactaagttgataaggtaaaaaataaaagatgatgagagcctgaacatgggcagtaagaggagagttagagagcgtgggacagatttaagaaaagtctttaaaaattaaattaaccgatttgatacaataaatcaagactatctccttcttagtcttgcagaatatgactacagtggaacgacaaagaatagcctcagactgctgcctggactgtgctacaaaaaagattgcttctgggattgagaagcaaattccatggttttcctgctttcaaacaccacccccttgtgtttatatgtgtracgaataccaacccaatggcttgggaggcacatgtgcctttcacgaagggagaaaatgtgcagcacttctggacattttttggaaattatgtcacgaatgtttggcggtcacctcccccaccattcccctcaggcccaggggtgtgggcagctcgggggctgtagcacatacactgaatgtgtgttccataaaat

SEQ ID NO: 72638 - DNA, 1501 bp, Homo sapiens
ttgctagggatgggcaagggacagaatcctgaccaataaaatgtgaggggaagactgccaggttcttaggtccaaaaatatagacacatgaaatatattatctttttcttcctctgaacattgtctcgtctggatgagggtaccagggtgagggcaaaagctgatacacagagcatggtggagctaagaggcccagagaactgggatcctcaatgatgtcactgagcagctgaattagccctggagaccattctacttctgaccttcttgttatatgacatggtaaatttctaaattgtttcagccagtattacattaaacttttctgttacttgcaataaaatactttaagtgatgtaacttcctttaaacatgctaccctctaaaaacaataaagtatgtcagtgaagagagaacaaaaaaagaattttaccaaaaaaaaaaaaaaaaacctactctgcttcttataaagcagaactactgaatggacatatttgcatttgagatatgcttttcattaattggctccctcaaggcatcccagatgtctggaggctgatgaggtggatagaggcccctgctcagttcatgcatagcccaagcacagcttggacaggaagagccacagagaccagaacttaccagaagaattaggaaagttaacatctgcacaatccctttaragtcaggatcttggttctgctaggtgagagtatcgtgtaccctagaaacagtggagaactcccttcacatcagagcagctcctgggatagctgtgcagaccaccttcctgacatgtgtcttggtagtgtcatcaggtgctaaagaaataggactaagaaactgatattggaaggggatatggctttctccaccggtcagttacctctcattagtactacacactaaagaagtcatttactaagagcatcttactactctgctgggcactatgaaatgcaaactaagaaaacctaaagatggtctatgagggtcctagaacttccagaagacacacacattggcctattggtgtattgaattgctcagcttaccaatctaatgcttaagttcactctgcacttagtctttccaagtgttcctctgccatctgactccatctttagaaacctctgatggataaaggaaaatagctaatagctattactgtgtctcgtgcttgatgagcaccttatagatattatctgattaaatacagcaatcctatgaggtatgtattattattattcccgatttacagatgaggaatttgctcagagtcacatagatacaaaagctgctttggaactcagattcagcactgctgaagccaaatggggccttaaccacttctccctgctgccaagacccactgatatcatttgcgtcgtcatcacacaggctgatgctaggaaggtagcactcttgccttactgcaaataaagccgaagagggctgccaggctcctgccccagactcaagtgcctcacccaagacaccc

SEQ ID NO: 72639 - DNA, 1499 bp, Homo sapiens
ctcttgcataccactgatgtatctgccctcctaggatactgggagactgtcaggacactgagcacacccccgaatgtttggggaacttgtaaatccatcctcagctcctcctcaacccaactgatatccctgtgccaaattttcaactgtcccagggtaatttccctggaatttcttaaagctgattataatttcctgttggatgggatgtttgagatttttggctttcatttcttccggaagttatttttcaagatcctttctctccccaggttctggcaccataagccttcttgccttcctgttgttggccttgctggggaggtgggggaaggggtggtgattatttaactttttggtgatttttgcactcttttcccatccaaggcactctgcaaggcattcacaatgggcagtgttcctttcattatgaggtaccttctcagaagtcaaggccactgacaaagcaaagtttgtccccagatttcaggacatgtgctccaaagtacatgtgaaagctgctgtcatccaagggagagccagcttctttgtcccaggcattagatttcagagcgagagcacgagttggtgggggagagaaagaagaaagagaaaagaggaaaaggggaagaaagagaaagagggaaataaagaaaagaggcaattacgtgtttggcatgaaattgctacttttctaatcaaattggcccagctctgtttatggttcagcgtcaatattcattcctcataaaattgaaggtttatggtacctacaagaaacattgaaaaatgcatgcatcctgtaactcctgaagtatgttgactagatgttttccatatggataataggaatattttgtggaggcgctaggccaggctgcgtcaatgggctgaacagctatggggaacttccccgttttcctctgtcaggtttaagttgtgggagtttcagtggcagaaccccctttcccatacgtaggcttaaaactcttaacaaattctcggggatcccagaataaaaccgagactctggaccatgaccttccaagctaccccctctgcatacctgtccctcactttgcctacccacactggcctcctccccatccccaagctctgcccagtgggaggacacctgtgcttgctgtcccctgtgcctggcgtgttttgccccttgctygtcatctgtggtttcttcttctcccttcaggccacaactaaaacatcctttcttcaaagaccgattccttctcctctgttactccccatcagatcaccctatttggttccctcgctggactttacctgaagatgtcatgtgcgtgcatttgtctttgtgtctcctcagtgggatgtgagcaccacgacagagccacctgccccatctattttctgcttcatctctgtgcctggcactttttagcggctcagtggatgtttcctgatcaagacagcttgttgggtcaagttggtcatcttgtccatccagagagaaattc

SEQ ID NO: 72640 - DNA, 601 bp, Homo sapiens
atgggactgatagggtcagataatgtttaaagggaaaggctttatgtctctcaggcctctatgtttccacatggatgcccccacacacacatagattgaattatgaacagacccattaatgctgggatcacaaaaggtcaagttttgtcttcttttacccctattcacattgcctttgtagaggaawaaaaaaggatttgaagaaaaaaaaagattcacgttgaagaattttaaagaacactttcccccttttagcaatatctgtgattgggaaaaaaaatcatattatgtaaaataattcatgagtattatattacctacctgattttagtatatgagttatttcatgtgtagagttgtcttttaggatgacatgttatcataataactgagaacaaaacataacactttggggataaaagaccttatgaatatgtaaagtaacatcaagtttgagtaaaactgaatggaaacattatcaaaatgtcagtgacaggattcttgatatattttctcctgtgtttaagatatgttaatctttgctagataccttgagagttttaagttatttttaaaaatcaggtgataattggtgtaattt

SEQ ID NO: 72641 - DNA, 916 bp, Homo sapiens
atgatcagatatgctgtaaaaatggctatgaatttagtcaggattattctctttcattttattggtggccgatatgctaggaaaagatactaagaaaatataagcctgctttgaagcaagtacataaaagacarcttggaatttagtagccataacccttggtcctgattctaagtgtcgcaaccttgtgaaaaagcaagcatttttcagtaaggctaaagggaaaatgacggggaggctccaaatggcatttttaatgtaaattgttaaggctcagtggagatgatgagcttttaaaaaagaaagaaagaaagaaatcccattgaccaagaatatatttgggagttctctcagcaacagtcatttgaaatatgatctatgaatgttaaggaaatgcaccgagccacagtcggctactactaagaccttgcatcagtgtctgtccaattaacttaatacatctgataattatgcccacaccattaaaaggtattcgttttatgggctgtgggttgataggaaagattactattttacccatatctgtaatgtcgactggagagctgccgcacttaagttccctgcactcacagctcataaatttgagaacaaactctctcccactcccagccttccaaccctcaggctgcaccaaggaagtatttaaactggaagaaaaaaagcagctcaccagctggaagggctgcagcaagtctaggacactgtgacgcagagtgcagccttcagaacggaagacctgcaagaggactccagtgcaacacatctgctcttccacttcaatgagacaaatgtcagattagctgccgtcagcagcttgcagcaaactcagggtgatcaaggaaggtgagcttttcctttctgataaactacacacacacacacacacacacacaca

SEQ ID NO: 72642 - DNA, 916 bp, Homo sapiens
atgatcagatatgctgtaaaaatggctatgaatttagtcaggattattctctttcattttattggtggccgatatgctaggaaaagatactaagaaaatataagcctgctttgaagcaagtacataaaagacaacttggaatttagtagccataacccttggtcctgattctaagtgtcgcaaccttgtgaaaaagcaagcatttttcagtaaggctaaagggaaaatgacggggaggctccaaatggcatttttaatgtaaattgttaaggctcagtggagatgatgagcttttaaaaaagaaagaaagaaagaaatcccattgaccaagaatatatttgggagttctctcagcaacagtcatttgaaatatgatctatgaatgttaaggaaatgcaccgagccacagtcggctactactaagaccttgcatcagtgtctgtccaattaacttaatacatctgataattatgcccacaccattaaaaggtattcgttttatgggctgtgggttgataggaaagattactattttacccatatctgtaatgtcgactggagagctgccgcacttaagttccctgcactcacagctcataaatttgagaacaaactctctcccactcccagccttccaaccctcaggctgcaccaaggaagtatttaaackggaagaaaaaaagcagctcaccagctggaagggctgcagcaagtctaggacactgtgacgcagagtgcagccttcagaacggaagacctgcaagaggactccagtgcaacacatctgctcttccacttcaatgagacaaatgtcagattagctgccgtcagcagcttgcagcaaactcagggtgatcaaggaaggtgagcttttcctttctgataaactacacacacacacacacacacacacaca

SEQ ID NO: 72643 - DNA, 706 bp, Homo sapiens
atgcagtaggtaaatttcgtattacagaatactttgttcatttttccctacttccttcagtaagctttaactgtgaaacagcttaattgctactgacaattatttcttagatgtataaaagtcccctttagaccaatgtcaatgtttgttaatctaacattacttttttgaaggaaaattactgctattaaatgtatactcgtggaaggaagtaatattgtaatcagttctggggattcaattaactagggtgtaataatactgtttgcttgaaagaaaacaatttgtacctgcatattttcatttggctacctaaagatcttttaagggattatctgatcattagaatgcttattatcttgataaaataccctagtttggtgattacaaaataatttaatgagatytttcttagttaaactcaagtattttatacagtatcataaattaaaaaaatcttccttactgatgaatcaatactatgtgatatcaagatgataaagttatagccctattcaatgtctcttttttcacataattttaaattaatatctctctggccctatcatttttgtaaaaatttacctttataattaacttatttaaaataatttaccacttctattattgatatatagtacatttgctattttattacatcattgtcattttattcaaacttctgccagtttgatgctatttctaa

SEQ ID NO: 72644 - DNA, 1335 bp, Homo sapiens
tgcatttgtctcacttttctacatttgtaaatgtaatgtatttcttaataaatttgttcttcagaattagagtttttgtcttcctgttcttcatgattgttttctttggcaacatctccaagtaagtgcattcttacatccattgcattgcttatgcctaaaactagacagactaaatgaagtgctaagtgtgttagacaaattatttatgctaaaagttatttttgcaagtgaactgacctggaaattgtggattttgcctttttatttttctagtatagaatatccaattttagatattttaagaaataacttttaaagctttgcatttaactgttaaagaagtatgtcaatacataatttaaaacttgaactaatatttgctatatcttcatgtttcttgtctgccagagtttagtgctaagagaactagatttgtactaggagcccagagcactttttatctggttagtatgaaagctttttaattttcaataggtattgtttcttaaagcatcrattttttaaaaacaagaaaaaaaacaactgaaataactgttaatgtggaaatcattttgttttaggagcaaatgtgaaaaatgatgcaatctgcagataataaaactctagttgttttgaggtcaaaataatcagtattatttttctcttgagcaacacaggaagtaaagagacattttcattaatgccatctggctcacagatgtcatttactgtgaattttagaaatatatgaaaaccttatggctaatctgttttgtaacacattcatttttatggcaggataaaaggcctagtagatattatagacatatttaaagaggctatatttacatatttattaaagctaaaatattatgttactaaatgataatttttccaagtaatcattcctatctaaaatggcattcaataatatttgttcaccaaaccaaaggatgacttatgaataaaatccttttaaatttgattttgttgctaaaggatatgtggttatacacagtgcatatattagaaaaaccccttattcatttagtaatgctcttgatatgttttggcttatggttcagttctttttaaattttgctacattctttgtttccacttaaatttggcttctatgaaaacattaagaaatactttttgtttacctcttagaaggtatatacaatatgacacctttggaggtttaatgttagaaatgcagaagcagacctttaaaatggagtccccattttgccagtcataaagcaaaatctgtgcgacacacacatctaggtatttttcatccatatctagcttgctcacaatgacttt

SEQ ID NO: 72645 - DNA, 1335 bp, Homo sapiens
tgcatttgtctcacttttctacatttgtaaatgtaatgtatttcttaataaatttgttcttcagaattagagtttttgtcttcctgttcttcatgattgttttctttggcaacatctccaagtaagtgcattcttacatccattgcattgcttatgcctaaaactagacagactaaatgaagtgctaagtgtgttagacaaattatttatgctaaaagttatttttgcaagtgaactgacctggaaattgtggattttgcctttttatttttctagtatagaatatccaattttagatattttaagaaataacttttaaagctttgcatttaactgttaaagaagtatgtcaatacataatttaaaacttgaactaatatttgctatatcttcatgtttcttgtctgccagagtttagtgctaagagaactagatttgtactaggagcccagagcactttttatctggttagtatgaaagctttttaattttcaataggtattgtttcttaaagcatcaattttttaaaaacaagaaaaaaaacaactgaaataactgttaatgtggaaatcattttgttttaggagcaaatgtgaaaaatgatgcaatctgcagayaataaaactctagttgttttgaggtcaaaataatcagtattatttttctcttgagcaacacaggaagtaaagagacattttcattaatgccatctggctcacagatgtcatttactgtgaattttagaaatatatgaaaaccttatggctaatctgttttgtaacacattcatttttatggcaggataaaaggcctagtagatattatagacatatttaaagaggctatatttacatatttattaaagctaaaatattatgttactaaatgataatttttccaagtaatcattcctatctaaaatggcattcaataatatttgttcaccaaaccaaaggatgacttatgaataaaatccttttaaatttgattttgttgctaaaggatatgtggttatacacagtgcatatattagaaaaaccccttattcatttagtaatgctcttgatatgttttggcttatggttcagttctttttaaattttgctacattctttgtttccacttaaatttggcttctatgaaaacattaagaaatactttttgtttacctcttagaaggtatatacaatatgacacctttggaggtttaatgttagaaatgcagaagcagacctttaaaatggagtccccattttgccagtcataaagcaaaatctgtgcgacacacacatctaggtatttttcatccatatctagcttgctcacaatgacttt

SEQ ID NO: 72646 - DNA, 634 bp, Homo sapiens
ccacaataccatcaccacaatctaggtaaaactattaccacaaaattttctttgtaaccctttgctctgttgtgtgtaggtatgtgcagtaagaacacttgacatgagatctattctcttaacaaatttaagtggacaacaaagtattaactataggactaaactttaggtataaataacaaattgtgtttttaaaaaatgtgaaaatattgctcttgaaatatgttttctgaatgagtatttacttttagaagtagtttaaagcaaagagatttaggccatatcctacaacttattaaagtattaaaatatatgagtagaataaagattactaggtacaaaagctatatatcatcttgtcattttttttcagtaaataataacakgttcttattcattcagactgaagccctttaaacacatgtttctacacacaaaaggaaaccctgaattgttgaattgttctggtataaactggctcaaacagacacttgagggtttaagagggaatgccatgaccaacaaatccagacgctctatgagctccactaaatccaacagaaacattgagctttatacttttacccttgagacagtttgaattgaatagctatttgcagagttatgtgagggt

SEQ ID NO: 72647 - DNA, 634 bp, Homo sapiens
ccacaataccatcaccacaatctaggtaaaactattaccacaaaattttctttgtaaccctttgctctgttgtgtgtaggtatgtgcagtaagaacacttgacatgagatctattctcttaacaaatttaagtggacaacaaagtattaactataggactaaactttaggtataaataacaaattgtgtttttaaaaaatgtgaaaatattgctcttgaaatatgttttctgaatgagtatttacttttagaagtagtttaaagcaaagagatttaggccatatcctacaacttattaaagtattaaaatatatgagtagaataaagattactaggtacaaaagctatatatcatcttgtcattttttttcagtaaataataacatgttcttattcattcagactgaagycctttaaacacatgtttctacacacaaaaggaaaccctgaattgttgaattgttctggtataaactggctcaaacagacacttgagggtttaagagggaatgccatgaccaacaaatccagacgctctatgagctccactaaatccaacagaaacattgagctttatacttttacccttgagacagtttgaattgaatagctatttgcagagttatgtgagggt

SEQ ID NO: 72648 - DNA, 634 bp, Homo sapiens
ccacaataccatcaccacaatctaggtaaaactattaccacaaaattttctttgtaaccctttgctctgttgtgtgtaggtatgtgcagtaagaacacttgacatgagatctattctcttaacaaatttaagtggacaacaaagtattaactataggactaaactttaggtataaataacaaattgtgtttttaaaaaatgtgaaaatattgctcttgaaatatgttttctgaatgagtatttacttttagaagtagtttaaagcaaagagatttaggccatatcctacaacttattaaagtattaaaatatatgagtagaataaagattactaggtacaaaagctatatatcatcttgtcattttttttcagtaaataataacatgttcttattcattcagactgaagccstttaaacacatgtttctacacacaaaaggaaaccctgaattgttgaattgttctggtataaactggctcaaacagacacttgagggtttaagagggaatgccatgaccaacaaatccagacgctctatgagctccactaaatccaacagaaacattgagctttatacttttacccttgagacagtttgaattgaatagctatttgcagagttatgtgagggt

SEQ ID NO: 72649 - DNA, 634 bp, Homo sapiens
ccacaataccatcaccacaatctaggtaaaactattaccacaaaattttctttgtaaccctttgctctgttgtgtgtaggtatgtgcagtaagaacacttgacatgagatctattctcttaacaaatttaagtggacaacaaagtattaactataggactaaactttaggtataaataacaaattgtgtttttaaaaaatgtgaaaatattgctcttgaaatatgttttctgaatgagtatttacttttagaagtagtttaaagcaaagagatttaggccatatcctacaacttattaaagtattaaaatatatgagtagaataaagattactaggtacaaaagctatatatcatcttgtcattttttttcagtaaataataacatgttcttattcattcagactgaagccctktaaacacatgtttctacacacaaaaggaaaccctgaattgttgaattgttctggtataaactggctcaaacagacacttgagggtttaagagggaatgccatgaccaacaaatccagacgctctatgagctccactaaatccaacagaaacattgagctttatacttttacccttgagacagtttgaattgaatagctatttgcagagttatgtgagggt

SEQ ID NO: 72650 - DNA, 1008 bp, Homo sapiens
gcatgtttttaacatttttgacaactctaaaatcagaaattgtctcacaattgaggtgataagaagcattgtgtattagtttaattgactgtgattttcttttagcaggtaaaaaaataatgatgtatcagaaatcagaggcatcttaaatttcattaactatgttgataactcattaggaatataactaaggttctgctctccacatactaaactgtgcaatgaaggaatcaactcgactttggcctactctctgttttattagrcatgcaaccaccaccccctacaggtaggaggattctcaccactctggctagaatttgcaggtgcagagctgggagggatgttatcaacaactcctcacattctccattcagtttcctcaggttgctttagcagcccagaagaaagtcacagataggaaatgaggcagatcaacagttttcccatttaaaaagagtatcagggaacaactctccatcgtcaccctttccctgcttcataactgtacaaagtcagttttttggtataaaactaataggccatcattttagttcaggccaggccagcaccacccctcatcaggaatacctaattgctttccaactggccattcccctttcacacccttactaaccccagatgcaatccattggcaaatcctgtaaatgtctccagaatcccatgacttctcgctttcatgccaccgtcctcttctgcaataatccccactacctgctctcttccttggacctcacttccctttagtcaattctcaacccagaaccagagtggttctttttaaatggcagatgatgtgactcttctgctccgaaccctctaaaagcattctttgtcctcagaggaaaaaaaaaaagccattgtagtcattacaatggcctacaagcctttacatcagaggtcagtaaattataacctgtttttctgagggaagaaaagtcttatttggaacacattttttttcattcatttatgcattgtctatag

SEQ ID NO: 72651 - DNA, 1008 bp, Homo sapiens
gcatgtttttaacatttttgacaactctaaaatcagaaattgtctcacaattgaggtgataagaagcattgtgtattagtttaattgactgtgattttcttttagcaggtaaaaaaataatgatgtatcagaaatcagaggcatcttaaatttcattaactatgttgataactcattaggaatataactaaggttctgctctccacatactaaactgtgcaatgaaggaatcaactcgactttggcctactctctgttttattaggcatgcaaccaccaccccctacaggtaggaggattctcaccactctggctagaatttgcaggtgcagagctgggagggatgttatcaacaactcctcacattctccattcagtttcctcaggttgctttagcagcccagaagaaastcacagataggaaatgaggcagatcaacagttttcccatttaaaaagagtatcagggaacaactctccatcgtcaccctttccctgcttcataactgtacaaagtcagttttttggtataaaactaataggccatcattttagttcaggccaggccagcaccacccctcatcaggaatacctaattgctttccaactggccattcccctttcacacccttactaaccccagatgcaatccattggcaaatcctgtaaatgtctccagaatcccatgacttctcgctttcatgccaccgtcctcttctgcaataatccccactacctgctctcttccttggacctcacttccctttagtcaattctcaacccagaaccagagtggttctttttaaatggcagatgatgtgactcttctgctccgaaccctctaaaagcattctttgtcctcagaggaaaaaaaaaaagccattgtagtcattacaatggcctacaagcctttacatcagaggtcagtaaattataacctgtttttctgagggaagaaaagtcttatttggaacacattttttttcattcatttatgcattgtctatag

SEQ ID NO: 72652 - DNA, 1008 bp, Homo sapiens
gcatgtttttaacatttttgacaactctaaaatcagaaattgtctcacaattgaggtgataagaagcattgtgtattagtttaattgactgtgattttcttttagcaggtaaaaaaataatgatgtatcagaaatcagaggcatcttaaatttcattaactatgttgataactcattaggaatataactaaggttctgctctccacatactaaactgtgcaatgaaggaatcaactcgactttggcctactctctgttttattaggcatgcaaccaccaccccctacaggtaggaggattctcaccactctggctagaatttgcaggtgcagagctgggagggatgttatcaacaactcctcacattctccattcagtttcctcaggttgctttagcagcccagaagaaagtcacagataggaaatgaggcagatcaacagttttcccatttaaaaagagtatcagggaacaactctccatcgtcaccctttccctgcttcataactgtacaaagtcagttttttkgtataaaactaataggccatcattttagttcaggccaggccagcaccacccctcatcaggaatacctaattgctttccaactggccattcccctttcacacccttactaaccccagatgcaatccattggcaaatcctgtaaatgtctccagaatcccatgacttctcgctttcatgccaccgtcctcttctgcaataatccccactacctgctctcttccttggacctcacttccctttagtcaattctcaacccagaaccagagtggttctttttaaatggcagatgatgtgactcttctgctccgaaccctctaaaagcattctttgtcctcagaggaaaaaaaaaaagccattgtagtcattacaatggcctacaagcctttacatcagaggtcagtaaattataacctgtttttctgagggaagaaaagtcttatttggaacacattttttttcattcatttatgcattgtctatag

SEQ ID NO: 72653 - DNA, 798 bp, Homo sapiens
tttccagtgggtagactatctcaggaagacacaaaaatatcatcctcatttacaagaactcagctatgaaagcacaatttttatttcatcaaagatagcatttaagaattaaacttctctttaaaatatccattttactaactgaggagagaattgccaagaacaattgacaataacagcaaagtaggctttaatcaacttctaagaaaagtgctgaagtggtttaatttttgtcagtgatacctagatatgtaattgagaaagaaatgggtcaaatatgaagagatttaaagcttgcctcagtttttcacctgacctgctgggtgacctttggcaaatcttcagcttctgggcctcagcattcaactagtttaagcatctcattttttggtatacaagagatagcccctcacattttgttaaaattgggaagttggctcacttagaatccaataccaaattgtcaaatgggggacggtacaaattgctgtaatcatcatccatatatgtgtgagatttattcattcactcttttcattcagccagtccatttatgtatttcattcatgccagayaaaaaagcaagtttttttatatgatggccagatagtaaatattttagtctttgcaggctatataatccctcataatgattcaattctgccattgtaataggaaagcagtcatagacactacattaaaaaataggtgtggttgtatttcaatgacattatctataaaatcaaggaaggtgccagctattgcccatggaatgtagcgctgaaccctgctttaaac

SEQ ID NO: 72654 - DNA, 1465 bp, Homo sapiens
tccgaagttttaaataaagattaaaaattactcctttataatgcacattaagcatttcaaagggaaatctggtagctatcactggatttcaatgtcataagtcttttatttatagaacagtaacaatatagttagaaaacaccatcctcttaaatgtagtacctgacagaggtataacatggatgggatccagctggctcaaatgcggtcctaaacagaagtgaggctatttcagggagataacttgaataacggacgagtaatatgatctcaaccttagtaaaacgtataatacattttcaaaccaagaaaacctgaaatactgtgaaatacttgtatgcataaatgaatctaccaaagcacagtactgatcagaggaaaaaaaatcacaacctttccagtcatactatcaaaagccttaaatcgtgcttctagaaatgccattttaaaaaatctggaacatgcacagacttaggcatgagcattttcagggtaaaagcctgaaaacggcctatgtgtctaaagccttaataaattcattattgtgcatcaatgtaacttggggccatgcacagattaaaattacatttcaaaacagtggtttaaaaactaggcattttgaagctgtattctcagcaattatccaaaaattgatttttggatttaataaatttttaactacttcaaaaactgttttttaagaaaagcatattggcaggtattctaaacaacgttttaacacactgaagcccttcaggacatggacactcctgcattcacttgttgagcagtctcctgagatggaaagttgaggggaaacctgaaaccctgatgaaacattcacctgagatgacagtgaaaacaagggcggacgctcatcaagcgactgacgtggccgactctctctaggtgacttcaaagtgcttctcacctaatatttaccataatcctatgaggttggtccactaagaacccacaatttacaaaacagaaagtggcatttcactcgatagtttgaccgcggtcccacagctaaggagtgctgagcccaggttctccacatggcttgcactcctcatgacacccttgtgctgtgctcataccaaacgcagacagaaactggatgctgcggctaattggcaattgttatcaacaactcctcctatttaaaaacttgtggcttgtcaaaacagtcttgtgctatttttaatgttacaataagtaaatatagattataatgattaaatctacttataagtgggtagataacactttyctctgttttatttgtggaattttatacataatcttgtttgaaatcagaatcctgctacttaaaaataaaagtttgaagactacaaagtagttatataggagaataattattgacatggaaaggtatttagaattttttaagtataaaaaataaaatatatactgaaacaaaaaaatcccccgccaacaa

SEQ ID NO: 72655 - DNA, 1151 bp, Homo sapiens
gcatgtatttttgctgcaattattaaatacaatgttacaaagaaagataagggaaataggccgggcacggtcgctyaagcctgtaatcccagcactttgggatcacgagattaggagattgagaccatcctggccaacacagtgaaaccccgtctctactaaaaatacaaaaaaattagccggaggtggtggcgggtgcctatagtcccagatacttgggaggctgaggcaggagaatggtgtgaatccgagaggtggagcttgcagtgagctaacatatgccactgcactccagcctgggcgacagaggaagactccatctcaaatgaaggggagaacggggagaaaggggagaacggggagaacaggaagaaagaagagagaagagaagagaagagaagaggaggggaggggagcggaggggatgaaatcaaacatatgggtgcaaaggagacatcccaagatcccaaaattttgactcagtagcagtctatgcccatactacaatactaaagaaaacaatatgcctgacagaaaagtcaacttaaattcccattaacagagaaaatactgctaagagcattttaatttttaaaaagactattaaacatttacaaatatgactgaagacctcaggcttcagagtaacagaaaaaattgcatcactagtgacttttgaaaacagtattaaaaaaactaaagtttctgagagtatctgtagaattttggatcctaccttggagaatctgagggaagctgaaaatctatcctgactttaaggaaagtactaatgcttataccagttttgagtgagctgcacattttaaagatttaaaatatcagaagtagccatgttcacctggtagctgacactgctatatttcagttcacctaatataattaagtctatgcgatgaagctaattatgatacagaagcaagaaaaaagaaaacctggcagttgatgacataataattgtagtgttatttttcatgacatggcaactgtagtattatttgggggatgacacaagatgtatttcttcttaatatcagcaatctttaagtctagagtaagaattcaaaactgttattttaaaacctcaaaataagaatatataataaaacaaagttgagttttacatatttgtt

SEQ ID NO: 72656 - DNA, 649 bp, Homo sapiens
  misc_feature (1)...(649): n = A,T,C or G
acacgcncacactcgcgattcgcgccaatgctgcatacaacctctccataccagcacacacayacacacacacacacacacacacactcccgattcgaaccaatgctgcatacaacctcaccataccagcacacacatgcacgcacacacacacacacacacacacactcccgattcgaacactctttactaatcactgcacagcagataccttgggtgaaaaagacgtaaactaaggatactaggcccattcctgagctggtgtgactcctcctggcctcgcactgctcctctggaaatatccctagaccttattttatctctgaatttccctcttctgccacctgggacctcctattacaagccaagaagcttatatctgtcaccatctatatgtatcttggtgtttccctatgaaagagttaagaaatttttcttttaagaaaatttatgagaagtccaatttctcagaaaaatgcaaagggttacatgtatactttaacaagaagaatgctaggaagaactcatgtcacagtttttccatctgtaatgaactaggaagaaagagacactggtgcacatctctgaatgaaggagaaagtgaaacatgcaatgactgagcagtttccctggggattcactaagaact

SEQ ID NO: 72657 - DNA, 649 bp, Homo sapiens
  misc_feature (1)...(649): n = A,T,C or G
acacgcncacactcgcgattcgcgccaatgctgcatacaacctctccataccagcacacacacrcacacacacacacacacacacactcccgattcgaaccaatgctgcatacaacctcaccataccagcacacacatgcacgcacacacacacacacacacacacactcccgattcgaacactctttactaatcactgcacagcagataccttgggtgaaaaagacgtaaactaaggatactaggcccattcctgagctggtgtgactcctcctggcctcgcactgctcctctggaaatatccctagaccttattttatctctgaatttccctcttctgccacctgggacctcctattacaagccaagaagcttatatctgtcaccatctatatgtatcttggtgtttccctatgaaagagttaagaaatttttcttttaagaaaatttatgagaagtccaatttctcagaaaaatgcaaagggttacatgtatactttaacaagaagaatgctaggaagaactcatgtcacagtttttccatctgtaatgaactaggaagaaagagacactggtgcacatctctgaatgaaggagaaagtgaaacatgcaatgactgagcagtttccctggggattcactaagaact

SEQ ID NO: 72658 - DNA, 496 bp, Homo sapiens
gctgtgcgcaggttgtaattatgtcagctggagtgttgaacaaggggactgattaatgtgagccccggcccaggcrcggtccctatcaaaacctccgcgcaggccagcagtggggacgggttaaagcaaaaagacaaaacatgctgtatcgtccatgatagatgaattgctccaacagtcttcaggcagatgttccaggacagtataatatacaattactctgccttatcaccttcccagggacaataaagcttcctccttctatggctcatgtgagtgaaggcaaaattagttttacttttacaacacggactcacttatcatgtcgctttgattgtgcttttacagctaaggaaaacacatattccacttttaaactaaaaaaaaaaaccttaaaaataaaactgaaaccttgtgttgactcttttttacagaacaacatacagtgttttaaaagattgttttgttaaaaagagatgcaaggaaggtaataata

SEQ ID NO: 72659 - DNA, 2693 bp, Homo sapiens
tgttcaaaatgactcttctaattaatctgtgatcccaatgcctatttaagctacatcaacaaacaaagcaacttatttgtaactgatcaacaaaaagtaggatctctgattctttttcttttaaagacatgtgaaccaatttataatttttaatgctgtggaatctatttgttttcaagtttgtaagatcttttacttaaacaaggttgttttgttttttaagataaaatttaacaatgttaactaaagacctagtgtaaatgcttgtgctatatcagcacagagcctcttaggctgaaaacaaaaattttaaaaagcctatgtacttgtgtgttagagggcaagaaagaaaattatgaataaagcaagctgaatatgaaagtaacactagataaaaaacattatacaaaatacaaaaccaaataaaaaattagaactgatgagataaaattcactaatgaaatgggcagagaaaactaggaaatatttcattcaggaagaactcaagttctgctgcaaagaattgtcagaaaaaaaggaagaatagattaacacatagtacaacattcacacttcattatagaacacctgaacagatgatacaattaagaggacattcattttattttgttagggaacccctcaaaaaaatcccacctaaacttgccaggaacttctactccacgtgaaagggagtacaccggtataaagtgtcatcatgacacaagctaggagaacctttcaaagcaatctttatgcttgccaggacaaaacagtttcgcaaaccagccaccacactgacatctacctgtggctggctgaactgtgtgcaggtgacaagcaggaaggggcgatctgaccaggagcaagcactgcacagacagttcaggggacacatttgtcttccagaaattcatcacaatttgaagaaggccttggaatcattattagcctaagaaaagtttggaaagtaactggaattttaggctttcaaagtaatctttcagcctgggacatttgtatttttattccatcgactagattggcagttacaatagagtaaaatataaagacatatagacttgaggtaaatgacataatgraaacgtgttgactggtactttaaatgacaaaaatagttttgatttaaagtctgttctgatcaaaccaggtttgtggcattgatcaaactgcttcaaatctcaattatatctaatattaattctagacattttcattttgattatttttatgggatccctttattctttaagaacttcaaaatcacccaaaagaaataaatgaaacctctgattctctggaagattgtgtactgttcattttggtatatataatttcacttctctcagcaaatacaatatactgctacagagatcaagatctattttttctcattgtctgtattcaggggcaaaaccacatttgttctatccactgcttcttgtggtacagcctatgagcctgcacaggaagcaaaaggaaaactgaaagtctctgaagagattatccaaaagaagaaaattattccctgtggagtgagtcgccctaactcaggaggctgctgaaacaagtggcagaacagaacaatgaatcccattgtatactgaattcttaatgccacagtatctaagaaggcttgccttattacttagctatgcattatcaacataaagtgtttatacaagaaaactgtatagaaatgtatactgttatctatgacctgaaaaacatgttttataactgagatattttagataaatatatgtttaaaaaattaaactcaactttcaggagaaatgaaaattataaatacaattttttttgtcattgcatcttaaaacttccttaaaaatgcttccagcaatatgcaaagttcagacaaaattctattaaattaaaagtatgtttggcaaaaattttcaaggatgtcgatacatatatcaaatggtggtaaagaacagcaaatttgccctgtgccagtcacacatgtaagaacttgagaaatttgattagaaatactcaacaaaatgtttagatgtgaaatcaaagagacactggagactattacaaaatgtaagcacacttctagttgagcatcactatctgagttacaatattacttgaaatatcttttgacttcccctcaccaaaaaaagaaaaaaaaaaaacctcttaagatgaaaaagtactttgtagaagtcattaacactggttaagagctatatcggccataagtagggggaaaaatacccaaagtgtatttccaacaaatttagcaaaatgacgaggtaaatcttcaatatgaggcagggactgcagattctattcttctgctccacgagatacagactttctactcagggttatgatgtcaagtaatgaataaaaaagaaaaatagagaaagatgtagatagttaaaaaaaaattaaaaagggtatgtaaggttagaagtactaaggaagtgacacagttaaggaaaactctggccaaaactagtctgaaggaacactgatgctatcccaatttcaataatagagacacaatatgcagatgataaaactgtcagagtctggcttgccatttcagttttctgcaatttactaaattaacatttaaagtgcaatgtagggttatccttaatatttttatactacaggtagtatttctgtgt

SEQ ID NO: 72660 - DNA, 1585 bp, Homo sapiens
caaaggaagcattaagaacacgctgagcagagaccatggaaaaataatctcaattccaaagctatatttttctcagcaggtgaagaataaaaaacaatgtgtttgacctctgccctggccagtatacagaagcacctgcaggtctgttctatgctaagcagtggctcttctgcaatgcccaggctgcctgttcagggctttgcccactgccccccaccccctccccagccccaccagcctccaggccacacagacctggttaacaaaaaagtcagtatgaacaaaggagcgtcccagaaatggtccaaagcatgtgaattggaatggtgctggcacagactcagccaccctgatgccaaaatacttaatctagcaggttcctgagacattcatgagtaagggggtaaaaacagcacagttgatactgtttatggctaatgcccttattttactcaagatcaatctaggtttctggaagaacaagagaagaacagaggtcagtgtagtaagactcaggagaccatggaggcctgagcccagggatgccagccaaagagggttcctgctcatggtgttctcccaccatgaggtgcttttctctggggcctctccttccctccttctgtccattcttcctttatcccttgttccatccctgtacgaacctgcagcctgcttgcctgtgtgtctccaaagcatttcccagccagctccttggtagaagagatgtggtggggatgagagatcatctaaggacccaggaacacttgaggaaacagcgggaataacactgactcatattctcacctgcaaatyaaatgctagcactggcaggcaggatagagagtttgaggttttgtcttttctcccccactgattcctgtttgcaaatggagtgtctgcttgtcctccccaggccccaggtccaggtggcaactggctggagcaggaagaggaggcagatggagcgggcgggtgcttcattattggaggtctctaaaggagtaaactgaatatttgccttctaggcagtataattgcttgggacggttgtaggtctcttgccaacacacatgtgtgcacatgcatgcacacacacatcaatgcacacacagaagtgcacaaataaccctagggaatcaacccctcagcgtgtttcacaccctcatattacaggtgtgggagaggaggcttggagaggtgagatgaccagtccgaggccacagtagcaactgtatgctgagccaggacagtgggcactgttctttcctctgccccagctatccctgctgagtgaattcatcccaggacttggcactctgggcacagtgggaaagggagggactttgacctcaggcagattccatttgaatcctggctctaccacttactagctgagtggcttggggcaagttgtttaaagtccctgagcctcagtttccctcatccgtgcactgaggagaacagtacctacttcccactttgtttgatgaattctctgaaatcccatatgcagagcacctggctcagtgccttgcacacagatgctgcttccttaagtggcagatgttagtaattctcttct

SEQ ID NO: 72661 - DNA, 2524 bp, Homo sapiens
tgcatctgtccacctccctttcaacatctcatgccatgtcttccatccatgatgcttcctccatcattaataaaatcctaatgagatcctggtgacctatcaaagcccagttccaatattacyaggccagatgagggctttcccttgagaatttcacccacagctacccacacagaatttcagtgctctactgcctgggatttaggaacacatcttatttccacctacctgatttgaccccttgagggcagggatactggcttagtcatctcacaaccgttcacttcacctagcatagaactctgtagacagcatgcctgagtgtttagtttttgaaatttttttttttaaatggaagcagtcatctttatctccaaatagaaggtttcaggttactaatgaaatggaccgttcatcatccatgttctactaataaggccttgcagagcgtgaacttctggaaaatttcaccagacataagcctcagaaaatcatctcttgccttagccatttgttagaaatataaacattcatttccatgggttactgcagttcttgagttcctgcttaaatctctaatgttaacctagtttataggaatctatgacttggaaataaggtcagattctgataattagttgtgatccatattttgtatctgataattagcttatagccgcagtgataattgggccctacatttttgggaggtggcatattttaagaaagcaaagtgctcttcatgtgctctgatcttgtctctgctttattaaggggttgttaaagagagaactataacataggaaaaaaatgaatacatttgctctcgaggatgcaattaaaataaaatgtaaatatgactaatgaggcgattaacttttctagaaatactatgcaggaaaatcaatccctggaatgtaacatttccatgctaagaaattcagtttagtggcatccccttagtgatgaaagggatctaagaatgaagaacgttgctactgtcagggaaggccaacaagtgcagagagatggctatgaaaagcgaccatttcttcccagcttgatctgctcagctataaaacatctgctattgcaaaggctcccaaaagtgtcttctgcatgtgtacagcttcttttcaacctggcatcagtagaatggcactaatgcaggggttaggagcactgggctcaagtctcagctccagcagttacagctgagtggctttggatcatccatgtcattggatgtgcattgctttggatgtgtattggtttgcttcctccatatgcatggcttcagtttcttcatctgtgcatgggcataatgacacttgcttcatggaaaaatgcctactatggagaagagcagccagtatgtccagggaaaatccctattgaagctgcagggtggggagggcgtgagaaatccctgtgcaggaggaggctctggcatgaggcagaaaactctagcaagggagattcacaagtcaggattctgggtcccaccctaccctctaagtttaagccatgtaatcttgggcactgatgtcacactttcagtatccataaaatgatagcatttaagtaaatgattttcaaggcactattcaaggaacctacccttgttcaatgctacaaaatagttcattttttttcacaaatatcttgttactaaatagcctgaatttctccaaatatgacctactgtcaacttagttgagtttaggtccacaactgtaggtgcccacaattacactgtaattagagagtgtaatttgtagccctgaagggcctctgaattttgcaaacttcctctctactctttctcagttcctatctgggagctgctccctatccttcagttcatgttttggccattaacctaacccacgtgttccataagccaggctccccacccaggctgaggatacagagttcagtcctgtcctcagaaagactgaagtcaaatggaggtcacaggccagaaacagacaaggccatcccagtggggcatggtttatgacagagaagtacacctggagccctgcgggtacagaggggaggtcacctaacccagagtgggggttggcaggaggggagatacttggtagagtccttgacatccaaacagacattcatctagccagtaactatttattgtgtaactactgtgtaccaggcactgtgctaggtgctgaggttacatcattgaatgatgtcatttccttaatcagccatccacgagagctccctctagccactcacttcagtgttcattccatactctgctgcctccctgacatgacttctccaatgtggcctgggcttcccagcgaacaaaccgtctttcttcctcaaatgtcccctccagagtaggccccctctcccatccttttgtggtattggtaccaacgaccacaaagttcttggtactctccaatccagcctcctcaaagaccttctctttatatcaatgatgagtgccattgtgtacttcactctcaatgggccagcctgatgggca

SEQ ID NO: 72662 - DNA, 792 bp, Homo sapiens
ccttggcctcccaaagtgctgggattacaggcatgagccgctgcacccggactacttatttatttatgggttttttttttttttttttaaaaaacagggccttgctctgttacccaggctggagtgcagtggcgcaatcatggctcacaataacctgcaactcctgggttcgagatcctttggcctcagccttccaaaagtagctgggaaataagcgtgccccaccatgcctggctttggtttttgttttttaaaaaatggcttttgttccctgtaaaacctgtaataaaaattcctctatgttatggcctcatcttatgttatgtaataaatgtttcatctatgtcacattgatttaatttctcagacccagccaggaccttaagaagattrgaatggagttttgccaactctacaatatgaacacacacacatacacacacacgaaagcaaatttggtaaaacattaacaatctggtgaaagctatgttagtatctttttttgtctaatttttcataaaaagcgggaggagccataaagatgtaagtagcttctaaattacagactattcaagcatatagatttttagcagtttttgccaacctcaaaaaagaaaaataaaaatggttattatttcaatttatgcttctaatatttttggcaacagaaaacattgtatgtttgtcaggagagtttcaaatttcttaaggtaaaattactcactaaaaatcacaaattggggttagcacgatattattactgatctgcctgtcgggaatatatagtcatgc

SEQ ID NO: 72663 - DNA, 1017 bp, Homo sapiens
atggtagcagatgcttgtaatcccagctactcaagaggctcaggcatgagaatctcttgaacccaaaaggtggaggctgcagtgagtcgagatcgcacaactgcacttcaccctgggcgacaaagcaagactttgttttttaaaaaaaagaagaagaagagaaaaagaaaaagaacacaaaactctggttactgctctatgagaattaagtgaatgtgaaggagaagttggaataatattacaagttggtgaaatattggaattctggtctgttggtgattggtcttcatctttyctataagagatagctcattacacaatgtattctcatttgtctgaacgggattatttcccttaaggcgatggcctcttctgcatctttatgtctctaatgtctagcatgggaactactcaatatatatttcaggttgttgacaatgattgctgctgtctattccatctaggtaagggtttttgcattcaaaaggccctttgccttaagacctaaagaggttttggaacatcagcaagcatccatctcgaggtaaataactggaatcccaatgggctgtgtgtgtgtgtctgtgtgtgtgtgtgtgcgtgctaactggaatcccagtggggtttgtgtgtgtgtgtgtgtgtgtgtgtgtgtgctaaatggaatcccaatggggttttgtgtgtgtgtgtgtgtgcgctcatgcctgcatacacatgcgtgcacttctggtacattttgaacaggcatcagattacgttcccacagcccctcttcatcaaaatgaagaccttgtacgtctgaaatacagtttgtgaaagtcaaattgttatccctgtgacatagaacagccgttaaaaatgtatttcactggaatgtcattctaaatgaatatttttaaatagatatccaaaaataagaaaatacagtgattttagtgtaataaaactgatttcacaattgtttcaagaaactcagaaaataaaacttcaaactggaaaaatgtggccataaga

SEQ ID NO: 72664 - DNA, 2554 bp, Homo sapiens
caagctccttatgctctctgggactctgctttctcatctaaaaaatggggatcacctgaggtcaggagtttgagaccagcctggccaacatggcaaaaccccatgcctgctaaaaatacaaaaattagatgggtgtggtggctcgcacctgtacttgcagctacttgggaagcagaggcaggagaattgcttgaacttgggaggcagaggttgcagtgagctgagatcgcaccactgcactccagcctgggcaacagagtgagactctgtctcaaaaaacggggcgggggggggtggataataatagtgcctacctcaagaggttgctgtgaacaccagaagaagcaatacacaccaagtgcctacagatagtaagcacttggtaaaaatgtaactgccattaacaataaatatgatgctcacagggtcagtggaaaaagtagtggaaagtaggagtggtgggaacagaayaggagggaacaaagcacctctgagtagacctttctgtatagctccgactcttattatgtttcaccgtaataattcattaaaactaggataggaaggctgagggtgtttttggaatacaaacactaatgaaccaaactgcattataaatagtggccacactgaaagggatgaagaagaaaataactaattttggaaaacagtattttgactggatactgtaaggcaagcttgtccaacctgcagcccaggatggctttgcatgtggcccaaaaccaattagtaaactttcttaaaacattatgaaatttttttgtgatttttttttttagctcatcagctattgttagtgttagtgtatttttatgtgtggcccaagacaattcttctttttccagtgtgacccagggaagccaaaagtttggccacccctgctgtaaggcttaggacaaaaatatttctccacaaacaatggactccagttaatcaatctgtcacaggcatatggaactactttatgatactagggtcaaacaaataagtgaataaagtgtacataacaagagccacacttcccactgttgaaaaggctaaaaagaaggaagagggggaggctaggatgaaatctgtgcttggattaaagcggaaacattcgttatcaactcatgtttattttaatatgtatacagacagatacagaaacagatgtagatgtgtgtatatgtgtggttagtatgcatgttttatttcctaatcctatccactgggaggacctacaaaaaatttacaaattttttatatgacactccaatagaaatcggcatgcctagtaccacatcctggtttctaacagcattctccaatatcagaaccagggctccttgaagtaatggctgattctgggtcagggtagagaaaacacaagatgagccttgtagtgccagagtgtattgtagtgccagaaaatagacacactcaaaaaagggtagtggcataacaagaggacacggggcgatcggaagatgcggggcaaaaagttccaggcagaggaaaaaatttccaagtttgacagagggcaaaaatttccagccacatgaaaaataatcaaacctttgacttatgttcagagctctcagatattgccatcattaaaggaacagaaaaaaatgttgggaaaggaagttctactgaaaagctaccaagtttgaatgtcacttcactcatgaatcatgatgagaaagtccattatgaagtacatccatattgtgtaaagagaaaacttgaaactttctttctttctgtttgtttgtttgtttgtttttgagacagagcctcactctgttgcgcaggctggagtacagtgaaacaattttggctcactgcaacctccacctcccgagttctagagattctcctgcctcagcctcctgagtaactgggattacaggcacccaccaccacacctgggtaatttttgtgtgtttttttttttagtacagatgaggtttcatcattttggccaggctcgtctccaactcctaacctcaggtgatcttcctgcctcagcctcccaaagtgctggggttataggcataagccatctcacctagctgatttatttctattataggttgaattacatacatttctgatgctatgccactgcactccactgcactccataaccttaaaaaaatggcaatttcatatgtattagcctaacacattacctagggtctccagtgccatgttcagtagatacagcgatagaaggtacccttgtctatgtcctaactttgacgaaaagcacttctaaaattttactattaagtatgataattgctttacattaaggaagatagggccgggtgtggtggcgcacaggtggaacctcagcactttggaaggctgtggggaggattgcttgagctggggaggtggaggttgcagtgagccaagatgttgacactacaccccagcctgggtgacagtgagaccttgtcttaaaaaaaaaggaagctagcttgctaatagtgcattatctgatgttgactctgcccttgcattattgtaataaaacctaatt

SEQ ID NO: 72665 - DNA, 736 bp, Homo sapiens
cattgattgtgtgggttaatcactgctaagccacagagagctcccctttcccctggtgagcgcttccccagctgacagttgcccacgcgctctgcagaaagcagtgcctctcttgggagcacgaccagggcagacccccacggtcctacccgtcctccctcacactcagagcatgcgcacaacagacctcctggggcccacgggtgcacccccmcacacacacactttccgtatcctacaccaggcagcccagggcccactggtccccaagcctccatctgtccccactcaatcactcattcggggtcccccacccttcctggcgtgctcccaagcatcttgacactcaaccaatggaagaccctctcctccgccccaggacagctgcctgtgggtttgggagatgttgtggggtgctggggagtggggaaccctggaggcccaagatgctgagtctctggagaaggaggtgggaaggcagcctgtctgggggccagaggcagccccctgggctgagagcagctgggggccccagcaggcagctcagggctggccaggcagctggactgtgactcagcagcttctccgccttggctagagtgcgccgtgctgcagtattaactccctctccagggagcctggactccagcttctctcccacggggatggcgggctcctctgtgctgtttcaagttgatcctggctggggtggcagagcggagggtgtgctgagggg

SEQ ID NO: 72666 - DNA, 627 bp, Homo sapiens
atgagaatggcacattgacatgctatgccccatatgatggtatttgtagaatcaaagcaagtttctgaaactctattccatagtatctttaacacagtcatcaaaggatagaaacagcagagaataagtaggtggtggtggttgttgttgttttgtttttgtttttgtttttttgagacagagtttcactcttgttgcccaaaagtgcaatggcgtgaactckgctcactgcaacctccgcctcatgggttcacgcgattctccctcagcctcagcctcccgagtagctgggattataggtgcctgccactgtgcccagctaattttctgtattgttagtagagatggggtttcactgtgtttgccaggccgatctcaaactcctgacatcaagtgatccacctgccttggcctctcaaagtgctgggattacagacgttagccactgcacctggccatgttattttttatttttaagtctctacattattagaccaatatatactacacatctacagaaaattggaaaacttctaaaaagtaggaagaaaataaaattgcccttaatttccttgttatataatagctcacgttaacatgttgttatatttccttcctgtctttttg

SEQ ID NO: 72667 - DNA, 975 bp, Homo sapiens
aagtttaagaagcagataaagctcattctgatcttaactagggactatgtgggaggggctgacttggttaaggtggttgggagagttgggagaagagtctggcatctctcagtggggaggtggcaatgtattggttcaagggaagttccgtgggattagggtaccatgggatgaacctgttcccaagatgaggaggcaggaaatcagagccaagccaaatggactggaacaaaggggaagcgagaggaagggtgttcatccctggagagaaatgttgaacaaagcacatctgagcagcaattcacatacagagcatacttgtgaaggctaactgtgaaggctaaccaggaaggctgtagccacagggatcctcagctaacctgggcatacctatgacaccagatccggagcctgaggcagcacgtgcagcccaagagcgtctgtctgaggtacccgctggcttcgtagtcactgattaggagacaggctggatcagaatctyctggagaattttggtgctgccagatgctgtgctgggtactttacatacattttctctaatcctcacaaactttcaaacagcggggaaacaaaaagtaactctacatatccttggtctcagcttaaaagtcactttctcacagaggacttctctgagcctataaatataagttaacttccccttttattctctatataatattctacttttactgatgtccctcagtatagcttataatttgatatgagtgatattcatgatgatttgttaacaaacattgtgtccatttctcctccatagtttctgggggcacaagctcttaaaaatatttctgtatccctgaatgcaagtggggaaatgcagtgaaataaccagtgtattgcatgtaaacatagagatgttgtagattgaaagtttcactctgtgaaactgtggccactgcacagactaatgtatctaagaaccagaatggc

SEQ ID NO: 72668 - DNA, 813 bp, Homo sapiens
caaaggggccaatattatactctgcatctagacctatggttactagctccaaagaagatgttttcattctcatgttaggaggaggaaactaaagcccatagatgtcaaataatattctcaaagtcacaatatatgtttggagctagattcaacctcaactgttctagctccaaatttggactctgcttagcaactatttttttttttttttttttttttgagatggagtctcgctctgtcgcccaggctggagtgcaatggcgagatctcggctcactgcaagctctgcctcccgggttcacgcctttctcctgcctcagcctcccgattagctgggactacaggtgccggccaccatacctggctaattttttgtatttttagtagagatgaggtttcaccgtgttagccaggatggtctcgatctcctgacctcgtgatccgttcgccttggcctcccaaagtgcgcttagcaactattttcactggagatatggaggacctctttctcaagccctgtgccacatggtccactttgctccttgttacagctcatcacactagcccatggtcacaatgaagcttgcaaggccttctttcagcagcccagctatcctsaacagctgattgttctcttttttagggagttagtcttaattttttgtcagtcttgggcataggagagacggcgtccacattgtggcacttgccaaagctatcctttggttagcagaatctcagcttcctcacctcattagatttctctcatccagactcatggctcaacttctctttgctgctgaggcttggcta

SEQ ID NO: 72669 - DNA, 715 bp, Homo sapiens
actacaccattttatattaggggcttgagcatccaagcatgtgcatgtggatcctgaaaccagtcccttgaggataccaagggaggactggacatgttaaccattttaataaaaataacaaacacaaatggacctaggcccgacgcggtggctcacacctgtaatcccagcactttgggaggccgaggcggttggatcacttgagatcaggagttcaagaccagcctggccaacatgaggaaatccaatctctactaaaaaatacaaaaattagccaggcatggtggcacatgcctgtmgtcccagctactcgggtggctgaggcagtagaatcacttgaactcaggaggcagaggttgtggtgagccaagattgtgccactgcactccagcctgggtgacagagtgagactctgtctcaaagcaaaaaacacaaaaacaaatggacctaagcacagggatagggtgttttgaagtttgaactactggttgtttgggaatcaaagtccttgtagtacattcttagtaaaacagattatgaagagaggactgaaatttagcagaggtccaggattacacaaaccagtgggtatacattgctttgacatacagaagacaggagagaaataattagccaaagatttaagaaataaagatcagaatatccttccagttgtatgaggaaaaaaagaaacatgtaataacaatgatagtta

SEQ ID NO: 72670 - DNA, 535 bp, Homo sapiens
tccaaggactgttgggctccctgcggccttaagcggtgccctgcaaaaactcccagaggttctctctrtcagtctagaagtccaggaacctcatagggtttctcctattcccaggattgtgcaggtccctgtaggaagtgtgcattccccagggcttttcactctctcaccctttgcccatgttacagaacttctcctggtttcacattggtcctgggtgggcagctgcccagcttcactcttctctgttctccatgtgtccctttgctcccttgatgagtcctgatatggtttcttagacaattcacttggacagtcagtatttactcaccactttgtttcctttctgtgagggtgttacacatcagccccttctagtcagtcatcttgaacccatttgtttttatatttttaaatgatttttgatgaaaactttctaaagtgcagcatctcttccccatatttgttttaattgcataacctaataatgataatttgaacttttattgatgggtggaatgttataagcatcttt

SEQ ID NO: 72671 - DNA, 1373 bp, Homo sapiens
gaggatggggatagcttgaagtaagtttttttgggggaagttactgggcagcacagcctaaagagtaggctcaggtgtggaccaggggcagggcgtggctattaagcagtgggctgaaactgccttgttctggcctgtgaaagccaattgttaaatgttcagaaattttgcaaattggctgacatcacattgagagcttgaaattggccatggtgggagcatttacaccatggaaattggcaaatgctgcaaatcagggcttgcccctgccctccccacccccactcccagagagcaagttgttaaatatttactagcacacctctaatttcagtttttccccaagtagctttcttccattctttttggtctggcatgggaagaaactcatcttacccactccaagaggccacttggtgcattcacagctggtctcagaactggccactccagatttggagcttttccccaaggagccctcagagcactctggagaccctgccttggcagcccgctagggacagggacaggtaggccattagggtaggcatggaggactgtcccttttcaaccaggggaagctaaggcacagaggagaggcaaggttgaatgatgtcctcagaactgcctgggagatcagaaaagcctcagagaatggaaagagcagaggatccggccctgggtttgatgctcctctgccaattattagctacgtgttttgggacaagtttcctgatctctttggattcctaatctgtaaaatgcaggagataatactcaatctgcaggttgtgcagattaatcaagagaaccagacaatggctactgatggggcaggaggcagcattccctggggaggcccctatgagatgtgacattgtgccagcacctgcacccgtgctaataaaatatttctggggtgggtgagtggctcacgcctgtaatcccagtgctttgagaggctgaagcgggttctgcgcttcccatgtcctctcttggcctagggttctttcttggggcaaagaccctggggccatcacctccatgcacgtccctctcgtagatgctatarccactggacttctgtctgccatctagccagaaccagttctgccttaagctcgcagctaaggaaaccctgcccagattcttggtttgaaggttccttcttttcccattctaaaaaggagtgggaagagtcagggcttgtcagatgtatatgcaggtgtgtaaaatctgggtggggctgagagatccagccacgctggcagtctggccttctactcatgaaaatgagtaggagatgctccctggtgtgttttaaggggtgctgggaagcatgtaacttgccctcactgatacccaaagccccc

SEQ ID NO: 72672 - DNA, 737 bp, Homo sapiens
aatttgtactttaaaggggcaactttataagaatgaagatttgataccttagcattgtttgatttagtaataccaccacaccaccatcacacacacacacacacacacacacacacacacacacccctttcaaatgtgttcagacaaaatttttaagtaaaagtcaaattagttttggaatgagaatatctgagattccttgaggtgattattaacataaggctragaaacactgttataggttctgttataacttactgttatcagctctacaaattctgttagatgtgaatgaattgccttttacttcaaataaatatgaattttttccaagacaatgcaaagcataaaatcatgcttccaagttagcatagttaaaccagtccataaagacggttgtctctcctctcctcagatatcccttttagtaatgtgttccaggtttgttttcaaaatgctgagacccaagatactttccctggtatttaatctgattctccatgcactcctttaagcccattgcctctcccctgctttccttttctcagaaaatagctgacaatttttacaacactcttgtgtatattaaactgttattggacttttcctcatctctcaattcttctggttatcccaatgttcctttgtaaaaatttgtcatgagatttattgcctctgtctttaagccatccttaggactctttctaggtcaccattaggaaacttccatcaattat

SEQ ID NO: 72673 - DNA, 1376 bp, Homo sapiens
cccggcaagatgagcaggaagcttgctgctagagccaaaaacactagaataacgatgagcagtggaacgctgaagcctgcggcatgccggggctgggggtaaaaaggcagtacgccgttccacagggtcatgctgcacgccggccgagtgctgcacgcaggcgggcaggcaagccagcaagctggggctgcctggacgcgggagagcgcgtccttgrcgtctctttgcgtacaaggctgggaccgagtgggctggtgaagtctgagtcctgcacctctccgttaaggaagcgtggaggtgggctgctctcaacgctctggggttggtaccgacagagtttttctagccggcgagcgaaactatttctcactgtctgtagccgttactttcctggttctgcgggttggcgctgagtttggaagtcgcgcgggaccccttttatagcagcgtgggcgacgtgccacacgggtgtcccagcccaggggctggtctgagctggaagaggttatgcaaataagggccccacctccacggcaggagggtgagccctaggtccagatgctcacactggcgcaggtctgtcctgagccgacacctgcacagtggcgagaccaaggacccagagagaaaggtgagagtgcagccggggaggctgaggatcggcggagctggaagagtgagggtgaaggcaagaagtagagcacagaagcaaagattttaagaggaaagaagacatctgaacccaacaccaccctaaaccacaggttagaccagagtttgggatctgaccctagccctcgcccatcatgcacaggcgttcattgcagaaggggagtttattggggaaggggggattcattgtggaagggtgctgcagtccctcactcccaggtcagtaacctttttcccttccctgcctcctggaggagaagcggagcctgacggattgggggcgggtggaggtgaaacattggagacattgggcacaccctgggaggcttgaccagtcctgccctggactgacatgccccagaagactcctgcccagtgggttcctatggtcgggggttaactctctgatggggtggcggatggggaacagtgtcaatgcctccagagctgccaattgtcctggaaagagtggcgtttggatgaaggtcctcggtgatgcttctaacagctaccttccagaagtggaaacagctggtgctcctcctccagtactagctgtaggaacaagaggggaggcatagaggacgccctaacagtggctttcgcataccacctaccacccccaccctcaccccgcaggctgcagggttggcatgctccgtgcaagaccagaggcactgatgctcctgggagctcttctgact

SEQ ID NO: 72674 - DNA, 675 bp, Homo sapiens
accacaccgaccctgcccagggatgggtcacagaatgacatgtccttctccggtatggagtgtggctggctcttgctctgtgtggtgtcttagggctggggatggattctgtcctgttgtgtcccctcagggagctgaagtttaaggggagtaaagtcccctgcatcctattccccatcaccactgctctcctccagccccctctccctctctgaggccgtctgtcagcacactctgctccctgctccactgctttttggctccctgccatgtctcccccactgarcagcttaaagatctggcttgagtttggacactactttgccctggtttttccctctgcaccctacctctcacatccacttcaggtatccactttctgctgctccaagtgccaggctcacagcacccatatccggcaggcctgcctgtcctctcacgcactgacttgcccagctgccccttccctccattctcacacaggagctcagaaccccatttcgtgggaggtgcagcgatttgatgggtggtacaacaacctcatggagcacagatggggcagcaaaggtaagtgagagccaagtggggatagaaccccagggccaggggggtactgagtgctgcggggcaagagctggcaagtaccagcaaaggccatccatttccaaggtttta

SEQ ID NO: 72675 - DNA, 744 bp, Homo sapiens
aggaaagtgatgccttttcttattctccttttatcatcaaaacaaacagccaatatgtctctagaaacattgcgttctaaactggaagtgctgacaagccttcatcccagaccctgagtggcagattttcatgaaaatcagcttctgggccagttaagtcttcatgaagttatcttttcataactcagccctcattcccctctgggtcagtagcagtggaaccaggaaacccaagggccagatttccttcctcaatgaaggcactccaggaagaaggggagttcctggcacctgcctgccaaactctgctctacttgctgaactttgctcagcatgaacagggcattctggctacaagttcccccaaactatcccagattgtatctttaaggcacaccaattcctctgcttaaggacttctgttcacaatgaattgtattagttattcttaacattcaaaagagaaagttctgcatcagagcccacccmtgtccagccattgtgccctgagatcccaagactgtggggatgagggcagagcccattaacatcagggattctggtcactggggtcacacttgagcatgattttcaaccccaatccctttttaaatgtttcaaaggcctccagagctttctccagaggaaacctatgggtgacgaggggttttacattcacagacttggacgcaagcatcgaaatcgccactggccacctgtaaaagagcacgagcattatattca

SEQ ID NO: 72676 - DNA, 632 bp, Homo sapiens
atgccagttgggaaggatggcaggacaggcacccaccctgggcatagaagttcctgggcagaacccaggcctgctttcctgtggcttctaggtccccaggatagactgcttagtggaggaagctgctcctataggcttccgacccctttgacctaccctaatttgttattttgtttatggtccctttgccccactctgatgtgctcactactgtatcctgcatcaatctcagggctggcacacagtaggtactcaatgtatactaagggacgctcaacaggcgtcctctccagactccatcctctggagtgacatcacctttcagatccccattcaccttgacctctaatggctgcaggatcaggctctcagcagatctacatctgaatagaaatcaaagactctggcgcaaaggccaaagggaggaattgtccgcaaaggacctttggggaagacacctaaaaccacggcggaggggtgaaattaaagactttcaaaacttaaaaataaataaataaataaaaaataaaaccacggctggtatttaggcacattctctgatatagccasaatgctgctgaaatgctgaaagatttccaaactagtaaagtagctactacccagaggatccc

SEQ ID NO: 72677 - DNA, 1660 bp, Homo sapiens
  misc_feature (1)...(1660): n = A,T,C or G
ttcgtatagtcacttcttttcctctgggtagatacccactagtgcgattgctgaatcaatctacttttagttctttaaggaatctccacactgttttccgtagtggttgtactagtttacattcccaccagcagtgtagatgtgttccataatcaccacgtctatgccaacatctattttttttttttattatggccattcttgcaggagtaaggcggtatcacattaaagttttgatttgcattttttaaatttttacaaactttgaggcttgatgtattccaattctagaaatgttttaaattcagaaaatataggctttcaaaactannnnnnnnnnnnnnnnnnnnnnnnnnnnnnnnnnnnnnnnnnnnnnnnnnnnnnnnnnnnnnnnnnnnnnnnnnnnnnnnnnnnnnnnnnnnnnnnnnnnagtgatcttatttgtttactaatctatccaccttcatctatcaacctatcaatctttaaaactatttattattttctgctagtccccgtctattgtatacaaccctttttagaggattatctattgcgtgtactagcaaagtcccatattatctttacacaaatgtagactattcccactgcttatcaagcttaaccagagtttgaggagaattgaggagaattacaaaaaagattcaattagttttttgttgttgttgttgtttttgttttttgttttttgttttttttttttaccagttgttagcatttctagtaaaaagacttgggtgtagyagaatactgaagctagggctaaaataaaatttaggacctctctgtagatttcatttaattctattactacttctgaaatgggaaaattcccttgtcccccttgcagggcatgcgatgggggtgtggctcacttcttcagcgccccactgctcaaacctttaggggagcatacagaggggcaggctgtggggctccaactccaggcagtgtctagggctgaatgtttacagccgaagctccagtgggcatgtgttacagtgtgctttcagttttgccgcctataggcagtttgtgtgagtcagctcaactggatccctgccttattgcaactacagagggctttctgtatcccgaggttcttgccccagaagaatcggatcacacgtgggcttggagaatgagtacaaggttttatcgagtggaagtagcagatggcagaagacagaacggaatggagtgggaaggttttcccctagagtcgggccgtttagtggcccgggctctcctctgccccagccaaactgcaggttgttctgcttctgcccgtcggtggcctggtgtgccagcatgccggtgcctgtcgctgtgttcctctaggcatccagccgcccgtgcgctcctctgcctatctgctcctctctaggcccagcagcttgtgtgtctgcctgctagggttgtggccggggcaggggtggtggggtggttataggcgtggcagtccagggtgatcttgggaaatgcaacaaaaatgcctgtcctcacccagtggtggagccctcgccggggaccatccttcctctacccagcacttccgttccccacttccatatcatttaaagggaccagctcttcccttcccagcacttcccttccatatcacttccatcaccaacat

SEQ ID NO: 72678 - DNA, 1660 bp, Homo sapiens
  misc_feature (1)...(1660): n = A,T,C or G
ttcgtatagtcacttcttttcctctgggtagatacccactagtgcgattgctgaatcaatctacttttagttctttaaggaatctccacactgttttccgtagtggttgtactagtttacattcccaccagcagtgtagatgtgttccataatcaccacgtctatgccaacatctattttttttttttattatggccattcttgcaggagtaaggcggtatcacattaaagttttgatttgcattttttaaatttttacaaactttgaggcttgatgtattccaattctagaaatgttttaaattcagaaaatataggctttcaaaactannnnnnnnnnnnnnnnnnnnnnnnnnnnnnnnnnnnnnnnnnnnnnnnnnnnnnnnnnnnnnnnnnnnnnnnnnnnnnnnnnnnnnnnnnnnnnnnnnnnagtgatcttatttgtttactaatctatccaccttcatctatcaacctatcaatctttaaaactatttattattttctgctagtccccgtctattgtatacaaccctttttagaggattatctattgcgtgtactagcaaagtcccatattatctttacacaaatgtagactattcccactgcttatcaagcttaaccagagtttgaggagaattgaggagaattacaaaaaagattcaattagttttttgttgttgttgttgtttttgttttttgttttttgttttttttttttaccagttgttagcatttctagtaaaaagacttgggtgtagtagaatactgaagctagggctaaaataaaatttaggacctctctgtagatttcatttaattctattactacttctgaaatgggaaaattcccttgtcccccttgcagggcatgcgatgggggtgtggctcacttcttcagcgccccactgctcaaacctttaggggagcatacagagggrcaggctgtggggctccaactccaggcagtgtctagggctgaatgtttacagccgaagctccagtgggcatgtgttacagtgtgctttcagttttgccgcctataggcagtttgtgtgagtcagctcaactggatccctgccttattgcaactacagagggctttctgtatcccgaggttcttgccccagaagaatcggatcacacgtgggcttggagaatgagtacaaggttttatcgagtggaagtagcagatggcagaagacagaacggaatggagtgggaaggttttcccctagagtcgggccgtttagtggcccgggctctcctctgccccagccaaactgcaggttgttctgcttctgcccgtcggtggcctggtgtgccagcatgccggtgcctgtcgctgtgttcctctaggcatccagccgcccgtgcgctcctctgcctatctgctcctctctaggcccagcagcttgtgtgtctgcctgctagggttgtggccggggcaggggtggtggggtggttataggcgtggcagtccagggtgatcttgggaaatgcaacaaaaatgcctgtcctcacccagtggtggagccctcgccggggaccatccttcctctacccagcacttccgttccccacttccatatcatttaaagggaccagctcttcccttcccagcacttcccttccatatcacttccatcaccaacat

SEQ ID NO: 72679 - DNA, 1660 bp, Homo sapiens
  misc_feature (1)...(1660): n = A,T,C or G
ttcgtatagtcacttcttttcctctgggtagatacccactagtgcgattgctgaatcaatctacttttagttctttaaggaatctccacactgttttccgtagtggttgtactagtttacattcccaccagcagtgtagatgtgttccataatcaccacgtctatgccaacatctattttttttttttattatggccattcttgcaggagtaaggcggtatcacattaaagttttgatttgcattttttaaatttttacaaactttgaggcttgatgtattccaattctagaaatgttttaaattcagaaaatataggctttcaaaactannnnnnnnnnnnnnnnnnnnnnnnnnnnnnnnnnnnnnnnnnnnnnnnnnnnnnnnnnnnnnnnnnnnnnnnnnnnnnnnnnnnnnnnnnnnnnnnnnnnagtgatcttatttgtttactaatctatccaccttcatctatcaacctatcaatctttaaaactatttattattttctgctagtccccgtctattgtatacaaccctttttagaggattatctattgcgtgtactagcaaagtcccatattatctttacacaaatgtagactattcccactgcttatcaagcttaaccagagtttgaggagaattgaggagaattacaaaaaagattcaattagttttttgttgttgttgttgtttttgttttttgttttttgttttttttttttaccagttgttagcatttctagtaaaaagacttgggtgtagtagaatactgaagctagggctaaaataaaatttaggacctctctgtagatttcatttaattctattactacttctgaaatgggaaaattcccttgtcccccttgcagggcatgcgatgggggtgtggctcacttcttcagcgccccactgctcaaacctttaggggagcatacagaggggcaggctgtggggctccaactccaggcagtgtctagggctgaatgtttacagccgaagctccagtgggyatgtgttacagtgtgctttcagttttgccgcctataggcagtttgtgtgagtcagctcaactggatccctgccttattgcaactacagagggctttctgtatcccgaggttcttgccccagaagaatcggatcacacgtgggcttggagaatgagtacaaggttttatcgagtggaagtagcagatggcagaagacagaacggaatggagtgggaaggttttcccctagagtcgggccgtttagtggcccgggctctcctctgccccagccaaactgcaggttgttctgcttctgcccgtcggtggcctggtgtgccagcatgccggtgcctgtcgctgtgttcctctaggcatccagccgcccgtgcgctcctctgcctatctgctcctctctaggcccagcagcttgtgtgtctgcctgctagggttgtggccggggcaggggtggtggggtggttataggcgtggcagtccagggtgatcttgggaaatgcaacaaaaatgcctgtcctcacccagtggtggagccctcgccggggaccatccttcctctacccagcacttccgttccccacttccatatcatttaaagggaccagctcttcccttcccagcacttcccttccatatcacttccatcaccaacat

SEQ ID NO: 72680 - DNA, 795 bp, Homo sapiens
ataaagagaaaaggatagaaactgtatttgataagatgccaattatctatacatatgtcataactatataaatgtctgtatatttctgttgtgcacagaaaattgcatatatatgtataatgtacaaaagttttatctgagtgctttacatrttatatcatgagcgttttcctaattcatcaagcagttcttttttttttttttttttttgagacagagtttcactcttgttgcccctgctggagggcaatggcgcgatcttggctcaccgcaacatccacctcctgggttcaagtgattctcctgactcagcctcccaagtagctggaattacaggcatacaccaccacatccatctaattttgtatttttagtagacacggggtttcttctggtggtcaggctggtctcaaactcccaacctcaggtgatctgcccgccttggccttccaaagtgctgggattacaggcacgagccaccaaagtagttcttaatgttgtataatatatgatgttttggatgtactaccagttaattgttcatgcctttaaaaaaacttgtatgcttctaaatgttaataccattatatctttcattgacattgccattcttgaacttggattctagacaaaatctgccattatttccttgaattctgagacatgaaattattgggctgaaaactgaaaacagtaaaatattttaacacacactgccaatgtgtttccctagaaaggtttgatccaattatcaatgattgtaactgcatactccactgaccataacttagttat

SEQ ID NO: 72681 - DNA, 668 bp, Homo sapiens
tgcatagacttcctgcatacaggccagatctctttgctggaagtggagaggctaaggtggtggctacagtgatgttttgtgaataaagaatgacgcaaaatgtgaaatgttgtaattagtagtcttcatctttagaggatttacttctagctacagctctccaaaactggaaggagggaagagagagagatactaagatttcttcttcccttggcatacttgggtaaaatgacacattccagatacaccaagggccacctgtgttgatagaatagcatctactcaaagcccatcgattgtaggattgaagctgctagtaacgcaagttacttgtgaaatgggataatattttaggctatctgtrtaggctttggggtctaaattttcttcctttattccatacttggtggttttacagtctaccatttgcctgagtcaatttcaagatgtagcaagacacagtcccttcctttacagaatgaatgtactatccagtgtaaaatattggtgatgtaacttgataaatgctatggtggacaagcacagacttctgtagaatcacaatctaactcagaatttgggaaatgatgaggtaaggaaaaccactcagagaagatcatgtctgactcaatccccatgtgggattcctactcttcttcctgactttg

SEQ ID NO: 72682 - DNA, 500 bp, Homo sapiens
ccaggggggggggccaaagcctggttaatcctagcaacttgggaggcccaaggggcaacagattgcctgaggtcaaaagtttgagaccagcctggctaacatggtgaaaccctgtctcyactaaaaatacaaaaattagctgggcgcggtggcaggcgcctgtaattccagctacttgggaggctgaagcaggagaatcgcttgaaccagggagacagaggttgcagtgagctacgatcgcaccactgtactcccgcctgcgtgacagagtgagactccatctcaaaaaataaataaataaaaataaaaatagaaaaacaggccctcaggaatgttcacatgccttggctattactgtgggaggctcctgctagagaagcacacctggcctctggccaccgcctctgcctgacacttgctatccccaaaggaggcgtggcttcccagttgtccccagagaagatgtggctcttcagattggtcagttccaagagggaacc

SEQ ID NO: 72683 - DNA, 584 bp, Homo sapiens
tactgactatgccaattgacaggttccaacctgagctgggttctgargggagctggtggacacgtggtgggtagctgaaagaacacttggattgtaggcagttggaacgtggctttattctctctcctgtcctacagagtcagcagtgcagttatattactcacagacagagtggctcaaagccaggtatgagctcacacaaacagattatagtaaatggttacataatgcatggggttgtgcacctgcgctccaaacccgctgtgtcgtaccataccggatgtttaccttggcctactcctgactgaagcacagccactttccttacaataataaataacttttgaaaaatgcatagtttcccctcactgatgacatgtggagacactgtaaaggacaaaggtagcaagtgtgatttcctgtggtcaagttagatacctccagtgaattccagataccttgttttgcctttttctatttctcttgggagaaaagttgttcctcgttatcaccataaggtgtcagtagagtcaactgtgcagaaattgggaaaggccaataattctaaaatctttctcctgcaa

SEQ ID NO: 72684 - DNA, 584 bp, Homo sapiens
tactgactatgccaattgacaggttccaacctgagctgggttctgaggggagctggtggacacgtggtgggtagctgaaagaacacttggattgtaggcagttggaacgtggctttattctctctcctgtcctacagagtcagcagtgcagttatattactcacagacagagtggctcaaagccaggtatgagctcacacaaacagattatagtaaatggttacataatgcatggggttgtgcacctgcgctccaaacccgctgtgtcrtaccataccggatgtttaccttggcctactcctgactgaagcacagccactttccttacaataataaataacttttgaaaaatgcatagtttcccctcactgatgacatgtggagacactgtaaaggacaaaggtagcaagtgtgatttcctgtggtcaagttagatacctccagtgaattccagataccttgttttgcctttttctatttctcttgggagaaaagttgttcctcgttatcaccataaggtgtcagtagagtcaactgtgcagaaattgggaaaggccaataattctaaaatctttctcctgcaa

SEQ ID NO: 72685 - DNA, 689 bp, Homo sapiens
ggctatggtggccacagttcagatgagaggggtgagggccctggcagtcacagtaggcaccctcctcactctgcttttcacaggctaatggaaaaccaggcccagtgtctctgacatttttctcctgagcctcctctctcagttgcaaccaggaccacatctccccgccctcccctcctcagcactgtgggactctgaagctcccagcttaggatcacacctttggctgcactggagtcctgttgtgtgcttttctttctttttcaatggttctctactttatgcaaaagtacttttgattaaattagatatgtgataacactataaaattttatgggagtgaatccaactattttgggtatcatgcttacagaagcttttttttaatttaaaaggagatcaggaaacaattttttttgcactttcttatcagatttatagagacgtgaaactatgtaaataccagawcaagtaggggacaaaccccaacaagtaaaatgaacagcccttactgttcctgccatctatatcttcttgctcacggtggcctcagttccttatcattcgtcctcacctcacctctcagggctctcctgaaaggtctcagaggagcctgaccagctgccgctttcctccgaagggcgatgtggaggtgatcgcaagcaaagcatgctgggcgcaaagggtcc

SEQ ID NO: 72686 - DNA, 689 bp, Homo sapiens
ggctatggtggccacagttcagatgagaggggtgagggccctggcagtcacagtaggcaccctcctcactctgcttttcacaggctaatggaaaaccaggcccagtgtctctgacatttttctcctgagcctcctctctcagttgcaaccaggaccacatctccccgccctcccctcctcagcactgtgggactctgaagctcccagcttaggatcacacctttggctgcactggagtcctgttgtgtgcttttctttctttttcaatggttctctactttatgcaaaagtacttttgattaaattagatatgtgataacactataaaattttatgggagtgaatccaactattttgggtatcatgcttacagaagcttttttttaatttaaaaggagatcaggaaacaattttttttgcactttcttatcagatttatagagacgtgaaactatgtaaataccagaacaagtaggggacaaaccccaacaagtaaaatgaacagcccttactgttcctgccatctatatcttcttgctcacggtggcctcagttccttatcattcgtcctcacctcacctctcagggctctcctgaaaggtctcrgaggagcctgaccagctgccgctttcctccgaagggcgatgtggaggtgatcgcaagcaaagcatgctgggcgcaaagggtcc

SEQ ID NO: 72687 - DNA, 982 bp, Homo sapiens
tgcagacactttaggggatgaatccactccccagggcatggctggggctttcctcttggctcttgggacttctgggatcacctgtgacctggacagtggcacccgcacgaggtgaacagaagttgtgaacaggctccctctctgcagagcccaccagtagccctttgatagccccgtgctgttttgattacaggtggtggctattgatgtggacatggccttttttgaacctaaaatgagggaaatccttgagcaaaactgcacaggagatgaagactgcaatttctttgactgtttttcaagatgtgatttacgagtcaacaaatgcggagcgcagcgcgtaaacaacaacctgcaggtatgagagtcckccagggctgggggaggagagggtgctctttggctgtttctgcccgctagctcttcagataccctcagtggagctcaaggtcgaccttttcaggccatccatctggatcgatgtggtcaataaaggcaggacggtggggatgggacaatcgtgctcttggttgcctgcccccagggttgttggtcaggcgaccaggggcatctgatgagggagttccctgcagagctggctgctgggcttcctcttgcccaggctccaccccacgtatctacaacctctcataaacatgggcacatacactatgagaatcctgagactaatccatcaaagataatactgagaagggtgcaaagcagtcctgagacactggcctaactagaggttagacagaaaccaccatccagacaggccagaggtcaggaccaggaggtggtttagacaggaagaaaggagccaagtccaggagatcagctacaagtggaatacatacagggttcaggcattcagagctggcgggtctcaggtcccccatctggggttggatcatctctcttcttttggcagaagctgtctccttctgccctcacttgaggctctcaggtgagggaggat

SEQ ID NO: 72688 - DNA, 982 bp, Homo sapiens
tgcagacactttaggggatgaatccactccccagggcatggctggggctttcctcttggctcttgggacttctgggatcacctgtgacctggacagtggcacccgcacgaggtgaacagaagttgtgaacaggctccctctctgcagagcccaccagtagccctttgatagccccgtgctgttttgattacaggtggtggctattgatgtggacatggccttttttgaacctaaaatgagggaaatccttgagcaaaactgcacaggagatgaagactgcaatttctttgactgtttttcaagatgtgatttacgagtcaacaaatgcggagcgcagcgcgtaaacaacaacctgcaggtatgagagtccgccagggctgggggaggagagggtgctctttggctgtttctgcccgctagctcttcagataccctcagtggagctcaaggtcgaccttttcaggccatccatctggatcgatgtggtcaataaaggcaggacggtggggatgggacaatcgtgctcttggttgcctgcccccagggttgttggtcaggcgaccaggggcatctgatgagggagttccctgcagagctggctgctgggcttcctcttgcccaggctccaccccacgtatctacaacctctcataaacatgggcacatacactatgagaatcctgagactaatccatcaaagataatactgagaagggtgcaaagcagtcctgagacactggcctaactagaggttagayagaaaccaccatccagacaggccagaggtcaggaccaggaggtggtttagacaggaagaaaggagccaagtccaggagatcagctacaagtggaatacatacagggttcaggcattcagagctggcgggtctcaggtcccccatctggggttggatcatctctcttcttttggcagaagctgtctccttctgccctcacttgaggctctcaggtgagggaggat

SEQ ID NO: 72689 - DNA, 671 bp, Homo sapiens
gtctcttaaactactgggacactgggtttcttaaactactggggaaactgtttccccaagctggcgaaccatgagaactcccacagaaacgttttaaaatgcaaatatgcaggttccatctcaaacctccttaatctgtatctctagggatgactccagagtcagctttttttttttttttttttttaagaaaagcytcccctgtcattctgatgatcagctaggttggtttgccaaattttggtagagaaaagtaatcaactaggacattttgaaaactagtgctaattcgaacagctaatactaatatacttttggtatagttcttcatcgccagggggccaatggtacactagtaaactgaggcagggccagctagaagtgggtgcaaaatgcccctttcacaactctgcccttcactctaccgaatactccacaaagtgcatattaattcccaaaaccaaggactcccctctacaaaagcaaacactgcatttcagggagagtcaattgttatataatacacctggattcattccctatggctgtaacaaatgaccacaaatttagcggcttaaagcaacaacaatttattcccttacaattctgcaggccagagcccaaactcaggttcatgaggtcaaggtgtcagagggctggttccttctgca

SEQ ID NO: 72690 - DNA, 635 bp, Homo sapiens
ctcttcctgcccctccttactccagcagatacctgagattccacaatgagtaaagtaatgcattctcttctcttcttcttctttcttctttccttttcttcttcttctgcttctgcttctccctctcgctctcgctcactctgttgcccaggctggagtgcagtagtgtagtctcagcttgctgaaacctccacctcccaggctcaagcaatcctcctgcctcaaccccctgagtagctggggctacaggtgcgtgcatgccaccacgcccagctaatttttgtattcttagtagagacgaggtgtcacctcattgtccaggctggtcttgaacttctgacctcaggtgatccacccgcctcggcctcccaaagtgctgagattacaggtgtgagccactgcacctggccaagtcatgcattcttttatgttagatgccacctcctcttttaaaaacaggggaactgagaagcaatttcacagaagttgtgccccttctgggatctggccctgcacccctcagaccatcggctttttagattgcacaactaaaggyggaaactcgtagttcctgcacttgacattttattgcttaaaaaaaaagatggtttcctaaagagtattatgctgatgtg

SEQ ID NO: 72691 - DNA, 868 bp, Homo sapiens
ggtatttccagttgggaaacatgagaccgtaatatagaaattcgaatcttaagtgcccaagagtgctgtcccagggggcttttaatcactggaagtagcaggatttcttgggaacatgcccagagatctgaaaatgggcaaaggttgtccaagtttaagaaataagaaaatattaggttagcgatagtctggaagcatttttctttccttcattttctcatggtgttggggatttgtccctttttctctcacagcgtgcgtctgacatgctccaggttggtcctggaagccagtgcctgggtgtactctgtgtgcctgaagccggctcccagagtgagaccccaggcacatggggagacctgctttctggcccccgctctaccagtgcstcccttacgggtctcgggcaagtcctaatttgtgaggttgacctccaggccccagcctgccactctgcatgtgagtagcagacttgatgctgggaaggtcactgggcaaatccatctccaggggagggaggattttggtggctggctgcggtctgagtggacagcaggcagtcagcaccaatcgctcacctagtttctctttgttccaatgttgcattttatgttctgtcaagaggagcatgtgtgtgtgtgtgtgtgtgtgtgtgtgtgtgttgtaattatcagacctgtgagttgatttggttaagttttatttgtcaaacaaaaatagtttcaacaaactgtgttgatttttgtgcaatttccttccttctgtttaagcaaatttgattttttaaagcaaaaccgtgaaaagcccagtgcttaatcacattcctcaaaaatctatatatgctaaatgcagtgtggcatcatggatt

SEQ ID NO: 72692 - DNA, 868 bp, Homo sapiens
ggtatttccagttgggaaacatgagaccgtaatatagaaattcgaatcttaagtgcccaagagtgctgtcccagggggcttttaatcactggaagtagcaggatttcttgggaacatgcccagagatctgaaaatgggcaaaggttgtccaagtttaagaaataagaaaatattaggttagcgatagtctggaagcatttttctttccttcattttctcatggtgttggggatttgtccctttttctctcacagcgtgcgtctgacatgctccaggttggtcctggaagccagtgcctgggtgtactctgtgtgcctgaagccggctcccagagtgagaccccaggcacatggggagacctgctttctggcccccgctctaccagtgcctcccttacgggtctcgggcaagtcctaatttgtgaggttgacctccaggccccagcctgccactctgcatgtgagtagcagacttgatgctgggaaggtcactgggcaaatccatctccaggggagggaggattttggtggctggctgcggtctgagtggacagcaggcagtcagcaccaatcgctcacctagtttctctttgttccaatgttgcattttatgttctgtcaagaggagcatgtgtgtgtgtgtgtgtgtgtgtgtgtgtgtgttgtaattatcagacctgtgagttgatttggttaagttttatttgtcawacaaaaatagtttcaacaaactgtgttgatttttgtgcaatttccttccttctgtttaagcaaatttgattttttaaagcaaaaccgtgaaaagcccagtgcttaatcacattcctcaaaaatctatatatgctaaatgcagtgtggcatcatggatt

SEQ ID NO: 72693 - DNA, 1212 bp, Homo sapiens
ggagctgcatttttttcatcagaaccatctcttagaactctactccatcatgaatgtcttaaatctaagcacccgctgcgcttactttagcactgaggaacctcaggatcatccatgttttctaggatttgtccacctaatttaagccagttgtcatctgcattctttttttttttttttttgagacagagtcttgctctgtagcccaggctggagtgcagtggtgcaatctcagctcactgcaacctccgcctcccaggtcccagttcaagcaattctcctgcctcagcctcccgagtagctgggatttcaggcgtgcaccaccacacccagctaatytttgtatttttattagacacagggtttcaccatattggccaggctggtcttcaactcctgacctcgtgatccacccgccttggcttcccaaagtgctgggattacaggcatgagccaccgtgcccggcccgtctgcattcttgctgaagaggacattcagctaatgatgctaattgtcagtgtggatctaaagaagcactttacttttgattaggttttatatcttaattaaaagtgtcttggctgggtgtggcatctcacacttgaaatcctagcactttaggaggctaaggcgggcggattagttgagcctgcccagctggtcagcctgggcaacatggcaaacctatctctaccaaaaatacaaaaaggtagccggacatggtggtgcacgtctgtagtctcagctacttatgaggaggctgagatgggagaatcacttgagcctgggagtgtgccactgcgctccagcctgggcgacaggagtgagacctgtctccaaaagaaaagaaaaaagaaaaaaaaagtgtttcatgggactcattttagagatggagaaactgatgctcagtttctcccaatgtcaaacaagactcccaatgtcatgtctttgaattttctggaagaacaacacagcatttttgaaaatgtgattcctgatcattctgcagctgccccgatggtcagagtcttccaaatacctcccatcatcctggccgaactggggagcgatcccacgaaaggcaccgtgtgcttctacggccacttggacgtgcagcctgctgaccggggcgatgggtggctcacgcacccctatgtgctgacggaggtagacggtcagtgaggcgcccgggctacagtgcggtgctgctg

SEQ ID NO: 72694 - DNA, 1212 bp, Homo sapiens
ggagctgcatttttttcatcagaaccatctcttagaactctactccatcatgaatgtcttaaatctaagcacccgctgcgcttactttagcactgaggaacctcaggatcatccatgttttctaggatttgtccacctaatttaagccagttgtcatctgcattctttttttttttttttttgagacagagtcttgctctgtagcccaggctggagtgcagtggtgcaatctcagctcactgcaacctccgcctcccaggtcccagttcaagcaattctcctgcctcagcctcccgagtagctgggatttcaggcgtgcaccaccacacccagctaatctttgtatttttattagasacagggtttcaccatattggccaggctggtcttcaactcctgacctcgtgatccacccgccttggcttcccaaagtgctgggattacaggcatgagccaccgtgcccggcccgtctgcattcttgctgaagaggacattcagctaatgatgctaattgtcagtgtggatctaaagaagcactttacttttgattaggttttatatcttaattaaaagtgtcttggctgggtgtggcatctcacacttgaaatcctagcactttaggaggctaaggcgggcggattagttgagcctgcccagctggtcagcctgggcaacatggcaaacctatctctaccaaaaatacaaaaaggtagccggacatggtggtgcacgtctgtagtctcagctacttatgaggaggctgagatgggagaatcacttgagcctgggagtgtgccactgcgctccagcctgggcgacaggagtgagacctgtctccaaaagaaaagaaaaaagaaaaaaaaagtgtttcatgggactcattttagagatggagaaactgatgctcagtttctcccaatgtcaaacaagactcccaatgtcatgtctttgaattttctggaagaacaacacagcatttttgaaaatgtgattcctgatcattctgcagctgccccgatggtcagagtcttccaaatacctcccatcatcctggccgaactggggagcgatcccacgaaaggcaccgtgtgcttctacggccacttggacgtgcagcctgctgaccggggcgatgggtggctcacgcacccctatgtgctgacggaggtagacggtcagtgaggcgcccgggctacagtgcggtgctgctg

SEQ ID NO: 72695 - DNA, 1212 bp, Homo sapiens
ggagctgcatttttttcatcagaaccatctcttagaactctactccatcatgaatgtcttaaatctaagcacccgctgcgcttactttagcactgaggaacctcaggatcatccatgttttctaggatttgtccacctaatttaagccagttgtcatctgcattctttttttttttttttttgagacagagtcttgctctgtagcccaggctggagtgcagtggtgcaatctcagctcactgcaacctccgcctcccaggtcccagttcaagcaattctcctgcctcagcctcccgagtagctgggatttcaggcgtgcaccaccacacccagctaatctttgtatttttattagacacagrgtttcaccatattggccaggctggtcttcaactcctgacctcgtgatccacccgccttggcttcccaaagtgctgggattacaggcatgagccaccgtgcccggcccgtctgcattcttgctgaagaggacattcagctaatgatgctaattgtcagtgtggatctaaagaagcactttacttttgattaggttttatatcttaattaaaagtgtcttggctgggtgtggcatctcacacttgaaatcctagcactttaggaggctaaggcgggcggattagttgagcctgcccagctggtcagcctgggcaacatggcaaacctatctctaccaaaaatacaaaaaggtagccggacatggtggtgcacgtctgtagtctcagctacttatgaggaggctgagatgggagaatcacttgagcctgggagtgtgccactgcgctccagcctgggcgacaggagtgagacctgtctccaaaagaaaagaaaaaagaaaaaaaaagtgtttcatgggactcattttagagatggagaaactgatgctcagtttctcccaatgtcaaacaagactcccaatgtcatgtctttgaattttctggaagaacaacacagcatttttgaaaatgtgattcctgatcattctgcagctgccccgatggtcagagtcttccaaatacctcccatcatcctggccgaactggggagcgatcccacgaaaggcaccgtgtgcttctacggccacttggacgtgcagcctgctgaccggggcgatgggtggctcacgcacccctatgtgctgacggaggtagacggtcagtgaggcgcccgggctacagtgcggtgctgctg

SEQ ID NO: 72696 - DNA, 1212 bp, Homo sapiens
ggagctgcatttttttcatcagaaccatctcttagaactctactccatcatgaatgtcttaaatctaagcacccgctgcgcttactttagcactgaggaacctcaggatcatccatgttttctaggatttgtccacctaatttaagccagttgtcatctgcattctttttttttttttttttgagacagagtcttgctctgtagcccaggctggagtgcagtggtgcaatctcagctcactgcaacctccgcctcccaggtcccagttcaagcaattctcctgcctcagcctcccgagtagctgggatttcaggcgtgcaccaccacacccagctaatctttgtatttttattagacacagggtttcaccatattggccaggctggtcttcaactcctgacctcgtgatccacccgccttggcttcccaaagtgctgggattacaggcatgagccaccgtgcccggcccgtctgcattcttgctgaagaggacattcagctaatgatgctaattgtcagtgtggatctaaagaagcactttacttttgattaggttttatatcttaattaaaagtgtcttggctgggtgtggcatctcacacttgaaatcctagcactttaggaggctaaggcgggcggattagttgagcctgcccagctggtcagcctgggcaacatggcaaacctatctctaccaaaaatrcaaaaaggtagccggacatggtggtgcacgtctgtagtctcagctacttatgaggaggctgagatgggagaatcacttgagcctgggagtgtgccactgcgctccagcctgggcgacaggagtgagacctgtctccaaaagaaaagaaaaaagaaaaaaaaagtgtttcatgggactcattttagagatggagaaactgatgctcagtttctcccaatgtcaaacaagactcccaatgtcatgtctttgaattttctggaagaacaacacagcatttttgaaaatgtgattcctgatcattctgcagctgccccgatggtcagagtcttccaaatacctcccatcatcctggccgaactggggagcgatcccacgaaaggcaccgtgtgcttctacggccacttggacgtgcagcctgctgaccggggcgatgggtggctcacgcacccctatgtgctgacggaggtagacggtcagtgaggcgcccgggctacagtgcggtgctgctg

SEQ ID NO: 72697 - DNA, 635 bp, Homo sapiens
attgttattaaaacccctggaactaggcttcactcatatttgtctgggagattcaacaaatgcagatctcacagaacactctagacaacttatccttcagcagcctaagggaagaaaaacagccagaggaggtaaacaattccatgcactttattaggttcactttgtataagtttctgattggactactgcttggcagcatttgtggacatttgtccaacggcaagagggagggatgactgtctggtagctaaaaccctacaagagaatgagctggaggtggaagataacgcagtagaaaggcattgagctgtgactaaagagkccaggtttctagtttgagctctaaccctatttcattatgtaaccatagccatataacccataaaaagtctttttcctaaaagacggggttggtctagactatttccgggggctcctttacttttagtagcctatgacacccacgctgtgaattcacaaactacgtttttctgacacaactttgtactacaaatcacctatataactgaattttcctactccaagtaaccaactctgaaatcccagcacttaccctcacctccaggttgtttgtatgggttgtacttaggttttggagcaactaccggggc

SEQ ID NO: 72698 - DNA, 1066 bp, Homo sapiens
acattgttttctcataagcaatagagatgacctttaaaaatgcacccccttttatcccccagcctgcaatcccatgaagatgaaagccagtttgctattctgcattaacatttctgtgatcagatatagtgtgggcacctcaattctatctgtgtcaagacattttcacacaagtgactcactcggtagaagctcaggcattgaacaccactctgacaccatctcctttgaggttgattccactttgctggtgttaccagccaacatcctgtttagctgctttcctctgcaacacaacagtgtaattggaagtgactgaataataaatctcaatttctctgtttcatcaagagaatcttccaatttactaggcttcttctattcaccagttcatcttctgcattatgaatcattcttgaacaaacacacaagttaactgtccgttcctatgttaaaaacacggtgtagcagggataattctttcattagatttcctagatctgttttgtggggatctcaaagaaaagctagtgttgaatatatagacaggtcatccacctcctcacatgggtaatgccagctccaacatgcacgagctcaatgtgcggccattccaaggcatctctctgtcctaagtaaccccctccctgctaccaagcttcagtcttccaaatctgagttacctttgcttaatgtagrtctacctgaactttttacccagaacattataaatcatgaatggcattctcacaggctagaggaaaaacaagtaggaggaaagggtagaaaaacacatgatatgggaaaataatgataggtacatggcactaatatgtgtcccaagtatactgagtcaaaaaatagtcttcattttcccatgtttaaaatgcgaaggatggttgggtaccacaagctacccacttcaattgtttgacatcattatagattaaatattcctctactaggtagaattgaatagctctctatggccatcagaataacttcagaactctttacattagcacgaaacacactttatgactggctgcttcatttcttctcacaa

SEQ ID NO: 72699 - DNA, 904 bp, Homo sapiens
catctcacttgatagtgttgggcagaggaaagttgaaacatgcagcattttataaaggatctgcaatcactaccatctgcggcctctcccagtttctgccttgcctctcttcctactttttatattcaaatccagtccatcctgattcttctggaagaggcacagttgctgataaatgttatagtcatggccctccttttctgccttctctttcctcttcttcatcccaaagatttctaaayttattatccccaaattcaaaatatccccccaaaagaaggcaggaagtctaatgaaatgtttgaatccaatgaaccaatgcatggataaaaagagagtaagcacctgaagtgctgcatggtgataactcgcccagctcaacaggtcaaactccctcaatccatgcaatatgatagatacctctaaaacatcgaccgcaagaggtcatattagagagcgtaaaacactaaggttgatcctccttttgggacctgaggtggactaagctatgtgtcttaccaagaaaaggaatcaccacggaatgtttttaatcagacggtgaggagacaagaagtccagttccctagtttatgaatggaaaccgtggcacaagagaagtgaaatagcttgcctgctaaaaatcaaaaagtgagttagaagcagaactaggagaattcacatgctccatctaccacaccatatcgccttcaccatcttcttgttcttttattctctctgttacagtctcaggggctgggctttgatccacaggaatttacgctaggatcagaaggagaatgctaggggagatcccacgttaacaatggctgtcttcccacttcagacagtaaaataagcattaggtcttttctgagtgctccaaggttagacataggtaataagc

SEQ ID NO: 72700 - DNA, 904 bp, Homo sapiens
catctcacttgatagtgttgggcagaggaaagttgaaacatgcagcattttataaaggatctgcaatcactaccatctgcggcctctcccagtttctgccttgcctctcttcctactttttatattcaaatccagtccatcctgattcttctggaagaggcacagttgctgataaatgttatagtcatggccctccttttctgccttctctttcctcttcttcatcccaaagatttctaaacttattatccccaaattcaaaatatccccccaaaagaagrcaggaagtctaatgaaatgtttgaatccaatgaaccaatgcatggataaaaagagagtaagcacctgaagtgctgcatggtgataactcgcccagctcaacaggtcaaactccctcaatccatgcaatatgatagatacctctaaaacatcgaccgcaagaggtcatattagagagcgtaaaacactaaggttgatcctccttttgggacctgaggtggactaagctatgtgtcttaccaagaaaaggaatcaccacggaatgtttttaatcagacggtgaggagacaagaagtccagttccctagtttatgaatggaaaccgtggcacaagagaagtgaaatagcttgcctgctaaaaatcaaaaagtgagttagaagcagaactaggagaattcacatgctccatctaccacaccatatcgccttcaccatcttcttgttcttttattctctctgttacagtctcaggggctgggctttgatccacaggaatttacgctaggatcagaaggagaatgctaggggagatcccacgttaacaatggctgtcttcccacttcagacagtaaaataagcattaggtcttttctgagtgctccaaggttagacataggtaataagc

SEQ ID NO: 72701 - DNA, 783 bp, Homo sapiens
tatcatatttatcacatattcttgtcgttatggctttacacatctttttcttacagtagaagtcccttgtggtgtgagaaagggtataaactgtgttccccttgattgtaatctgcagtgtcctgcattcagtaggggcttaacaattgttggtttgatgaagtttacaataaataagtaaattttaataactgatacaaactagctcacaagtgactgtggatttcctcaatttgtaagctggactctgacaaacatcccaatatggaagagttaattgattgaatagatcaccagatggaataccagatagctaaacttttgtggaacgagaatagatgcccctgaatttcattagtcttcaaatattggcccctatttccaatttttttaaaaatatcgttacttactcagctgccttccctagattccgtagactcccatatgtcttattaaattaaaggcaaaatcattaaggccaatataaactctgtawggaactagtgaaatgttacgttgcttcttttcttgagatctcctagaactggtccaggagcacttagggacaagctcagacccacctctctcaaaggtaatgatactcctgcatgtgtttcctccctatccagtctgatatccagtccttatctacccactttctctaactgagatacagagacagggatggaaatggtgattagtaacagcatggcataaatattatttaagacataaaaacagataacaacatagaaataatctggcagagtggtgaaaagtatg

SEQ ID NO: 72702 - DNA, 848 bp, Homo sapiens
ctacaattttgtctaggcagagctgtttatgtctggagactgtatagtccctttcattaacaaagggcaatatttgctcattggtatcaacatttcctctagtaacattcacatcacacctgcttcaaagtcctcatttttttccaaaggattcttccatttgccacatactaggacaggaaggatatgtattctccctgaagaaagtcacaatcctgccaagcatcctggactcttctctttcccataagccccctctttccaaattgcttttgattcttgttccccttctccatggtcatggccaccaccttggttaaggtccttgtctgcctcaatggacccctgaaggtgactccaagacactctgtcatcaccatttctgatcacttgagtaccactatgttatagcaatccatctaaatacagatcaaatcattttatttactagcataaaaggctctttatcgtgtcctaatgatatagccttagattggaaaaatctcccaaatgccatcacaactattaaagaaaaattatttatttgaattgggggagtagctataaagcagtcagggaaacttttaccaaggacagaaactgaagcaaaaggaacagcttaagcaaaaagctgcaaagctatgtgtctctttatcttagttcaggtttcagccttttccagggggcaacgatctggtagttggccaagttccccactaaatatgaaagaacatcaccattcccttccctgccttccccacctccgccacccatccgcgcttctctgsggcaccacagcttatcttgctatacaaggttttgctgactctggtctcctgttctgcatg

SEQ ID NO: 72703 - DNA, 1163 bp, Homo sapiens
taattttttgtatttttagtagagacggggtttcaccgttttagccgggatggtctcgatctcctgacctcgtgatccgcccgcctcggcctcccgaagtgctgggattacaggcgtgagccaccgcgcccggcccattccattttatctacaaacatttccaatgtttctctgaaagacaaagaagactcatttttttcttcaatgtatctatgcgaacatagtcacacctaaaactataacaataaatatatcactttattagattttcttcttgacataaagcacttcttcagcttaaatggtggcagctttcggcagttaccgatgatcacagtctgagaaccacttctaatgtcacatctgatcccagccccgagttactttgcaattaccactcgctggaacccaagagttctatataattgataagtatgatgtgcacccttgaacttacccagaagagaaaatcctaaggatatttgatgttgcttttgctagaaaaatgttgctgaccaaaaggatccacattaaccaactacagccttaaaatgtcagccttactcacttgaatgcaatgtttgaagatagagaacatagcaataaaaagacatggctgtatgtcctccaaaataacaaggaaatgttgccttctcaaatagtattcctaaaaaaaaaatggctttgggatctgaaacaaaattagtaggcaaaagtattttgagggcttcagagggtaagccagcagaactctgggaagcttgagttgggtatgttgcattaaagtaccttagatcttcataagttgtaaagctctcaataggctctggataaatgtttatccagcacagaaacamtcatgaaattcatgagctccctaggatggcttataaacatgactttaacttcagctcttacctaacatgactttaacttcagctcttacctgtactttgaaagcctcttcatcaagaggtggtggaggaggaaagtttccagagatagatggaagggcactggaatcatctagaggtggaggtgggggtggaagaaaatcacctacagaaaagaagtaaacaacatgaagttaataaggatgcaacgttatagtactcgtgatatatttgctggcattttacttttttataattggctttgacaca

SEQ ID NO: 72704 - DNA, 912 bp, Homo sapiens
ccaaggatttctgagaaagaaacacttggttacaatacgatttactaaagactaatgtaaaagtccatgcaggacagattaggagaaatgaataagaaacacccaatttagaaatctatacataatccaggcaagaagtaatgagactttgggataccgagaaaaacctagcatctcttaccaacaagagaagcacactgctgtcagagttattgagggagtgaacctgatctctgtgatctaagttatacacatatatccaagagctttatggttcctggaatgaaacctttttaaatagtctgcaaaaaactgtattggggaaacagaaacttctaccttttaacctgttctttatttgttattttcctattaaaaataatgtttttgatgtgttggagaagagatcttttctatttatggaggagtagcytttccttgcattttagttgctcaacactttgtgggttagggcagcagtctccatcattaagtgagttgcttttggatattatcaaaacatcacagtttaggccctgagaaatagaagtataagaatggaagagtgagcacattagaatgactgtgagtaggttttgttgttctgatacacctttgaaatggttcagtttgcctctatttgccttataaataacagtcttagaattcaaagtgtagctaagccaagaactgtcaggtctagccccaagccaaattcagactgctaagcaatcaaaagcactatctctcgagtactccgcttactagactcgcaccatgccaggcagtttgctaagattttcatacactgccaccgaatcatacaacaacccttaaagctgatggttctcaaactttagagttcatcaatatctctggaatgtctttttaaaatacagatttttgggtcct

SEQ ID NO: 72705 - DNA, 912 bp, Homo sapiens
ccaaggatttctgagaaagaaacacttggttacaatacgatttactaaagactaatgtaaaagtccatgcaggacagattaggagaaatgaataagaaacacccaatttagaaatctatacataatccaggcaagaagtaatgagactttgggataccgagaaaaacctagcatctcttaccaacaagagaagcacactgctgtcagagttattgagggagtgaacctgatctctgtgatctaagttatacacatatatccaagagctttatggttcctggaatgaaacctttttaaatagtctgcaaaaaactgtattggggaaacagaaacttctaccttttaacctgttctttatttgttattttcctattaaaaataatgtttttgatgtgttggagaagagatcttttctatttatggaggagtagcctttccttgcattttagttgctcaacactttgtgggttagggcagcagtctccatcattaagtgagttgcttttggatattatcaaaacatcacagtttaggccctgagaaatagaagtataagaatggaagagtgagcacattagaatgactgtgagtaggttttgttgttctgatacacctttgaaatggttcagtttgcctctatttgccttataaataacagtcttagaattcaaagtgtagctaagccaagaactgtcaggtctagccccaagccaaattcagactgctaagcaatcaaaagcactatctctcgagtactccgcttactagactcrcaccatgccaggcagtttgctaagattttcatacactgccaccgaatcatacaacaacccttaaagctgatggttctcaaactttagagttcatcaatatctctggaatgtctttttaaaatacagatttttgggtcct

SEQ ID NO: 72706 - DNA, 2324 bp, Homo sapiens
catcagtgtaacatcctcattagcattctggtagttacatttacttattccagagcaaaattaatacatgataagaagtggaatattttctattgatatctagggtattatgacaacaaccttccttagaaaagaaacagtgtgttatgaggacagtggatgctacaacattatttgccttcaaggcattgcaaacaaccggaatcaattgaataaccttctcaagcacaagccaacagtgaaatgagagtcatttatctgaaacagcaggcaagagcttcattggtacactcggaaggtggctcattaaccctgccgaaggtttgctccatctgatcagggcataaatgtttcattggcccaataaccaaggtcttagagtttcacagtgttttctctccaatagctaatatggggagcattgctgacattctgcccatggttgccaaggctgaaatcaaacgtgctttgaataatactataaaaattttgaaatgaatgtttgccgtaggaaccaatgttctactgtgggctctatacaaagccgcttaaggtgggagggagcaaacttttcaagttggttttaggtaacagaaacagacgtctttattgtatttgtctggaaaaaaagtaaggaaaatcccaacattatctgttctggtcaagaagtataaggctcagtcccgttttatttctctccttctcctttggatcctttttccttattcttgactctatacatggagaaaaagttcaagtgcatctaaagcagtaatgctgggaacttgtcaacttattcccatgatgctactgttgcttataaagcattttgaggattcttgtattcagagctagtgataagccgcaagaggaagtcagtcttgctggtgtacagctgcattttgggctcatgtatagaagagttaacatggatttcagagtctcccaggtgtttgaaatccaggctctgctctcaggacctgtgaggtcttagataagttgctcaatctctttgagcctcagttttctgagtacaatggcacataactcacaggactgcggtgtggatgaattgcgatgatgtgtatgaactcagctcagggtcttctttccttccttctttcttccctgcctctgaatttacaccaagctttacttctgaggtctgactcctgagaagctagacacacagtgaagcttgatgcttgctagaaactgagggactagacttgagtgttagggaacctgggaatgacatctgtcatccatccgggaaggccgaggaggaaagcgaggcagcgcagcagagcaggaagtggtgcccatggaggccacttttgggctggagcctgcttaaggcactttagtgctgagtcatttggggcccaaggtaggggcagataggagagaaggagggcagttatcgcctagtcacaggggcagatagaagagaaggagggcagttatcacctaatcacaggggcagatagaagagaaggacggcagttatcgcctagtcaggaatttaacaatctctatttcctttcaaacctcgtttcatcccttccatcccagtcaaattcacaggaaattaaacttcctcctgcatctcggagcaggcctctgcatcatcatttctcctctgcaagtgtatcttcttcgggcacgtgggaaggtcttagtgaacctgcggtatttagggactggatcctctttcctctttattgtcaaagttgtggcttgccgaggtcagggcagagtatgattatgacatgttagcaatcgtcacctctcattttcaagtaaatatatttttatgcagtttgagctttcattcatgtcatttattaatttgttctttcgttaacacattcatttgtggagcatttggcctataaaagagaagaaacccttccttagcattaaggtargagataaaacaaaatgtacagagacacatgcttggttttgtacaactttgaaagtttctaaaataaaataaggtctaacttggaaaaccaaaaccaatcactgagatattttcataatctaaaaagtcagtttcaaaagaacttccaaatgttttaaaatatgactatccttaagaataatgatgtagcattccaaggttttagtgttcaaccagcatttattaccacctgctgggtgcctgaggcaggacatttgtaatgagagctataaacatgaattgaaaatccgctgcccataggttcacagttcctgtcaaagcatagagccccctgtagatagagccccctgtataagatgtcctgtgttctgggcgagaggatacactaggtctg

SEQ ID NO: 72707 - DNA, 2324 bp, Homo sapiens
catcagtgtaacatcctcattagcattctggtagttacatttacttattccagagcaaaattaatacatgataagaagtggaatattttctattgatatctagggtattatgacaacaaccttccttagaaaagaaacagtgtgttatgaggacagtggatgctacaacattatttgccttcaaggcattgcaaacaaccggaatcaattgaataaccttctcaagcacaagccaacagtgaaatgagagtcatttatctgaaacagcaggcaagagcttcattggtacactcggaaggtggctcattaaccctgccgaaggtttgctccatctgatcagggcataaatgtttcattggcccaataaccaaggtcttagagtttcacagtgttttctctccaatagctaatatggggagcattgctgacattctgcccatggttgccaaggctgaaatcaaacgtgctttgaataatactataaaaattttgaaatgaatgtttgccgtaggaaccaatgttctactgtgggctctatacaaagccgcttaaggtgggagggagcaaacttttcaagttggttttaggtaacagaaacagacgtctttattgtatttgtctggaaaaaaagtaaggaaaatcccaacattatctgttctggtcaagaagtataaggctcagtcccgttttatttctctccttctcctttggatcctttttccttattcttgactctatacatggagaaaaagttcaagtgcatctaaagcagtaatgctgggaacttgtcaacttattcccatgatgctactgttgcttataaagcattttgaggattcttgtattcagagctagtgataagccgcaagaggaagtcagtcttgctggtgtacagctgcattttgggctcatgtatagaagagttaacatggatttcagagtctcccaggtgtttgaaatccaggctctgctctcaggacctgtgaggtcttagataagttgctcaatctctttgagcctcagttttctgagtacaatggcacataactcacaggactgcggtgtggatgaattgcgatgatgtgtatgaactcagctcagggtcttctttccttccttctttcttccctgcctctgaatttacaccaagctttacttctgaggtctgactcctgagaagctagacacacagtgaagcttgatgcttgctagaaactgagggactagacttgagtgttagggaacctgggaatgacatctgtcatccatccgggaaggccgaggaggaaagcgaggcagcgcagcagagcaggaagtggtgcccatggaggccacttttgggctggagcctgcttaaggcactttagtgctgagtcatttggggcccaaggtaggggcagataggagagaaggagggcagttatcgcctagtcacaggggcagatagaagagaaggagggcagttatcacctaatcacaggggcagatagaagagaaggacggcagttatcgcctagtcaggaatttaacaatctctatttcctttcaaacctcgtttcatcccttccatcccagtcaaattcacaggaaattaaacttcctcctgcatctcggagcaggcctctgcatcatcatttctcctctgcaagtgtatcttcttcgggcacgtgggaaggtcttagtgaacctgcggtatttagggactggatcctctttcctctttattgtcaaagttgtggcttgccgaggtcagggcagagtatgattatgacatgttagcaatcgtcacctctcattttcaagtaaatatatttttatgcagtttgagctttcattcatgtcatttattaatttgttctttcgttaacacattcatttgtggagcatttggcctataaaagagaagaaacccttccttagcattaaggtaggagataaaacaaaatgyacagagacacatgcttggttttgtacaactttgaaagtttctaaaataaaataaggtctaacttggaaaaccaaaaccaatcactgagatattttcataatctaaaaagtcagtttcaaaagaacttccaaatgttttaaaatatgactatccttaagaataatgatgtagcattccaaggttttagtgttcaaccagcatttattaccacctgctgggtgcctgaggcaggacatttgtaatgagagctataaacatgaattgaaaatccgctgcccataggttcacagttcctgtcaaagcatagagccccctgtagatagagccccctgtataagatgtcctgtgttctgggcgagaggatacactaggtctg

SEQ ID NO: 72708 - DNA, 1906 bp, Homo sapiens
tattcaaatattaacagtttaagtaaaatttattttcttcacaattagaaaacatgaaaaggtacatataatgactttggtgttttgaatttaagaatcaatgtctgagggacccttgtgtgtgaaaataaatattcatatacatttttagttgtttaatgtttgatgtattacactggtttctattaaacaaaactttaaaaactgattttcttgtgtatttaaatctgggttataaattttgttagcttaactcccgtaccaaatataacgtttatttataacttctttttggttgattcttttggaaaacctggaatatcataacatttagacaaaatatttataaataaaatgattacaaaatatgttaaacttatatcacatccagttaaaaacgtgctgataacatggatttaatttcttagtcaagtcacaagggctgggaggtctctcatctggatggctcctggtgagccctggaacatggcggtgtggtccaaggcgatttaaacctgtgccacagattattcagctgagtcctttttgcaatagatttttaagaccctctttcattcaaatttaaatttttgaagcttagtgtccttcctaaaaataaaatgaaatgaactttcctaaagtgttgtattattagtgctatctaagtcatcatcctggccttatgaaatattggcattttctactggtgtaacttttattagaagcatctcatcataactagtaggacatctcaaaggggttgcaacacattagcaagtaatgaaatcaatgtattgtttcctcaagggtattgggtgggtgggggggaaaaggaatacacacagacacacagagaaaggggtaaaagagaatacraaatatcaaggtgcataacacatggataagtaagtattgttaagtacaactcttgcttcagttatacatatgtttgtgctgggctggcaatgtaaaaatgcatttctcaatggattgggtcaaaatagttttcaagtcactgacttaagattttatcctgggggatgacgaaattagtctaagtgattacctctttctggtgggatgtttgtttaatctgtcatcttagaaaacactgctgtgttcctattttcagttcattattgtatactaccaaagctgctactcaaaggctgagcttatcttctatttgcttgttctgcgtggtgcccactggtccttactgtttttgatatagttatctactttttaaagacagtttagcactcacatatttttgttcaatctttacttctcacacaaacagaaaaaggaaattatgtattctgtatcaacaaagatttaacaaaacatccgtatactacaactgtctacttactaaaattgagaattagtatattatcttttttcttcttatattaaaactatcttttcatacactattttaagcttatgagctgaaaatcttagagataatttacttcagtgaactattattatttatattttatatgcaaattgtcacaacttggtcttagctagctccactgtttgcttgcagtctgtaatgtttctgaaagcatgcatgatttctgctacaaagaagatacttatgaactattctgttttcctactctgtgacctaaaattgactggttctttaatggaaatgagatccatatctaggcactaagggtatagagaaataattgtgggcaaaagtactaatgcgatttttgttgcactgtattttgagatctctttaaggctctatgttcttgctggtttattccaatttaatgtattacactattgcatcctactttttctttttaaatatattatgattgactgttacagactttgtgtgaaactgacaggaagtttttataaacaataacagcactta

SEQ ID NO: 72709 - DNA, 642 bp, Homo sapiens
ctcggggagctgtgaaagaggatcacttgagcccaggagttcaaggttatagtgagctatgatcatgccactgcactctagcctgagtgacagagcaaggtcctgtctcaaaaaaagaccgaaacaaaacaaaaggcaacatgtgaaggtacaaagtgatatatggagaacggtctctctcatgatagaccccagccatctattcatgcctgctttccagaggcaatgcctatcataatacttcttaaaaatgtctctacaggaagactttctagcatagtaawcttttttttttttttttgagacggagtctcgctctgtcgcccagactggagtgcagtgacacgatcttggctcactgcaacctccgcctcctggattcaaacaattctctacctcagcttccagagtagctggggttacaagaacctgccaccatgaccgaataattttttttgtatttttagtagagacggggtttcaccacattggccaggctggtcttgaactcctgacctcgtgatccacccgcctctgcctcccaaagttctgggattacagatgtgagccaccgctcccggccagtaatcttaactatgattttagattgaaagcaaaatgagcagaatctatgtctatgtt

SEQ ID NO: 72710 - DNA, 642 bp, Homo sapiens
ctcggggagctgtgaaagaggatcacttgagcccaggagttcaaggttatagtgagctatgatcatgccactgcactctagcctgagtgacagagcaaggtcctgtctcaaaaaaagaccgaaacaaaacaaaaggcaacatgtgaaggtacaaagtgatatatggagaacggtctctctcatgatagaccccagccatctattcatgcctgctttccagaggcaatgcctatcataatacttcttaaaaatgtctctacaggaagactttctagcatagtaaacttttttttttttttttgagacggagtctcgctctgtcgcccagactggagtgcagtgacacgatcttggctcactgcaacctccgcctcctggattcaaacaattctctacctcagcttccagagtagctggggttacaagaacctgccaccatgmccgaataattttttttgtatttttagtagagacggggtttcaccacattggccaggctggtcttgaactcctgacctcgtgatccacccgcctctgcctcccaaagttctgggattacagatgtgagccaccgctcccggccagtaatcttaactatgattttagattgaaagcaaaatgagcagaatctatgtctatgtt

SEQ ID NO: 72711 - DNA, 777 bp, Homo sapiens
ttccattttaagaaagctatttacactccaatttgcaagttggactttacaaaaattaaaacatttagaaaatatagtaactatgattgctttaaaaagtaatggctttttatggtaaggaaataaattgaagctctgtgttggaaagtgcagaaaacaaatcagcactctttataaatagattttactgctggtttagaaattaccttatgtgctttatagatgatggaaaataaaatcagctgcagttagcagtgtgcatgcatcgtattttctgtgtcactttcagaaagattatggaatattggcaggtcaggattctcaaaatgataagttctaagaagaggctaaatgaaaaagaattttaaaagcaagcctagttgtttaacatatacatggactagttatggggaaatcctggactrgaagctagcagacctatgttctgacttttactaagtcattggctgctacagccggccaagcagacataactgccaaggctgcctgggagttgcattgattggcaattggcacagggagagaggacaactgccagagtaatggccaaatattcagggtttcatgttcagtgaagcaggacgtgcctttgtatcccaaggtcaaaactgacgctagaatctggacctcctggctgaatgcgagtctacagtctgatgagtacgatgaagtagtctcagaaatccaagccagccagaacccatgaggtgttctctgcagatattggctggtgagctgcattaagatgttttattc

SEQ ID NO: 72712 - DNA, 777 bp, Homo sapiens
ttccattttaagaaagctatttacactccaatttgcaagttggactttacaaaaattaaaacatttagaaaatatagtaactatgattgctttaaaaagtaatggctttttatggtaaggaaataaattgaagctctgtgttggaaagtgcagaaaacaaatcagcactctttataaatagattttactgctggtttagaaattaccttatgtgctttatagatgatggaaaataaaatcagctgcagttagcagtgtgcatgcatcgtattttctgtgtcactttcagaaagattatggaatattggcaggtcaggattctcaaaatgataagttctaagaagaggctaaatgaaaaagaattttaaaagcaagcctagttgtttaacatatacatggactagttatggggaaatcctggactagragctagcagacctatgttctgacttttactaagtcattggctgctacagccggccaagcagacataactgccaaggctgcctgggagttgcattgattggcaattggcacagggagagaggacaactgccagagtaatggccaaatattcagggtttcatgttcagtgaagcaggacgtgcctttgtatcccaaggtcaaaactgacgctagaatctggacctcctggctgaatgcgagtctacagtctgatgagtacgatgaagtagtctcagaaatccaagccagccagaacccatgaggtgttctctgcagatattggctggtgagctgcattaagatgttttattc

SEQ ID NO: 72713 - DNA, 736 bp, Homo sapiens
atcaatactgatgggaaaacattttcagtagataagcacacctgataaatataagagacctaaagtccattctcctttccattgcaatccctgtcagttgaaaaacggcaccttgcaaaggctrtgtctgatttgtgtttttcaaattcttctaaaattaagtgtcaagatgttaaggtaaagaaaaaaatctgtagagaagacaaaaaagcaaaccattgaaatggtctaagatgccccagaaatagacatcctctttattctctataatgccactgggctgttgcgtggagctgatggccattgctgttacagcaagtgctcacttcaagtgcttggtaggttctgggaaaatgtggctctaagcaaaacaatgtaagacaagaccaattttcccacaggttaattgatataaacaaaagtaaagttcctatgtcatattacttgtcatagaaaacatctacaaaattctaaatattaaagatcaaaacacttctaatattgaacactgacacacatgtgagctctacattcacttaagaaagattaataaaaacaagtaaaataatttatccaattattccagttttgggttgtgggtggccagagctgtctcagcagctccgggtgccaggtggtcaccagccctggacaggacacactaccatggcaggatcacacacacacacacacacacacacacacacacacacacaccccacactcacccatacta

SEQ ID NO: 72714 - DNA, 736 bp, Homo sapiens
atcaatactgatgggaaaacattttcagtagataagcacacctgataaatataagagacctaaagtccattctcctttccattgcaatccctgtcagttgaaaaacggcaccttgcaaaggctatgtctgatttgtgtttttcaaattcttctaaaattaagtgtcaagatgttaaggtaaagaaaaaaatctgtagagaagacaaaaaagcaaaccattgaaatggtctaagatgccccagaaatagacatyctctttattctctataatgccactgggctgttgcgtggagctgatggccattgctgttacagcaagtgctcacttcaagtgcttggtaggttctgggaaaatgtggctctaagcaaaacaatgtaagacaagaccaattttcccacaggttaattgatataaacaaaagtaaagttcctatgtcatattacttgtcatagaaaacatctacaaaattctaaatattaaagatcaaaacacttctaatattgaacactgacacacatgtgagctctacattcacttaagaaagattaataaaaacaagtaaaataatttatccaattattccagttttgggttgtgggtggccagagctgtctcagcagctccgggtgccaggtggtcaccagccctggacaggacacactaccatggcaggatcacacacacacacacacacacacacacacacacacacacaccccacactcacccatacta

SEQ ID NO: 72715 - DNA, 736 bp, Homo sapiens
atcaatactgatgggaaaacattttcagtagataagcacacctgataaatataagagacctaaagtccattctcctttccattgcaatccctgtcagttgaaaaacggcaccttgcaaaggctatgtctgatttgtgtttttcaaattcttctaaaattaagtgtcaagatgttaaggtaaagaaaaaaatctgtagagaagacaaaaaagcaaaccattgaaatggtctaagatgccccagaaatagacatcctctttattctctataatgccactgggctgttgcgtggagctgatggccattgctgttacagcaagtgctcacttcaagtkcttggtaggttctgggaaaatgtggctctaagcaaaacaatgtaagacaagaccaattttcccacaggttaattgatataaacaaaagtaaagttcctatgtcatattacttgtcatagaaaacatctacaaaattctaaatattaaagatcaaaacacttctaatattgaacactgacacacatgtgagctctacattcacttaagaaagattaataaaaacaagtaaaataatttatccaattattccagttttgggttgtgggtggccagagctgtctcagcagctccgggtgccaggtggtcaccagccctggacaggacacactaccatggcaggatcacacacacacacacacacacacacacacacacacacacaccccacactcacccatacta

SEQ ID NO: 72716 - DNA, 736 bp, Homo sapiens
atcaatactgatgggaaaacattttcagtagataagcacacctgataaatataagagacctaaagtccattctcctttccattgcaatccctgtcagttgaaaaacggcaccttgcaaaggctatgtctgatttgtgtttttcaaattcttctaaaattaagtgtcaagatgttaaggtaaagaaaaaaatctgtagagaagacaaaaaagcaaaccattgaaatggtctaagatgccccagaaatagacatcctctttattctctataatgccactgggctgttgcgtggagctgatggccattgctgttacagcaagtgctcacttcaagtgcttggtaggttctgggaaaatgtggctctaagcaaaacaatgtmagacaagaccaattttcccacaggttaattgatataaacaaaagtaaagttcctatgtcatattacttgtcatagaaaacatctacaaaattctaaatattaaagatcaaaacacttctaatattgaacactgacacacatgtgagctctacattcacttaagaaagattaataaaaacaagtaaaataatttatccaattattccagttttgggttgtgggtggccagagctgtctcagcagctccgggtgccaggtggtcaccagccctggacaggacacactaccatggcaggatcacacacacacacacacacacacacacacacacacacacaccccacactcacccatacta

SEQ ID NO: 72717 - DNA, 736 bp, Homo sapiens
atcaatactgatgggaaaacattttcagtagataagcacacctgataaatataagagacctaaagtccattctcctttccattgcaatccctgtcagttgaaaaacggcaccttgcaaaggctatgtctgatttgtgtttttcaaattcttctaaaattaagtgtcaagatgttaaggtaaagaaaaaaatctgtagagaagacaaaaaagcaaaccattgaaatggtctaagatgccccagaaatagacatcctctttattctctataatgccactgggctgttgcgtggagctgatggccattgctgttacagcaagtgctcacttcaagtgcttggtaggttctgggaaaatgtggctctaagcaaaacaatgtaagacaagaccaattttcccacaggttaattgatataaacaaaagtaaagttcctatgtcatattacttgtcatagaaaacatctacaaaattctaaatattaaagatcaaaacacttstaatattgaacactgacacacatgtgagctctacattcacttaagaaagattaataaaaacaagtaaaataatttatccaattattccagttttgggttgtgggtggccagagctgtctcagcagctccgggtgccaggtggtcaccagccctggacaggacacactaccatggcaggatcacacacacacacacacacacacacacacacacacacacaccccacactcacccatacta

SEQ ID NO: 72718 - DNA, 736 bp, Homo sapiens
atcaatactgatgggaaaacattttcagtagataagcacacctgataaatataagagacctaaagtccattctcctttccattgcaatccctgtcagttgaaaaacggcaccttgcaaaggctatgtctgatttgtgtttttcaaattcttctaaaattaagtgtcaagatgttaaggtaaagaaaaaaatctgtagagaagacaaaaaagcaaaccattgaaatggtctaagatgccccagaaatagacatcctctttattctctataatgccactgggctgttgcgtggagctgatggccattgctgttacagcaagtgctcacttcaagtgcttggtaggttctgggaaaatgtggctctaagcaaaacaatgtaagacaagaccaattttcccacaggttaattgatataaacaaaagtaaagttcctatgtcatattacttgtcatagaaaacatctacaaaattctaaatattaaagatcaaaacacttctaatattgaacactgacacacatgtgagctctacattcacttaagaaagattaatraaaacaagtaaaataatttatccaattattccagttttgggttgtgggtggccagagctgtctcagcagctccgggtgccaggtggtcaccagccctggacaggacacactaccatggcaggatcacacacacacacacacacacacacacacacacacacacaccccacactcacccatacta

SEQ ID NO: 72719 - DNA, 601 bp, Homo sapiens
ataaaagtgttatactgcagatattctaaaacctgaagacattttctcagtttattttttagcaacaattaatatttttctgatgctagaggttttctcattttaataattcaaaaatggtgtctgttttatcttataagtggctctccatggaaaatttaacttgttttttctcctttcttttctttttccaatagttttacctagccacacttgtggaaatcctggagaaatcctgaaaggagttctgcatggaacgagattcaacataggagacaaaatccggtacagctgcctccctggctacatcttggaaggccacgccatcctgacctgcatcgtcagcccaggaaatggtgcatcgtgggacttcccagctcccttttgcagaggtacagtgctacaagggggctggtgagcagactccagggcagggcaatggttttggagatgcttttatgaaagtttccacttaaatgaaaataatacatgttgagctgactcttacaatgtcagctsattctgctcctgaaagcaatattacatgttattactatgtaagaaataacatgtaatgtgtaataacatttaatattgcatg

SEQ ID NO: 72720 - DNA, 1120 bp, Homo sapiens
tgtggaaggcctgaggcagacctacatgtgcaggatggcacccgcctgggcagagagagaagcccattagcagagtccaacttcccccttcaatatcaaagcaaaataatcaatgaaaaaagacaggaggggcctaaaatccttttgacctgcagcaaattaagtttaatcctctccagccagctgtgtggctgtttgggtacaactgggctgtctactaggaaactgacagccccctgaaacccacagacgggggccaagaggagaagtcccagccagcagctggaatgctgcaactgatgaggcatcccagagtccctcactgtgcagggctggacccttggggcagaaggctggcctcctggcctcaatgcctattggcaatggaaccaagcaaaaccttaggagacagaaccaatcctgtttccctcacactgagctaaattctggaagaaacagtcattctccctggatgaagtcgactaaacccaaacttctactagcccagctgtgaaccagcacttccatttccaaaacagtacattctggtgggaactgaagctcctgaagtgggtgacttgtccaggcttccaggggtggtggaggtcaaaatcaagactggaagaatcttgatggtgatgcctaacacgcactgagcacttctgagtgccaggccctgcactgagtgcattacatcatctctcagcccatgctctctgcacccctctgagatgggcagcattatccccactgcacacatggtgaagcaaaggtctgcaaaatggcttgcccaaggtcacacagctctcactgragaacttgcatccaaacccagaaatgcccgcaccccctcctctcttgcttctgctagcccagccaaagatgcagctatcgactgccaggagagagagcttcaaatgcccagagaaaatccccaagtaaatcagactacaatttaataagcttgggtttaaaagaaggcataatcagcagactaaaatataataagataaaataaaataaatgaaataaagaaatgaaaaagaatgccagtagcagggatgacaatgaccaccatggctttgagccacatgtaggaaccctgaaaaagctcccccaa

SEQ ID NO: 72721 - DNA, 1120 bp, Homo sapiens
tgtggaaggcctgaggcagacctacatgtgcaggatggcacccgcctgggcagagagagaagcccattagcagagtccaacttcccccttcaatatcaaagcaaaataatcaatgaaaaaagacaggaggggcctaaaatccttttgacctgcagcaaattaagtttaatcctctccagccagctgtgtggctgtttgggtacaactgggctgtctactaggaaactgacagccccctgaaacccacagacgggggccaagaggagaagtcccagccagcagctggaatgctgcaactgatgaggcatcccagagtccctcactgtgcagggctggacccttggggcagaaggctggcctcctggcctcaatgcctattggcaatggaaccaagcaaaaccttaggagacagaaccaatcctgtttccctcacactgagctaaattctggaagaaacagtcattctccctggatgaagtcgactaaacccaaacttctactagcccagctgtgaaccagcacttccatttccaaaacagtacattctggtgggaactgaagctcctgaagtgggtgacttgtccaggcttccaggggtggtggaggtcaaaatcaagactggaagaatcttgatggtgatgcctaacacgcactgagcacttctgagtgccaggccctgcactgagtgcattacatcatctctcagcccatgctctctgcacccctctgagatgggcagcattatccccactgcacacatggtgaagcaaaggtctgcaaaatggcttgcccaaggtcacacagctctcactgaagaacttgcatccaaacccagaaatgcccrcaccccctcctctcttgcttctgctagcccagccaaagatgcagctatcgactgccaggagagagagcttcaaatgcccagagaaaatccccaagtaaatcagactacaatttaataagcttgggtttaaaagaaggcataatcagcagactaaaatataataagataaaataaaataaatgaaataaagaaatgaaaaagaatgccagtagcagggatgacaatgaccaccatggctttgagccacatgtaggaaccctgaaaaagctcccccaa

SEQ ID NO: 72722 - DNA, 1120 bp, Homo sapiens
tgtggaaggcctgaggcagacctacatgtgcaggatggcacccgcctgggcagagagagaagcccattagcagagtccaacttcccccttcaatatcaaagcaaaataatcaatgaaaaaagacaggaggggcctaaaatccttttgacctgcagcaaattaagtttaatcctctccagccagctgtgtggctgtttgggtacaactgggctgtctactaggaaactgacagccccctgaaacccacagacgggggccaagaggagaagtcccagccagcagctggaatgctgcaactgatgaggcatcccagagtccctcactgtgcagggctggacccttggggcagaaggctggcctcctggcctcaatgcctattggcaatggaaccaagcaaaaccttaggagacagaaccaatcctgtttccctcacactgagctaaattctggaagaaacagtcattctccctggatgaagtcgactaaacccaaacttctactagcccagctgtgaaccagcacttccatttccaaaacagtacattctggtgggaactgaagctcctgaagtgggtgacttgtccaggcttccaggggtggtggaggtcaaaatcaagactggaagaatcttgatggtgatgcctaacacgcactgagcacttctgagtgccaggccctgcactgagtgcattacatcatctctcagcccatgctctctgcacccctctgagatgggcagcattatccccactgcacacatggtgaagcaaaggtctgcaaaatggcttgcccaaggtcacacagctctcactgaagaacttgcatccaaacccagaaatgcccgcaccccctcctctcttgcttctgctagcccagccaaagatgcagctatcgactgccaggagagagagcttcaaatgcccagagaaaatccccaagtaaatcagactacaatttaatmagcttgggtttaaaagaaggcataatcagcagactaaaatataataagataaaataaaataaatgaaataaagaaatgaaaaagaatgccagtagcagggatgacaatgaccaccatggctttgagccacatgtaggaaccctgaaaaagctcccccaa

SEQ ID NO: 72723 - DNA, 1120 bp, Homo sapiens
tgtggaaggcctgaggcagacctacatgtgcaggatggcacccgcctgggcagagagagaagcccattagcagagtccaacttcccccttcaatatcaaagcaaaataatcaatgaaaaaagacaggaggggcctaaaatccttttgacctgcagcaaattaagtttaatcctctccagccagctgtgtggctgtttgggtacaactgggctgtctactaggaaactgacagccccctgaaacccacagacgggggccaagaggagaagtcccagccagcagctggaatgctgcaactgatgaggcatcccagagtccctcactgtgcagggctggacccttggggcagaaggctggcctcctggcctcaatgcctattggcaatggaaccaagcaaaaccttaggagacagaaccaatcctgtttccctcacactgagctaaattctggaagaaacagtcattctccctggatgaagtcgactaaacccaaacttctactagcccagctgtgaaccagcacttccatttccaaaacagtacattctggtgggaactgaagctcctgaagtgggtgacttgtccaggcttccaggggtggtggaggtcaaaatcaagactggaagaatcttgatggtgatgcctaacacgcactgagcacttctgagtgccaggccctgcactgagtgcattacatcatctctcagcccatgctctctgcacccctctgagatgggcagcattatccccactgcacacatggtgaagcaaaggtctgcaaaatggcttgcccaaggtcacacagctctcactgaagaacttgcatccaaacccagaaatgcccgcaccccctcctctcttgcttctgctagcccagccaaagatgcagctatcgactgccaggagagagagcttcaaatgcccagagaaaatccccaagtaaatcagactacaatttaataagcttgggtttaaaagaaggcataatcagcagactaaaatataataagataaaataaaataaatgaaataaakaaatgaaaaagaatgccagtagcagggatgacaatgaccaccatggctttgagccacatgtaggaaccctgaaaaagctcccccaa

SEQ ID NO: 72724 - DNA, 1120 bp, Homo sapiens
tgtggaaggcctgaggcagacctacatgtgcaggatggcacccgcctgggcagagagagaagcccattagcagagtccaacttcccccttcaatatcaaagcaaaataatcaatgaaaaaagacaggaggggcctaaaatccttttgacctgcagcaaattaagtttaatcctctccagccagctgtgtggctgtttgggtacaactgggctgtctactaggaaactgacagccccctgaaacccacagacgggggccaagaggagaagtcccagccagcagctggaatgctgcaactgatgaggcatcccagagtccctcactgtgcagggctggacccttggggcagaaggctggcctcctggcctcaatgcctattggcaatggaaccaagcaaaaccttaggagacagaaccaatcctgtttccctcacactgagctaaattctggaagaaacagtcattctccctggatgaagtcgactaaacccaaacttctactagcccagctgtgaaccagcacttccatttccaaaacagtacattctggtgggaactgaagctcctgaagtgggtgacttgtccaggcttccaggggtggtggaggtcaaaatcaagactggaagaatcttgatggtgatgcctaacacgcactgagcacttctgagtgccaggccctgcactgagtgcattacatcatctctcagcccatgctctctgcacccctctgagatgggcagcattatccccactgcacacatggtgaagcaaaggtctgcaaaatggcttgcccaaggtcacacagctctcactgaagaacttgcatccaaacccagaaatgcccgcaccccctcctctcttgcttctgctagcccagccaaagatgcagctatcgactgccaggagagagagcttcaaatgcccagagaaaatccccaagtaaatcagactacaatttaataagcttgggtttaaaagaaggcataatcagcagactaaaatataataagataaaataaaataaatgaaataaagaaatgaaaaagaatgccagtagcagggatgacaatgaccaccatggctttgagccacaygtaggaaccctgaaaaagctcccccaa

SEQ ID NO: 72725 - DNA, 678 bp, Homo sapiens
tgccatcagcatccttcattaagcaccttcttttgcccccagcctctgcagttgccctcaccacacacgcaacctccccacacacccctctggctcccacctctctctccgacctgcatccacrtgtgcatacccagcccattgggagtgcccctcacccacaccccaccgcaccccacccacgagtaaagcccacccgccccccgccacctgctccccgtgctcacctgcactgtccagcccctgaagaccccctcgcaggctggaggttcctgccaccctcagcacatgcccctggggaccacatgtggtgagttcacacacccatccccgagcccactccccatctctctgtcgctgcccacagccttccccaggcttggagcacacacttgttcaccctgtttaagatcaaaaataaactctctggaacctgttcaaaggttaatgtgcatcctcccttaattattgatttgttgattacagatgcttgggtaggacattcattgtgtccactgtgccaagggcctaactctagaatccctgtcctttttgggagaaagttggcccattgatcttttgggaaggagctatttgagtgttagataaaacctgtcctgccacaggacaggtcatagactaaatattgtgctccctgctgaagccctcattagccct

SEQ ID NO: 72726 - DNA, 569 bp, Homo sapiens
tgctctgtagaagggctgggcctgtaggttcctgcctcgcatgtaccctagagatgagaggctgcctggcagaactgccggtggctgtggcttgggctgtcggggtcttggggcctggatgcaatgtgatctgaccctgggctgcgcagaccacccagctcatagccctggctgccrccagtgcctgcaatttctcaaggtgaaagcactctccagcgggtcattcgtccgcgtctgagtggttttctgttcgtggaatcatttatttctggtgtcagggaggcccagggcgacttttcccactggctgtaaatgctccgagcatcatcgattcgtctactcccatctccggaaatctgctggagcagcaagtctgtctgggattcctggctggaagggcatggggcagggcaggggctggggtggctttggttccctccctctcagcagaggcaagtggagggatgctgaagcctccccatctctccagagagcagcctcatggtttgggccctgtgttggagtttcctgatctgcagctggggaagtgtggctagcttggcttgtaa

SEQ ID NO: 72727 - DNA, 1024 bp, Homo sapiens
gatcctggaacagaaagaggatactagagaaaaactaaggaaatctgaataaactgtgggctttagttaatactatatcaatattgattcgttaattgtaaaaaatgtaccataggaatgagaaatgttaataataggagaaatttgatgtgggctgtatagaagtctctttactatcttagtaattttttggtaaatctaaaactattttaaaattgaaagcttattaaaaataaatttaaaatgtgattgataattaaagtcgtataattatgcagctgatgctataattaaactaataagaagaatataattagattcacatgtactgatatggaagaaagccaaagatacattatgttaaaaaaaagcaaattgcaaaaacatcgattgctgtgacccactttatgcaaaaatgtgaacacatatgcatacaccyaaatagttgaagaggtacacactaaagtatggttacttcaaagatagcagtaacattgaggtggttgtaaaaaatggagtgaatgtgggcataggcctttttttctatacatttctcttatttgaatattttataataaacatgtatttgtagatacgtataagttctttatgatttaaaatgcttttcttagatatatcttaacttcttttgctaccaagtctgccttaatccattattccctttcattaatgtaacatcaagtgtcttctccaatgcttctttttgctaggcacgtaaacaagactaagtttctcccaggttaaagaggaaaataacaaaacaaaataaaacaaaaagctaccttatgcctttcagttaccccgtattttttttctgccaaatttcctgaaggtgttgtctatggtcattatttctacttccctatgtagctttctctgtcagttcactgcaggctgtcttctgcctttacctctctactcaatccagtgtatggcaaccttcctgacagtgtggtggggagggtaaagctctgggcacatttgggctctgtgtctgagaatt

SEQ ID NO: 72728 - DNA, 1112 bp, Homo sapiens
ttacgtctaaaatgaggacagtatccttcttgccaacttctagtatagaaactgatacataacatatttttaaaaatattgatcagatgatctaaaaagcaatctcgtcatagcatcatggcaaagatgtaatccctcaccatctttcctctagattcttgcggtggtctactagtgttatagatgaactaacctccctaaagagtctcagtgtgtctgccctcacaacccttcaaatctctgtcaacacaatatccagagtgggcccattgaagcctaaaaaatgtgcatgtctcctctcctcagaaccttccagagcctactattgcacaagaatgtgtttgtgtagtgtttgtatggcatgtgtatatgtgtgtgtgagagagaatgtgtatttgtggaggtaatcctaggaatcaacaacactggagtggaaaactatggcagggaagaaaggaagccattaaagttttgttatcaagcagcatactgctgtgggcaccaggtgcctaggctcagtaggaaactcagaagggtagggtgaatatgacccagaggagttccaaccaaggttctaagaagctgagaatttggyccacactatctggcagttattggttgatggctgctttggggaaggatgtggaaggaatgcattactttctaacatgtccaatctactttatctttaagcctggcaaactgtagcagccaaagagagcgctcagttgaagacctgtcaatagggagcatacccaagaatggtgaaagccaaggagatatggatgggttgctgacagcatctactaaaatgtcttcttttcaaatatctaatgtatttgtatttcctttttaaccctatgcatcatgtaaggttctttaggaaatagaaggcatattcacaggggataattaaagagaatttaacaaaatggctatttataaatatgtaagcagttttcaagaatttcacaagttagaagaaagctagatggactaaagctatttccattgtctaaaggagcaagggtagggaacagacacttgaacctattagatgtggctttaagtaacagaaatcaggcaccgccaagctacgcctcagcagggaa

SEQ ID NO: 72729 - DNA, 520 bp, Homo sapiens
cacttacaaaaatatctttgaagaaagaaaactgcctaggaaggagaaaggaatagaaaagaaatttaaaaaatcaggtttttgtggaactgtttttcttttttctttttctcaggctcccgagtagctgggactacgggcgcctgccaccatgccaggctaayttttgttgcattttttagtagagacggggtttccctgtgttagccaggatggtcttgatctcctgacctggtgatccgcccgcctcgacctcccaaagtgctgggattacaggcggtagccaccgcgcccagccttgtggcactgtttttaagtgcagggcaagccttacagtatgtagggatttatagaaaatcatagataagaagtccttaatgaattagggtagaacttcagtgcttttggccaagggtggtcgttaaatgtttgtaacaaaaatcaaatggagtaaaattctcagaataaaccagagagcacagaagagggttcgtatggaatttccagtcaggaagaagca

SEQ ID NO: 72730 - DNA, 520 bp, Homo sapiens
cacttacaaaaatatctttgaagaaagaaaactgcctaggaaggagaaaggaatagaaaagaaatttaaaaaatcaggtttttgtggaactgtttttcttttttctttttctcaggctcccgagtagctgggactacgggcgcctgccaccatgccaggctaacttttgttgyattttttagtagagacggggtttccctgtgttagccaggatggtcttgatctcctgacctggtgatccgcccgcctcgacctcccaaagtgctgggattacaggcggtagccaccgcgcccagccttgtggcactgtttttaagtgcagggcaagccttacagtatgtagggatttatagaaaatcatagataagaagtccttaatgaattagggtagaacttcagtgcttttggccaagggtggtcgttaaatgtttgtaacaaaaatcaaatggagtaaaattctcagaataaaccagagagcacagaagagggttcgtatggaatttccagtcaggaagaagca

SEQ ID NO: 72731 - DNA, 954 bp, Homo sapiens
tgcatacaaaattacagataagcatttctttcactgtttttgttgtgcagggaaaaacatttatagaagaaatagaaactcagctggtgaatttcagatatcatcatcatcttcttcatcctgagaagatcccgcctgattagatgcactggctgaggcagcagcaagctgggcttgttgggcagcttgctgcatttgaagccattcctgttgggccaattctgcttgttgctgtctagcctaaacacccaaaacataaaaaaaaataacaattttttacaaacccacaatatatacactttggttaaatgtagattaggccaatttcagacagtttattatcatacttggatactgtccaagtactatgtaattgtcacacatctggagaacataaactctataggtaaatataattagagattgcttttttctaactacacaggtctaagaaatttctcaaacttggatctcttataaatggccctgttttatttcacgtaatttatgacctttgattcaactgaagaagttgaaaaagtggaaccaatattgtgaaaaacccacaatattccctctggctctttccctcttcttttcctttcatttcacttgactcttctgtaccctcatattacaactttgatacaawcatttttcaatctaaaatttatttatatggtttaaaagttctctagtatagtacctctacctcataggaaagaagtactgtacatgtatgcagtagctaccccattatttctttctgagtttctattacaattccctaacctactatatgcctatctctctgtgtccctcattccctctctgtaagtacacacatttgcatatacacacatacaaatatacatatccttcccgtatacacactagtaaaaagatactacttaaaatccattcatctgatatatcctctattaaaaacaacca

SEQ ID NO: 72732 - DNA, 702 bp, Homo sapiens
ggatccaggtgcaggcacagtcctgggagaccagcagttccctaggctgggaacatttgcttcagtcccccacagccccaggagccttctgagttcctgcctctgagctagtatccatgtctccctgtctgacctaccctcctcttcctgacccactccaccccacccgcacatacatgsacacctttcaacacattccccccaaggcttactaagagccagctatgaacattccctggagaactgtgacaacagggccacagcaccaatccatcagtcattcacagctggggctgggggatgagttcccagagaaccagggaaggtgagagatggggaaggacgacactggccccacctgggtctgggtgaggccgagctgcgctgccagctgggccctctcgggcagcgccaggtactgcgtgtgctggaaacgctggtttaggtgctgcagctgcaggctggagtagatggtcctcggcttgcggagctttttggcgggggcctgagggcgccgctcggagggttccggggacagccgcggcttctccgagtctggtgggcagcacaacacggtgtagggggcgaggagggagcgagggggtaggacggacagtttcataagcttatttgcatctcgtctgcatgccgtcggcagcaaatagcaaaaagcgcagccaccaggatcgcccccttggcccc

SEQ ID NO: 72733 - DNA, 707 bp, Homo sapiens
ctccctggggagcctgcttctgaggagaccccaggttatcccaagctggtgccccagccccacaccctctggaatatgggagaagggagccttgaagaaacaggtgatgatggaaggagatgtttcctcatttgtaaaatggggataatagtgcctggagtttgagcgtgtgtgtgtgtgtgtgtgtgtgtgtgtgtgtgtgtrtgtatgcacgcacaggacttggatgttgtgagtgcttgataaattccaaagggctgcagagtatgtcctgctgctgcataggggtgaagatcctctgagtccagagaagccctgagagcttagaacttaagacaagtatgcactggggatctcttggctttggaggatgcccaaagccaactgtggcagaaccctgccagaaaacccatgcctgcccttctttcctgggtctgacaagaaaggattctgtgcacatggttctaagagggaatgtctttccacttatcctgtcaactccagctcaaaagcacttcctttgggaaaccctccctcacagccaaccccacccaaaaaacattctcttcctttgatgcacaactttgatgccatccctggaaactctcctcagcactgctgtaaggctgcctccatccctgtagaggaaaatggtgatggtagaatgaaaggtttagaaggatatatatcctcacaggttcacagct

SEQ ID NO: 72734 - DNA, 1522 bp, Homo sapiens
tggatccttcataattcctgtgaccagacctctgcctccccagtacctgtcccctccacccctgaagaatctgctgtctcgggaaactccagaatggagctgggccagtgggagctggatgagatgacctggctcctccctgagtcacacccaatccttgagcaatcaggtcccaattccacggacagttcttatggtccatcccatgcttttgagagagttatggaaatcctcctctttctgctatgtgggttggggtctactttgttcttaaagagccctccatattcttttttatccaaaagttattacatagtttaggcccctcctgctgcagaaaaggactgtctcctttggtttggtcttcagtggaggtggtgaggcactggccccatcccttctatgggagtgtgcttccaagaaggatgctgggatttcccaatgactgggggaggccatgaaggttagggagctggctcagtgtcttgaaataagagatgacctataaatgtagaggaacacacagtggtgagtgggtggataaatatatagaagtgggtgatgtccaggtgagtggatggaggatgcatgtgtgagttagtgggtaagtggatggatggatgagtgggcaggtggggtttgtggatggaggagcggctgatgtttggatggatttgtgggtgtttaggtaaatggatataagggtgaatggttgaatggatagattattaggtgggtgcatgatggatggctggatggatggatggatggttgaatggatagatgggtagaagaaagaaaggaagaataggatggatgaatggatagatggatggaaggaaggaaggatgaataggtgatggaaggatgcataggcgaatgggatagtgggtggataggcatgagagtagattcgtggcagagatttgggagcctggaggagtctttaaaagacagactatacatagtgaatgagtttttcacatctaccttagttttggtcagctctcaatcatctagactgatggagagaaaccatgctatggaaaagtctagaaggtgttggcctatttcttggtctcttctgcccttcggaaaaatcttctctcgtgggactctatggcctggtttcccatgattataggagccctcatgcattgagaacatgctggatgccaggtgccttacatacatcgtcacatttaattctcacaacatcccttcaaggtagggagtacttctcccattttacaaatgaggaaactgaggctcagaaaggtgaaaggatatgctcagtattacccaggcaggatgttggaaaatcaggattcctattcaagttggcctgacttctctgcctcatgccacccctaatttctgaacaccccccyctccctgcagtcccaggcccagctggagagaatgggtccaaggagcatcaactggagggacacatcagagaggtgaaggagagggcttcagaggatgcaaaggctagaggaccagagatgggcccacatgg

SEQ ID NO: 72735 - DNA, 796 bp, Homo sapiens
atacaaacttggtaacagtctttcttacccttcatttttttctagaaatttgacttttttctcattaagtatcatgtagtaactttggctctgtgaaattttgaaaggcaatgtaatttccttcggatattcatctccgcccacctcttattatgtcaagatagttaatgtctctgggaaatattaatgtggcttcaataataatgtttttgaaagcactttcaaaaataaggattatgattctatcccagaaaagatcaccttctcttcccagttggctactttcagcttgaggagtgtaaaagaaaaataatcaagagatacaagtgtgggcatccctctaaacaggcagaaccaggcagaggagaggccacctccagggkgaggctgtgagctgacttgggtgcagtttcggcatcctgggctggtgtttgtgctaagagaaccagcaagttagcaacagcttcactggggcccagaaacagctgagacagagctgagacttcaggctggagatgccccaggtcaaactcctgagtaccattctgtaggttgcatgttcaccctgatggtagtttcttttgctgtgcagaagctctttagtttgattagatcccagttgtcaattttggcttttgttgccattgtttttggtgttttagacatgaaatccttgcccatgcctatgtcctgaatggtattgcctaggttttcttccagggattttatggttttaggcctaacatttaagtctttaatccatcttgaattaatctttgtataaggtgtaaggaag

SEQ ID NO: 72736 - DNA, 1144 bp, Homo sapiens
tttattcctaaaatacactgtcataaaattaaatgactatatcaattgccaacaatatattttatacaaatgacattttgttcccaaaaataaatcactatgggaaagatacctcacaaatcatgttttgtgaggctctaagtttcaattctaacaacatcctcacccctccccatttacagtaatctgccttagagattcgtagcttatccaattaataagctttctcatcaaaatctggcatttaactgacatgagctttctttaccaattttatcctgtgtctgtgtgtatactctgtttggaggaatgtgcatttgaatggaggctgaggcagagatggagggggaaggatgtgcaggattatcagtggcatgccttgtgtgtgagtgagcctggatgtgcctgcaatggaatttcctctggtcgttaatcatgaacatatttattacttgaaccttgtttttcccctgatgtgtgtgttaaatcatatattttccatcctaacataagtaattaagttttgagttatttatatatccctattttacttcctcattgcaaagggtaagtgaaacagaatgaactcacaagttaacacaattgtattaaggcaatgcactcagtggcaaaactaaaaactgaaacggaaaagcttgctttcagtgtctccttcttagattatttaaaaygtagaaaaaatcaagcaatatacaccaatataagagccaattccataaagtattagtgacaataaatctcctacagacagaaactttgtaagaggttcaaaatagacacagtaagagtaagtatgactgggcataatggctcacacctgtaatcccaacgctttgggaagccaaggcgagcagatcacgaggtcaggatatcgaaaccatcccggccaacgtggtgaaaccctatctctactacaaatacaaaaattagctgggtgtggtggcatgtgcctataatcccagctactcaggaggctgaggcaggagaatctcttgaacccgggaggcagagattgcagtgagctgagatcatgccactatactccagcctggagacagagagagactccatctcaaaaaaaaaaaaaaaaaaaaaaaaagattaagtgcatgtcccaaatcaa

SEQ ID NO: 72737 - DNA, 782 bp, Homo sapiens
agtctccttgacagtctcacctaaatacaaactcttctcaaaactaagttgggttaaagagattcttttataagctgcttatttgaaacttggaatgcattgtttcataaagtgagttacaaatgtactttaagtggtggttacggcaacacaagaaaaaggtcaatgatggaaaaggaatatttaaaagagtgtttacyatgtgtgaaaaaccctgttaagaactttccattgtttcctttattttttgcaacattttttattagggtgttattattccaaattatacaaactcagtaactaatgttcaaagtgactaatttgccaagtatcatgtaggttgtaaatgccaatgctgagattcaggtccaggtatgtttgattcctaagcatatgcaccttcctagcacctagaaatttgtttaatagggaaaaggtgcacacagagacgtgagttcagccttagtcagtggcatggggtttgcctccttctctttggagactcatagagggaaagatcaggagataaagggcaagacagtctggttccaccatgcttgattcacaccccaatcaatgactgtgtcagaacagaggattgacatattcgttattgctatatgagtgtgttcttgactcccaaatctggtcagtaaaagaccttgctggacattttctttcccctcctcccctttcccactgatccattgtccagccttctcagccctgctctgccttgtgaggttgacttccttgggttccataaactgactggctccctt

SEQ ID NO: 72738 - DNA, 721 bp, Homo sapiens
aaggtaggcacgttcagacagttactaggacagacgttaccacacactcaataaacaatcggaaataacaaggatgatataagaagagcggcttcctctacaattcaactctaaggaatcaatttaatatttcttacatatgctttcgttattatatctttatactttctctgcctgccttcacttatcattgctatggtgaaaggtatgcaagtaactagcctatttatctgaactcatagtctcctttttaatcaaaatttcctttaccaagcttccttccagaggtcataactcccacatctcagkctagtaaattaccttcacctcccttctaccttttatttcttttgcttttagattttgtctctgttaagtgccaactcttttgtctctggctgtagagtgtcccagaagctattatgtagagctctagacatgtaacttgataatctccaccttttaaaacaaagtctgattccttttttttttctttttttcagatgaagtctcactctgtcacccaggctggagtgcagtggcacgatctcggctcactgcaacctccgtctcctgggttcaagtgattctcgtgcctcagcctccagggtagctgggattccaggcacccaccaccacacacagggctaattttttgtaattttagtagagacggggtttcaccatgttggttaggctggtctcgaactcctgacctcag

SEQ ID NO: 72739 - DNA, 1234 bp, Homo sapiens
ttcttatctgtagttccatgttatcgaatgatccattaatttcttttacccaattatcaaatggaatgtgatacatttgtatcaattagttgcatattttagaaagcaagctttttaaaragcatcagatacatcgagcacactgaaatgtatacaaaataatataatatatatcctgaaaacattatatagataaataaatttagcattttttcatatttatttgtttctgcttttttttaatagagaaggggtcttgctatgttgcccaggctggtcttcaactcttggcctcaagcagtcctcctgcctcagcctcccaaagtgctgggattacaggtgtgagccaccacgtgtgggcttgttttggtttttgataagcagataaggcaggttcagaaatgaaatacatctgatgtaattgaagcccctttggaaccccctcagactcagttcccttccctcattctctaggacatcactccaaatgtcatgtttattatagccactcacatttttatactattcctacatatatatgtaaagcaaaaatatcatgttttacatgttttcaagcattatttaagaggtattttcttttttctttttttttttttttgagatggagtctcaatattgcccaggctggagtgcagtggcacaatcttggctcactgcaacctccacctcccgggttcaagagattcttctgcctcagcctcccaagtagctgggactacaggcgtgcaccaccatgcccggctaatttttgtatttttggtagagacagggtttcaccatattggccagctggtctcaaactcctgacctcatgatccgcccacctcggcctcccaaagtgctgggattacaggcgtgagccaccgcgcccagcccttaagtgatattttctctacatgtcatgttgtaacttttctttttatatcaagatcatactaagtttaattcactttgagacatgtagatctagtgtatttattttagtggctatgtattatttcaaattatctttttctgattgaagatcatgtcagtttctaatttttttagattacaaatcataactctgaacattctcttgtatctttttctcctctttatatatttatatttacataggcatttataatatatatgtgtgtgtatatgcttctgtgtctacatgtgtacatcatcatatactgtatatacacacatccacacatactatgca

SEQ ID NO: 72740 - DNA, 1234 bp, Homo sapiens
ttcttatctgtagttccatgttatcgaatgatccattaatttcttttacccaattatcaaatggaatgtgatacatttgtatcaattagttgcatattttagaaagcaagctttttaaagagcatcagatacatcgagcacactgaaatgtatacaaaataatataatatatatcctgaaaacattatatagataaataaatttagcattttttcatatttatttgtttctgcttttttttaatagagaaggggtcttgctatgttgcccaggctggtcttcaactcttggcctcaagcagtcctcctgcctcagcctcccaaagtgctgggattacaggtgtgagccaccacgtgtgggcttgttttggtttttgataagcagataaggcaggttcagaaatgaaatacatctgatgtaattgaagcccctttggaaccccctcagactcagttcccttccctcrttctctaggacatcactccaaatgtcatgtttattatagccactcacatttttatactattcctacatatatatgtaaagcaaaaatatcatgttttacatgttttcaagcattatttaagaggtattttcttttttctttttttttttttttgagatggagtctcaatattgcccaggctggagtgcagtggcacaatcttggctcactgcaacctccacctcccgggttcaagagattcttctgcctcagcctcccaagtagctgggactacaggcgtgcaccaccatgcccggctaatttttgtatttttggtagagacagggtttcaccatattggccagctggtctcaaactcctgacctcatgatccgcccacctcggcctcccaaagtgctgggattacaggcgtgagccaccgcgcccagcccttaagtgatattttctctacatgtcatgttgtaacttttctttttatatcaagatcatactaagtttaattcactttgagacatgtagatctagtgtatttattttagtggctatgtattatttcaaattatctttttctgattgaagatcatgtcagtttctaatttttttagattacaaatcataactctgaacattctcttgtatctttttctcctctttatatatttatatttacataggcatttataatatatatgtgtgtgtatatgcttctgtgtctacatgtgtacatcatcatatactgtatatacacacatccacacatactatgca

SEQ ID NO: 72741 - DNA, 768 bp, Homo sapiens
ccagttatctcttccctttccttggttaactaggttctgattttccactgggggcccaccccctccccagctattggtctttgtggctcaggaagccacagacagtaattcatgcccctcccccaaagaggtgtcatggttgatcacatgaccctgacctgatcaaacagcagcgatcatttccctagtcactgtgacaggtgccaggaggctgtaggtctcaatttcagaattgctggaactgggctttcagatgccacaatataagtagttagagactgatgggtatttgtgttyagaagaagatagctagtctaaaatgaagcccacacagagaaaatgggagccaaaagattggtgaagcatgacggagaggctggatgcggtgattcacacctataatcccatcactttgaaaggccaaggtgggaggatcgcttgaggcgaggagtttgagaccagcctgtgtaacaaagcgagactccatctctgcaaaaatttttttaaaaattagccgggcacagtggcacccacctacagtctcagctactaaggaggctgaggcaggagtatctcttgagcctaggaggtcgaggcagtgagctttgacagcaccactgcactccagcctgggtgacagagcaagaccttgtctctaaagagaaataaaaaaatagagagagagagagagaaggaaggagaaaggaaggaaaagagagaggtgaccagaaagagagacctgtaagatgtcaagctcctggatccagc

SEQ ID NO: 72742 - DNA, 624 bp, Homo sapiens
  misc_feature (1)...(624): n = A,T,C or G
tttttttttttttntgagacagagtcttgcttggttgcccaggctgaagtgcaatggtgtgatctcagctcactgcaacctctgcttcccaggttaaagtgattctcatgcctcagcctcctgagaagctggaactacaggagtgcgacaccacgcccggctgatttttgtatttttagtagagacgggatttcaccatgttggccaggctggtctcgaactcctgacctcaagtgatcctcccgcctcggcctcccaaagtgctgggattacaggtgtgagccaccgtgcctggcctgaacagggtcttacatgctaacctttttaggagttagattgtgatgagatccagagggttctgggggaatggccaatgtggacaagacaactggaggggggtactctgagggtttggggcggctatttaccaacaagtaatataagatatcaacattttaatgcctggtgaaagtgtactagtgcaatctgattgaatacaagtcctgaaaatggaaagattctaagaacatacacaacaatgaaataattctattagggtggtatgayctgggaaaatttatttttcttcttaaatatttctttaatgttatataacttttgcac

SEQ ID NO: 72743 - DNA, 658 bp, Homo sapiens
acatgtgatgctctgtggatagaagagagtacagggcagcgtcttttctccactgcattccactgagctctgggtatccaaggggattgggcagtgatggtgtagaagtgttgtcatctgtcttatatcagagttcctataggaggctgtgcttgggggagaaatgagggattcactctctgctcctaagaaatgtctcttacaaagaacaatgcaagagcttgttgttacaatacaaacttcaaagccagactgcctgagtttgaaccccagagctgccacaaatctcccgtgtgaccttgggcaagtgacatcctttctgtgtgcctcagtttcctcccctcgtaaaatggtcacagggttttccatattttcatagagtcattgtgaggtttggatggggtgataatttagaacagggcctggcccctacatacgggctattggctgtgatgaggaggcggaargcattggtggtgacagtggtgatggtctgaaataagaaagggtgttccccttcttatttggccacccactgggcctcttttctcacccacccactgggcctcttgtgatgtcaaccttaaatttaaagcccaatgggtgcacctccaggaaacgctcactgctgttctgaatggcttgtcagaggtggagg

SEQ ID NO: 72744 - DNA, 623 bp, Homo sapiens
ggatttttatgagaaacttctcaattttatgacattgacaactaattcaagtgaacctagccagccagttggtgcttctgctttagggcatttcttcacagtgtgactataacttcccatgtcacctgaaagctgatggagtttttctctctaaagcgcatggtagcttcacaggttggtaacatttaagtggcaattatggggcactttggaatttcagtggccagcattaaacacttccttctttgggtttcctggttttatttctcctggggtcctgttccacttctgttaattaggtccttccttccccactttccacaagggcaagtgatcaagtgggctgcccggctcataatattcattgaataattgcaaagttaggaatccaggaacttctttcccccagtaactcttttagtttgtatcttttttcctggagtgaaattaaagcaatgtttcagcaacctgtttaaccagatggagagcaaggcttctctgggaccacaaatttccctttggycctcctctttgtatctagggggttgcatttttcatttccaagggctttatttacaagttgccaaagctcccttctttctggctctgtcccttgtctatgt

SEQ ID NO: 72745 - DNA, 623 bp, Homo sapiens
ggatttttatgagaaacttctcaattttatgacattgacaactaattcaagtgaacctagccagccagttggtgcttctgctttagggcatttcttcacagtgtgactataacttcccatgtcacctgaaagctgatggagtttttctctctaaagcgcatggtagcttcacaggttggtaacatttaagtggcaattatggggcactttggaatttcagtggccagcattaaacacttccttctttgggtttcctggttttatttctcctggggtcctgttccacttctgttaattaggtccttccttccccactttccacaagggcaagtgatcaagtgggctgcccggctcataatattcattgaataattgcaaagttaggaatccaggaacttctttcccccagtaactcttttagtttgtatcttttttcctggagtgaaattaaagcaatgtttcagcaacctgtttaaccagatggagagcaaggcttctctgggaccacaaatttccctttggccctcctctttgtatctagggggttgcatttttcatttccaagggctttatttacamgttgccaaagctcccttctttctggctctgtcccttgtctatgt

SEQ ID NO: 72746 - DNA, 1971 bp, Homo sapiens
gatccagcctttaagaatttgatgtttaattaaaggtataaaactaacacacaaataactatatataaaaaaggaagcgagaagtacacagtagaggtaacaagaaagcttggtaagttaaagagagaggtcaaggttagtttcaaaagggataagaaatggaaggttggtctggaaggacaagtttcatttggttagagacaaaaaggagtagaaatccaaactgtagaaatccagacagtaatggcagggatgtgggaaagcactgcatatcaacactggaagaactggtctgtatggaacacctgtatgtaatggggctggcagaagatgaccctggaactttgggctgaagccaaatcagtaagggccttaaaggcaggctaaagaattcagccttcacttttttagtaattggaattcacccattcaagacttcacccaagggcagagtcagtatatttaactaaacacccaaagggctaagaataagacagtgtatgggatctgaagaaatcttattaaataaactcaggactttttcacttcctaaagcttctgcttcagttgccaggaagctgagagataaatttagtgctcaatttcatcataagtacttgtttcatttctttgccttctaattgattaaaaacaccaccaccaacaacaacaacagtcctatctgatgtgcactttacttttgtaagcttgatggggtatatatcacacgtaaataaaattaaagtaacatttgtcttgataccagggaaagttgtagatgcaacacttaggtttcagaagagagaaggtaatttataatttccccaccaagtaaagctcattccccaataaacattacaatgaaagatggctgcattgaattaaaaaactcagttactgcagttggtgattgctctaaaatctacaagcactgggttcagcaacctatcttcctgcctggctgtccagtttgaccttccatgtgaatctgtgctcctatcatgatgccaaaatgaccttctgaaacttacaaggcttccaaagctgcagatattttcagctgtatcagccctggctgtcacagcattctgcatagtgagtggcaaaactggagcctcctgtactggcctgaccttttaaactcacaatattttgctgctactcaaaatgagttttctcttcccgtattattttgtgatgctatttctcttgtttaattgtaaagcattgattctaagcataaaatggcatttttctttacatgaaaataaaatccttccttcgtgcatagtaaatctaacattggtagatgctgtaaaataaatatttactggcatctagatgctgtaaaataaatatttactggcatctataaataatttttttttaattattgaaaatcttgtggcaacaaaacctaataaaatgtcactatttctgcaatggccaatttgaaaattgagagatgtctaaattttataactgtttactatctgtttatgtttaccattatgtattcaatatctagcacagtgcctagaatattaaaaattcaaattaatattaggtgaatgtaacagaatctgcatgtttaatatatttcatttaccacagtactattaaactgaaatacaggtgcttaattttcttgccaaaaaattagtatattagcatggaatctttaatctgaatacacacacacacacatgtccctaagaattcttggtacttaaaggtaaaatcattttcaaatccattgatatcaggtcactgacaagctgaaaactgttatatgaataagttaaaactttaaatttgcataggtatattagaatacctttattttgtttctaattagggtctgtggatactatattttcacaagcccatacttgtattcaatacagggaaycacaaaatggtatcaatatttcagagcaaatttgtcaactaacgcattagttggagaat

SEQ ID NO: 72747 - DNA, 579 bp, Homo sapiens
ggtggtgattttgtgatctaggttgaagtccctgatccatcatttatcatatatgtaaaagtaaccagcaaactatcttacaggtacttaattcatgtttgtttcattttccttgtgatcttttcaaggtaatcattgagactctcgtttctatcattttaaaaatggagatatacacgaagatttttatttgagattatgtatttacagatgcttgtaattttttatggggggtggaatggagtctctcattctgtcacccaggctggagtgcaatggcatggtcttggctcactgcaacctccgtctcctgggttcaagcgattctcctgcctcagcctctcgagtagytgggacaacaggcgcgtgccaccacacccggctaatgtttgtatttttagtagagacggggtttcactatgttggccaggctggtctcgaactcctgactttgtgatccgcccaccttagcctccctaagtgctgggattacaggcgtgagccaccgtgcccggccgatgcttgtaatttttaagtgaagaagataaagctcagagaagtcacatacctatttaggag

SEQ ID NO: 72748 - DNA, 1267 bp, Homo sapiens
atgttgtatgtcatgttttaatgtaacattgtattttaaccacaaaggactgagagaaagatatcagaaccgtgtgtgtgtgtgtgtgtgtgtgtatgtgtgcctgtgtgtgtggtttgtgcccccaaggatttcaatcctattcagaaacaagagaaataaaaataatcaactggtagaagatacataactatttttttcaagaagataaactattcttttcaagatacataactatttttttcaagaagaatttataatggtcaaagctgtccaaagctagaattttctgtctcagaaatttgacattctgatttactaaatctaaagaatatatacatgtatgtgtgtgtatactttagaatatatatatacacacagtatatactatagtatatagaatatacttaagaatatagaatatatgtatctagaaatatatgaaatatctatgtatatatgaaatatatgaataaatgtatatagtaatatatgaaatacatacatacattctaaagtattaatacatatatttggaatgttggaataagatttcttgaattctttttgttttgtatatataatactaaagtaatttaagaaattgattgtaggttggactacatctatgctttcaagtcgttcttcattggcattccaacattccaaagtcacctaagatacataataaataactcaagtgtccaaattaatttaacacttattttgtgtctgaggtacaagatccataactctgcactttttaaaaccctagagatgactctgatatagtctgccaatggagctgctgacctagatgacctttcatatcctctcaaatttgatgtttggtttatttggtttctatcagtgcttggagtacaggaatgagtcttatgcctttctttatatgcagggccttgctcataattggtattaggtaaatgtttcataattaaaagaacaaatgaatgaytgaataaaaggacatctcattcccccccaccgacctctctgtataatactaaagacctttataaaaattagcataaaagttaatgaaatcagtatgaaagatgaaatagaatgcagtggcaagatggaaaaaaatatgggtaaaacaaactcaattatttaacatgttggggaagaaaaggagcttgggggaaaactatttaaactaagataggatgataagtttaagaaactagaacatgctgaaaaatatgcagtatatataacttgaaaccgaagaaaaagaaggcaa

SEQ ID NO: 72749 - DNA, 1971 bp, Homo sapiens
gcattaagcatttcactgttcaccttaagggcgtgctacatagactattttttttttcctagtctggcatgctctggggcataaaatgatttggttgccgaagttttgacattttaaaatatttcaatgattaaatgtttaattaagtcagtggaccctgaggtcacttggcaaagggtagtttttttgttttgttttgttttgattttgattttggatcaaattcattaaaacacacacacatacacacccaatttgagaaaagcattggtaaatctgttgggaaaaaagctttcctaaaaatattcatttactaccgtttcttgagttaatcagagttacaagaaagcggtacttctgcatagaattatctggaagtgtttcaytggaaaaaggttcattatcctaataaatgatggagtaaataacaaataacaggcctggtacaggcctggctcacacctgtaatcccaggactttgggaggccgaggtgggcagaccacttgaggctagaagctcgagaccagcctggccaacatggtaaaaccccatctctactaaaaatacaaaagttagccgggcgtggtgacatatgcttgtaatcccagcttctccaggagactgaggcaggagaatcacttgaacccaggaggcggaggttgcagtgagctgatgtcgcgccactgcactccagcctgggtgacagagcgagactccatctcaaaaaataaataaattaattaataacaaataaataaataaataacaataataaatttaaaataatatatacatgggtgggaaagctaaaaactggaacatgtaataccaaggaatcctgtagcttctatatgcatccaactctatcctaacttaagatgcagcttcactgtggactgatcaaagtcagtcagattaatagtggaaaattatgcatatttcactgtagtttaataatttagtgctgcattaaatcctttggggattaaggcattatatgattaatttattcataagcaatcgattcattgattcagggacatttgctagttagtgagctctcccatttgcagacattggttcagtttgtttgttgttagtgttttagcaaaacttggcaaagcttcctccatatagtaatacagttattctttggtatccatggaggatttgggggattggttccagaacccctgtgaataccaaaatccacagaggcttaagtcccttatataaaatagtgtagtatttgcagataacctacataccttctcccatatagtttaaatcatttctagagtacttatatttaatttacataacaatatagatgttgtacaaattgttacactgtattacttttaaatatttattatttttattgttgtattgttatttttattatgttttttaaaaatacttcaattcattgttggttgaattagagaagcagcgtgcaattaaaaaaaaaagtgtggcatgtggtgtctgtagcattgaatgaatttccatatatatttatcacgataattttttgagacagagacttatgtttttattgcatattctgtgtttttttttttttgttttttttttttatgttctcctccctttctttccccccttaaggaggtggccacattctactttctttcctcatatgagattagtttttgtgcttctagacttttgtttcccagtgtcttaacccactgaaaataatagaatttgaagaaacatgctgtatctctagactaaataaggattcttgcaggttgagtggtgtgtgtgtgtgtgtgtgtgtgtgtctgtgtctgtgtgtctgtgtgtctttgtgtatggcgctgtgtggggggagatgccatgtggcagcatctccaaagatgtggcagaacctcagtagtaatgaacacacattacactgagaagactggaagggtccagcaattccagccaatatggtaattccc

SEQ ID NO: 72750 - DNA, 1034 bp, Homo sapiens
tttttctaactgaaatatttaaaccgctttcaactggcctttgtgatgcgacgcttatcctatcactcctcgtttaacagcttctaaggtagtgtaaatgaaggcaggatgcatcatttatcatttttctgctgtagacattaggacatgcccttgcagttacaacctacttggctcaattagcatgtaatgatttcaaaattggcagtgaaattaaagggagaattgagagtacggagggaagaaagtaaaaggaaagaaggagaaaaagaacagaggaaaaaaagagagaaggaaaaaacagaaacaagaaaaagaatgtcaatgggaaagaaaataaaacagatgataagaaagraaaaatgaaagagatggagaaagaaaagtgggagattaaaagctcctttattttttaaaaaactctcagttggaaacaccttatttacattttggtaaaagggagtaccaagttcttactcagggcaatttatcatatgtcatattacttctgctttttaatgtcaacttattttatgtaaactaagataaaacttagcttccataaaaacattctttaatactcacacaagtttaagcacttgttttagaaatagatgttaactgtaatagatggccaggaagaacagaggctatgcaacactcctggaatttgtaaggatcctcgactgctaataaacagttgtctaaaaaagattccaaaaaaagaaaaaaaaaagcaaaaacaaaaccctgcaacgttttatattgcaaataaaatcccggcctgtctctttaatagctccatttatactccctctaatttcctactctccagtcagattggctgtgaccctcttacacagcaagagcattactgtctcagggtccttgctcttgtttcccctttctagagaacacttttgtttcagagtttggcacaactccttccccacagttcaagtatgtactgaaatgccacctctggggagaagttatggctaaacatcctggctcactggccttttcttgatgca

SEQ ID NO: 72751 - DNA, 1034 bp, Homo sapiens
tttttctaactgaaatatttaaaccgctttcaactggcctttgtgatgcgacgcttatcctatcactcctcgtttaacagcttctaaggtagtgtaaatgaaggcaggatgcatcatttatcatttttctgctgtagacattaggacatgcccttgcagttacaacctacttggctcaattagcatgtaatgatttcaaaattggcagtgaaattaaagggagaattgagagtacggagggaagaaagtaaaaggaaagaaggagaaaaagaacagaggaaaaaaagagagaaggaaaaaacagaaacaagaaaaagaatgtcaatgggaaagaaaataaaacagatgataagaaaggaaaaakgaaagagatggagaaagaaaagtgggagattaaaagctcctttattttttaaaaaactctcagttggaaacaccttatttacattttggtaaaagggagtaccaagttcttactcagggcaatttatcatatgtcatattacttctgctttttaatgtcaacttattttatgtaaactaagataaaacttagcttccataaaaacattctttaatactcacacaagtttaagcacttgttttagaaatagatgttaactgtaatagatggccaggaagaacagaggctatgcaacactcctggaatttgtaaggatcctcgactgctaataaacagttgtctaaaaaagattccaaaaaaagaaaaaaaaaagcaaaaacaaaaccctgcaacgttttatattgcaaataaaatcccggcctgtctctttaatagctccatttatactccctctaatttcctactctccagtcagattggctgtgaccctcttacacagcaagagcattactgtctcagggtccttgctcttgtttcccctttctagagaacacttttgtttcagagtttggcacaactccttccccacagttcaagtatgtactgaaatgccacctctggggagaagttatggctaaacatcctggctcactggccttttcttgatgca

SEQ ID NO: 72752 - DNA, 765 bp, Homo sapiens
ggacatgcacagaccagattttatctgcctcaggcagttttcctcaacctagttcattttaaatcccagtttctggtcatatactgctgcctatctgtaagtaataattccacttcatataacttgtccgtgtgtgtgtatgtgtgtgtatggggggtattctgtctcaccagactcagacagcttggtaaccaatgtacagtgaacctgcttcacagctcggattaacaaaatattataaagaagaacatgattttctgagcttcctytgggcaccatacattttgaaaaatctcagcaccaaatgttaaaatactttccctcttgtttccctcttgtcccaaaaccatcactatatactggaataggagtgagctgttcacttaaagcctgttatcaataggtttgtcaatggcctattaggtggcctggtataaaagtacagcccaagaagatgtctgtatcaaatggggactgcctcacccaatgatattcacttcaggttttgtggagattttgtgtctgtgcgtgcttcagtggggaaagacaggaagagagcgagagagaatcagcagagcagaggagagagaatacataacaaacagtgtcttcattcttagaggatataaaggctactttctacagttactgctgcatcactggagtctctgacagacactagaactggagtgagtcctattgtgtactcagttctttctgagacctgatatgcaattcttgagacatcttatgttacttgcttat

SEQ ID NO: 72753 - DNA, 1134 bp, Homo sapiens
ttcttcctttcaactggaagtataaaagtcacaagaggctgggcgtggtggctcacccctgtaatcccagcactttgggaggccgaggtgggtggatcacaatgtcaggcgattgagaccatcctggctaacacggtgaaaccccatctctactaaaaaaaaaatacaaaaaaagttagccgggcatggtggcgggcacctgtagtcccagctactcgggaggctaaggcaggagaatggcgtgaacccrggaggcagagcttgcagtgagccgagatcgcaccactactacactccagcctgggcaacacagcgagactccgtctcaaaaaaaaaaaaaaaagaaaaaggaaaaaaaagtcacaagaaacctcattacttaacatattctgtacatttaaaatacattttcattttaaataaatgtgtttaaaggtttagtataatctttaaccataataataaattgtcatgataaatccaagatgcagtttttttaaggaattatgtaactcccttttaactaagacccctggaactcctctgtaaagagaataaatagaatgtagcaatgaagagtggtatttttattggaagagaggagttaaaggaatcaaaatagtattatgtaggaaagatgtggataattcacttggtacttttgcaggtgtaaatatttacatcttttcaggtttgattgctgcattcacaccacagttactgtatagggctggtctttcttcctctaccagatcattcatcactgcctaaaggaagaagcttctttggcaaatggatgaatcatttaagatgtccgttttgttgttactatttagcattcacaaatgatttgcccctcacctttgggaactctggcaatttctcccacatttttgactatgcaaacacccactctttccgtggtaaacggtggcctggttattgcagttgtgactctggcccttgggttacctcagaatgggggtgagttaaccttctggtcgaacaatatgagaagatccagattttacaggaagatgctgagccgctccctgggtcttggcccaacagagcatcaggtctgtgtgcactattgccccccaggcccaagagaaatcttctggactgtgggaa

SEQ ID NO: 72754 - DNA, 1134 bp, Homo sapiens
ttcttcctttcaactggaagtataaaagtcacaagaggctgggcgtggtggctcacccctgtaatcccagcactttgggaggccgaggtgggtggatcacaatgtcaggcgattgagaccatcctggctaacacggtgaaaccccatctctactaaaaaaaaaatacaaaaaaagttagccgggcatggtggcgggcacctgtagtcccagctactcgggaggctaaggcaggagaatggcgtgaacccgggaggcagagcttgcagtgagccgagatcgcaccactactacactccagcctgggcaacacagcgagactccgtctcaaaaaaaaaaaaaaaagaaaaaggaaaaaaaagtcacaagaaacctcattacttaacatattctgtacatttaaaatacattttcattttaaataaatgtgtttaaaggtttagtataatctttaaccataataataaattgtcatgataaatccaagatgcagtttttttaaggaattatgtaactcccttttaactaagacccctggaactcctctgtaaagagaataaatagaatgtagcaatgaagagtggtatttttattggaagagaggagttaaaggaatcaaaatagtattatgtaggaaagatgtggataattcacttggtacttttgcaggtgtaaatatttacatcttttcaggtttgattgctgcattcacaccacagttactgtatagggctggtctttcttcctctaccagatcattcatcactgcctaaaggaagaagcttctttggcaaatggatgaatcatttaagatgtccgttttgttgttactatttagcattcacaaatgatttgcccctcacctttgggaactctggcaatttctcccacatttttgactatgcaaacacccactctttccgtggtaaacggtggcctggttattgcagttgtgactctggcccttgggttacctcagaatgggggtgagttaaccttctggtcgaacaatatgagaagatccagattttacaggaagatgstgagccgctccctgggtcttggcccaacagagcatcaggtctgtgtgcactattgccccccaggcccaagagaaatcttctggactgtgggaa

SEQ ID NO: 72755 - DNA, 2073 bp, Homo sapiens
atgtacaaaccaaacaatagccagggaaggacaaaggttcattcatgagactgtcagagctccagcagaatatagaagctaattgttttcttttaaatgggaataaaacacacaggacagattattcttgttgtttgtactgtcacaagagcagatagtgatatttgtagctcataattctttcctttattcctgctgctaaacatccactcaggccattcaatggaaaagaggcaggaaagattttactcaaacgtgaatgtttayaaaaaaggtcaacagattctcactggattttgaaattagtttcctttaaaacatatcctttctgagctacgttttcatatttaatattaatatcaaactaatcaaatttaataaattaattagatcgttagttcataaatactataacacattaactaatgtaattaatatttaatattaaaatcaccttttaataatattaacaataagtataataataatgccttttcacagtatataaaaagagagattttatataggacttctgggcatgaggtaagaagaggcaacaggctcactttgatataatggatgaatagtttaaattcccttccttattctgccagacttggcatttggattctggtaacagccatggatttaagtgtatgaagggcagcatctcatagaagtctttaatattttggtataaagccagatctgcctcaaaatgtaattggcctatttcatttctccaatttactaccatttctcaaatataagccttaccctaagccacctctgcaaactaaatgaccaaaaaaaaaaaaaaaaacagagagactgtgttcaaccactcattcatttatgaaacacttactagcatgtactatgcgtcaggtaccatgctagaggcagaagaacagagatgaataagtaattctctcttgcctcaagaagctcacagatattttcataagaccagtgatggagataatcacagtagtagctaacatgcattgagcacttactatgtggcatgcagttttctaagaactttacataaataaactcttttaatataaaataatatccttttgaagataactatattattattcccatttcattggtgcttaactcggggtacagagagattatgtgacttgcccaaagtcacccaggacaatgaagggtagagctaggatttgaacactggcaatttgacccagaagccatgctctcacacattgtgcagtgatgaacatggtgctatggaaaccatagaaagggtggttgcctcactggggctgatgatggaggcaagccagagaagatattcaaaatgaaacagagctgaggctgagccttaaagagtgagtagaagttagctaagaaaggaatgatgaagaaaaggtaaggacattataaatatggcagcatggtcaagccgaggcgtgagagtgacagacagcaaggagaaggggcatttggtggtgggtgagtgtaaaaagaatgggagatcagataacagtgaggctagagaacgttggtagggctccattcggatgggccttgagggcttccttagaaaatgtggatcttatctcattcttgacattattatacattttgtgttttgttttgtttgttttattgtttgtttatattcatttgaactacaattcatgagctgagtaaatgccaagtcacttgtctgagacatgagtagttaatgaaattaattgggttaatcaaacaaagtgtattagaaattataccaggttttagattgttagaaaatcatgactaaaattaggtgaaatggaattaaatctcacaaaagatttcaataacattttactttaagtcaaacaaaagctgttccctttggaatctaagatgtccattttggtatttaaaaatgactgcttaaaatactactgacatcaatttaacatatttatttatacttattttcaatatactgaacataattgaaaaagaaaaccttcattggtaagaggttgacgtttttgggaacaacacctttttctttccttcctttctttctttcttcctttc

SEQ ID NO: 72756 - DNA, 1606 bp, Homo sapiens
gtagaatccctgaaatataaattttaatccagggagtgacaagagtttaagtggagagacaagcaaggctccacagtcatattggcccttatatgtctggttaagggctttgtgttgatcccataggtcatggggcagcatgaatcagttttgagtagagaagtgacatggcctatctggtctaatttgtattctaggcaggtaatttgggtggtaaatggaggttagatttgaagggaacaagattagaggcaaattattgcatttgtgcagataaaagatagcgaagaaagaaaggctgtggaggaaaggaattgaaaggaaaagtgaactctgagaaacatttaagaggaagcaaaggaaagggtagaatttagagtatgtctcagattactgttctgggcaagtgtgtgattggtgtacccattcaccaagatggagaatacatgaggaagacaaggtctgggaaaaccattctgaatgtgatttcaggtatggtgaatttgaaatgcatgggacccttggcaaatatgtctagcaggtgtttgttatgagccctgaagttcagaggagaagacagcaaaacattccatgtgcttagacacaaagcaaaggcatcatcattaatattcattaatgacaaatgatgaattaatcttcattaagtcatgaatgattaattaatcttcattaatgatgatgcctttgtatttcttcataagatataatataatatcaattgaaatgttgatttaaaaggcagcatggtgtgtagaaatcagttcagactttggaactaagctgacttatattcgaaatcctattgctgaagctttaaactgtgtaatcatagataatttctctaaaatctcagcttccttatttctaaaataaggataacaataaaagactgttaaattgcctgggagaatccttctactacttccttttagaaataaaaccctgaaatttaggtgacaaatggcaacccagctgaaaactccattttgcaggtctttcttctagcaagtatggtgactggaattgactggaatgtggttggtcactcttgcctggaattaggggctttttgatcctaaaactaggaaagtcacaggcaaaccagaatgcactggtcaccctagcagaaagtgtgctatggactaagtttagaccagtgggagatgagtggaattaacatgtgaaacttccagggcatccccttaaagacaaattagcttttgctgaaatttcttttccccacttcctgctgctactacaactggctattgtaagaaccatcttgcacctagagatggaagccatgtattgaggatggcagtgctgaacaccagcctggatctctggatggccttgggaggcaaaatgctctctctaasccaggatgcctaactacctttgaactattatttgagagaaagacatacttgtgtcttattaagccactatattttgggtctcttctttagagtagtttaatccatactctaactgatacttgaacttactttgaaaagtatttaagattctatagcacatttaatgccacatttctgttattagtagatatttttccttaaaaacc

SEQ ID NO: 72757 - DNA, 767 bp, Homo sapiens
taatgtggacccattaaaaattcctaataggcatttattgtacacatctgttattccttttggaggcactaatttcagcaaagaatgtaggtttgtggttttttgaaaaacactagatcaaattattgtgtgtttaatttgaacgggaacttcatgaatgagatgtctcccaagtgcaccaagcaagagtgaggaaacgtaggtttaaaccttttgttctgtttggaagtgtaaacagtgtattcaaattcttaaatatagagaaaagatctagaacagagggacagtgaagctaatgtgtcttgagagattrgagcagacacatggaaaatacctatacctaaaagcactgaggatgtttccacctaataataaggagtatggttctgtaagctcctggaagtaaggattgtcctttaggctcagatccagagcccaacacctgtttttagtggatgatgagaatgataataatagctaacatttattgattgcttactacatgccaaacactgttctaagcactttacaggtcttaaatcacttaatcttcttaccaatcttgtggggcaagaaccgtcattattctcaatttatagatgaaaaagatgaggcccagtgaagctgtttgcccatgttcacacagctagtaaatggcataactagcattcaagtccaggcggtagagtccagagcctgtcctcttcacaccaccccacccagcgagaatggaaggagttagctgccagaggtcttaaattcctgga

SEQ ID NO: 72758 - DNA, 767 bp, Homo sapiens
taatgtggacccattaaaaattcctaataggcatttattgtacacatctgttattccttttggaggcactaatttcagcaaagaatgtaggtttgtggttttttgaaaaacactagatcaaattattgtgtgtttaatttgaacgggaacttcatgaatgagatgtctcccaagtgcaccaagcaagagtgaggaaacgtaggtttaaaccttttgttctgtttggaagtgtaaacagtgtattcaaattcttaaatatagagaaaagatctagaacagagggacagtgaagctaatgtgtcttgagagattggagcagacacatggaaaatacctatacctaaaagcactgaggatgtttccacctaataataaggagtatggttctgtaagctcctggaagtaaggattgtcctttaggctcagatccagagcccaacacctgtttttagtggatgatgagaatgataataatagctaacatttattgattgcttactacatgccaaacacygttctaagcactttacaggtcttaaatcacttaatcttcttaccaatcttgtggggcaagaaccgtcattattctcaatttatagatgaaaaagatgaggcccagtgaagctgtttgcccatgttcacacagctagtaaatggcataactagcattcaagtccaggcggtagagtccagagcctgtcctcttcacaccaccccacccagcgagaatggaaggagttagctgccagaggtcttaaattcctgga

SEQ ID NO: 72759 - DNA, 767 bp, Homo sapiens
taatgtggacccattaaaaattcctaataggcatttattgtacacatctgttattccttttggaggcactaatttcagcaaagaatgtaggtttgtggttttttgaaaaacactagatcaaattattgtgtgtttaatttgaacgggaacttcatgaatgagatgtctcccaagtgcaccaagcaagagtgaggaaacgtaggtttaaaccttttgttctgtttggaagtgtaaacagtgtattcaaattcttaaatatagagaaaagatctagaacagagggacagtgaagctaatgtgtcttgagagattggagcagacacatggaaaatacctatacctaaaagcactgaggatgtttccacctaataataaggagtatggttctgtaagctcctggaagtaaggattgtcctttaggctcagatccagagcccaacacctgtttttagtggatgatgagaatgataataatagctaacatttattgattgcttactacatgccaaacactgttctargcactttacaggtcttaaatcacttaatcttcttaccaatcttgtggggcaagaaccgtcattattctcaatttatagatgaaaaagatgaggcccagtgaagctgtttgcccatgttcacacagctagtaaatggcataactagcattcaagtccaggcggtagagtccagagcctgtcctcttcacaccaccccacccagcgagaatggaaggagttagctgccagaggtcttaaattcctgga

SEQ ID NO: 72760 - DNA, 767 bp, Homo sapiens
taatgtggacccattaaaaattcctaataggcatttattgtacacatctgttattccttttggaggcactaatttcagcaaagaatgtaggtttgtggttttttgaaaaacactagatcaaattattgtgtgtttaatttgaacgggaacttcatgaatgagatgtctcccaagtgcaccaagcaagagtgaggaaacgtaggtttaaaccttttgttctgtttggaagtgtaaacagtgtattcaaattcttaaatatagagaaaagatctagaacagagggacagtgaagctaatgtgtcttgagagattggagcagacacatggaaaatacctatacctaaaagcactgaggatgtttccacctaataataaggagtatggttctgtaagctcctggaagtaaggattgtcctttaggctcagatccagagcccaacacctgtttttagtggatgatgagaatgataataatagctaacatttattgattgcttactacatgccaaacactgttctaagcactttacaggtcttaaatcacttaatcttcttaccaatcttgtggggcaagaaccgtcattattctcmatttatagatgaaaaagatgaggcccagtgaagctgtttgcccatgttcacacagctagtaaatggcataactagcattcaagtccaggcggtagagtccagagcctgtcctcttcacaccaccccacccagcgagaatggaaggagttagctgccagaggtcttaaattcctgga

SEQ ID NO: 72761 - DNA, 425 bp, Homo sapiens
aaacttgtcactgataatttcttcarttgcttcaatagtcagaaaattgtctttcctcaacaattgggataagaatactatttaaaaaattagctctttaaaccatctggcatttgttgcggtatagggatacactgaccatattttctgagtcaaaaattggaacatgtgatctgacaaatgccagtgttctcatgggtaaaatgggacagaatatttgaaattgagactttcctggaaaattaaggacatatggcccccatatgtatggagccggctgttattttaaacgtcccgcttttttcagcccctatcaactctaagcaatagagctttttagcctaaggttcaatgtcacccaagtcctgagcccaaccttacgagggcaggcagaatggcaatacagccattcctaccagaaggaa

SEQ ID NO: 72762 - DNA, 1040 bp, Homo sapiens
taagccaaaattctgcaacatgaaaaaacaacagaaattcactgaacgatagagaaagggggtgctcatttgtgttattgatgtaatctaataaacagaaaaataaatttaaaaataagagaacagagaaacacattattcatatgaaaaaagatcatggaataaaaatgaacaaaaaaagagggtaggtcccaaagtgagtatgtaaagataaaaaggctgtaggtttaaaagaaaatgtagcaaactgagtataagtagaaacaggcagaaaaataagaggaatttgggcagtttttttaaaaaaatgccaaggtttataaatgaaaggmgcagaagtaaaatgtgttatatacaggctaaactgattctgaaaaaaacttgttcactgatataattgagaagttcttgccaaatgcaggtaaaagaacaataacgtgcataataataaagatcacagaagatcaaagattaaatataaagaaactgctatttttaaagaaaacaaataaaataatcagagacatgttaaaattttttcgtgctaaaaactataagtctatagtgttctagcaaagaataattatgagagagtaaaaaatagacttgtcctggaactagatgccagatgaatacaaaatgatgttgtcagatatttgaagagaaacattttataatccaagaatcctgaattcagaggagttattactcatgtggaaaaatcttagcaacacagtgcttagaaatattaaacacatttaccctttcttataaaaaagcactcaaagatatactctagcaaactgaaagattaattataattaaaactcagaaatagggaatatgaaatgactattacaattgagaacaaaaaacatagttttgggaatagttaaaagttttaatataaatttgaaaataaactacccacaagaaattaatttgggaaaatgttattcttatcactttcttcctcctcatcagtgttaaatgagcatatttaggaaaatggaaatacgaggggataaagaaagtaaagc

SEQ ID NO: 72763 - DNA, 1040 bp, Homo sapiens
taagccaaaattctgcaacatgaaaaaacaacagaaattcactgaacgatagagaaagggggtgctcatttgtgttattgatgtaatctaataaacagaaaaataaatttaaaaataagagaacagagaaacacattattcatatgaaaaaagatcatggaataaaaatgaacaaaaaaagagggtaggtcccaaagtgagtatgtaaagataaaaaggctgtaggtttaaaagaaaatgtagcaaactgagtataagtagaaacaggcagaaaaataagaggaatttgggcagtttttttaaaaaaatgccaaggtttataaatgaaaggagcagaagtaaaatgtgttatatacaggctaaactgattctgaaaaaaacttgttcactgatataattgagaagttcttgccaaatgcaggtaaaagaacaataacgtgcataataataaagatcacagaagatcaaagattaaatataaagaaactgctatttttaaagaaaacamataaaataatcagagacatgttaaaattttttcgtgctaaaaactataagtctatagtgttctagcaaagaataattatgagagagtaaaaaatagacttgtcctggaactagatgccagatgaatacaaaatgatgttgtcagatatttgaagagaaacattttataatccaagaatcctgaattcagaggagttattactcatgtggaaaaatcttagcaacacagtgcttagaaatattaaacacatttaccctttcttataaaaaagcactcaaagatatactctagcaaactgaaagattaattataattaaaactcagaaatagggaatatgaaatgactattacaattgagaacaaaaaacatagttttgggaatagttaaaagttttaatataaatttgaaaataaactacccacaagaaattaatttgggaaaatgttattcttatcactttcttcctcctcatcagtgttaaatgagcatatttaggaaaatggaaatacgaggggataaagaaagtaaagc

SEQ ID NO: 72764 - DNA, 521 bp, Homo sapiens
ccaataatgtaaaaataaagtgacagtttgaaaacacaaagcccatactacttctcccccggcttaccatcctcgccatcttcctcctaccaatctccctacttaccctgcttatcttctagaaatttaggttaaacaagaccaagagccttcaaagcccttagtaagtagactatacttaatttctgaaaacccaaggactgcaaaactctactctgcaaatttgagaacttttcagtcatcatttcatggaatactttttcaataatgttctttttttaaatctccttctgggcctttgataatatgcatgctagatcttttggtattgttcacaggttcttgatattctgttaattttttctcagtctattttctctstatagttaagagtggaaaaattctatagatctgttttcaaattcattgattcgatctgtcatctccattctgtgattaaacccaatcatcaggttgtattattgttatattttttagttctataatttccatttggttct

SEQ ID NO: 72765 - DNA, 1300 bp, Homo sapiens
gaaattggtatttttgaaaaggtccataggtggtaccaatgcacatcttgttttgagaaccacaggtctaatatacgtgtgggtatcatgttccaggggtgatgtccattccttatagtggaggaaagtgccctggttttgttaatcatgggagcctcacggcagtgactgcagccttggctacacattagattcatctgggaagcttttaaaaaccacaattgcagactgtacccagatcaaataaaagagaatctctggggtgagattcaaacatcggtattttttaaacttgcatgtggttgcaatgtgtacttagggctgagagccataggtttaagtttaagaagtaaaagttgtgggcaatgactaatcaactaattaacatagtcaagatcagataactcaatgcaacccaaataagtcaacaaacattcacctcaaaacatactgagctgacacttttctcctttgttctccatttctctcttttaatatatcccctcctcctttcttcctctctattccacttcgtctttcttggtcactgaattctttttttttttcctttccatgccatcaaatctattctctggctctaacatagcttaactgatagcctgtctttatctcaaattttgatattttattaatcgtgttttgagggtgtataaatttttattttttcaaaaatggcattaaaatattatattgattactgtgaaaaaaaaaaaacaaaaaatatctattttctgaccctaacttgggaatatgaaactgaacttgtatatgtctatcatatttgygagtcaaattatatcatctctgatcttattttggaaattagagctgagatattttacatttcttcaagacgctccattttctaaattaagatgcttttccagatgctttcttaaatatacacacctcttactccccattctcactccctatatccttagaatatttcagaatactattggattaaatatcaggcctctggcattaaagagctcacaggcttctggagggtcacagtgtttttctaatcctaggtttatttccctagtgtaactctgaggaacttggaagacttcctgggagcatggcagcagctgctagaaggcagcaggacagtaccatacattacacttgtagaaggcgctgagaggttaacaatgagttgtctcacgattgacaaaactttgaatggtgccaagagttaagaactgccaacaaaacttgtgactgtgaacagcagataaacttattttgagttgagtttaatttcctggga

SEQ ID NO: 72766 - DNA, 750 bp, Homo sapiens
gattacaccattctcctgcctcagcctcccgagtagctgggactacaggcgtccaccaccatgcccagctaatttttttgtatttttagtagagacggggtttcaccttgttagccaggattgttttgatctcctgaccttgtgatttgcccgcctcggcctcccaaagtgctaggattatagacgtgagccaccgcgcccggcccagtcagtgctcttaatcacttgcctatcttgagaacagtgtttttaaaaaagtttatccaataatctcatccatagacatttcagtgttatctttgctgcaaatgaaattgagctacgtacacttgagaatatttattgactatatttgcaaactgcatcatttctccatctttaaaatataccccttccccatctgttaagtttgttaagatagaatgatctcagtattttagttacagcagaggctttttgtcagagcttttactcctagttgtcagctaagtaagatttattgtataactrcaaaatagagtagtaagtacactaccaacttctcagaaaaaagtacaattatgtcaaatcacctgttctagaaaatgtaaagagcaataaaatcattaatcatttggattaccacctataatgcctatcagaaataaaatgcagtagtgtttgttgcctattatcagtaatgctgttactgttcaccaaaactgatttctcaaaatacattgttatatccatcaactgtgatgttagata

SEQ ID NO: 72767 - DNA, 1297 bp, Homo sapiens
atacatttctccatgacattgtaatgtaaggcaaaatatatttagataatttttccctttgactcattctgggcaaagcataaatgtatatggaaccttttctgtaatgcagtttgtctagctcacaattatattcaggaatrtagtgaacattaattacagttttttattatagtaaagaattttgtctttcatggaaaacaggataaaagtactgaatacatttaccccttttgttggctgttcagatacatcccgaagagagcagaggattctttttttttttttttttttttgagacagagttttcctctgtcacccaggctagagtgcagtagcgtgatctccactcagtgcagcctctgccccctgggttcaggtgatcctcccacctcagcctcccaaatagctggatcacaggtgtgtaccaccacacctggctgttattattattgttattattattattatttgtatttgtatttttagtagagacggggtcttgccatgttgcccaggctagtcttgaactcctgagctcaggtgatctgcccgtcttggccttccaaagtgctgggattacaggcctgagccactgcccttggccgagggcagaggattctaaagaggcttctttgtgttcctctggtgctagctagtatctggactttgttttacctgcttgcctgagggtagaaaccaaaggtcagaagaaggtgctaagctctgaatccagagtgcaatctttgtgtcaggatttagggagtgtgtaagtcaatctgattaggaaaaaagaaatcttcattttgagattcacaacaaacaacatttaaagttaacttcaggtgttgctcttaggaaaggaaaagctttcatatgctgatgatgggagtacacattggctaatctttttgcaaaaacggtttgtcattctctagtaaaattgaatatgtatactatcagaaggtatgtaattctagatacctgtacgtgtagatagaggaacacgtactgtatgcacagtacagatgtataagatatgtcacagcattgttgtaacagactcaaactagaaacgttctcaatacccatctatgggagagtgaataagtaagttgtagtatatccatgcaatggataattgcatactatacgaaaatctaagtgcgggaactacattttacatgcaacaacatggataactcacaaatacaaggctgagcaaaagaatacatgtagtgtgattccattgatatgaatttcaaaaacaggcaaaactaagctctgttgtttaagg

SEQ ID NO: 72768 - DNA, 1297 bp, Homo sapiens
atacatttctccatgacattgtaatgtaaggcaaaatatatttagataatttttccctttgactcattctgggcaaagcataaatgtatatggaaccttttctgtaatgcagtttgtctagctcacaattatattcaggaatatagtgaacattaattacagttttttattatagtaaagaattttgtctttcatggaaaacaggataaaagtactgaatacatttaccccttttgttggctgttcagatacatcccgaagagagcagaggattctttttttttttttttttttttgagacagagttttcctctgtcacccaggctagagtgcagtagcgtgatctccactcagtgcagcctctgccccctgggttcaggtgatcctcccacctcagcctcccaaatagctggatcacaggtgtgtaccaccacacctggctgttattattattgktattattattattatttgtatttgtatttttagtagagacggggtcttgccatgttgcccaggctagtcttgaactcctgagctcaggtgatctgcccgtcttggccttccaaagtgctgggattacaggcctgagccactgcccttggccgagggcagaggattctaaagaggcttctttgtgttcctctggtgctagctagtatctggactttgttttacctgcttgcctgagggtagaaaccaaaggtcagaagaaggtgctaagctctgaatccagagtgcaatctttgtgtcaggatttagggagtgtgtaagtcaatctgattaggaaaaaagaaatcttcattttgagattcacaacaaacaacatttaaagttaacttcaggtgttgctcttaggaaaggaaaagctttcatatgctgatgatgggagtacacattggctaatctttttgcaaaaacggtttgtcattctctagtaaaattgaatatgtatactatcagaaggtatgtaattctagatacctgtacgtgtagatagaggaacacgtactgtatgcacagtacagatgtataagatatgtcacagcattgttgtaacagactcaaactagaaacgttctcaatacccatctatgggagagtgaataagtaagttgtagtatatccatgcaatggataattgcatactatacgaaaatctaagtgcgggaactacattttacatgcaacaacatggataactcacaaatacaaggctgagcaaaagaatacatgtagtgtgattccattgatatgaatttcaaaaacaggcaaaactaagctctgttgtttaagg

SEQ ID NO: 72769 - DNA, 2575 bp, Homo sapiens
tgcgcacgctaaaaaccacccccaccagcaccacgacagtttacaaatgccatggcaatatctagaagttaccccgtatggtctggactggggactcctggttccacagaatccctgcctcttttccagaaaactcacgaataatccaccccttgtttaacatatactcaagaaatggccataaaatagccagttagcaggcccgcctgcttcccaccctccccacyccactctgcctatggggtagccacccttttattccctcatttttaataaacttgctttcactttactctgtggctcattcttgaattctttcctgcatgaagccaaaaaccaacttggcttccagggctgagcctcaattttggtattcacctgcaacagctgtagaagatccttgagtggtctgcctgtaaactccagacctatcaaattccatactccaatacacctaaatgcttcatacaatccatggatattatgaagtaataaacagacttatactgataatcatattattaacaggcttctccttggcatcaaatatggacatgagggaaactgaaggacttttccagttaccatcctaacatctgcatctaactgtgaaagggaatccactagcactggccataccctttcctttgggaatctatgttatttcttaggcccaaaatctttttggaagacttgtgtttttgggaagacagagttacccttttgaaaaattgtgcagactacactttagaattcacttcaaagggaaaaattagttttgcaaggatggtacctaacctgcaaaataaaatttaatagtcctggtgcaaaacacttctccacagggaaacattattaaactgaagctgattaacagtattattgcttctcaaaatttaaatgcatcttaacaagattctttgtatgcacaattctgatttagtagatttagggtgaggtctgagattttgcatttctaacaagctccagatgatgctattactgctagtctggggattaccctgaagtgcaaggtgatggacagtcattagagagaccaggtagaattcagaggttagatacgggacagcaaaccgggcactgagacttcagagtctccccagagttttgttctttaagatgcaatccagtcatcttttttttcaaattaaaacgtaggtttaatgcaattccaaccaatatgccaaaaggattattttggaaacagactaagttatttcaaggttattctagaataggcaacaagaaagatgaatgtgggaagggatgaaagagaatagcaaggggagtaaaattatgtgattaaggaggcatcaagcatcattaagaaaggaaataatggtggagaactagatatttggcaaaatgaacagacaaaaacacccaaaacaaaaaagaagctaggctgggtgcagtggctcatgcctgtaatcccagcactttgggaggccggggcaggtggatcatgaggtcaagagatcgagaccagcctggccaacatggtgaaaccccatttctactaaaaatacaaaaataaaattagccgggtgtggtggtgtgtgcctgtaatcccagctactcgggcagctgaggcagcagtatcgcttgaatccaggagccaagatcgcgccactgcactccaacctggcaacagagcaagactccgtgtcaaaaaaaaaaaaaagaagctaatttagatccttatctaataatatgtctcttctctgaataaattctagatgaatgaatctaacacaccaagaaaaacacaaaatccccacaagagagaagtgaatatttaacaaacctatgccactcctcccaataaattgtagatgaatgaatctaaaacaccaagaaaaacacaaaaccctcagaagagagaagtgaatatttaacaaacccaggggtgaagattaaacttagaattggaagaaacgagggaaaaaaagtgatagctgacactctgtgtatgtgtatcctctgtatttaaaaataacactaaaggccaacgaggaaaatgtttatgttatgtcaaattaataggaaaataagtacatcaaacctagtgccttcaaaagacaacagaacagtgtgtttagaacttctggggtccagatcccaccccctttgcttttccaagtgaatacctctcccccgcagtggtttactctcatcaacgtacattctagtctttcacattaaaataaaaatagcaagaacctgagcccctcaccatgtccttcgtcagctaccaatccagttctctatgagattgctcatgatcacagtaaaacttctccgaagtctccatctccacctcctcacctccctttccttttccacagtacttcaatctggcatctccccaccactccattcaaatggctctcatcaaaactccagtcttcatctcatgccagttctcaatcagtgcccaacacagccgctcatccctacaaaacacttcctcctttggctttcctccctccagcctcactggctattttcttcttagttgcctttgttggtgtctcctgtatcaaaactccaa

SEQ ID NO: 72770 - DNA, 1670 bp, Homo sapiens
agaggaatgtcaagaatgactttcagatgtatagtttgtgcagctgagtgaatggcagtgtcattcaccaagggagggaacactgcaggaagagtccaagtttaggtggaagaargcgagttcagtttggggtatttgaagtatgatgcgtctctaagtctttcaaattgtcttgctaaccaaatcctaaaactgtctattggatttaggtattgtagatatctttggtagccttaaggcaagcggtaaaaaacagttggcagtaagttgagaagcaagtgagaggtgataaaatggagagagtagagaaaactctttttgagaggtttgtttgcaaataggagggagacacaatgatatctggagagaaaatatattgaaagtggaacagatatttgaacacatttaagtgcccatggaaaaatatctagtgtaatgggagaacttgaaaattctgaagacagaagagtaatatgtgttgtaaggaagagagtaggatccagagaacagaagaaagaagtaaaactcttctatgtgttctctttagctgtccctgagatttagaaacttaagacaaaaataaagataatttgtgagcacccactgtctgccattcatttttacaagtcctgcttttctctttcataaagttccacattgtctgttttaataaacagttgccaggtggcatattaccccttcccagaatttcggggaatattaccacaaagttattttaagacattaaaaatatcttagtgccttggcctaaccactacttgcgccaatgaattgagccagcagataagcaacaatgtgtatattacaaaatggcagctccttcacttacacccacaaatctcccgcaggaatctttttttgtggctcaccctagctggaaacatacaggaaacaaaattctgggaaatgtagttcagcctagccaagttgatatattacaaaattacaaaaacaacttcatcatttcacttggtttcactatgcattttattctttctatcgttcccctcttcacacatagagtcacttaatagtgtgtcaagggcttcatacataatacctcatttaatctccacagcaaccttgtggtgtgtgtattattacccctatttataaggaaactccttgtctttcccaaggttcatgagccagaatgtggtagagctataatggaaatcaaggttttaggacttctagtttggcactttttcagctagtaggagaaaaacacatctacttcatgccatgctgtggagcaagagcgggagaaggtcttcttttggttggtgggaacccatcttcctttttccttagactgcattgcctcatttgtttaaaaaggttctatgaatcaataaacctttccaaaggcaaggactatgagaaaatatcatgtggtttaggcacaaagatggatactatttacctcaagaaatttgtttaagatcccatctgaatctagcaatcctaatatttcagcccaggaatcttcttggccaagagctgtcattcttgagagctatgactatattttaattactatatggatttatatatggagcatagtgcgtccattctacttctcctccattgttacagtctgttctaattagtgtttcaacctaaatctgctgaagcaaggtcctttt

SEQ ID NO: 72771 - DNA, 1670 bp, Homo sapiens
agaggaatgtcaagaatgactttcagatgtatagtttgtgcagctgagtgaatggcagtgtcattcaccaagggagggaacactgcaggaagagtccaagtttaggtggaagaaggygagttcagtttggggtatttgaagtatgatgcgtctctaagtctttcaaattgtcttgctaaccaaatcctaaaactgtctattggatttaggtattgtagatatctttggtagccttaaggcaagcggtaaaaaacagttggcagtaagttgagaagcaagtgagaggtgataaaatggagagagtagagaaaactctttttgagaggtttgtttgcaaataggagggagacacaatgatatctggagagaaaatatattgaaagtggaacagatatttgaacacatttaagtgcccatggaaaaatatctagtgtaatgggagaacttgaaaattctgaagacagaagagtaatatgtgttgtaaggaagagagtaggatccagagaacagaagaaagaagtaaaactcttctatgtgttctctttagctgtccctgagatttagaaacttaagacaaaaataaagataatttgtgagcacccactgtctgccattcatttttacaagtcctgcttttctctttcataaagttccacattgtctgttttaataaacagttgccaggtggcatattaccccttcccagaatttcggggaatattaccacaaagttattttaagacattaaaaatatcttagtgccttggcctaaccactacttgcgccaatgaattgagccagcagataagcaacaatgtgtatattacaaaatggcagctccttcacttacacccacaaatctcccgcaggaatctttttttgtggctcaccctagctggaaacatacaggaaacaaaattctgggaaatgtagttcagcctagccaagttgatatattacaaaattacaaaaacaacttcatcatttcacttggtttcactatgcattttattctttctatcgttcccctcttcacacatagagtcacttaatagtgtgtcaagggcttcatacataatacctcatttaatctccacagcaaccttgtggtgtgtgtattattacccctatttataaggaaactccttgtctttcccaaggttcatgagccagaatgtggtagagctataatggaaatcaaggttttaggacttctagtttggcactttttcagctagtaggagaaaaacacatctacttcatgccatgctgtggagcaagagcgggagaaggtcttcttttggttggtgggaacccatcttcctttttccttagactgcattgcctcatttgtttaaaaaggttctatgaatcaataaacctttccaaaggcaaggactatgagaaaatatcatgtggtttaggcacaaagatggatactatttacctcaagaaatttgtttaagatcccatctgaatctagcaatcctaatatttcagcccaggaatcttcttggccaagagctgtcattcttgagagctatgactatattttaattactatatggatttatatatggagcatagtgcgtccattctacttctcctccattgttacagtctgttctaattagtgtttcaacctaaatctgctgaagcaaggtcctttt

SEQ ID NO: 72772 - DNA, 1670 bp, Homo sapiens
agaggaatgtcaagaatgactttcagatgtatagtttgtgcagctgagtgaatggcagtgtcattcaccaagggagggaacactgcaggaagagtccaagtttaggtggaagaaggcgagttcagtttggggtatttgaagtatgatgcgtctctaagtctttcaaattgtcttgctaamcaaatcctaaaactgtctattggatttaggtattgtagatatctttggtagccttaaggcaagcggtaaaaaacagttggcagtaagttgagaagcaagtgagaggtgataaaatggagagagtagagaaaactctttttgagaggtttgtttgcaaataggagggagacacaatgatatctggagagaaaatatattgaaagtggaacagatatttgaacacatttaagtgcccatggaaaaatatctagtgtaatgggagaacttgaaaattctgaagacagaagagtaatatgtgttgtaaggaagagagtaggatccagagaacagaagaaagaagtaaaactcttctatgtgttctctttagctgtccctgagatttagaaacttaagacaaaaataaagataatttgtgagcacccactgtctgccattcatttttacaagtcctgcttttctctttcataaagttccacattgtctgttttaataaacagttgccaggtggcatattaccccttcccagaatttcggggaatattaccacaaagttattttaagacattaaaaatatcttagtgccttggcctaaccactacttgcgccaatgaattgagccagcagataagcaacaatgtgtatattacaaaatggcagctccttcacttacacccacaaatctcccgcaggaatctttttttgtggctcaccctagctggaaacatacaggaaacaaaattctgggaaatgtagttcagcctagccaagttgatatattacaaaattacaaaaacaacttcatcatttcacttggtttcactatgcattttattctttctatcgttcccctcttcacacatagagtcacttaatagtgtgtcaagggcttcatacataatacctcatttaatctccacagcaaccttgtggtgtgtgtattattacccctatttataaggaaactccttgtctttcccaaggttcatgagccagaatgtggtagagctataatggaaatcaaggttttaggacttctagtttggcactttttcagctagtaggagaaaaacacatctacttcatgccatgctgtggagcaagagcgggagaaggtcttcttttggttggtgggaacccatcttcctttttccttagactgcattgcctcatttgtttaaaaaggttctatgaatcaataaacctttccaaaggcaaggactatgagaaaatatcatgtggtttaggcacaaagatggatactatttacctcaagaaatttgtttaagatcccatctgaatctagcaatcctaatatttcagcccaggaatcttcttggccaagagctgtcattcttgagagctatgactatattttaattactatatggatttatatatggagcatagtgcgtccattctacttctcctccattgttacagtctgttctaattagtgtttcaacctaaatctgctgaagcaaggtcctttt

SEQ ID NO: 72773 - DNA, 1670 bp, Homo sapiens
agaggaatgtcaagaatgactttcagatgtatagtttgtgcagctgagtgaatggcagtgtcattcaccaagggagggaacactgcaggaagagtccaagtttaggtggaagaaggcgagttcagtttggggtatttgaagtatgatgcgtctctaagtctttcaaattgtcttgctaaccaaatcctaaaactgtctattggatttaggtattgtagatatctttggtagccttaaggcaagyggtaaaaaacagttggcagtaagttgagaagcaagtgagaggtgataaaatggagagagtagagaaaactctttttgagaggtttgtttgcaaataggagggagacacaatgatatctggagagaaaatatattgaaagtggaacagatatttgaacacatttaagtgcccatggaaaaatatctagtgtaatgggagaacttgaaaattctgaagacagaagagtaatatgtgttgtaaggaagagagtaggatccagagaacagaagaaagaagtaaaactcttctatgtgttctctttagctgtccctgagatttagaaacttaagacaaaaataaagataatttgtgagcacccactgtctgccattcatttttacaagtcctgcttttctctttcataaagttccacattgtctgttttaataaacagttgccaggtggcatattaccccttcccagaatttcggggaatattaccacaaagttattttaagacattaaaaatatcttagtgccttggcctaaccactacttgcgccaatgaattgagccagcagataagcaacaatgtgtatattacaaaatggcagctccttcacttacacccacaaatctcccgcaggaatctttttttgtggctcaccctagctggaaacatacaggaaacaaaattctgggaaatgtagttcagcctagccaagttgatatattacaaaattacaaaaacaacttcatcatttcacttggtttcactatgcattttattctttctatcgttcccctcttcacacatagagtcacttaatagtgtgtcaagggcttcatacataatacctcatttaatctccacagcaaccttgtggtgtgtgtattattacccctatttataaggaaactccttgtctttcccaaggttcatgagccagaatgtggtagagctataatggaaatcaaggttttaggacttctagtttggcactttttcagctagtaggagaaaaacacatctacttcatgccatgctgtggagcaagagcgggagaaggtcttcttttggttggtgggaacccatcttcctttttccttagactgcattgcctcatttgtttaaaaaggttctatgaatcaataaacctttccaaaggcaaggactatgagaaaatatcatgtggtttaggcacaaagatggatactatttacctcaagaaatttgtttaagatcccatctgaatctagcaatcctaatatttcagcccaggaatcttcttggccaagagctgtcattcttgagagctatgactatattttaattactatatggatttatatatggagcatagtgcgtccattctacttctcctccattgttacagtctgttctaattagtgtttcaacctaaatctgctgaagcaaggtcctttt

SEQ ID NO: 72774 - DNA, 1670 bp, Homo sapiens
agaggaatgtcaagaatgactttcagatgtatagtttgtgcagctgagtgaatggcagtgtcattcaccaagggagggaacactgcaggaagagtccaagtttaggtggaagaaggcgagttcagtttggggtatttgaagtatgatgcgtctctaagtctttcaaattgtcttgctaaccaaatcctaaaactgtctattggatttaggtattgtagatatctttggtagccttaaggcaagcggtaaaaaacagttggcagtaagttgagaagcaagtgagaggtgataaaatggmgagagtagagaaaactctttttgagaggtttgtttgcaaataggagggagacacaatgatatctggagagaaaatatattgaaagtggaacagatatttgaacacatttaagtgcccatggaaaaatatctagtgtaatgggagaacttgaaaattctgaagacagaagagtaatatgtgttgtaaggaagagagtaggatccagagaacagaagaaagaagtaaaactcttctatgtgttctctttagctgtccctgagatttagaaacttaagacaaaaataaagataatttgtgagcacccactgtctgccattcatttttacaagtcctgcttttctctttcataaagttccacattgtctgttttaataaacagttgccaggtggcatattaccccttcccagaatttcggggaatattaccacaaagttattttaagacattaaaaatatcttagtgccttggcctaaccactacttgcgccaatgaattgagccagcagataagcaacaatgtgtatattacaaaatggcagctccttcacttacacccacaaatctcccgcaggaatctttttttgtggctcaccctagctggaaacatacaggaaacaaaattctgggaaatgtagttcagcctagccaagttgatatattacaaaattacaaaaacaacttcatcatttcacttggtttcactatgcattttattctttctatcgttcccctcttcacacatagagtcacttaatagtgtgtcaagggcttcatacataatacctcatttaatctccacagcaaccttgtggtgtgtgtattattacccctatttataaggaaactccttgtctttcccaaggttcatgagccagaatgtggtagagctataatggaaatcaaggttttaggacttctagtttggcactttttcagctagtaggagaaaaacacatctacttcatgccatgctgtggagcaagagcgggagaaggtcttcttttggttggtgggaacccatcttcctttttccttagactgcattgcctcatttgtttaaaaaggttctatgaatcaataaacctttccaaaggcaaggactatgagaaaatatcatgtggtttaggcacaaagatggatactatttacctcaagaaatttgtttaagatcccatctgaatctagcaatcctaatatttcagcccaggaatcttcttggccaagagctgtcattcttgagagctatgactatattttaattactatatggatttatatatggagcatagtgcgtccattctacttctcctccattgttacagtctgttctaattagtgtttcaacctaaatctgctgaagcaaggtcctttt

SEQ ID NO: 72775 - DNA, 646 bp, Homo sapiens
cagatgactcaaagcctatggaactttgaaccaagcactaacaaaaccaataaacatcatagtaaagtggctagtacagttaacattcttccagcttctgcatctagctacagtggtacactctttgcagcctagatcctggggcttgtgtttctcctttgagatatgggtcttggaggacagttgcttctaaaatagaacattttgagctaaattgaaaatatgatctaggatgctgcctttttcatcagtctgtcatgttaatataggggaaatatctttgtggtttcaccatctggacttccacttttgctaaagagcttaacatggtagaaaaccagcaattctttaagccattggaacagccactatttgcactaaaggaaagcatgtttgtagatttttagtttttattcctaagaccttcacatttagcaaggctttatctttgcctgtaagaaaacttactccaattacttcaaaatataaatgagtttgaaaccaatatgagtctcctgatactgatctcttatttctcaactgcatacaaggtaactcacattaaaaaaaaaaaaaaamcctagttgcaaaagactgtagataattttaccactttcttatgttatattaccttcctgcaggtcat

SEQ ID NO: 72776 - DNA, 855 bp, Homo sapiens
tctgccctctaggcttgtggtggaattagcccagaacactgaggctgtgaagtacagtagctgaaagtgaaagttctaaagtttgtcatccgtaggcttgaattatagcttcaccattttctgtttgtgtaactcttggcaagttacttagccttttttgagtccatgttacctcttttataagatgtctcactctgtcttactgtgtacaagtctcttctcaaatgtcacctcctcagagaggcacttccagaccaccctgtctaaaacggtgcttcccgtcactatccatcatctcctgtcttgcttaacattcctctggatatttattactaccaatattctgtaagattgtttgtttgtttattgtcctccattggtaggaaagcatcaagaaagcaagcaatttgtctcacccattctagaagagtggccaacacataatagaaattcaatatttcttgaatgagtgaatgggaatagttattgcatctattatttgattactatgaggactgaataaataatgcaagaaaaatgtttagcacttttcttagcatattagaagcccacaatatcagatagctagtagttctaataatacttataaatattccattaccagaattatttttaaaaaatctaattgtgaaaatatgacttcatccattaccagagttattttgtaaaattctaatagtgraaatatgacttgatgtggtcttattttgtatagtctttaataaataacccggcttctcacaagaaggaatttgaggcagcttctgaaaatacataaagtgacctgtaccaacataacttaaaccattctagaagattttcatgatcgttgat

SEQ ID NO: 72777 - DNA, 1965 bp, Homo sapiens
ctctccttgcctagagaaagatcccatgagtaagggagttggaagaaaagcaaaagatttagacataataatttgagaatgggccctaagttttctacttgcccatcccaaggctaagtgctaagctgagaggtgtgaaggagtgatctatccaaaataggcttgtgattcccagaaagaaaaaaaaagagcttgagcctcattttctaggtagcagccagaaaactggccagtcatcagaatcacccaaccttaaatatagcccagtacaacgcaagagcagcagcgtagcaattcctgcgagagctttgtaaacagaactaaaaaaaatttttacagttcccttatcacctgatcacaaatttaatctccaattcagctacctatagacagaaaacactcaagatttgtggccactagaaacaatttcttctccatgacattgaactctaacatttaccctcagtaaccacaattctcaattcttccctgttcttacaagccatgaatccccttatgatttcattatcttccccctcccccccgaccttagccttgattccaagattaaccatactggccttggaagctctgattctctcaaacccttgccacttaacaatctttatagctccaacctctggcaatgcttagccctacaatacacgtttctactcttgccctcatattgtcaataatgagcttgtgctaaccactgtaaaatgggatctttttcttccacctgcaactattttatttatcttatttgtcacattccttatgattcattatgatatgtattccattcttctcaattactgaatacctacctccctcacctctgaagaggacttcattgaatacatcaccagaacaacataggttatccaaataaaattactggatctcctatatgcctctatatttgtctttcagggatctgcaaactgtggcctgtaacccacatccagctactgtctgcttttgtaaatgaaagttttactggaatattattcatccatatattgtccacggctccttttgtgctacaacagcagttgagtagctgtggaagagattatatgacccacgaattctaaatatttaatatctgcccctttacagaaaaagctttctaatccctgatctctttcatcatccattctttcttccttttcataaaaaaagagatatttctgttcctctttaatataaactagctgtttatgccttgggtccctttgatcatctgcttctgaacattaccctattaattatcagttcaatgcatttctgtagctcctctattcccactggatccttcaactattctaagaatatgctccccccaaaattaaaatgtctctcattctgttatcttttcaatcgaccatctgatttttcttcttccctttaccatcaaagttctggtggtagaaggtggtagaggcattgaatattatatataatattgtcataatatatataacatatattaatatataacaatacaacataatgtatattaatatggaatatatcatgtaatatattaacatgtaatataatatataacaaataattataatcrtatatattatatattcaatgtttctattgcctggtcccatttcccttattccatggaatctaacttttatctgctacaaaaactgttctctcaatactcacaataattaaaatacatactctctcaatacctttcattaactaaatataaagccttgttcttgtcctgcattcctctccatgagctcttcttttaaacagttattgcaatttcattatctttttaattaacatgttcattataaaacaacagaaaattcaactaagcagaaaagataaaagtcacccataatttcaccactttgagttaaacagtataaatattttactatgactaaatgtacatacacttattaatagtaataaaaatcatat

SEQ ID NO: 72778 - DNA, 1965 bp, Homo sapiens
ctctccttgcctagagaaagatcccatgagtaagggagttggaagaaaagcaaaagatttagacataataatttgagaatgggccctaagttttctacttgcccatcccaaggctaagtgctaagctgagaggtgtgaaggagtgatctatccaaaataggcttgtgattcccagaaagaaaaaaaaagagcttgagcctcattttctaggtagcagccagaaaactggccagtcatcagaatcacccaaccttaaatatagcccagtacaacgcaagagcagcagcgtagcaattcctgcgagagctttgtaaacagaactaaaaaaaatttttacagttcccttatcacctgatcacaaatttaatctccaattcagctacctatagacagaaaacactcaagatttgtggccactagaaacaatttcttctccatgacattgaactctaacatttaccctcagtaaccacaattctcaattcttccctgttcttacaagccatgaatccccttatgatttcattatcttccccctcccccccgaccttagccttgattccaagattaaccatactggccttggaagctctgattctctcaaacccttgccacttaacaatctttatagctccaacctctggcaatgcttagccctacaatacacgtttctactcttgccctcatattgtcaataatgagcttgtgctaaccactgtaaaatgggatctttttcttccacctgcaactattttatttatcttatttgtcacattccttatgattcattatgatatgtattccattcttctcaattactgaatacctacctccctcacctctgaagaggacttcattgaatacatcaccagaacaacataggttatccaaataaaattactggatctcctatatgcctctatatttgtctttcagggatctgcaaactgtggcctgtaacccacatccagctactgtctgcttttgtaaatgaaagttttactggaatattattcatccatatattgtccacggctccttttgtgctacaacagcagttgagtagctgtggaagagattatatgacccacgaattctaaatatttaatatctgcccctttacagaaaaagctttctaatccctgatctctttcatcatccattctttcttccttttcataaaaaaagagatatttctgttcctctttaatataaactagctgtttatgccttgggtccctttgatcatctgcttctgaacattaccctattaattatcagttcaatgcatttctgtagctcctctattcccactggatccttcaactattctaagaatatgctccccccaaaattaaaatgtctctcattctgttatcttttcaatcgaccatctgatttttcttcttccctttaccatcaaagttctggtggtagaaggtggtagaggcattgaatattatatataatattgtcataatatatataacatatattaatatataacaatacaacataatgtatattaatatggaatatatcatgtaatatattaacatgtaatataatatataacaaataattataatcatatatattatatattcaatgtttctattgcctggtcccatttcccttattccatggaatctaacttttatctgctacaaaaactgttctctcaatactcacaataattaaaatacatactctctcaatacctttcattaactaaatataaagccttgttcttgtcctgcattcctctccatgagctcttcttttaaacagttattgcaatttcattatctttttaattaacatgttcattataaaacaayagaaaattcaactaagcagaaaagataaaagtcacccataatttcaccactttgagttaaacagtataaatattttactatgactaaatgtacatacacttattaatagtaataaaaatcatat

SEQ ID NO: 72779 - DNA, 1965 bp, Homo sapiens
ctctccttgcctagagaaagatcccatgagtaagggagttggaagaaaagcaaaagatttagacataataatttgagaatgggccctaagttttctacttgcccatcccaaggctaagtgctaagctgagaggtgtgaaggagtgatctatccaaaataggcttgtgattcccagaaagaaaaaaaaagagcttgagcctcattttctaggtagcagccagaaaactggccagtcatcagaatcacccaaccttaaatatagcccagtacaacgcaagagcagcagcgtagcaattcctgcgagagctttgtaaacagaactaaaaaaaatttttacagttcccttatcacctgatcacaaatttaatctccaattcagctacctatagacagaaaacactcaagatttgtggccactagaaacaatttcttctccatgacattgaactctaacatttaccctcagtaaccacaattctcaattcttccctgttcttacaagccatgaatccccttatgatttcattatcttccccctcccccccgaccttagccttgattccaagattaaccatactggccttggaagctctgattctctcaaacccttgccacttaacaatctttatagctccaacctctggcaatgcttagccctacaatacacgtttctactcttgccctcatattgtcaataatgagcttgtgctaaccactgtaaaatgggatctttttcttccacctgcaactattttatttatcttatttgtcacattccttatgattcattatgatatgtattccattcttctcaattactgaatacctacctccctcacctctgaagaggacttcattgaatacatcaccagaacaacataggttatccaaataaaattactggatctcctatatgcctctatatttgtctttcagggatctgcaaactgtggcctgtaacccacatccagctactgtctgcttttgtaaatgaaagttttactggaatattattcatccatatattgtccacggctccttttgtgctacaacagcagttgagtagctgtggaagagattatatgacccacgaattctaaatatttaatatctgcccctttacagaaaaagctttctaatccctgatctctttcatcatccattctttcttccttttcataaaaaaagagatatttctgttcctctttaatataaactagctgtttatgccttgggtccctttgatcatctgcttctgaacattaccctattaattatcagttcaatgcatttctgtagctcctctattcccactggatccttcaactattctaagaatatgctccccccaaaattaaaatgtctctcattctgttatcttttcaatcgaccatctgatttttcttcttccctttaccatcaaagttctggtggtagaaggtggtagaggcattgaatattatatataatattgtcataatatatataacatatattaatatataacaatacaacataatgtatattaatatggaatatatcatgtaatatattaacatgtaatataatatataacaaataattataatcatatatattatatattcaatgtttctattgcctggtcccatttcccttattccatggaatctaacttttatctgctacaaaaactgttctctcaatactcacaataattaaaatacatactctctcaatacctttcattaactaaatataaagccttgttcttgtcctgcattcctctccatgagctcttcttttaaacagttattgcaatttcattatctttttaattaacatgttcattataaaacaacagaaaattcaactaagcagaaaagataaaagtcacccataatttcaccactttgagttaaacagtataaatattttactatgactaaatgtacatayacttattaatagtaataaaaatcatat

SEQ ID NO: 72780 - DNA, 940 bp, Homo sapiens
atactttagtcacattgaactaccttcagtttcctgaacttagcattatttccctcatcccatccctctccctctgcataagccagtctttgaccttgaatgctcmctttcttgtcaggtggctgattcctgctcattctttgagattcaactgctggtattctacatatattccactcatggcatttatgatgttatattattatggtctattcccatgtctgtttctgccaccagatcattccattcttggagtcagggattagggcttattaattttaaatcccaaacacaagatggattaaaagaattattggaggccgggcacggtggctcacgcctgtaatcccagcactttgggaggccgaggcgggcggatcacaaggtcaggagattgagaccatcctggctaacacggtgaaaccccgtctctactaaaaatacaaaaaattagccgggcatagcggcgggcacctgtagtcccagctactcgggaggcagaggcgggagaatggcgtgaacccgggaggcggagcttgcagtgagccgagattgcggcactgcattccaacctgagcgacagagccagactccgtctcaaaaaaaaaaaaagaaaagaaaaaaagagagaattactgaattaagggatacaattatattgatctgaattttaaaggaaatcttggattgatggagacagtggatgagggcattttgagtagaagtagaaaacgtgtagctggcagactaatatggttggctagtgagactgtcttggtgagtactgagaaccctgattaaataaataatggagggcttttaatagaagctggggatgtacagattctatataaattattttagtcattcttaagcaggaaaacgtgaagtttttaggttattctgatagttgttcattttacagaactctcttgttgtt

SEQ ID NO: 72781 - DNA, 940 bp, Homo sapiens
atactttagtcacattgaactaccttcagtttcctgaacttagcattatttccctcatcccatccctctccctctgcataagccagtctttgaccttgaatgctccctttcttgtcaggtggctgattcctgctcattctttgagattcaactgctggtattctacatatattccactcatggcatttatgatgttatattattatggtctattcccatgtctgtttctgccaccagatcattccattcttggagtcagggattagggcttattaattttaaatcccaaacacaagatggattaaaagaattattggaggccgggcacggtggctcacgcctgtaatcccagcactttgggaggccgaggcgggcggatcacaaggtcaggagattgagaccatcctggctaacacggtgaaaccccgtctctactaaaaatacaaaaaattagccgggcatagcggcgggcacctgtagtcccagctactcgggaggcagaggcgggagaatggcgtgaacccgggaggcggagcttgcagtgagccgagattgcggcactgcattccaacctgagcgacagagccagactccgtctcaaaaaaaaaaaaaraaaagaaaaaaagagagaattactgaattaagggatacaattatattgatctgaattttaaaggaaatcttggattgatggagacagtggatgagggcattttgagtagaagtagaaaacgtgtagctggcagactaatatggttggctagtgagactgtcttggtgagtactgagaaccctgattaaataaataatggagggcttttaatagaagctggggatgtacagattctatataaattattttagtcattcttaagcaggaaaacgtgaagtttttaggttattctgatagttgttcattttacagaactctcttgttgtt

SEQ ID NO: 72782 - DNA, 663 bp, Homo sapiens
tgataaaagcagggaactgtcttgtttgaatttggatctggtgtccaagtctctgtttttgagagggggtgtagcatgggggtcagcgaacggactctggggccagattgcccagctcagttcttggctccactgcttaccacttgkgtgattcaaggcgagatatgtgacctgcgtgagcctctctccctcagctctagggtggagacggtaattatgctaactttatagagctgtgaggaggactacatgagttcatttctacaaagcgcctggcatgtattatgtactatatgagccttgcctatcattagtaatgttattaaaaaaataaatctttaaatatagtatatccatgttacctaaaatctggaaaatgaacaaatcattttactctatcataactagtctcataattatttcttttgagtcatttttaaataattattttttacttagtttttttttttaaaacaagagccagtctttcctttctcatctcctgccagatgtacagcctatgaggcctgcccaaaataaaaccaaactcacttcagaaaggggctccacatccacgcacacatgcctgggctgcctgcttcccctctggcacatcccgcccctgtgataatttcatctcacatggggctgctttccactgga

SEQ ID NO: 72783 - DNA, 663 bp, Homo sapiens
tgataaaagcagggaactgtcttgtttgaatttggatctggtgtccaagtctctgtttttgagagggggtgtagcatgggggtcagcgaacggactctggggccagattgcccagctcagttcttggctccactgcttaccacttgtgtgattcaaggcgagatatgtgacytgcgtgagcctctctccctcagctctagggtggagacggtaattatgctaactttatagagctgtgaggaggactacatgagttcatttctacaaagcgcctggcatgtattatgtactatatgagccttgcctatcattagtaatgttattaaaaaaataaatctttaaatatagtatatccatgttacctaaaatctggaaaatgaacaaatcattttactctatcataactagtctcataattatttcttttgagtcatttttaaataattattttttacttagtttttttttttaaaacaagagccagtctttcctttctcatctcctgccagatgtacagcctatgaggcctgcccaaaataaaaccaaactcacttcagaaaggggctccacatccacgcacacatgcctgggctgcctgcttcccctctggcacatcccgcccctgtgataatttcatctcacatggggctgctttccactgga

SEQ ID NO: 72784 - DNA, 663 bp, Homo sapiens
tgataaaagcagggaactgtcttgtttgaatttggatctggtgtccaagtctctgtttttgagagggggtgtagcatgggggtcagcgaacggactctggggccagattgcccagctcagttcttggctccactgcttaccacttgtgtgattcaaggcgagatatgtgacctgcgtgagcctctctccctcasctctagggtggagacggtaattatgctaactttatagagctgtgaggaggactacatgagttcatttctacaaagcgcctggcatgtattatgtactatatgagccttgcctatcattagtaatgttattaaaaaaataaatctttaaatatagtatatccatgttacctaaaatctggaaaatgaacaaatcattttactctatcataactagtctcataattatttcttttgagtcatttttaaataattattttttacttagtttttttttttaaaacaagagccagtctttcctttctcatctcctgccagatgtacagcctatgaggcctgcccaaaataaaaccaaactcacttcagaaaggggctccacatccacgcacacatgcctgggctgcctgcttcccctctggcacatcccgcccctgtgataatttcatctcacatggggctgctttccactgga

SEQ ID NO: 72785 - DNA, 663 bp, Homo sapiens
tgataaaagcagggaactgtcttgtttgaatttggatctggtgtccaagtctctgtttttgagagggggtgtagcatgggggtcagcgaacggactctggggccagattgcccagctcagttcttggctccactgcttaccacttgtgtgattcaaggcgagatatgtgacctgcgtgagcctctctccctcagctctagggtggagacrgtaattatgctaactttatagagctgtgaggaggactacatgagttcatttctacaaagcgcctggcatgtattatgtactatatgagccttgcctatcattagtaatgttattaaaaaaataaatctttaaatatagtatatccatgttacctaaaatctggaaaatgaacaaatcattttactctatcataactagtctcataattatttcttttgagtcatttttaaataattattttttacttagtttttttttttaaaacaagagccagtctttcctttctcatctcctgccagatgtacagcctatgaggcctgcccaaaataaaaccaaactcacttcagaaaggggctccacatccacgcacacatgcctgggctgcctgcttcccctctggcacatcccgcccctgtgataatttcatctcacatggggctgctttccactgga

SEQ ID NO: 72786 - DNA, 663 bp, Homo sapiens
tgataaaagcagggaactgtcttgtttgaatttggatctggtgtccaagtctctgtttttgagagggggtgtagcatgggggtcagcgaacggactctggggccagattgcccagctcagttcttggctccactgcttaccacttgtgtgattcaaggcgagatatgtgacctgcgtgagcctctctccctcagctctagggtggagacggtaattatgctaactttatagagctgtgaggaggactacatgagttcatttctacaaagcgcctggcatgtattatgtactatatgagccttgcctatcattagtaatgttattaaaaaaataaatctttaaatatagtatatccatgttacmtaaaatctggaaaatgaacaaatcattttactctatcataactagtctcataattatttcttttgagtcatttttaaataattattttttacttagtttttttttttaaaacaagagccagtctttcctttctcatctcctgccagatgtacagcctatgaggcctgcccaaaataaaaccaaactcacttcagaaaggggctccacatccacgcacacatgcctgggctgcctgcttcccctctggcacatcccgcccctgtgataatttcatctcacatggggctgctttccactgga

SEQ ID NO: 72787 - DNA, 1143 bp, Homo sapiens
gagtgaggacaaccagaggtcactttcaacgccatcttggttttggtgagttttggccagcttctttaccgcaacccattttatcagcaaggtcttgtgacctgtatcttctgctgaccttctatctcatctcgtgactaagaatgcctaacctcctgggaatgcagcccagtaggtctcggccttattttacccagcccctgttcaagatggagtccctctggttcaaatgcctctgacggtgggggtagagggcaggtatgcaaacttccacattcaccttgcatttagatgtcgcagacctatggcacactgccagaggtgactcccagaagtggtttacaggagccagaagcaaatctccaagtcagagtgagcctgggggaagacctgaggctcttgacatgtaatcactgtagcccagcacatctgcaccactgacaggtcccctttacatagagatctctacaggttgtattattcccattctacagaggaggaaaatgaaccactgagagacacagcagctaaactcaggtcacacaactagttgacccagccaagactcaggctaggtttcctgattccatcctccagcccgcttaccagcacctctcatggttactaaagcaagtgactgtgagagtgagaacctgctatatctgttgtgtcccttcttccctaagggcatgtgcagcttctatcagagttgctaggagccacatcmgcaaagagcgtggtcttcatcacacatcactccagaagcagtggcttttccactccaggcagaaagcaattttttcctagtgccttcccagaagcaaagtgggtaattaattgcactgaataacacattaaatgtactaataattgggtagtcacagcaaaatgattactttgaagaaatattaccaactccctgttgtacttaacatttctccttatttatcattaccattttaatcaataatagtcacaatactaacaaatccatcttaattttaattgttttcaatttgatgtaccagtacttgagtattctgagcatacttcattatttatattaatttaagaacacttaaaggcaaattacgtagtttgtactttcaagtaggtaggtaattatgacaaagtttctctaga

SEQ ID NO: 72788 - DNA, 1143 bp, Homo sapiens
gagtgaggacaaccagaggtcactttcaacgccatcttggttttggtgagttttggccagcttctttaccgcaacccattttatcagcaaggtcttgtgacctgtatcttctgctgaccttctatctcatctcgtgactaagaatgcctaacctcctgggaatgcagcccagtaggtctcggccttattttacccagcccctgttcaagatggagtccctctggttcaaatgcctctgacggtgggggtagagggcaggtatgcaaacttccacattcaccttgcatttagatgtcgcagacctatggcacactgccagaggtgactcccagaagtggtttacaggagccagaagcaaatctccaagtcagagtgagcctgggggaagacctgaggctcttgacatgtaatcactgtagcccagcacatctgcaccactgacaggtcccctttacatagagatctctacaggttgtattattcccattctacagaggaggaaaatgaaccactgagagacacagcagctaaactcaggtcacacaactagttgacccagccaagactcaggctaggtttcctgattccatcctccagcccgcttaccagcacctctcatggttactaaagcaagtgactgtgagagtgagaacctgctatatctgttgtgtcccttcttccctaagggcatgtgcagcttctatcagagttgctaggagccacatccgcaaagagcgtggtcttcatcacacatcactccagaagcagtggcttttccactccaggcagaaagcaattttttcctagtgccttcccagaagcaaagtgggtaattaattgcactgaataacacattaaatgtactaataattgggtagtcacagcaaaatgattactttgaagaaatattaccaaytccctgttgtacttaacatttctccttatttatcattaccattttaatcaataatagtcacaatactaacaaatccatcttaattttaattgttttcaatttgatgtaccagtacttgagtattctgagcatacttcattatttatattaatttaagaacacttaaaggcaaattacgtagtttgtactttcaagtaggtaggtaattatgacaaagtttctctaga

SEQ ID NO: 72789 - DNA, 1958 bp, Homo sapiens
tgtccctcccacatgtcatctgtgcatatgccatctcttcctccccactttctaccctcttcacctaggaactcctactgctgtcttagatcttcgcttacatctcactcctcaggcaaggtttctgtctaatagacaccatggcacactctccttcccagcacctcacaccatcacaattttccatttgtttgatcattgtctgtcccccacactagaatgtaaatttccacaagggcagtaccaatatcagttttgtctctcatggcattccatgcccagcacagtgcctggcactttgaaggccctcagtaaatatttgccgaagttttatggacttgacctggaggatgggaggctaagcaggcagccagtattgagggatgggggagaggctgaagctgagagacaaagtgtgcagagctgaaagtcaagtcaggatatgggagaatggggacagagccagaagccagagaagggggcccaatgtttagtacaaaatggaggagtgccaaggcagctctggggagccaaaaatgcagggcaaatggagactgcaaggcagggcaaggaagtgggaggggtccataccaatgcaggaccccagagctgctgcccaaagcaggtttctacaggcctgggtaagcagaccacacttaaccagctaagatgaaagagtgggtagaatgtgattaagagaacttccagagcagtgattctcaatcctggctggacatttgaatcattgggagcattttttaaaaatacaaaggcccatgtccagaaattctgccttctgtttttatcctaaaggcaagaagcaattgaaggttttaagatgtgtgtgcatgtgtatgcgtgtgtgtgtgtgtgtgtgtgtgtgtgtatgtgtgtatgatgacgatgatattaatgtttgtgtggataacacatgggggagaccagttagaagggtgttatgcacgggactcaagaataagtgttttacaaaagcatcctatgcatttaaaatatgcactagggttgggaaccactgttctaaagcaatagtctttaatcttggctgcgtattgcatttgcctgtggagttgtaaaaaaataytgatgcctgaccctcactcccagaaattctgatttaattggtcgagtatggcctgtgcatagggattttttcagagcacctccagatttttctaatgtgcaggcagggttgagaaccactgctaacgctattcaggctactcaaagtagcaagtctgcggaccagcaggatagacaacatctgggaacttcggcatgcaaattcatgagcaactgaaacagaaactcttggtggtggggctatccaggagattttggcacctgctacagttttagaaccataattccagaaagacaaagtaataatttccaattgggaacccagattcccactagggaatctggtctgctgaatattttagaggctttggagttaactcgcttccctaacctagtgtgtaactttggcttccaatcaaacagactgaggatgaataacaatagtttctcctctgtgagacccaccttcctccatcttggggcacatccggttggagcagaggcttgacatttttctcacggtctttctgatctctcactctggcaggatctctgccagaggctacattacctcctacccgaggcctgacttccagatgtttttcatatgaaacagagaagagggggcagagagagcagggaattggggaatggagcaacacaagaactaaggaagcaaacactgcctgctcacaggaagcgggtcttctcctggcagatcaaatgcgcagagcacgacctggggaagtgggggaggccactgcggttgacttaaggaagaattctccccatgggtgcgtttctctggctccctctcctatgtaataatgtgcagccacagtcatgatttgccctca

SEQ ID NO: 72790 - DNA, 1958 bp, Homo sapiens
tgtccctcccacatgtcatctgtgcatatgccatctcttcctccccactttctaccctcttcacctaggaactcctactgctgtcttagatcttcgcttacatctcactcctcaggcaaggtttctgtctaatagacaccatggcacactctccttcccagcacctcacaccatcacaattttccatttgtttgatcattgtctgtcccccacactagaatgtaaatttccacaagggcagtaccaatatcagttttgtctctcatggcattccatgcccagcacagtgcctggcactttgaaggccctcagtaaatatttgccgaagttttatggacttgacctggaggatgggaggctaagcaggcagccagtattgagggatgggggagaggctgaagctgagagacaaagtgtgcagagctgaaagtcaagtcaggatatgggagaatggggacagagccagaagccagagaagggggcccaatgtttagtacaaaatggaggagtgccaaggcagctctggggagccaaaaatgcagggcaaatggagactgcaaggcagggcaaggaagtgggaggggtccataccaatgcaggaccccagagctgctgcccaaagcaggtttctacaggcctgggtaagcagaccacacttaaccagctaagatgaaagagtgggtagaatgtgattaagagaacttccagagcagtgattctcaatcctggctggacatttgaatcattgggagcattttttaaaaatacaaaggcccatgtccagaaattctgccttctgtttttatcctaaaggcaagaagcaattgaaggttttaagatgtgtgtgcatgtgtatgcgtgtgtgtgtgtgtgtgtgtgtgtgtgtatgtgtgtatgatgacgatgatattaatgtttgtgtggataacacatgggggagaccagttagaagggtgttatgcacgggactcaagaataagtgttttacaaaagcatcctatgcatttaaaatatgcactagggttgggaaccactgttctaaagcaatagtctttaatcttggctgcgtattgcatttgcctgtggagttgtaaaaaaatactgatgcctgaccctcactcccagaaattctgatttaattggtcgagtatggcctgtgcatagggattttttcagagcacctccagatttttctaatgtgcaggcagggttgagaaccactgctaacgctattcaggctactcaaagtagcaagtctgcggaccagcaggatagacaacatctgggaacttcgrcatgcaaattcatgagcaactgaaacagaaactcttggtggtggggctatccaggagattttggcacctgctacagttttagaaccataattccagaaagacaaagtaataatttccaattgggaacccagattcccactagggaatctggtctgctgaatattttagaggctttggagttaactcgcttccctaacctagtgtgtaactttggcttccaatcaaacagactgaggatgaataacaatagtttctcctctgtgagacccaccttcctccatcttggggcacatccggttggagcagaggcttgacatttttctcacggtctttctgatctctcactctggcaggatctctgccagaggctacattacctcctacccgaggcctgacttccagatgtttttcatatgaaacagagaagagggggcagagagagcagggaattggggaatggagcaacacaagaactaaggaagcaaacactgcctgctcacaggaagcgggtcttctcctggcagatcaaatgcgcagagcacgacctggggaagtgggggaggccactgcggttgacttaaggaagaattctccccatgggtgcgtttctctggctccctctcctatgtaataatgtgcagccacagtcatgatttgccctca

SEQ ID NO: 72791 - DNA, 2791 bp, Homo sapiens
tgcaatcagatgcctgcctgccttgcccgcctggtcccatgttgccaggctggagtgcactgggccgatctcggctcactgcaacctctgcctcccgggttcaagcgattcccctgcctcagcctcctgagtagctgggactacaggcacatgccaccacacttggctaattttttgtattttagtagagatggggtttcaccacgttagccaggatggtcgcgatctcctgaccttgtgatccgcccgcctcggcttcccaaagagctgggattacaggcgtgagccaccacgcctggccaagactctgcctttctaacaagttcccagacgatgctgatggtgctggcccaggaccacatcttgcgcatatcactcaccctgcatcccaccagctggtcaaggtcctgctcagatgctaccgtttttgtcaacaaaactgggcacactagcaaaaaatgcaccccctccccgcccactcacctcactgctacacccctctgtgcctgccaagacactgtatctgagctatttggctgtgtctccctgatctcaggggcctaaagttctcatgcctttccccgtaccccacagaatctcatttagtgcagccggggacacgctaccagctggggcagattccgttccattcactgggaccttaaagaacttcagactccttgatgcagcactcagccctgggggtccaaagatgcatgacgcccagagactgcccttgagatgaacatctattttytgggttatattcactgctcactgagcccactctgctgtccttccagctgctggcctggggcatgactgacctgagcagaccacgggatgtcctccctgatctaaaccagtgggaggttcctctcactaatacacagctccaagttctcagcttgccttgctgtctttgagactcagaagggaggtgttactttcggtggtaagccacaatatgtaactcacagagggcatgtaagaggcaggtgaaagatgttttgcagcctgtttaaatgtcagtgactaagacccaggggtgctctgagaacattctcacttctcagttgtgggcacctaaaaggttactgtccacccagttctcctgccacgtggacttacggcatcacggcctcacatcctcatgggaccaatggcaaattatggaacctcaactcaggctgcttaagtaaaatgggaactctttgctcacctctgtggcttggcccaaggtgactcagaattgaaaaagaagctataggaatctgggatttaggaaccatgtctggtctcacacatgccaggactctctctctgtctatcccgttctcatctctgcatgtccttgtatgtgggcctaactctctcttgctgcattcaggagaaagggtaccatgcccaccaaggcagtgtggaatagaagggggactgttctccaaaggagataggagtgctagacagacccaaaccagacatccattccaaatggttagcaaatgttaagtctttgtcacaagttaggcactctgctgttttacatatatgatctcatttaatccccaagctgactctatgagtcaagtatggcatttgctggtctgacaaataaaaaggcatgacacaaatcatacctcagtcccttctaccagctccagtgttggctttgggacagccagaagatatgacctggatgggagaatgcatttcctttggaaataagcatattgtcctagaaagggggcctaaaagccaatgctttagctctggttgtctctgtatcagtagttatgaggctaacaccatcaacgtcaagttgttaattttggataatttagatctctctattaaaccatcatttctctgtgaatctacattgaaggaagagaagtctcatcaagaaaatcaaaggggtttcctccactgtctcacccagccaagacacatatcctttgggatagcatttaagaagatagatgatccgattagatgaggataagccatgggattctccctccagacgatctgccatgctggagacgttttcatggatcctaggaccctacccaaaaaaaggactctcctctccagctttatttctgtgaccacttcttgcctatattttctctaagaagaaatgagagttgagacttgctcacaactttaccattaagagaaaataaatcataacagagcctggtcaccacccgtctgagtggtcccccgacccaccaggggcgtggctccttggctgctgagattctcaaggctgagagcagcccctccagtgttcctacctgactggggacttcgtgcagccgcaggctctgcctcttctgctctccattacatcctgactcacagcacagtggctggcacacagcgggtgcccaagaagtgtttgttaaacaaatgaatgatattccattctccagtgataactcaaacaacaattgaaatcaattggtgactccaagccaaggtcactgtgctgaacattatagttatatagttatatcaaattcctcagagacatccatggtttttctcactggtcagttcttagggctctgtttttggtttcatcaatgcaaatgccaactctttatgtaaatattgtcataaattccttctcaatattctgccgtgcatttgttcaatataaatgtgctgatcacaggcttcaaatctgggtcaaagaatatttgactgaagtcagacaaccagagccccagctctatgaccactagcaaatgccagtatttactgagcacttactatgtgc

SEQ ID NO: 72792 - DNA, 2791 bp, Homo sapiens
tgcaatcagatgcctgcctgccttgcccgcctggtcccatgttgccaggctggagtgcactgggccgatctcggctcactgcaacctctgcctcccgggttcaagcgattcccctgcctcagcctcctgagtagctgggactacaggcacatgccaccacacttggctaattttttgtattttagtagagatggggtttcaccacgttagccaggatggtcgcgatctcctgaccttgtgatccgcccgcctcggcttcccaaagagctgggattacaggcgtgagccaccacgcctggccaagactctgcctttctaacaagttcccagacgatgctgatggtgctggcccaggaccacatcttgcgcatatcactcaccctgcatcccaccagctggtcaaggtcctgctcagatgctaccgtttttgtcaacaaaactgggcacactagcaaaaaatgcaccccctccccgcccactcacctcactgctacacccctctgtgcctgccaagacactgtatctgagctatttggctgtgtctccctgatctcaggggcctaaagttctcatgcctttccccgtaccccacagaatctcatttagtgcagccggggacacgctaccagctggggcagattccgttccattcactgggaccttaaagaacttcagactccttgatgcagcactcagccctgggggtccaaagatgcatgacgcccagagactgcccttgagatgaacatctattttctgggttatattcactgctcactgagcccactctgctgtccttccagctgctggcctggggcatgactgacctgagcagaccacgggatgtcctccctgatctaaaccagtgggaggttcctctcactaatacacakctccaagttctcagcttgccttgctgtctttgagactcagaagggaggtgttactttcggtggtaagccacaatatgtaactcacagagggcatgtaagaggcaggtgaaagatgttttgcagcctgtttaaatgtcagtgactaagacccaggggtgctctgagaacattctcacttctcagttgtgggcacctaaaaggttactgtccacccagttctcctgccacgtggacttacggcatcacggcctcacatcctcatgggaccaatggcaaattatggaacctcaactcaggctgcttaagtaaaatgggaactctttgctcacctctgtggcttggcccaaggtgactcagaattgaaaaagaagctataggaatctgggatttaggaaccatgtctggtctcacacatgccaggactctctctctgtctatcccgttctcatctctgcatgtccttgtatgtgggcctaactctctcttgctgcattcaggagaaagggtaccatgcccaccaaggcagtgtggaatagaagggggactgttctccaaaggagataggagtgctagacagacccaaaccagacatccattccaaatggttagcaaatgttaagtctttgtcacaagttaggcactctgctgttttacatatatgatctcatttaatccccaagctgactctatgagtcaagtatggcatttgctggtctgacaaataaaaaggcatgacacaaatcatacctcagtcccttctaccagctccagtgttggctttgggacagccagaagatatgacctggatgggagaatgcatttcctttggaaataagcatattgtcctagaaagggggcctaaaagccaatgctttagctctggttgtctctgtatcagtagttatgaggctaacaccatcaacgtcaagttgttaattttggataatttagatctctctattaaaccatcatttctctgtgaatctacattgaaggaagagaagtctcatcaagaaaatcaaaggggtttcctccactgtctcacccagccaagacacatatcctttgggatagcatttaagaagatagatgatccgattagatgaggataagccatgggattctccctccagacgatctgccatgctggagacgttttcatggatcctaggaccctacccaaaaaaaggactctcctctccagctttatttctgtgaccacttcttgcctatattttctctaagaagaaatgagagttgagacttgctcacaactttaccattaagagaaaataaatcataacagagcctggtcaccacccgtctgagtggtcccccgacccaccaggggcgtggctccttggctgctgagattctcaaggctgagagcagcccctccagtgttcctacctgactggggacttcgtgcagccgcaggctctgcctcttctgctctccattacatcctgactcacagcacagtggctggcacacagcgggtgcccaagaagtgtttgttaaacaaatgaatgatattccattctccagtgataactcaaacaacaattgaaatcaattggtgactccaagccaaggtcactgtgctgaacattatagttatatagttatatcaaattcctcagagacatccatggtttttctcactggtcagttcttagggctctgtttttggtttcatcaatgcaaatgccaactctttatgtaaatattgtcataaattccttctcaatattctgccgtgcatttgttcaatataaatgtgctgatcacaggcttcaaatctgggtcaaagaatatttgactgaagtcagacaaccagagccccagctctatgaccactagcaaatgccagtatttactgagcacttactatgtgc

SEQ ID NO: 72793 - DNA, 2791 bp, Homo sapiens
tgcaatcagatgcctgcctgccttgcccgcctggtcccatgttgccaggctggagtgcactgggccgatctcggctcactgcaacctctgcctcccgggttcaagcgattcccctgcctcagcctcctgagtagctgggactacaggcacatgccaccacacttggctaattttttgtattttagtagagatggggtttcaccacgttagccaggatggtcgcgatctcctgaccttgtgatccgcccgcctcggcttcccaaagagctgggattacaggcgtgagccaccacgcctggccaagactctgcctttctaacaagttcccagacgatgctgatggtgctggcccaggaccacatcttgcgcatatcactcaccctgcatcccaccagctggtcaaggtcctgctcagatgctaccgtttttgtcaacaaaactgggcacactagcaaaaaatgcaccccctccccgcccactcacctcactgctacacccctctgtgcctgccaagacactgtatctgagctatttggctgtgtctccctgatctcaggggcctaaagttctcatgcctttccccgtaccccacagaatctcatttagtgcagccggggacacgctaccagctggggcagattccgttccattcactgggaccttaaagaacttcagactccttgatgcagcactcagccctgggggtccaaagatgcatgacgcccagagactgcccttgagatgaacatctattttctgggttatattcactgctcactgagcccactctgctgtccttccagctgctggcctggggcatgactgacctgagcagaccacgggatgtcctccctgatctaaaccagtgggaggttcctctcactaatacacagctccaagttctcagcttgccttgctgtctttgagactcagaagggaggtgttactttcggtggtaagccacaatatgtaactcayagagggcatgtaagaggcaggtgaaagatgttttgcagcctgtttaaatgtcagtgactaagacccaggggtgctctgagaacattctcacttctcagttgtgggcacctaaaaggttactgtccacccagttctcctgccacgtggacttacggcatcacggcctcacatcctcatgggaccaatggcaaattatggaacctcaactcaggctgcttaagtaaaatgggaactctttgctcacctctgtggcttggcccaaggtgactcagaattgaaaaagaagctataggaatctgggatttaggaaccatgtctggtctcacacatgccaggactctctctctgtctatcccgttctcatctctgcatgtccttgtatgtgggcctaactctctcttgctgcattcaggagaaagggtaccatgcccaccaaggcagtgtggaatagaagggggactgttctccaaaggagataggagtgctagacagacccaaaccagacatccattccaaatggttagcaaatgttaagtctttgtcacaagttaggcactctgctgttttacatatatgatctcatttaatccccaagctgactctatgagtcaagtatggcatttgctggtctgacaaataaaaaggcatgacacaaatcatacctcagtcccttctaccagctccagtgttggctttgggacagccagaagatatgacctggatgggagaatgcatttcctttggaaataagcatattgtcctagaaagggggcctaaaagccaatgctttagctctggttgtctctgtatcagtagttatgaggctaacaccatcaacgtcaagttgttaattttggataatttagatctctctattaaaccatcatttctctgtgaatctacattgaaggaagagaagtctcatcaagaaaatcaaaggggtttcctccactgtctcacccagccaagacacatatcctttgggatagcatttaagaagatagatgatccgattagatgaggataagccatgggattctccctccagacgatctgccatgctggagacgttttcatggatcctaggaccctacccaaaaaaaggactctcctctccagctttatttctgtgaccacttcttgcctatattttctctaagaagaaatgagagttgagacttgctcacaactttaccattaagagaaaataaatcataacagagcctggtcaccacccgtctgagtggtcccccgacccaccaggggcgtggctccttggctgctgagattctcaaggctgagagcagcccctccagtgttcctacctgactggggacttcgtgcagccgcaggctctgcctcttctgctctccattacatcctgactcacagcacagtggctggcacacagcgggtgcccaagaagtgtttgttaaacaaatgaatgatattccattctccagtgataactcaaacaacaattgaaatcaattggtgactccaagccaaggtcactgtgctgaacattatagttatatagttatatcaaattcctcagagacatccatggtttttctcactggtcagttcttagggctctgtttttggtttcatcaatgcaaatgccaactctttatgtaaatattgtcataaattccttctcaatattctgccgtgcatttgttcaatataaatgtgctgatcacaggcttcaaatctgggtcaaagaatatttgactgaagtcagacaaccagagccccagctctatgaccactagcaaatgccagtatttactgagcacttactatgtgc

SEQ ID NO: 72794 - DNA, 1091 bp, Homo sapiens
tgcctctgcttccttggttcctggaaatccagcaacatctctgcttctcttggctgaggttcctttacccccagggcactcaatgagccagcttccaagtccctgccttcatcctttccccatttcccctagcccagtaaagccctctgtctgcgcccctccatctgaagacctttgaggttttcaaggctggtccaatccagtctgcccccagactgaaggtgatacacattaagttctccttaagcccctctatcgtgagaggaatgagctgcatcctccatttctccccactgtgtgcacaggcactggagccttctccaaaaatcctccctggaaaccttgtcccttcactcccattttcaactctatttttaatatggatcttggagagggggttaagaataatgtttttttcctgactctgtgggtctcattttggaacatggtttgtgttgtcttggttctttagatgtaacccaaacatggtaggaaagggaagcatgagccgaagtcctccctggcctccctttgggactttttttttttttttttttttgaaacagagtctcgctgtgttgccaggctggagtgcagtggtatgatctcggctcgctgcaacctctgcctcccgggttcaagcgattcttctgcctcagcctcctaagtagctgggactacaggtgcacgccaccatgcccagctaatttttgtattattagtagagacggggtttcaccatgttgaccaggatggtctcgatctcttgacctcgtgatccacccacctgggcctcccaaattgctgggattacaggcgtgagccaccgtgcccrttcccctttgggactttaacatcacatgttcccaggggctctgattgttagaatacagattgtccccgcttccaagttggggcttttatgaatccatagtgttaaatctctggaggaaaacagaaggaggatgtctgtgtgtgcttccctgtgaaaatcagtacaggtgtaggtagtcttcctcaggctccactcaaatttacttaggctttccagcaagagcaagacagccatgatgtttgggatcattttatgc

SEQ ID NO: 72795 - DNA, 596 bp, Homo sapiens
atgggtgcatcaaagtctcacaaatcaccgctaaagaacttactagtgtaaccaaataccacctgtccccctaaaacctatggaaataataaataaataaataaaaacttaagtaaaaacaaataaaatgtggccatttagtccatttataattaatggaattattgattgatatatatgggtctaagattattttattgctcgttttctrttttttcacctgttttgtgttatatgttttcttatgtttttggcctcctatttgtttattgagaccgcatctggctctgttacccaggctggtgtgcagtggtgtggtctctcttgcaacctccacctcccaggctcaagtcatcctgccacctcagcctcccgagtagctggggctacaggtgcacaccaacatgctcagctaatttttgtattttttgtagagatggggttttgctatgttgcttgggctggccttgaactcttgggctcaaggaatccactcgcctctgcctcccaaagtgccaggattataggcatgagccactgcatctggcctcttggcctccttttggaatgatttttataaattattctatgatcag

SEQ ID NO: 72796 - DNA, 596 bp, Homo sapiens
atgggtgcatcaaagtctcacaaatcaccgctaaagaacttactagtgtaaccaaataccacctgtccccctaaaacctatggaaataataaataaataaataaaaacttaagtaaaaacaaataaaatgtggccatttagtccatttataattaatggaattattgattgatatatatgggtctaagattattttattgctcgttttctgttttttcacctgttttgtrttatatgttttcttatgtttttggcctcctatttgtttattgagaccgcatctggctctgttacccaggctggtgtgcagtggtgtggtctctcttgcaacctccacctcccaggctcaagtcatcctgccacctcagcctcccgagtagctggggctacaggtgcacaccaacatgctcagctaatttttgtattttttgtagagatggggttttgctatgttgcttgggctggccttgaactcttgggctcaaggaatccactcgcctctgcctcccaaagtgccaggattataggcatgagccactgcatctggcctcttggcctccttttggaatgatttttataaattattctatgatcag

SEQ ID NO: 72797 - DNA, 596 bp, Homo sapiens
atgggtgcatcaaagtctcacaaatcaccgctaaagaacttactagtgtaaccaaataccacctgtccccctaaaacctatggaaataataaataaataaataaaaacttaagtaaaaacaaataaaatgtggccatttagtccatttataattaatggaattattgattgatatatatgggtctaagattattttattgctcgttttctgttttttcacctgttttgtgttmtatgttttcttatgtttttggcctcctatttgtttattgagaccgcatctggctctgttacccaggctggtgtgcagtggtgtggtctctcttgcaacctccacctcccaggctcaagtcatcctgccacctcagcctcccgagtagctggggctacaggtgcacaccaacatgctcagctaatttttgtattttttgtagagatggggttttgctatgttgcttgggctggccttgaactcttgggctcaaggaatccactcgcctctgcctcccaaagtgccaggattataggcatgagccactgcatctggcctcttggcctccttttggaatgatttttataaattattctatgatcag

SEQ ID NO: 72798 - DNA, 596 bp, Homo sapiens
atgggtgcatcaaagtctcacaaatcaccgctaaagaacttactagtgtaaccaaataccacctgtccccctaaaacctatggaaataataaataaataaataaaaacttaagtaaaaacaaataaaatgtggccatttagtccatttataattaatggaattattgattgatatatatgggtctaagattattttattgctcgttttctgttttttcacctgttttgtgttatatgttttcttatgttttyggcctcctatttgtttattgagaccgcatctggctctgttacccaggctggtgtgcagtggtgtggtctctcttgcaacctccacctcccaggctcaagtcatcctgccacctcagcctcccgagtagctggggctacaggtgcacaccaacatgctcagctaatttttgtattttttgtagagatggggttttgctatgttgcttgggctggccttgaactcttgggctcaaggaatccactcgcctctgcctcccaaagtgccaggattataggcatgagccactgcatctggcctcttggcctccttttggaatgatttttataaattattctatgatcag

SEQ ID NO: 72799 - DNA, 596 bp, Homo sapiens
atgggtgcatcaaagtctcacaaatcaccgctaaagaacttactagtgtaaccaaataccacctgtccccctaaaacctatggaaataataaataaataaataaaaacttaagtaaaaacaaataaaatgtggccatttagtccatttataattaatggaattattgattgatatatatgggtctaagattattttattgctcgttttctgttttttcacctgttttgtgttatatgttttcttatgtttttggcctcctatttgtttattgagaccrcatctggctctgttacccaggctggtgtgcagtggtgtggtctctcttgcaacctccacctcccaggctcaagtcatcctgccacctcagcctcccgagtagctggggctacaggtgcacaccaacatgctcagctaatttttgtattttttgtagagatggggttttgctatgttgcttgggctggccttgaactcttgggctcaaggaatccactcgcctctgcctcccaaagtgccaggattataggcatgagccactgcatctggcctcttggcctccttttggaatgatttttataaattattctatgatcag

SEQ ID NO: 72800 - DNA, 652 bp, Homo sapiens
agaaagaatctagagcagtcattttcaagcttgcgaatgattttaactgctcaagagaatttttaaggctacccacgacactactgtttaaccttccttcaattgttttagataagagatctctaaaatcctttttctttcaatggtgtacttagttccaatagagactcaaacaccttttttaaattgcagatggtaattttccaggtttttgccatataagcagcaagaagtattcctagaggaggcatccccaagtattccctcttggaaatgggtttaagatagcaaaatacaacaaaagtcctgtagagataggactgtttttttgtcctaataaatccaaccagcagagatgggacgttttaagacaaaactcacctaagggctcgacacattcaggaygaagagtatgctaatgtgtctcagactcccagtcctctcagaccagccacctgacttgaacccaagaatttccatcctccagatggcagagatcaagagagagagtacccctacatggttacaaagtcaagctctcaaccacataaaacaagaccagggaaatctcatccagtttttgttccaaggacctgcagcaaagtttgtaaccgaccagtctgcagggctggcttgaacagcaggcttacag

SEQ ID NO: 72801 - DNA, 652 bp, Homo sapiens
agaaagaatctagagcagtcattttcaagcttgcgaatgattttaactgctcaagagaatttttaaggctacccacgacactactgtttaaccttccttcaattgttttagataagagatctctaaaatcctttttctttcaatggtgtacttagttccaatagagactcaaacaccttttttaaattgcagatggtaattttccaggtttttgccatataagcagcaagaagtattcctagaggaggcatccccaagtattccctcttggaaatgggtttaagatagcaaaatacaacaaaagtcctgtagagataggactgtttttttgtcctaataaatccaaccagcagagatgggacgttttaagacaaaactcacctaagggctcgacacattcaggacgaagagtatgctaatgtgtctcagactcccagtcctctcagaccagccacctgacttgaacccaagaatttccatcctccagatggcagagatcaagagagagagtacccctacatggttacaaagtcaagctctcaaccacataaaacaagaccagggaaatctcatccagtttttgttcsaaggacctgcagcaaagtttgtaaccgaccagtctgcagggctggcttgaacagcaggcttacag

SEQ ID NO: 72802 - DNA, 760 bp, Homo sapiens
ctttcttgccacgggaaggctcctaatgacatgaaggaaaaatttaaaaatgaaagtgaaaattactataggtagtaacggcactagtatttctgagctatttaataactggcagccttaattttttttttttttttttttttttgagacggagtctcgctctgtcgcccaggccggactgcggactgcagtggcrcaatctcggctcactgcaagctccgcttcccgggttcacgccattctcctgcctcagcctcccgagtagctgggactacaggcgcccgccaccgcgcccggctaattttttgtatttttagtagagacggggtttcaccttgttagccaggatggtctcgatctcctgacctcatgatccacccgcctcggcctcccaaagtgctgggattgcaggcgtgagccaccgcgcccggccggcagccttaatttttacgccaccccaagatgaaagcaccaaaattatttttactgtagatagcaaactgatgtatttttcaggtaatactatctataaaccagaaaaacaggcttaggtattgtaaagacaaaacaaaaatgtacattttcactttcctttaaatagggaatttgatcagctaatacctacccccgtttttggtgtaaatgatttttcaaataatttaaatatcttatatttgggaaaaacctcagaaaccatctattggaaccctaccacccaatccagcagaccattctacaatgtctttgatggatagttgtc

SEQ ID NO: 72803 - DNA, 760 bp, Homo sapiens
ctttcttgccacgggaaggctcctaatgacatgaaggaaaaatttaaaaatgaaagtgaaaattactataggtagtaacggcactagtatttctgagctatttaataactggcagccttaattttttttttttttttttttttttgagacggagtctcgctctgtcgcccaggccggactgcggactgcagtggcacaatctcggctcactgcaagctccgcttcccgggttcacgccattctcctgcctcagcctcccgagtagctgggactacaggcgcccgccaccgcgcccggstaattttttgtatttttagtagagacggggtttcaccttgttagccaggatggtctcgatctcctgacctcatgatccacccgcctcggcctcccaaagtgctgggattgcaggcgtgagccaccgcgcccggccggcagccttaatttttacgccaccccaagatgaaagcaccaaaattatttttactgtagatagcaaactgatgtatttttcaggtaatactatctataaaccagaaaaacaggcttaggtattgtaaagacaaaacaaaaatgtacattttcactttcctttaaatagggaatttgatcagctaatacctacccccgtttttggtgtaaatgatttttcaaataatttaaatatcttatatttgggaaaaacctcagaaaccatctattggaaccctaccacccaatccagcagaccattctacaatgtctttgatggatagttgtc

SEQ ID NO: 72804 - DNA, 808 bp, Homo sapiens
acttccrtatgtttctctgcccctctgtctgtaagcatggctattcccctgtatttctgggagcagagagagttataagcttgtctaggccaatgtctttctgcctacttactgaatgtcttatttgtttccctcagacgtcatcctttctcttttactgctgtctccagctttcccctcttgcttcttctcacccagggtaaagtgttacatccttttttggtttttatatctgaccaaatttttaatattttgtttgctcttaaaatttcctgacatcccctttgccatataatgtcccttccagacaatcgggaagggtactgcttcacagaggtgctacaaaacatgtgtcagatcggctccagcaacaggaaccccgtcaccaaatcggaatgctgctgtgacggagggagaggctggggtccccactgtgagatctgccctttccaggggactgtgggctttcaagaaactctgtccccatggccgaggattcatgaccaatggagcaggtacttcatttatagtccaaaaatacttgcagggaatctatttatttgttttttgtgtgaaacacagatgaaaatatggagtttgcaatatgtgcctaggttgaattgcacagctgaggccaacaaaaattcttcattatggagttttagacatttgaggtcatgctgccaaagtggccttggtccacttgattaagctgtgtgtgcttaggaccctccctctgcattccagcgagtcttcaactttttaaaccgtttactataagtcaattggctactcagaatataatttt

SEQ ID NO: 72805 - DNA, 402 bp, Homo sapiens
  misc_feature (1)...(402): n = A,T,C or G
tctcattcaaaggcaaataattcctgagagtcatggcttagaggcacataaaagaaggcatctttsagagctagcacactaaagtatttgctgtcccctgagagactggctagcaatatataagtgttaggctctatggggtaaatgtcctgagcagcactgttaaccatctctcttttttctgggttcttaacagtggggtattacatggggagtgaccaggcctgataagcccttggagtaagagactctctaacacaggctgtattccctgcagtgcttcaggttttagaggatattnnnnnnnnnnnnnnnnnnnnnnnnnnnnnnnnnnnnnnnnnnnnnnnnnnnnnnnnnnnnnnnnnnnnnnnnnnnnnnnnnnnnnnnnnnnnnnnnnnnntt

SEQ ID NO: 72806 - DNA, 1002 bp, Homo sapiens
catgttctatatacatctatatttatatatgcgtgttttgtatatatagctataatgactatggctatgtaatactatagcaatagaacatgtagctacatgctactaccatcctcgatggtgtttctaagagacctctgtggaaggatgaaaggtaatcacaggccaggcgcgatggctcacgcctgtaatcccagcacattgggagggcgaggcgggcagatcacaaggtcaggagacagagaccatcctgcctaacacggtgaaaccttgtctctactaaaaatacaaaaaattagcccgggcttggtggtgggcgcctgtagtcccagttactcctgaaggtgaggcaggcaaatggcgtgaacccgggaggcggagcttgcagtgcgccgagatcatgccactgcactccagcctgggcgacagagcgagacyccatctcaacaaaaaaaaaaaaaaaaaaaaaagataatcacaggctaattaagatgcaaagactaaagattattcaaatgataaatttaaattttcttcttaaacatgactattcatacatatttacaaaaaatgctttttgaatgtataattatgtatgtgtacacacacatttatttatctttttaacagctttattgacatataattcacctaccatacacgtctcacatttaagtgtgtaattcaaaagtatttagtatgttcacatagttgtgaaatcacaattaattttataatatttttattatctaaccaaaagccctatattcatgatcatgtccccatccccaaaccacttataccctcttcagccctaagaaactgctaatttactttctgtctctataagatttgtctatcataaaaatttcatagaaatgaaacacacaatatgtattttttgtgacttgattctgtaacttgcatagtattttcaagtttcctcaatattgatacctgtatcagttcttcattctgttttactgccaaataacattccat

SEQ ID NO: 72807 - DNA, 1002 bp, Homo sapiens
catgttctatatacatctatatttatatatgcgtgttttgtatatatagctataatgactatggctatgtaatactatagcaatagaacatgtagctacatgctactaccatcctcgatggtgtttctaagagacctctgtggaaggatgaaaggtaatcacaggccaggcgcgatggctcacgcctgtaatcccagcacattgggagggcgaggcgggcagatcacaaggtcaggagacagagaccatcctgcctaacacggtgaaaccttgtctctactaaaaatacaaaaaattagcccgggcttggtggtgggcgcctgtagtcccagttactcctgaaggtgaggcaggcaaatggcgtgaacccgggaggcggagcttgcagtgcgccgagatcatgccactgcactccagcctgggcgacagagcgagactscatctcaacaaaaaaaaaaaaaaaaaaaaaagataatcacaggctaattaagatgcaaagactaaagattattcaaatgataaatttaaattttcttcttaaacatgactattcatacatatttacaaaaaatgctttttgaatgtataattatgtatgtgtacacacacatttatttatctttttaacagctttattgacatataattcacctaccatacacgtctcacatttaagtgtgtaattcaaaagtatttagtatgttcacatagttgtgaaatcacaattaattttataatatttttattatctaaccaaaagccctatattcatgatcatgtccccatccccaaaccacttataccctcttcagccctaagaaactgctaatttactttctgtctctataagatttgtctatcataaaaatttcatagaaatgaaacacacaatatgtattttttgtgacttgattctgtaacttgcatagtattttcaagtttcctcaatattgatacctgtatcagttcttcattctgttttactgccaaataacattccat

SEQ ID NO: 72808 - DNA, 1002 bp, Homo sapiens
catgttctatatacatctatatttatatatgcgtgttttgtatatatagctataatgactatggctatgtaatactatagcaatagaacatgtagctacatgctactaccatcctcgatggtgtttctaagagacctctgtggaaggatgaaaggtaatcacaggccaggcgcgatggctcacgcctgtaatcccagcacattgggagggcgaggcgggcagatcacaaggtcaggagacagagaccatcctgcctaacacggtgaaaccttgtctctactaaaaatacaaaaaattagcccgggcttggtggtgggcgcctgtagtcccagttactcctgaaggtgaggcaggcaaatggcgtgaacccgggaggcggagcttgcagtgcgccgagatcatgccactgcactccagcctgggcgacagagcgagactccrtctcaacaaaaaaaaaaaaaaaaaaaaaagataatcacaggctaattaagatgcaaagactaaagattattcaaatgataaatttaaattttcttcttaaacatgactattcatacatatttacaaaaaatgctttttgaatgtataattatgtatgtgtacacacacatttatttatctttttaacagctttattgacatataattcacctaccatacacgtctcacatttaagtgtgtaattcaaaagtatttagtatgttcacatagttgtgaaatcacaattaattttataatatttttattatctaaccaaaagccctatattcatgatcatgtccccatccccaaaccacttataccctcttcagccctaagaaactgctaatttactttctgtctctataagatttgtctatcataaaaatttcatagaaatgaaacacacaatatgtattttttgtgacttgattctgtaacttgcatagtattttcaagtttcctcaatattgatacctgtatcagttcttcattctgttttactgccaaataacattccat

SEQ ID NO: 72809 - DNA, 1002 bp, Homo sapiens
catgttctatatacatctatatttatatatgcgtgttttgtatatatagctataatgactatggctatgtaatactatagcaatagaacatgtagctacatgctactaccatcctcgatggtgtttctaagagacctctgtggaaggatgaaaggtaatcacaggccaggcgcgatggctcacgcctgtaatcccagcacattgggagggcgaggcgggcagatcacaaggtcaggagacagagaccatcctgcctaacacggtgaaaccttgtctctactaaaaatacaaaaaattagcccgggcttggtggtgggcgcctgtagtcccagttactcctgaaggtgaggcaggcaaatggcgtgaacccgggaggcggagcttgcagtgcgccgagatcatgccactgcactccagcctgggcgacagagcgagactccatctcaacaaaaaaaaaaaaaaaaaaaaaagataatcacaggctaattaagatgcaaagactaaagattattcaaatgataaatttaaattttcttcttaaacatgactattcatacatatttacaaaaaatgctttttgaatgtataattatgtatgtgtacacacacatttatttatctttttaacagctttattgacatataattcacctaccatacacgtctcacatttaagtgtgtaattcaaaagtatttagtatgttcacatagttgtgaaatcacaattaattttataatatttttattatctaacmaaaagccctatattcatgatcatgtccccatccccaaaccacttataccctcttcagccctaagaaactgctaatttactttctgtctctataagatttgtctatcataaaaatttcatagaaatgaaacacacaatatgtattttttgtgacttgattctgtaacttgcatagtattttcaagtttcctcaatattgatacctgtatcagttcttcattctgttttactgccaaataacattccat

SEQ ID NO: 72810 - DNA, 673 bp, Homo sapiens
attcgaaagtgtttcatgtaaaggagagaacagatttgttatgagttgttctagaaagctcaactagaacaaccagtacaagttataaacagataggttcaaatattctctratgaagatcaggtattaaatcttactcattctggctttgccacattgtctagcacagggccttaatcatatctgggcctaataggtgtttattgattgatttgaattggcatgaatggaaagaataaacctctctagcagtaaaaatagactgtcttttgaagtaacagtatccaatctttcaacaaagaattattcattacctacaatgtagctgtccctgtgctaagcatctggaatataaagatactaacatcttaatattgtagatcatttctatgggcaaagcattcttctaaatatttttcatgtactaacttattttgcagcagccttttatggtaggggcttttattatccccaatttagatgtaactgaagcacatagaggttacttcttttttttttttttttttttaacttttgaaacagtctcactctgttgcccaggttgaagtgcaatgctgtgaccttggctcactgcaacctccacctcccaggctcaagggattctcatgcttctgcctcccgagtagctggaattacaggagcgcactaccat

SEQ ID NO: 72811 - DNA, 812 bp, Homo sapiens
ctttttctccttcactctttcagctccacctcttcattttggagttcttgctagttctgtatgacaaatgttcattagtaagttgaatggataattacatgggatggagggggagagaatgatctagatttcaaatgtggaactattacctaagtcttaactgaaactagcgtaattatgtactttctttccttcaactttttttgttgttgttctacatgtacaaggctgatttttcattaacttttaatgttgcttgtaaccctattccgatttgtattcaatgtaactctgaatagaggtctactcacaatagaatgcaatattataaagctttaatgtaagacaaaagctcttattgaagttgtaagaacagcatttttattaaggttgtttcatttagtggaaagaacagrcccacacaaatccagaattatatctgggcagtagcaaaatttctgagcagttcagatagtaaatcaatttttaaactttctatgagaaatgtctgtaattcattcattttaaatacactggtgcgtttgttcttccgtaattataatacaaagattgctaaagcagttatgatcctgcctccatctcttatccatactcctgcttttactcctctgggttgttagagagagacagcctcagcctcagcctctcacgagcttcaaacacaacaccccagaataagccacattgaccaccaatttatcataaaaaagacaagtatatccaaatgtactgtacagaactctgggttttaagtggcagaaattcatctccaagtaagttaaactaataaa

SEQ ID NO: 72812 - DNA, 1156 bp, Homo sapiens
gagacaatggggttttctagatatacaataactaaacttgttttcactttactcagtgaacttaccctgaattctttcctgtgtgaaatccaagaactttctcttggggtctggattgggacccctttgtggtaacacatggatttcaaagccagtgagaagccaagacccgggctccttctaccctgtggctccatcattctctatagattttggtgacaatgtgtgtctccctggaggaagaagaggaagcacagagyatgtccagggagggctttatgggacatctaattagctagaactcagtcacatggccacacctgcagcaagggaagctgggaaaggaaatttagctgtttcctgggagatacaggaaatgagtttggaaataggtagctagtctttgccttgtttggaattgtcctggtggctggtctaggaatgtcagaggagggatttaaaatgatttttttgtttgtttgtttctatagtccatgagacactgtttatgcacatagagtctagaatttgggaattgttagatttatcctccttgattcattgatttataaggcttggtttctaaactgcacctgtggtagaagtgggttaccaaatgacatctatgataataagcggatagcaaacactagctttggagtcaaacatatctggttttcctcatcactaaaatttagaaaatagtatgtgtcttagaatgtaattgttagaaataagtaatacatgcaaagtcccccaaaatatgcctggtacatagtacaagctcaatgaatagtagctctcttaatgtgatttgtctaatgagataaataagagtaaaatgaaatgaggtttgaccaacaagagaaaatcagagtatttaatgcacagctgtcttaaggtcttgaaaaaatggtaaggaagctgatacattaaattctgagcaatggaatggccccaaaagtggataatgtgatcatagctcacatacagaaaatgaaaacatatcaggtgtccagagaaacccagaatttcctgacactgaaacttgagagaaattttataaaagagacaatggtttaggaagtgagtcacattctcaaccaaagtaacctcaaatgagtaacaaattttctagaactgtctcttgttgtaa

SEQ ID NO: 72813 - DNA, 992 bp, Homo sapiens
tataattcaaaacttacataattcaagcctacttttcccacaggactgaatataaagtgtgtgcaggagggagaatgcaatcttggagtgcataaatctgcaaaccttgtaacatatatttgctttaaggctgctttttattttccctgtattttctctaatattttgaagtgctttctcttaaattaacagtacagaacaytgtggtggtgatttggccttctcaatagagatttagcacatctaagttctgttctaaagtccccgagtttcttgagcgtttgagtgttttacagttctaacacttaaagaactcctggatgaccttgttacagcattataggtaggatataaagaggatcttaaattataacagcagcaaatgttacaataactgaagcgaagccatcagatcgctcacagacattctcatgcctgtaaacagctgtggttcaccaggcattgacagagggtgaaggtggctaaggggcgctgctgagtggccacagggcccacaaagcttctcaccactcatcctaccagctctgatagtgtgtggttcttgatgaaggcttttgaattgagagtggaggattcaagttatctccagttttgaacataaagtgagactgataatattttatatagcagcagttcaaatatacataactccaataaaaaatgtcatatgtggagaaagatgtctcctttcttagcttggcattcaaggctcttctgccttctacctacatctccaactttatctccttgccatgcccctcctcaaccagactgatacttgtttttacccactgttgtgtgttttaccagttttaaatggttgcatttataacatgaagctactacaaataagcataaataaaatgaaatcatccataattggatcacacagaggtaattattgttaatatttggatgtatttccttgcagacattccctatctacatgtacaaataaattagagcatgca

SEQ ID NO: 72814 - DNA, 718 bp, Homo sapiens
tcctcccagccggctgctgtcctcccaaaggccgaagcgcctcatcgcgcagctccaggggcaccattcatgtggcctggggaatgaatgatgtgctggatgctgtgcactggctcggctgagggccacccaggcccctccgcaggtgccttctgtggaagatggaactctccggggagctgaattctccattaggggctttttgatgatcctattgcaaatcaaagaaagcaaccagggaacttggcagtgggatgaacagaaacctgcaggtgatgtggaaggagtcccagaggagttccatcttattactgatggtgataggaacactgtccaggtgatttttttccaacctgcagggctgacttttctaggaggagtttactcttcaactccagagctgacttggttggcaccagagtgtctcattgtgggagagggggttaagccctgggcrggagaaccccagagggtcaactctccagatctctcaggacagagtggcccagggtggaggggaagtagaccagaacaggaggccccagaaagttcaaggcacaggatctgtctctgtggaaggcttccctggggtcctctggtttcattgccactgccctttgtctggggctctttttgcccaacaaaggcttaatgaaataagctgccagttttttcaaattcccactttgtgaagtctgaattcacaagggagaaacca

SEQ ID NO: 72815 - DNA, 1408 bp, Homo sapiens
caaaaggttaacagaatacacatgcttgggtagtgaaataacatacattatgaatataggaacattttgaaaatcatattatcatctcagagctagaaaagtgtagcttggtggctctggaagtacttaattgcttaatgatagcattctacaaaaaccacatagttttcacttgtaaaacaagctggtctagatatgttgagaaagaggagagatggcatgtactgaaagttgcagtgttttggatttgagtcaggatgtggaatgggaagagtttcttctatattttctacatacagcaagagtcagcttgggaagatggcatggtgggtgttcatttggttctgacaagcctcaactgtttttgaatactccagattgccagtaacacatctgctaactgtttgcttctttggggacttagtgttgaacaatctattaagttgcaaatgtttcatttttaaccttaagatgttaaaaccattgaaattcccaattctactttactttttctcaaaatatttgataatttgaattttcacaaagtttcagcacacttaccattctaagtaggcctttctatttgtataatcctttacatttgttagaatttatagcctagtagacataaattcagtaacatatgggggaaatttgttaggagaggccaagagataacttaaagacatcgcaggaaaaaaatccttcatgtctgtacacagtgaatctggatcctcaaattcctgaggattcttgacctacactacctaacttaaaacgactttcctcattcaagtgattaaagttagtaaagaagaattttgaaattttacctcttrtgctatataatattgaaacaggtaatcttgacaaatacagcacaatctttcacaacataaaactaaatataaccctttatttcttcttcattttacagacgctcacagacattggggtttcactacgagacatatgtatacataatattaacaattctaaaatatatttatttattacttatgtgcaccaaagtagctactcgatatacataatcttattatcctcacaacattgtttagataaagaaactggggttgtaaaggttcagtacccagcgcaaggtagcaatcctagattcatgtggtatttgcccttctatgcatggcttatttcacttaacataatgacctccatttccatcaatgttgcaaataacaatctcattcatttttgcagctgaatagtaccccattgtgtattagtaccacattttctttatacatttatctgttgatgaacacaggttacttccaaatcttggatattgtaaacagtgctgcagtgaacatgagagtgcagatatctcttctatatactgatttcctttgagtatatacccagtggtgga

SEQ ID NO: 72816 - DNA, 1408 bp, Homo sapiens
caaaaggttaacagaatacacatgcttgggtagtgaaataacatacattatgaatataggaacattttgaaaatcatattatcatctcagagctagaaaagtgtagcttggtggctctggaagtacttaattgcttaatgatagcattctacaaaaaccacatagttttcacttgtaaaacaagctggtctagatatgttgagaaagaggagagatggcatgtactgaaagttgcagtgttttggatttgagtcaggatgtggaatgggaagagtttcttctatattttctacatacagcaagagtcagcttgggaagatggcatggtgggtgttcatttggttctgacaagcctcaactgtttttgaatactccagattgccagtaacacatctgctaactgtttgcttctttggggacttagtgttgaacaatctattaagttgcaaatgtttcatttttaaccttaagatgttaaaaccattgaaattcccaattctactttactttttctcaaaatatttgataatttgaattttcacaaagtttcagcacacttaccattctaagtaggcctttctatttgtataatcctttacatttgttagaatttatagcctagtagacataaattcagtaacatatgggggaaatttgttaggagaggccaagagataacttaaagacatcgcaggaaaaaaatccttcatgtctgtacacagtgaatctggatcctcaaattcctgaggattcttgacctacactacctaacttaaaacgactttcctcattcaagtgattaaagttagtaaagaagaattttgaaattttacctcttatgctatataatattgaaacaggtaatcttgacaaatacagcacaatctttcacaacataaaactaaatataaccctttatttcttcttcattttacagacgctcacagacattggggtttcactacgagacatatgtatacataatattaacaattctaaaatatatttatttattacttatgtgcaccaaagtagctactcgatatacataatcttattatcctcacaacattgtttagataaagaaactggggttgtaaaggttcagtacccagcgcaaggtagcaatcctagattcatgyggtatttgcccttctatgcatggcttatttcacttaacataatgacctccatttccatcaatgttgcaaataacaatctcattcatttttgcagctgaatagtaccccattgtgtattagtaccacattttctttatacatttatctgttgatgaacacaggttacttccaaatcttggatattgtaaacagtgctgcagtgaacatgagagtgcagatatctcttctatatactgatttcctttgagtatatacccagtggtgga

SEQ ID NO: 72817 - DNA, 1408 bp, Homo sapiens
caaaaggttaacagaatacacatgcttgggtagtgaaataacatacattatgaatataggaacattttgaaaatcatattatcatctcagagctagaaaagtgtagcttggtggctctggaagtacttaattgcttaatgatagcattctacaaaaaccacatagttttcacttgtaaaacaagctggtctagatatgttgagaaagaggagagatggcatgtactgaaagttgcagtgttttggatttgagtcaggatgtggaatgggaagagtttcttctatattttctacatacagcaagagtcagcttgggaagatggcatggtgggtgttcatttggttctgacaagcctcaactgtttttgaatactccagattgccagtaacacatctgctaactgtttgcttctttggggacttagtgttgaacaatctattaagttgcaaatgtttcatttttaaccttaagatgttaaaaccattgaaattcccaattctactttactttttctcaaaatatttgataatttgaattttcacaaagtttcagcacacttaccattctaagtaggcctttctatttgtataatcctttacatttgttagaatttatagcctagtagacataaattcagtaacatatgggggaaatttgttaggagaggccaagagataacttaaagacatcgcaggaaaaaaatccttcatgtctgtacacagtgaatctggatcctcaaattcctgaggattcttgacctacactacctaacttaaaacgactttcctcattcaagtgattaaagttagtaaagaagaattttgaaattttacctcttatgctatataatattgaaacaggtaatcttgacaaatacagcacaatctttcacaacataaaactaaatataaccctttatttcttcttcattttacagacgctcacagacattggggtttcactacgagacatatgtatacataatattaacaattctaaaatatatttatttattacttatgtgcaccaaagtagctactcgatatacataatcttattatcctcacaacattgtttagataaagaaactggggttgtaaaggttcagtacccagcgcaaggtagcaatcctagattcatgtggtatttgcccttctatgcatggcttatttcacttaacataatgacctccatttccatcaatgttgcaaataacaatctcattcatttttgcagctgwatagtaccccattgtgtattagtaccacattttctttatacatttatctgttgatgaacacaggttacttccaaatcttggatattgtaaacagtgctgcagtgaacatgagagtgcagatatctcttctatatactgatttcctttgagtatatacccagtggtgga

SEQ ID NO: 72818 - DNA, 944 bp, Homo sapiens
aacaagataccaagaggagggaaagagaggagaatggatatttggcaaaacactatttgttaaaatggaagttgccatttcccgtttattattatagctgttaaaagacaatgaggacagccaggtgaggtggctcatgcctgtaatcccagcactttgggaggctgaggcaggcggatcacttgaagtcaggagtttgagaccagcctgccaacatggtgaaagcccatctctactgaaaatacaaaattagtcgggcatggtggtgcacgcctgtaatcccagctacccaggagactgaggcaggagaatcacttgaacccggaaggcagaggttgcagtggggcgagatcgcaccattgcactccagcctgggcagcagagtgagagagactccatctcaaaaaaagacagtgaagaaaacaaaaagtaatagtctttaaatatttcaaactattgtgtacatatatattaaatacatatttaattcaaggtgcactattgccttatttagcaattctttttacaacagtgcctttgcactaaggcagctggctcctctctggacttctgcctccaggytccttcccttgactgccacttcggtgaaatgtccatccatctacaggcttacttactgcattctatcagctctttaatgcctgtagctcctaaagataattcacagaattgccccaaagggatctctaaccactttaataaaaatttagaaaataatttaattcccatacaggagcatttccaataagtcaatatggatgaactctaacctggccaagcatgagacaacagcctccaggcacagcccatgtttgctagaaatatcaacgtgatgcttcaagcccatggggagcaagatgggcagtttggactttttggtttttccgtcgacctcggaggaagcggaaccaagagcttgagcc

SEQ ID NO: 72819 - DNA, 1272 bp, Homo sapiens
tgcctgggaactggaggcctctgtctctggacccctagtctcgaggcatcctaatccagtccggctcagggatcattgtacatgtatcacatatacgatatcatatatacagatgatatataygatatcatataaacacatgatatatatgatatatatacacatgatatatatgatatatacacatgatatatatgatattatatacacatgatatatatgatatatggaacagtatataacctgtgacctctatatgtagcataataggatttataagataataaatatataggataaatgtattaggatatatagggtaatacaaatatatatagggtaatacaaatatatacatatgctatatatacatatatcatatatacaaatatatatgatatatatacatacacaaatatatatgatatatatatatacacatacatatatacatatgatatacatacatatataataaatatgatatacgggacagtatataatctgtaacctgtatatgtagcataatagggtttatataatatattaggatatatagggtaatacaaatataactttctataatttgctccttgaacatggggcactgcctgttgccatgtctctgtgagcacctaagggttatacgcggaggtaccaaacacaggacccttgagaaatgtcagccttgtcatgtaatggcatgaggggaaaacactggagaaacagtccttttgtttaaaatagaaacttctaagagagccaagttagcacatgacaaattactgaatatcccgttctcctggaggggagaaaaaaaaaaaagccccttcatttctgaaatgagaaagggaattgctggtaccaaaattcacgtttcctttttggtggaaattctccagccaagcttggcgctaacagagtaggcgatttcacttcgtcgtcacctcacaaaaggcttccaaattcactgcggcagacaccgcaaaataaaaatgttaaatacatcctagctgggaggggattgaagcctccaggctcaatcaaaggtttgcaataataggattcatttaaaaaaaaaaaaaaaaaaaaggacagatgggtttagaaaatgttgcagtgaagactggaacgagatgagctcatagcaccagcctgtcttttgtggacccgcacaatgatccctgagccagactggattaggatgcctcgcgactaggggtccagagacagaggcctccagttcccaggcacttcgggaagaggaggctg

SEQ ID NO: 72820 - DNA, 2126 bp, Homo sapiens
tgtgttaagccaaactgtcttctaaactagctatactattttgcatgtccatcagcaatgaatgagagtccttgttgctttgtgtccttgtcagcctttggtattgtctgtttttgacttttttaccaaaaaaaaaaaaaaagaaaggtcatttagatttttatcctgtgttttcttttagacattttacaatgttacgttttcatttaggtctataatctattttgaagagatttttgtgccttttaaagttttaattttcatcagccaataaatctcctcttttccttagccagtttgggttgggttttctgtcatttggaactgtgcaagagtcttaattaacacttaaaatttcttctaacttacaccagtgtatatacttagttttatgtatttacatagttcaaattgttgtcacctttgatagatttctgcctttcattatactgacatataatacttagcttcacagcctcctgtattttataatttcctaatttttactgttacaaatttgtatgaatactttgcataaattatttttcttgttctcttattttcatgtggtatatatagagagagcagaattagcaggtgaaagatacaaacagatatataacttattaatgccacaagctttagagaattgtatatactatgaacaatgtatacgtatttaaagcccaacaatttttttttttgagacagtctccctctgttgctcaggctggagtgcagtggtatgatctcagctcactgcagtctctccctccagggttcaagtgattctcgtgcctcagcctcctaagtagctggaattacagacgtgagccaccatgcccactaattttttgtatttttagtagagatggggtttcaccatgttggccaggctggtctcaaactcctgacctccggtgatctgcccgcctcagcctcccaaagtgctgggattacaggcatgagccaccacaaccggcccccatcaatattttttaaaatcatttttattacttcaaagaagtagatatgaatccttttttgcttttgccttttacaaattttattgtgactattttaaaacacacgccaatgaactcccacttacctgtcacccatattcaacatttatcaaaattttgccacatttgactcacatctctcgtatttttcttgtaaaaatattttaagcccagatatcatattatttcacttacatattttattgtgcatctgaaaaaatatgaacatattcttacatagtcacattgccgtgactgcacctaacaaaattaataactatcatttggcatcatgtaattaacaactccataacaaaattttcctgattgtctctaaaatgtatttttacagttgattttgagaataaggatccaacacacattgcattcagttgtgttttctctttttgtctattttaaactggtgcagtcttcccttcttttttccctgccatttacttgttgcagaaactggatcagttatgcagcagaaatgtccaacgttccgaatttgtcaattacttccttctcatatcatttaacttgttcctttattctctgtaaactgaatttggctctagaggcttgattatagccaagttcaactctttagggatgcttatgtcttagatggtactgcagtcagttcacagaaatcaaacttttgagctgttcaagaataataattttaactcctrtaaggcccatcacttaccacctttctaacctattggagcttggagctctttcctccatgtttggaactgtttttaatataaagtccgtgttttcataaaaacattagtttaagtgaagtacccaggctaggcaaacaaaagattgatttaatccatgcaaatattgtgtaattgtgataaaaacaagaaaaatatcttgtcactattaataattaatatgacaacaaaatatcatgagaaatcatttagaaattattttggatgtcaataatgtaaaaaaaaccatgtagaggatgagaaaatactgaggaatttcgcagcaattctgagagttactttagagcacttttaagagtttcataggatttttattgatttctaatttaattttaaagtgaaattt

SEQ ID NO: 72821 - DNA, 1219 bp, Homo sapiens
gccacattttaagccagatgttaataaattgaagagcatcaagaggcagagtggtgcagagcctgggaatgttgttacatgaacgcctgaaagaagtggggaagcctaatttgcaaaagagcctaaagtgaccctttcctgggatctcatgggctatttcaatgagacggggattytttaccagaattcagaattcagactactgtgtgactgttacaggaaggcagattttagttcaatgtatggaagaataattagacctgtccaaaaatagaatgtgcttttgttactggaaatattttgtcagttggatgaacacgtgctgtgaaggggagcccacatagagtgcaaggtcatacctgctgacctctgaaggctgcacctatccaaagctcccttagaacatcctggaaaccatgtatctctgccaatactgtgtacagtataactgaatttagggctgtatttatgtgattttcaaacaaccaaccagccatacaaagtagattaacaacgtgtccactaatacatcagggcatatgtttatttcagcaccgggattttgcccatggtctctgctgcagaagcaaccagaaatcacaaggagtagtttttgttttttgtttttgtttttgtttttttgtgacaaagtctcctctgtcatccaggctggagcacaatggcgcaatcaaaactcactgcagcttcgacctcccaacctcctggactcaagtgatccgcccacctcagcctcccaagtagctgggactataggcgtacaccactgtgtcgggctaatttttgtaattttgcatttttttttattaacagagataaggttttgccatattgtccaggctagtctcaaacccctgggcccaagggatctgcccaccatggcctccctaagtgctaggattacaggcatgagtcactaagccaagccagtagaactcttaactaacccttatgagagcctctcaatagcaacggaaacatggggacatttgaagataagattacctttccatgcaaaagagcagcagcttggtgtcctttgttgattctaggaatatataaattgcaatttcagagtccataattagatgctttgaagaatgagaatgccaacattgctagtcttggtacattaattaataaatgttagaagttacttggcacttcttccccttcagaaacaacagcaagagcatagggc

SEQ ID NO: 72822 - DNA, 1219 bp, Homo sapiens
gccacattttaagccagatgttaataaattgaagagcatcaagaggcagagtggtgcagagcctgggaatgttgttacatgaacgcctgaaagaagtggggaagcctaatttgcaaaagagcctaaagtgaccctttcctgggatctcatgggctatttcaatgagacggggattctttaccagaattcagaattcagactactgtgtgactgttacaggaaggcagattttagttcaatgtatggaagaataattagacctgtccaaaaatagaatgtgcttttgttactggaaatattttgtcagttggatgaacacgtgctgtgaaggggagcccacatagagtgcaaggtcatacctgctgacctctgaaggctgcacctatccaaagctcccttagaacatcctggaaaccatgtatctctgccaatactgtgtacagtataactgaatttagggctgtatttatgtgattttcaaacaaccaaccagycatacaaagtagattaacaacgtgtccactaatacatcagggcatatgtttatttcagcaccgggattttgcccatggtctctgctgcagaagcaaccagaaatcacaaggagtagtttttgttttttgtttttgtttttgtttttttgtgacaaagtctcctctgtcatccaggctggagcacaatggcgcaatcaaaactcactgcagcttcgacctcccaacctcctggactcaagtgatccgcccacctcagcctcccaagtagctgggactataggcgtacaccactgtgtcgggctaatttttgtaattttgcatttttttttattaacagagataaggttttgccatattgtccaggctagtctcaaacccctgggcccaagggatctgcccaccatggcctccctaagtgctaggattacaggcatgagtcactaagccaagccagtagaactcttaactaacccttatgagagcctctcaatagcaacggaaacatggggacatttgaagataagattacctttccatgcaaaagagcagcagcttggtgtcctttgttgattctaggaatatataaattgcaatttcagagtccataattagatgctttgaagaatgagaatgccaacattgctagtcttggtacattaattaataaatgttagaagttacttggcacttcttccccttcagaaacaacagcaagagcatagggc

SEQ ID NO: 72823 - DNA, 486 bp, Homo sapiens
tagcatgggtaatagagttcttttagtcttacagtgtaaatcttatgtttagtcttagaatattagtgtctactcttactgaagagtttttaaaatcttatagcatgggaaaagaggcatagtgacaaattgtgacttaacttttctatagtgatgtcttcaatgtcctaacaattgctcagttacttatctgatgtaattttcaccactacggagggtggataatattcatcaaattttactgctaaagagcctgcagctcagagagaatcaatgactgctcaagatcacrcttcaaataagttgtagaacttgtactagacccaataatttgtatttttcagtaagatttgaaaagccatgaatgcaaagttaagagttcgcctcccagcatacagtgtcccagggatctgctacaagtgtttcctactttctgcatatatgaccatcattttccttgctgagacccataattatagccttttc

SEQ ID NO: 72824 - DNA, 486 bp, Homo sapiens
tagcatgggtaatagagttcttttagtcttacagtgtaaatcttatgtttagtcttagaatattagtgtctactcttactgaagagtttttaaaatcttatagcatgggaaaagaggcatagtgacaaattgtgacttaacttttctatagtgatgtcttcaatgtcctaacaattgctcagttacttatctgatgtaattttcaccactacggagggtggataatattcatcaaattttactgctaaagagcctgcagctcagagagaatcaatgactgctcaagatcacgcttcaaataagttgtagaacttgtactagacccaataatttgtatttttcagtaagatttgaaragccatgaatgcaaagttaagagttcgcctcccagcatacagtgtcccagggatctgctacaagtgtttcctactttctgcatatatgaccatcattttccttgctgagacccataattatagccttttc

SEQ ID NO: 72825 - DNA, 486 bp, Homo sapiens
tagcatgggtaatagagttcttttagtcttacagtgtaaatcttatgtttagtcttagaatattagtgtctactcttactgaagagtttttaaaatcttatagcatgggaaaagaggcatagtgacaaattgtgacttaacttttctatagtgatgtcttcaatgtcctaacaattgctcagttacttatctgatgtaattttcaccactacggagggtggataatattcatcaaattttactgctaaagagcctgcagctcagagagaatcaatgactgctcaagatcacgcttcaaataagttgtagaacttgtactagacccaataatttgtatttttcagtaagatttgaaaagccatgaatgcaaagttaagagttygcctcccagcatacagtgtcccagggatctgctacaagtgtttcctactttctgcatatatgaccatcattttccttgctgagacccataattatagccttttc

SEQ ID NO: 72826 - DNA, 1473 bp, Homo sapiens
cttttaaacatactccataattttgttatttattatgtttattgtttagagtctgtcttcccattaaaatataatcttcatggtggcagggatggttatgttttaatcagagtatcccaaatatttagaacagtgttgcccaatcgaatgttctatactgatggatatgtttcattattggcatagtctaatacagtaggcactagcgacatgcagttactgaacwcttgaaatgtagctagctagggtgacagaatacttgaattaaaaattttgtttagtttttgttcatttaatttaaatagccatatgtggctactggaatactgtatttgcataggtctagaatattacatggtacacagaaatttctcagtacatatttgttaaatggatgaattcccttctgaattcaaaaatcaagaacaagctacatgattgcatatttagttcgctctttaaagattatcagtaaagacgaagcactttactgattgacttgctcatcttggaggcttcatgaagttataatatgattcagtttgcaattttaatacatttttatttttatttctttttggtgtcaggtcaagaaagatttggaaacatgacgagggtctattaccgagaagctatgggtgcatttattgtcttcgatgtcaccaggccagccacatttgaagcagtggcaaagtggaaaaatgatttggactccaagttaagtctccctaatggcaaaccggtttcagtggttttgttggccaacaaatgtgaccaggggaaggatgtgctcatgaacaatggcctcaagatggaccagttctgcaaggagcacggtttcgtaggatggtttgaaacatcagcaaaggtaatgtgactttaaataataagcttaatataagcaaggttcacaaagaaaatggcacataatcatcaccatcatcataatgataataatatgtttgtttagtgatgtatggttttcacattgctctaagctctttctcatctcagtgcaatgagtaggtaaggcaggaattattatctacaatttaagatcattgtggcaagaggaggaaagcaacttgtacaaggtttcaatagtaatagttgataactatgtttgccttttgaggtcttactatgagccaggcatattttgcatgcattttcctatttagtcctcaccacaactttattaggtgagtatggttttatagtaaaggccttattcatgtgttagttaatttacacaatcaatatttaatatgttcacctgtacatcaggaattgtgcttcctcctaggaaagaaaagatggcaaacactacattgggcataccggaatagtggggtaacagagaatagacagcaagcacaaatgtgaagaacacagcatagcttggccatgctgtttcccctggatggcagaaaagtggcaggaggtggagctgaggcagggctggaagatgaa

SEQ ID NO: 72827 - DNA, 750 bp, Homo sapiens
gggaggctgatgtgggaggatcacctgacctgggaggtcaaggctgcagacagccttgatctcacgccactgcactccagcctgggcaacccaagtgagaccctgtctcaaaaaaaaaaaaaaaagtgttgagaacaagttacagacatgaggcttttttccctaaaaatttaagcatgtactcactgcctaagataaaggacattgtagctgactaggataccattatcatccctaagaaagttaacattcattcaataatatcacctatcataaatatgatagtgatatcataaatatcacctttttttcctctaattgtctcaaaaatatcctttatatctgtattttaaaatccagaatcatctaatccaaggtttacttgttgcatttgtctaagttgtactgagtacttgactgacttgtggtcatgaaaatgactccaaagcagcttttatagaacggccatctctacagataacgagaacattacccggataacattctcttacatgcagactttacaattttttatttacaatctrataatgatgtattttcatgtagtttataagaggttgtacaattgatgagcactcactatgtgctagacgctgtgctggccttgaggctcttacagcttaggaaagggagacacacatgtaaacagcatgagagcaatgccaggacaataaagcaaggacaggagtaggcacatggtatgaaggaaagcttcccaaagaaggtgga

SEQ ID NO: 72828 - DNA, 750 bp, Homo sapiens
gggaggctgatgtgggaggatcacctgacctgggaggtcaaggctgcagacagccttgatctcacgccactgcactccagcctgggcaacccaagtgagaccctgtctcaaaaaaaaaaaaaaaagtgttgagaacaagttacagacatgaggcttttttccctaaaaatttaagcatgtactcactgcctaagataaaggacattgtagctgactaggataccattatcatccctaagaaagttaacattcattcaataatatcacctatcataaatatgatagtgatatcataaatatcacctttttttcctctaattgtctcaaaaatatcctttatatctgtattttaaaatccagaatcatctaatccaaggtttacttgttgcatttgtctaagttgtactgagtacttgactgacttgtggtcatgaaaatgactccaaagcagcttttatagaacggccatctctacagataacgagaacattacccggataacattctcttacatgcagactttacaattttttatttacaatctgataatgatgtattttcatgtagtttataagaggttgtacarttgatgagcactcactatgtgctagacgctgtgctggccttgaggctcttacagcttaggaaagggagacacacatgtaaacagcatgagagcaatgccaggacaataaagcaaggacaggagtaggcacatggtatgaaggaaagcttcccaaagaaggtgga

SEQ ID NO: 72829 - DNA, 750 bp, Homo sapiens
gggaggctgatgtgggaggatcacctgacctgggaggtcaaggctgcagacagccttgatctcacgccactgcactccagcctgggcaacccaagtgagaccctgtctcaaaaaaaaaaaaaaaagtgttgagaacaagttacagacatgaggcttttttccctaaaaatttaagcatgtactcactgcctaagataaaggacattgtagctgactaggataccattatcatccctaagaaagttaacattcattcaataatatcacctatcataaatatgatagtgatatcataaatatcacctttttttcctctaattgtctcaaaaatatcctttatatctgtattttaaaatccagaatcatctaatccaaggtttacttgttgcatttgtctaagttgtactgagtacttgactgacttgtggtcatgaaaatgactccaaagcagcttttatagaacggccatctctacagataacgagaacattacccggataacattctcttacatgcagactttacaattttttatttacaatctgataatgatgtattttcatgtagtttataagaggttgtacaattgatgagcactcactatgtgctagacgctgtgctggccttgaggctcttacagcttaggaaagggakacacacatgtaaacagcatgagagcaatgccaggacaataaagcaaggacaggagtaggcacatggtatgaaggaaagcttcccaaagaaggtgga

SEQ ID NO: 72830 - DNA, 946 bp, Homo sapiens
cattacacttctcagctgagctctcaaagagctctrtgccctgtgaaaagcagtggctgagttggatgaacacatagcattattaattttgcactgggaaaacagattatgacaggaccacagaccacaatataaaaacttggcagttctttggtgtgatatattttaattagtatttgcaaataatcagagttacttgtgtacataaacgtgtgtttcacaactatggccagatgcaaccttttggtctgtttcaggaaaagacctattattccactaacaattatgctgccttagaaacataatgggagtgtaattgaagaaagcatgtctcagaaggttttgatatgcagaactggaagctattgtaattcctacatacatttccattagctatgccttatgtaatgtgagtgcagatttttacaacttagagttcccatcagtgtttttttgccacatcaccgggtttcttattttactgttttcttttcaactttgggtgctttatttccattctctaaaactaagtttcttgctcttacgagacttagtgttccttttgaacccaggtgttccacctgacagtgtttgtctttcatagactttccagaatagacatagtcaagatcagacacgtgagcttctctctcattttaatgtgaggaaaatcatctttcagagacaaggcaccgcttagaaatgtatgtccaggtatgaaagaacctttttaaaatggctggttgttcctgatccagatttctctgcacactggacttcgtagagtaagtgtggtagacaaagagactacactgcacaaccaccagtgaatatcattgctaagaagactttgggtcgtgtttctcagccactctcacagcttttgtagacttaatcatttgattttgaaacaagcagttagctaaatctattttccttttatgca

SEQ ID NO: 72831 - DNA, 615 bp, Homo sapiens
cctgacaccagagggtcacgggactcccctgggtgatcacagagcctggctcagcccagagtgtgggcttggggagggtccctggaaggaaatcagagttcagattctaagtcatttcccacccaacatatctcagctctcagcccaggaccctccagatgcccccatcagtcagtccagaactgctattccccatccccagctgcacgggggtggccccttgtccccagtgaggaggagggacctgggagagctggggacagactcacctgcctgcacgtgggtccgggggcccagactcagccctggaagagagttccctgtgaggaatttgcccctgaagcctgggcaggtcctcccctccctgggatctttgtgagcccctggggtctccttagggactagaggtcggctgtggggtgaggtccctcctaggttagaagctcccctccctcttcaaatctcacygagacagatcaggactgtgacgatgggggtcatagcgtctcctcccactgccctgctctgcggatggatgagccctcggtgctggcaggacagagacacacagagagaaatagcctcccctccttcccacccagtgtggacactcgg

SEQ ID NO: 72832 - DNA, 621 bp, Homo sapiens
ccacacccctgtcttggccctttacaatcctggtcacaggagagcccctgaccccccttggcctacagaggcacagggagttcccagagatggtgcagaggcgcctctggagcccacgtggaatcccacaggcttctgatccctgagcagcctgggtccagctgccactgccttagcagggagggaggaggccaggcacctctgtgggccccagaataagtatgacagctggggcacaggagcagccaagctgagcaccacacagctgcccacctctgttgcttcctgcgaaatggggcttccttcctgctaatggggcttgccagctgcagggccccagtcacccgtcctgcccccacccgaacacsgtggccctggctcagtgccctctgaaagcccaatgctcagaggcccctgacaagccctttgcagtcactgccacctctgcctctgcccctgctgccccaggcccagggagggtgtggggaggcctggcactttcacgtgtccccagagcaaaaccgagtgacacttcaggagggaagtgtgagcgggccctgtgcctcacagctgccagtctccagtgccccagcagaggggccctgccctccctagtgacag

SEQ ID NO: 72833 - DNA, 621 bp, Homo sapiens
ccacacccctgtcttggccctttacaatcctggtcacaggagagcccctgaccccccttggcctacagaggcacagggagttcccagagatggtgcagaggcgcctctggagcccacgtggaatcccacaggcttctgatccctgagcagcctgggtccagctgccactgccttagcagggagggaggaggccaggcacctctgtgggccccagaataagtatgacagctggggcacaggagcagccaagctgagcaccacacagctgcccacctctgttgcttcctgcgaaatggggcttccttcctgctaatggggcttgccagctgcagggccccagtcacccgtcctgcccccacccgaacacggtggccctggctcagtgccctctgaaagyccaatgctcagaggcccctgacaagccctttgcagtcactgccacctctgcctctgcccctgctgccccaggcccagggagggtgtggggaggcctggcactttcacgtgtccccagagcaaaaccgagtgacacttcaggagggaagtgtgagcgggccctgtgcctcacagctgccagtctccagtgccccagcagaggggccctgccctccctagtgacag

SEQ ID NO: 72834 - DNA, 621 bp, Homo sapiens
ccacacccctgtcttggccctttacaatcctggtcacaggagagcccctgaccccccttggcctacagaggcacagggagttcccagagatggtgcagaggcgcctctggagcccacgtggaatcccacaggcttctgatccctgagcagcctgggtccagctgccactgccttagcagggagggaggaggccaggcacctctgtgggccccagaataagtatgacagctggggcacaggagcagccaagctgagcaccacacagctgcccacctctgttgcttcctgcgaaatggggcttccttcctgctaatggggcttgccagctgcagggccccagtcacccgtcctgcccccacccgaacacggtggccctggctcagtgccctctgaaagcccaatgctcagaggcccctgacaagccctttgcagtcactgccacctctgcctctgyccctgctgccccaggcccagggagggtgtggggaggcctggcactttcacgtgtccccagagcaaaaccgagtgacacttcaggagggaagtgtgagcgggccctgtgcctcacagctgccagtctccagtgccccagcagaggggccctgccctccctagtgacag

SEQ ID NO: 72835 - DNA, 1246 bp, Homo sapiens
gagggtgcagtgggacgtaggcaagaggacataatggggcggagggaagaggatgtagtgggctgaggggctgccacggaggggtgcccagttctgcttctgctagaaggggcaggggagtgagagaatgtcagccaggtcagagaagatgggaagagtcccaggatgtgctgacgaggagagtctggcatgactggtctgaggtgggccgtgatgacagacagtgtggaagaaataagagcagcctggagggcccctgggtgccaagcaaagaggtgcagcttctctctggagaagctgcctggagggttgaatgaagagattggtgggtgtcttggtccaacttacctgttggcagcatggagagtgggttggcgggcaaacagtggagtcagggaagcctgctaagagaccagtggagtaatccaggcaagttctgaactaggggaaagctgacggggttgagtggtggggaccaagagacgggatccatggcaggaacagtgacatgcagaggaacctggcatgtgagagagggaagaggccaggctcagcctaggacctgcagattccgaggtgcacatggaccacagatgtcccgcagggctgagagtgtgggtgtgcccatggtaggaggcttatgatggaaagaggtcagctggccttacaaggtcatttgaaacaacacccaggcagggctgaccaggggcttctagtaggtaggtcttgtgctgaggagagaaggcagcactggagacccggcttgagagtgtctgcacggggctggagatgcaggtcataagagaagatgcatggagwgagagagtgaaaagcggaaactgaagttgaagcaatggacttgggggtgccccattgatggggtaggcaggaagacattggagccaggaggaggcaggaaagctgctgtggtaagctctacacttcaatgtgctggtatgtgtggtgggagacgctggagcagtgccaaagtcatccatctgacctttaatgttgtgaaatgtcatgtatggtgaactggagctctgctttctccagaagtgagtgggccttggcccggtttactggccacagagacattctacctgttatctaccttcaggagacatctacctgttatctgcattctatgaaatgtgcaagttgtacagattcctggggctggagcagctccctccccgatcctgctccctttctcctctcttcctctcatcctctctcctttcct

SEQ ID NO: 72836 - DNA, 698 bp, Homo sapiens
taaaggaattccagtggtatctaactggatttctttttacagtctttgtcattattcagatctctcgtggagtctgacccctttggtgtaggctgtctccctaagggaaagtggttgagtcttatgcttttcagcagcctgagatccccagggcaggcatcattactgctggctagatgaaagaaggagacttgcccccacctctggctccagcaagtccaaagccagaggccacacagagagaagggcatttcacgcagtcactaccaatccccacagcagtcatgtcttcttgcagaccccgtgccyattgagctcagctagacaggcctctgtggctgtgattttgggtcccaggcctctgaagactgtgcatcatatttttcaaactaatgaggttccttaaacagtgtggcattgccacttcatgtctcctcatttccctgtcgggtaggaacatctgctagggtcctgggaaaggcaattagcaaattagagtttttgttttcttgctcagccatgattgaagccccagagcagatccttctggataatgtcattaagcatccccatccaagcatgacgtaggaaattaagtttggttttggggaaaagtgacggaggcatcctttggcgttcttcaggatgctggctgcttactgggttgagagatgatggtattcctgtcaggaagatgg

SEQ ID NO: 72837 - DNA, 1549 bp, Homo sapiens
aaacctgggtctgtctcattccaaaaccttactcattctgccataccgaggtgtaatgcatcacagtgtttgagcttaggtgacatagaggaggcccagagaggttaagctgggcttgagacccatggtggattagtcacagccagtgaagcttccggttctccagagccaccttcccaccctgcggcgctgsagaagggccatgccggctgccaaggctcagctgtgcttctctcccatcatcccacatgcatattaatcacacacatagactctaatgagcagttcaacctctgcagcaggctcagaccagaagccaggggtcctcaccagctgggcatgaagagccctgtgcccactcctccagccctccagagcctgagccgtgccttgctgaactccagcctgagccatgccttggccccctcttctaataccacacaggtctcccatgtgaccttgttctggtcactgctgtgttctgagcctctgtttccacctctgggaagtggaggctagcagcaccagccccatgagatgtctgtaaaaaaaaagccaggcaggtcccggcaggcaaattcccagctggcctggccaggttccctgtagttgttggcagccaggcgtgcttgctgtatctctacagcaagcggtttgcagcagccttgctgcctgaggtcggctggggctcagtggtctgccctgaggctgacactgcgtatgtccaccttctcttcctcctccagctcccacagctcccagtctcctcccgccatggcccttctcatctgactgtgagcctggttggtctgtgtacctctggcctccagcactgggccggctcagagcaggtgcatgggaacttggtgaatgaatgagtcattgcatttgtgcctggctgtttccagatttgcactggctgccatgggacatccaggggagagtctctgctcctgccctctccaggtgaccacggggagatgaggcagttccttatctctgtcagttgcctcggagggagctgagctagacagctgttgcatgcactcttgtgccctgaactcggagaatggctggtgagagactcagggaaggcctcttagaggaggcaattttttaatgacgacctgaagagaacatgggttggatattgtgtttactcctgggcctttttttaaccacccccaaaagtcgtgtaacaaaatgctctcaagtggaaaccacgttattgcaccctgaggaggaagctgattgcctgctagactgagatgctggcttatttcttggcctgaaggttctcccttgtgccctgcccgccccccgccccccgcccctttgcccccctgggagcagccctcaatcactgtctggagggttggtgtacacattctccagccccctcaccctatcccttgtgttggctcaccctgtagctggctgaggacaagcctctcctgcctgtgcttcccttgtctccgagacctcatccattttctcagtggctgcactgctcctcccagagaacatgggagatttagaagtacctcag

SEQ ID NO: 72838 - DNA, 1772 bp, Homo sapiens
taggtatttgtcctaatgctctccctccccttgccccccaccccctgacagaccccagtgtgtgttgttcccctccatgtgttcaaatatgtctttacaagagtgttcattgctacattgtttgtagcaacaaagaatagaagaaacttaaaatatccatcaatcagggactgagtaaataaatcatggcacatctgtccattggagtaccgtgcagatcttgaaaaaaytggtgtacatctaactgtgttgatgtggaaaagtctctttgtgtattgtcaaatgaagcaagtgaaggttcaaaacattgtgtatagaaccccatctcccttcttgctacacatcagtttttttaagaagaagctatatatttttacatatgtttttgtgtttgtgaaacagttctagaaacctcgatggtggttatctctatggagtgggacagggagggggccagagagggtcactggattttctttgaataagtctataggttattttcattattcaacaaagggtaaaaggagaaggaagatgaggaaagagaataaaaagaaaaacatatttctaaactggaccacaaagtttgcctggccatgactctgtcctctatagctttatcttgtgctactcactctcattgtccttcaggctctagctcactagtctgctctccattctttgcattttcagtcctccctctgacctctgggtctttacacatgctgttccttctaactagaactaccccaactagcacacacagttaacttttgcttctcttttaaatgacttcttgctcctgagggaagccttccgtgacttctcaggctgggccaagttccccattatgcattcttgtagcacccagtgcttttcatgcatggcactaatcgcagtttaaaattctgtatctgtgggctattgtttcacatctggctcccctagtaaattgctgctaatcatttcactatcactcagcaccacatatgacacatatgaggtgctccataaatattaatgagtaaatgaatcaactagggaggttgcagggggcaagtctcccaatatggagtggggcattgtttagcatggcccctttcaagttcttcctactcagtggtctcataatttgagccaatggctttctttacctttgttgtaggaaagtgtcctgcaaaggtcttccctttagaagtgttagaacacacaagaatgaaccctttcttgtggaaaactggagaaggtgtcaataggcttcatcttagtactcctagatttttgttcattttaacgttgttagaactcagcaaaagaaatgtttattttatgttggacacattttgtcatacatatgtcaaacaggcctaaaataaatatgacaaaagtgagtatatagacaaaacaaaggcaaaaggagattttcactgccaatatggccaatggatctgatcctcccagaaagaacgatataaacttggataaacataccaaaaaaaaaaaaaaaatgacctgggcctgaagaatgatggtaagcaaatagattctggagaggcatctacacttggaaaaaatgaatggcacagattgaattattcacacgtgtggcttttaacctttgttccaggtctaaatcagtactacacatggtagctaaatatctgcttgaaaaccaatagtctttctggcctaaaaaaactagaggacagagttcagggcaactgaagccactgagaagtgaggaggggattctgtaaagcacacagctagag

SEQ ID NO: 72839 - DNA, 978 bp, Homo sapiens
aaggaaatatcacttagaactatcatattttatgaaaacatatgttatttcatattctcaaaaataagtagtatagatgtttatctttaaggatgaaaaaaaccattacaaattctatttatcactatcaatgaggttttccaattaaaatgacaacctttgattaatataaagcctcattattgtaactgggcaataaattcaacattccatgttgtcattttactattaattatagtcacatttttatacaaaagaaataaacatatgttaaagattcatttactctttttaattaaaaacccccaacccaatacatagaaaaaaaaaaaacgattaaataattaactttctttttctttggagatccctgtgcattttaatttacatgttgattatgtagccaggaaaagtctcccatgttaaatttgattgagcaaggcagaaagtgccttaaaatgaatagaytgctgaaactggagaacgcattttgtctaattgtgttaatgaactaccctgatgagacttgtttagtacaaaagcccccccgaccttttattgactgtaaaacaatacttctaatatctaaagagttttactccatttttgcatttttaaaaagccaaacactcaagccacttaaatacttgagaaaataatggaatgggtaaaagatctaggcatttgtcagctcagtagtgaaaccaccgctccttgtttattgaaaaactctcatgttgaggccacctgtgttttttaattacttcgtttgcatctcagactatgatagacattgtgtacaagaagtacaaattatgtaactcataatattgtgtgcaagggctagggtttatgcaggagggaaaaaatatctgataagttgtcatagtataatctaacgtgtggtgtttataagtgtcatagtgttcaaaaaggacattgatggtttggtgtaaaaatatgttccccttccatgta

SEQ ID NO: 72840 - DNA, 1095 bp, Homo sapiens
gaaaaattaattcgcattaccaaaatcggttgcctggaactatctttgcagggagaaggtactccttcaattccctttttctcccaactcctcacctataaactatgtgataaaatgagaaacttctttaactcagtgaagaagacatgggtagttccccacaaaaatgttgtgctccccttttatagtatatatttgtggattggtaaaaactacctagacagggtctagattctctgcaggctttcccctatgtcaacatgggattttctaactaattcttgccatggaattttcgtaagcaataaggcatgtgtcaatttaggatttttaagaagcatatgtgtcatctttacctattctcccatctccaacattgggggtaaaagactctgagatcctagtggaggacagattaacaaggaggaaaacccctgctcttctgtttatcatatgcaggaaagccacttaccaaataaaaacaagcccacaggactcttaaatgactgagaaataaactgctgtgttaaatctttgaaattgtaagacttaattctcagagtagcttatagtaccttaatatatttactatgtctcaaagtgtatcttctggaataayagtccaagtagacatgccataaaaaagttctatgaccaaataagttagaaatcatatatcccttttacagacacataatagatacaggataatcaaaagctcaggaaagtcgtgtagctttaaaaaatgtttaactgtgtttaatctagcaatttccaaatttactggcaaattaaatcctttatggcataagaactattaatgttgtatataaatgctattaatcagaaaactctttggaaactatttccttggctaaatgattgataaaatcccctcgtgacttggaaaatgtctttggaaggtgaacgatagagaaagggcttagagcttaaaaaacaaatgaacaaacaaacaaatactgaagatctggagacattaatctgtttatgatgggaacagtttatattcaataatcttaaggagcaaaactttttttttttttacctaagtatgctttttcaagtcctgaagat

SEQ ID NO: 72841 - DNA, 1371 bp, Homo sapiens
gcatttacgaaatatgggaggttagggttacctttgaagataaaatttaacttttcaccaatcccacaaaaattaaatatcaagataataaattatatatattacaaaggacatggatatctttaaaaacctgtactatacacacataccaacacacaagagttagatgttcatagactagaagtcctaggataaactcaaactacttgcagaaaaagacaaacattgcttcagtaaacaatatgtcagtggattcttacaaatgccaaactaaaatttctccaaaatattacaaccgaatgactctaaaaaacttccagcaaagcctaattcttcaatgatgacatcctgaaacaccagtgtcttcttggtttttagtgaaaatattagccaatttctaaatagcaaaatctctctctmtatatatatagatatcaaaatatcaaatatctatctacatacatatgtatattgatatatattggtcacccaggctggagtgaagtggcgcgatctcggctcactgcaacctccattccctgggatcaggccattctcctgcttcagtctcccgagtggctaggattataggcacccgccaccaagcccagctaatttttctatttttagtagagatagggtttcaccacattggccaagctggcctcgaactcctgacctcaagtgatactcctgcctcggcctcccaaagtgctaggattgcaggcgtgagccactgcacccggccagtttgctattttttaataatggctttacatttgtgaaaaaaggaatgatgaaatcataagggcacctataagggattcagcattcctattttcaaatgaaaatataggtgctggatgttgtagctcccacttgtaattccagcactctaggaggctgaggcaggaggatcgcttgagcccaggagttcgagaccagcctaggcaacatggtaaataccgtctacacaaaaaagtaaagaaaattttaaaaaattaaaaaggccaggtgtggtggtgcacacctgtaataccatcactttgggatgctgaggcagaaggattgcttgagcccatgagtttgagaccagcatgggcaatacagtaaaactttgtctctacaaaaagtacaaaaattagccaggcatggtggcacatgcctgtggacccaggtacttaggaggctgaggttggaggatcacttgagaccagcggtcaaggctacagtgagtcatcatcatgcaactgcaatccagcctgggcaacaaagtgtctctaagaaagtgaaaatgaaatgaaagtatttttataacagaaaagtaaaataaatatcgctcaggtttatgtagctttacatgccatagct

SEQ ID NO: 72842 - DNA, 1371 bp, Homo sapiens
gcatttacgaaatatgggaggttagggttacctttgaagataaaatttaacttttcaccaatcccacaaaaattaaatatcaagataataaattatatatattacaaaggacatggatatctttaaaaacctgtactatacacacataccaacacacaagagttagatgttcatagactagaagtcctaggataaactcaaactacttgcagaaaaagacaaacattgcttcagtaaacaatatgtcagtggattcttacaaatgccaaactaaaatttctccaaaatattacaaccgaatgactctaaaaaacttccagcaaagcctaattcttcaatgatgacatcctgaaacaccagtgtcttcttggtttttagtgaaaatattagccaatttctaaatagcaaaatctctctctatatatatatagatatcaaaatatcaaatatctatctacatacatatgtatattgatatatattggtcacccaggctggagtgaagtggcgcgatctcggctcactgcaacctccattccctgggatcaggccattctcctgcttcagtctcccgagtggctaggattataggcacccgccaccaagcccagctaatttttctatttttagtagagatagggtttcaccacattggccaagctggcctcgaactcctgacctcaagtgatactcctgcctcggcctcccaaagtgctaggattgcaggcgtgagccactgcacccggccagtttgctattttttaataatggctttacatttgtgaaaaaaggaatgatgaaatcataagggcacctataagggattcagcattcctattttcaaatgaaaatataggtgctggatgttgtagctcccacttgtaattccagcactctaggaggctgaggcaggaggatcgcttgagcccaggagttcgagaccagcctaggcaacatggtaaataccgtctacacaaaaaagtaaagaaaattttaaaaaattaaaaaggccaggtgtggtggtgcacacctgtaataccatcactttgggatgctgaggcagaaggattgcttgagcccatgagtttgagaccagcatgggcaatacagtaaaactttgtctctacaaaaagtacaaaaattagccaggcatggtggcacatgcctgtggacccaggtacttaggaggctgaggttggaggatcacttgagaccagsggtcaaggctacagtgagtcatcatcatgcaactgcaatccagcctgggcaacaaagtgtctctaagaaagtgaaaatgaaatgaaagtatttttataacagaaaagtaaaataaatatcgctcaggtttatgtagctttacatgccatagct

SEQ ID NO: 72843 - DNA, 708 bp, Homo sapiens
actcaaacatctcttaataatcaaagtgcctttctagtaaacatgttttgtgtttgatatggtgcaattttggaataacttaaatttgtgaaacacgaaagagtatctactggttaaaaagtaaaggaatatagtttcccttaaacatacgtggttgtacaaattgcatacattactgagattttatttcaacgtggtaaatgaatagaaattactttaaaaaatatatccagactcaaattatgttggagtatattgcatgaattaaaatgctgaggttttaatcagcctatgtgtatggactgggaaatcttttttctaaaaggtgtcctgactctgactttgcttcctagtactttccttgctttgattctttgggcaagtgtgtgtgtgtgtgtgtgtgtgtgtgtgtgtgtgtagtggggagagagagggggaaagagagagagagacagagagagagagagagagacacagagagagagagagacagagacagagagagagagtgtgtctgtcttgaatgttggaggtgggcagaggggcactggcccagttaagagtcttagggaaggtcttcagccttttttaaggaatttcatcaatatcaatttcatcatgaggtcatgttatttcagaaacraacaggtccagccacagtcactaatgttttgagatctcacctcaattgaccaatggcaaacacag

SEQ ID NO: 72844 - DNA, 2087 bp, Homo sapiens
ctctcctgagcatggggaaatgaactagatttctgctcaggaagctgtttcagctccaaacttcactgttccttcagcaggctatctggaagggcagactatgagctgggcttctttaggagctcacaaagctatgtccaagtatgaagtctcctctctgccatcactgtcatccttatgctggaagcgatcttattagggttccaatcaccttccttgttttgccccgaaatttcctgaatactcactaaccaaagactactttccctgttgcttgtttttttcattgttgttcctctagaaaacaagcctccagatctgtttcaatttaaacagaaaggagtagcgaaagttacaaagatgaagaagatgaatgcattgtactcttatagtgaactgggtctccataaattgtttttggtatagcatgtcccatttagcccttacataagctcagataaggcaaggaaatactcagttttagaggcaaagggacaaagactcagagaggccaaacaaggaagctagatttgatccctgaatcctgaccctaagttctctttacattagaraaaagtcctgattgcgtgtctgtagtttcccagtgatgtttctttgcctctcaccctgaggtgtatcaataggtgcaggtggggtcttattgttagatactagagacccacagagcaaggagtgttcacctcagggtgcccaggtactcatggctccaactcccttgggagaggtcagcttgaggcattttctcagcttcttactacctttcctcccacacctcatactcacacacacactgctcatgacatagcaacccctgtctccacaggaccagccctggactcagggctcagagctgacgtctcacagcttccgtcctctcccaccaaatgctgctccaagtcgctgtcccaaaacatcctgtacaggttgtggtagatcctggaaatatttttctcacttggcttaggacatcatgccacttgcctccttcccacctctctgcctgtttcttctcagccttattttctggggctggtccttctaatctgtaaactttgcagggcccagcgctcagtccttgctctcttctctgtactcactctctcagagatctcaccctgctctgagggcttctaataccagatagatagattgatagatagtaaaatagatagatagatggatatctcctgaagactcctgcttctaactaaatatgacaccttcactcaaatgtcaaataagaacatcaaaagtaacacgcatcaaaggtaacatgcatcaaaggtaacgaacaaccaaactctttcatttctactcaaatattattttccagcagtctcctggcacttccatagaggcaactccgtcttccggttgctcagactgtggagtcatgtttaaccctccttttctctcgcagcccccatccaatctgccagtaaaccttatagcttcccagtcaatatggaactaacatccaaccactcctgccctctgctgacagcctccaaggctcctcacccacctggagtgagagccaacgcctcatactggccttcatgtcaggtggctacacaccctggcctgcctcagaccctggcactcacgtctatcctagtgcaattactaacagcacctcctttcactatctagggccccgactggataataaactgcatgctgtcccccacaacatgcacatgtccaatctgatcctcattcctctccacgctctctactgctgtctcctcccttgtaccacattgtaaacaccttcctccccaacaggctgggttccgtgcctctatatgggacacgctctccccagacagtctatgtctcattacttatttccttcagctgctcaaatgtcaccctatctgctcaataaataaagctaccccacacccactctcaggaaaaacagcctggtcactctccatctcctgaccctgccacaccccttctcagagcaggtatccctacctggcagctgcatcttcattgtcactcttctcactagaatataagctcctgagcccgagcctttgtctttctactcacgg

SEQ ID NO: 72845 - DNA, 2087 bp, Homo sapiens
ctctcctgagcatggggaaatgaactagatttctgctcaggaagctgtttcagctccaaacttcactgttccttcagcaggctatctggaagggcagactatgagctgggcttctttaggagctcacaaagctatgtccaagtatgaagtctcctctctgccatcactgtcatccttatgctggaagcgatcttattagggttccaatcaccttccttgttttgccccgaaatttcctgaatactcactaaccaaagactactttccctgttgcttgtttttttcattgttgttcctctagaaaacaagcctccagatctgtttcaatttaaacagaaaggagtagcgaaagttacaaagatgaagaagatgaatgcattgtactcttatagtgaactgggtctccataaattgtttttggtatagcatgtcccatttagcccttacataagctcagataaggcaaggaaatactcagttttagaggcaaagggacaaagactcagagaggccaaacaaggaagctagatttgatccctgaatcctgaccctaagttctctttacattagagaaaagtcctgattgcgtgtctgtagtttcccagtgatgtttctttgcctctcaccctgaggtgtatcaataggtgcaggtggggtcttattgttagatactagagacccacagagcaaggagtgttcacctcagggtgcccaggtactcatggctccaactcccttgggagaggtcagcttgaggcattttctcagcttcttactacctttccycccacacctcatactcacacacacactgctcatgacatagcaacccctgtctccacaggaccagccctggactcagggctcagagctgacgtctcacagcttccgtcctctcccaccaaatgctgctccaagtcgctgtcccaaaacatcctgtacaggttgtggtagatcctggaaatatttttctcacttggcttaggacatcatgccacttgcctccttcccacctctctgcctgtttcttctcagccttattttctggggctggtccttctaatctgtaaactttgcagggcccagcgctcagtccttgctctcttctctgtactcactctctcagagatctcaccctgctctgagggcttctaataccagatagatagattgatagatagtaaaatagatagatagatggatatctcctgaagactcctgcttctaactaaatatgacaccttcactcaaatgtcaaataagaacatcaaaagtaacacgcatcaaaggtaacatgcatcaaaggtaacgaacaaccaaactctttcatttctactcaaatattattttccagcagtctcctggcacttccatagaggcaactccgtcttccggttgctcagactgtggagtcatgtttaaccctccttttctctcgcagcccccatccaatctgccagtaaaccttatagcttcccagtcaatatggaactaacatccaaccactcctgccctctgctgacagcctccaaggctcctcacccacctggagtgagagccaacgcctcatactggccttcatgtcaggtggctacacaccctggcctgcctcagaccctggcactcacgtctatcctagtgcaattactaacagcacctcctttcactatctagggccccgactggataataaactgcatgctgtcccccacaacatgcacatgtccaatctgatcctcattcctctccacgctctctactgctgtctcctcccttgtaccacattgtaaacaccttcctccccaacaggctgggttccgtgcctctatatgggacacgctctccccagacagtctatgtctcattacttatttccttcagctgctcaaatgtcaccctatctgctcaataaataaagctaccccacacccactctcaggaaaaacagcctggtcactctccatctcctgaccctgccacaccccttctcagagcaggtatccctacctggcagctgcatcttcattgtcactcttctcactagaatataagctcctgagcccgagcctttgtctttctactcacgg

SEQ ID NO: 72846 - DNA, 1534 bp, Homo sapiens
agcgatggggcattggctgaggcaccttccatacggtgagggtcctgggtcttttattattccagacatggggatttagaaagaagaaccacacccagtaagtgtatctctgtataaactatgggggagactctcaagaagttaaacatatacttacaagatgacctagagtttacccaagataaatgaaaacatgtgttcacacagacttgtatttgaatgttccttgtagctttattcataatagctaaaaactaaaatcaaaacaatgtttagtgctggtgaagggataagcaaattgtagtatatccatacaatggaatattactcagcaattaaaaactccatcgaaatatacagtatcatggatgaatcttaaaaagcattatattgaatgaaagaagacagataaaaaagactacttacagtgtaatttcatttataagacattccagaaaaagaaaactagagtgacagaaagtggagtatttattgtcaggagcggggagaggggaaagaggtagaagattgtttgcacaaaggaatgtgcagtttttgaagtcatgagaaatgttcatgataacagtggtggatacacaacagtatacatttgaccaggctcatcaaaaattcaaaataaaaccggtggattttattttatattaattatatctcaagaaagctgattatatatgtatatgtacacacataaaaatacatatatcttctataaatactctgggatcctattcaaagatattagcacwtcttccttttgaagaacaggggaagatggaggaagaagaggctttttgttctcatttaaaggaacagcctctggggcatgttctagcaaaatcacaatgggtgacatactttctgtttcattccgcatggttctgaatagttcttcttatttcacattttggaattacaaattcttctttgtgttctttaatgacatgttttctggctaggatttttttcccttttaaataaggctgggggatgggcaaggagcatgtgaggcaagtgaggggcgcagggttatgtgtcctctaagaaacaggaaatgcatagtcaaggattcccatggtttgtgtgagtaaattgtgacctgaacttgctgtgactcagcctgatgcatcccttacatatttagagtgctcccatcattaagccctccattacacaaagatccccacatattgtgattttgggtagagcctgtgttttaaaccaagaattgttggagtgtccctgtgatctattcatacctgtaagttgggtgaattttatcagtgctattaacagaaatgattattttaggtcttagagcaaagtttgaattttggcttcaacccatctgaagaactaaattacagatgacagaggacaaaattaggtcctgccttatatatgtattttttggactgtttctacatgacaaatatttgtacttaggatttgtacctattcaacctaagttcaatagttgaaaatgtaagagaatgaagggaaatgtataagtcaa

SEQ ID NO: 72847 - DNA, 1534 bp, Homo sapiens
agcgatggggcattggctgaggcaccttccatacggtgagggtcctgggtcttttattattccagacatggggatttagaaagaagaaccacacccagtaagtgtatctctgtataaactatgggggagactctcaagaagttaaacatatacttacaagatgacctagagtttacccaagataaatgaaaacatgtgttcacacagacttgtatttgaatgttccttgtagctttattcataatagctaaaaactaaaatcaaaacaatgtttagtgctggtgaagggataagcaaattgtagtatatccatacaatggaatattactcagcaattaaaaactccatcgaaatatacagtatcatggatgaatcttaaaaagcattatattgaatgaaagaagacagataaaaaagactacttacagtgtaatttcatttataagacattccagaaaaagaaaactagagtgacagaaagtggagtatttattgtcaggagcggggagaggggaaagaggtagaagattgtttgcacaaaggaatgtgcagtttttgaagtcatgagaaatgttcatgataacagtggtggatacacaacagtatacatttgaccaggctcatcaaaaattcaaaataaaaccggtggattttattttatattaattatatctcaagaaagctgattatatatgtatatgtacacacataaaaatacatatatcttctataaatactctgggatcctattcaaagatattagcacttcttccttttgaagaacaggggaagatggaggaagaagaggctttttgttctcatttaaaggaacagcctctggggcatgttctagcaaaatcacaatgggtgacatactttctgtttcattccgcatggktctgaatagttcttcttatttcacattttggaattacaaattcttctttgtgttctttaatgacatgttttctggctaggatttttttcccttttaaataaggctgggggatgggcaaggagcatgtgaggcaagtgaggggcgcagggttatgtgtcctctaagaaacaggaaatgcatagtcaaggattcccatggtttgtgtgagtaaattgtgacctgaacttgctgtgactcagcctgatgcatcccttacatatttagagtgctcccatcattaagccctccattacacaaagatccccacatattgtgattttgggtagagcctgtgttttaaaccaagaattgttggagtgtccctgtgatctattcatacctgtaagttgggtgaattttatcagtgctattaacagaaatgattattttaggtcttagagcaaagtttgaattttggcttcaacccatctgaagaactaaattacagatgacagaggacaaaattaggtcctgccttatatatgtattttttggactgtttctacatgacaaatatttgtacttaggatttgtacctattcaacctaagttcaatagttgaaaatgtaagagaatgaagggaaatgtataagtcaa

SEQ ID NO: 72848 - DNA, 840 bp, Homo sapiens
ccccacattctcaattcccctaagctgctttattttttctcatagtcctcacctttatcatcaattctaactatacattcacttgttttatttcttaatttttttggttattatctgtctccccaatagaaagtaagtcttatgaagaagggactttgtttctaacagtgcacacactctctagtatgcaattaggggagaacccgacatacaaaagatgctccatacatatttgttaaatgaaygaatttgttaataaattaatggattcctgacatctatttaacacatttttatattatttaagacccatcatgatattgcttcaattgactttatttattaaaaccatatttcttacctttatgcaaaccattcaactttaatcaggtcttttaccccagaatagtgcgcttgatgactgtgggaaaagtatgtttgaaataggaagtaaggaattcagccgtgcttccaaactggcatgtcatggcaccctggcctaccaaaaaataggctacccagttttgatcgatgtatacaatttattttactgcagccaagcactctgctaacaggcaatgcctgtcaagcagaactggacctgaggtgtttgtggaacatggtgaagattaatatgatttgctagaagaaagacagtttaacacaagtcaacctctcactaaagaaaaatatacaggagaaagatgacaacttttgtattatgtccttgagcaccatgagggcatcaactgttctcgacaagtgaagtccaagtgcctgcggatgaatggttgtagtgaattgccactgtaagatctttgcaggcaaaatgaggcattg

SEQ ID NO: 72849 - DNA, 1265 bp, Homo sapiens
ccttttagatgcttttacaaaatcaccaccattctctcatgaaattcaattttgacgatgaagagcttgtcctacagtgttaaactgtggagacccaaactgttgcaattctaaagaatatttcccccctcaagagccaattgtagccacattgtggacaatatcatccttgtgagaatgcatgactcagtctagtaagattttaaccatgtaggattcttgagaaggaatgaagactgaggagattagagaagtaaaagtatccagatgttgtgaaaactgagttattttaagggttttgggtctctgtgggtgaagactcagtgttagaagtggaggtgttttcaggaaatagtaacttagtttaaaaacataggaaggcagaagctcaagatagggggaaaagtgtgagaaggcacctttactatactatggaagatatgactgtaagagggtaatataaattaatttttaggcagggaagaatgcttttgaattgttcacattaatcttacattctagctgtataaattcacacaggatgtatatatataggtaatgataatgctgatgtgtttattttcaagattttcaaggactgtgtggaataggatgctcatatgggctgccacatcgtaaacaagctggattattcctccttgccagtttaaaacaacccactgggttttcagggaacacagtcaaatcttaggaaacaaaaaaaagtacatttctctccatgtgtgcattcatgaatacttacagttttattccactgtcttgattcaggtcatataaatataatttaatttttagcttttaccctaaaatcatgagaattatttgcatgtcaatcattttataatcgtaaaatatatcagaaatagatttagcaaaaaatcataaacatttatttttctcattgtagtagcaattactttctgatcctctattttataatggcattatggtagattttgatttcgaggcacatttccagactttgtcagttcctgatattaatgaacaactcattgcacatgctttagcatattctgaaataacaatgtactgaagataatgacttagattgcatgtgtttccttttcactagacaattttagattttgaaagttctgaaaatgcagcagaagtacttggatccacttgggacaaaaccataccyggggctagtttgtacccattactagaggccaaggctatacaaataaacaatgcttggggctggaccaatgtgacatttt

SEQ ID NO: 72850 - DNA, 2188 bp, Homo sapiens
tgagggagagccctccacacccttgtacctccrctataccatgcctcttcagggacattttctgccgtcttttcttcttccccctcacatataattgaaaacttaattcttcacctttacctcaatctaaactaaacagtttaggatttccaacacagtcatcacattttcatttagtttttgctaatataaattgtccttatatcatcttgaaatatgatatttctttttcatttctatgacctaaaaccctttcaatgaaagtggtggaagatagtaagagacacagttatgttaatggattgtgctatctctttcttccttcttttatcaattgtctagatatgctttctaaattatatcatatattttatccttgtcattatgccaccttcaatttgtaatgaaaataaaataaatatatatatatatatatatatatttgacaataaatctgacttaattcattcactggtatatattttagtttctcattgtcattgtttgtatatttaaactcaggaaataatttctggtaccccaagtagtcttgagattgagcctaagaacttcagagaacatatggacatgagtcatgatccataccctaagcagctaagaaactgtcctaacacaaccctgggagaagaatggttagttctttccagagggtaactaagaatgactccacactcatagaaaacaggaaaggatacaggtaagagaacaagtaataaacatctacaaacagaaaataagatcaacagtcctctttggtagattattttattaatggcatacatttcctgcttctctctgggaaaggattattcttccctggccatcaagaaaggctcggtcatgttacttgattggatctataaaatgtgaaggaaaatgagatatttaacttctgagcaatgcaatttaaagctttgccatgggaagttagatcccttgcttgggttctagaataaagacgatatggaaaggatatgtactgatccttcaaaaataagtaacataagagcaaaataaaaatttgtataaatcatgtagatgttgggatcatttttactacagcataaaccaggtgtctttgattgataagtcttcatgcatattactcccaggatgctggggcatagcttatgctttccaggaaaaagattataacacattagtctgaggattttgataagtcatggacaaaagacctaaagaatctgccagtcaggaatattcaagcaaatcactaaaatcagttgatgaatcttagtagatgactctgaaacttctaaaagcaaattacagtatttcccacagaaaaacaacaaattaaaatctcaagtaacttacacatagactttcaacaaatataagattacacaaacacatgcacacacacctgcaaacaactctaataagtgtgttccgcaggaataataaaagaacttctcagtagctctctaaaaccctacccttaaataggaacaagcaagcaagaataaccagaagttacaggcaggtgtttaacatgacatacagaatctacaataaacaggtggaaagaaatttaataagaatttagaagttattctttgaaaaaatttagagaccctaattaatatattcaaaggtaaaataaaattactggctatgtgattcagtaaaaataatattataaaaagaagtgtgcaaagactaagatagaatcttaaaaattatgataaattcaaaagcaatgaaattactaaaatagagtagaagaaataaacataaataataattagaagagaaagtttaaataaattacagaatcaattgagagatccaacatctgaataataggagtttcagaaagagaaaacagagtaaaaggaaggaataaattatcaaggaaataatggaagacatttttaaagaatgcaataatttcaatgttctaatagaaggagctgatggattaatcagcacaaatactataaaaaagtttaatttctagctttcctataggctaaaaatattgaaggattcttgctgcaaagccctaataattagtgctagagaaaataaaatattaaaatggttaatggtgctttaaataaaataacagaatttatttctgaaatcagtaaaaactgtgatcaagaataccaagaaatgagaactctcaggttatctatgc

SEQ ID NO: 72851 - DNA, 1394 bp, Homo sapiens
ctattttytttgcttttgctttttttttttttttttttaaacagacaaggtctttctttgttgcccacactgatcgtgaactcctggcttcaagcaatcctcctgcctcagcttcccaaagtgctgagattataggggtgagccaccacacatggcctcaacctaatgttaggaacaaagtaggtaggttttataagagattggacagagttaaaaagagtattagtgaacttgaagactagtcagtaaaaaacacccacataaaagtacagaaaaataaaaagaattaactccagaaaatagcataagcatagggaacacagtgaaagtctaacctatatatatttagtttcccatagagaaaaaaaaagagagaatgaagagccatgaatttgttaaatatttggataaactgaattaagtatgtctacttatgatagtatctatagtactttatggagtaaaatatatagagagaattaaaatatatgaaaaatagaatataattcagaatgaagtaaatggagaaagtgtcccaaggtgtcattattgcagaggaagagggtaccacctgacattttatttttataatgcaaaggtagttactattggaatagtaaaaattatacttcctaactgaaagggaaaaatagaataatcaaaaatagttattccaaaagaaataaagaaggagagaaaaaggatcaaaggcacagatagaaattgcagaataagattgaagaaataaatcaacattcatcagttaatatattaaataaaaaaaaaatgctcaaattaaaaaaaatcaaactccatagacagtctatatgataaacataccgaatgaaaatatatatatttatatttatttatttatttatgtaaatagcagctcagtataccctagctaaaactttttaaaagtctagcaacttcttagattataaaccctctttggataaagattgcattttactcataattgaaccatctgtgaggctttgcaacatggcatgcatatacacaatgaaacaattcacttgaatattgcataagagttaataaagtgcagtagcacattatgtctctcagaacagtcttgtataccagggaaagaagaacttttaatttaatgaaaaaaagaaacaaagctaagaattggcctgttcaagattatttagcaagaactgaaactcaaatttaagatgctttatacctatcttctgtactattttatgaattaactctttgtgtaattaaattgaatcatttgtatctttaatcattctccaaatgtttccacttttaaatattttgagatcattcattcagggatgactgaacacatatctaattgcttcatttacttatgtcatcttaatgaatgtgaatta

SEQ ID NO: 72852 - DNA, 1394 bp, Homo sapiens
ctattttctttgcttttgctttttttttttttttttttaaacagacaaggtctttctttgttgcccacactgatcgtgaactcctggcttcaagcaatcctcctgcctcagcttcccaaagtgctgagattataggggtgagccaccacacatggcctcaacctaatgttaggaacaaagtaggtaggttttataagagattggacagagttaaaaagagtattagtgaacttgaagactagtcagtaaaaaacacccacataaaagtacagaaaaataaaaagaattaactccagaaaatagcataagcatagggaacacagtgaaagtctaacctatatatatttagtttcccatagagaaaaaaaaagagagaatgaagagccatgaatttgttaaatatttggataaactgaattaagtatgtctacttatgatagtatctatagtactttatggagtaaaatatatagagagaattaaaatatatgaaaaatagaatataattcagaatgaagtaaatggagaaagtgtcccaaggtgtcattattgcagaggaagagggtaccacctgacattttatttttataatgcaaaggtagttactattggaatagtaaaaattatacttcctaactgaaagggaaaaatagaataatcaaaaatagttattccaaaagaaataaagaaggagagaaaaaggatcaaaggcacagatagaaattgcagaataagattgaagaaataaatcaacattcatcagttaatatattaaataaaaaaaaaatgctcaaattaaaaaaaatcaaactccatagacagtctawatgataaacataccgaatgaaaatatatatatttatatttatttatttatttatgtaaatagcagctcagtataccctagctaaaactttttaaaagtctagcaacttcttagattataaaccctctttggataaagattgcattttactcataattgaaccatctgtgaggctttgcaacatggcatgcatatacacaatgaaacaattcacttgaatattgcataagagttaataaagtgcagtagcacattatgtctctcagaacagtcttgtataccagggaaagaagaacttttaatttaatgaaaaaaagaaacaaagctaagaattggcctgttcaagattatttagcaagaactgaaactcaaatttaagatgctttatacctatcttctgtactattttatgaattaactctttgtgtaattaaattgaatcatttgtatctttaatcattctccaaatgtttccacttttaaatattttgagatcattcattcagggatgactgaacacatatctaattgcttcatttacttatgtcatcttaatgaatgtgaatta

SEQ ID NO: 72853 - DNA, 1616 bp, Homo sapiens
tgggcagaaaaattgcaaagcatagatgagtcatcttttagaaagtgattttgtgtagttatttggaagcataaataaaacataagtattaatatatttgtctttcaaattttttatagacattaaaaaataagtgcaatgatagaaaaatccagtaacaggctgggcacagtggctcacacgtgtaattctagcactctgggagaccgagacaggaggatcacttgagcccaggagtttgagaccaaactgggcaacatagtgagaccctgtctctattaaaaaaaaaaagaattaaaataaaaattcagtaacaattttacaaagaaattgtatacatttttaagcaataagttgaatacctatttttatttttatttattttttttgagacggcgtctcactctgtttcccaggctggagtgcagtggtgcaatctccgcttactgcagcctctgcctcttgggttcaagccattctcctacctcagcctcctgagtacctgggattacaggtgcacaccaggcattgcattattagtagagatggggtttcactatgttggccaggctagtcttgaactcctgacctcaggtgatccgcttgccttggcctccctaagtgctaggattacagatgtgagccactgtgcctggccagaattgctctctttaattaagttaacctattagctgatgtcacagattttttttttttttttagacaagaatcttcctctgtcacccaggctggagtgcaatggcacgatctcggctcactgtaacctctgcctcccaggttcaagcaattctcctgcctcagcctcccgagcagctgggattacaggtgcctgccaccaatcctggctaattttttatactttattaatagagatggggtttcaccatgttggccaggctggtctcaaactcctgacctcaaaggatccacccaccttggcctcccaaagtgctgggattacaggcgtgagtcaccgtgccaggccatgatgtcacaggtgattttaataagtgatgggctatttcagataaatatgtcataaaagtgacttgcaaaaatgacttgctaaggggcagcgggtagcttgtgtcaycagtatattgccagtgtcctacacagtgcctaatctactacaggcagtccaatatttgccgaatgaatgacccatatcatttatttttaaaatgtttgtccttggaaggaaacagcaatttctttaataaaaaagtgaagcattctagctaaagtctttatatagtctgaagagaaaagagtttgtgagttatagccaaaaggagtagcagattagtagttttcaaagagaaaacatagaaagatctacccatgcatcatatgactaacataaaagtcctaacctaatgcaccacatattacctgactttagagtagaagagctagagattgagtcaatgattgttttataaaacccattcctattttttccagttatctccttatgacagaattattgtctcctgacaataattcaaggcaaactcaaaacacaaattcaaatttcttttcttttcgtttttttttttttttgagacagaatctgttctgttgcccaggct

SEQ ID NO: 72854 - DNA, 577 bp, Homo sapiens
aggaaacaatatttttttaaagctcttcaagtgattccaggctgcaggacaatatgagattcaacctaagcaaagtctggttatggasgcatggggatattataagtcaatgttgttactggccttggaaaaattattaacaggggtgaccatacctttgctggaactgtttccctcttctccccacacatatctggctgtgagctgtgaaacctaaacctccatgcctagtccatccaaaatcagccacacaaacactgacttccagggctgttttaattattgaaaagtccctcagttggccagacatcaaaatcagtgtggaaaagacctaaatctgattggaggactgctttggaggtaaggtgtgtataaaactatttgagcatccctcctctgttaagtatcatgtgtcagtgctattgcatgatattctatgtgagtgctgtcccccagagttgtgcaagaaggtgacccggcctaaaacagacatctcactgcaatgaaaagaatcaaatcacgatttcatttagagaagggactcatccatgattttggcagaatccaaagcaggcag

SEQ ID NO: 72855 - DNA, 577 bp, Homo sapiens
aggaaacaatatttttttaaagctcttcaagtgattccaggctgcaggacaatatgagattcaacctaagcaaagtctggttatggacgcatggggatattataagtcaatgttgttactggccttggaaaaattattaacaggggtgaccatacctttgctggaactgtttccctcttctccccacacatatctggctgtgagctgtgaaacctaaacctccatgcctagtccatccaaaatcagccacacaaacactgacttccagggctgttttaattattgaaaagtccctcagttggccagacatcaaaatcagtgtggaaaagacctaaatctgattggaggactgctttggaggtaaggtgtgtataaaactatttgagcatccctcctctgttaagtatcatgtgtcagtgctattgcatgatattctatgtgagtgctgtcccccagagttgtgcaagaaggtgaccckgcctaaaacagacatctcactgcaatgaaaagaatcaaatcacgatttcatttagagaagggactcatccatgattttggcagaatccaaagcaggcag

SEQ ID NO: 72856 - DNA, 627 bp, Homo sapiens
ccagggatgctatggtgaccccagaaactcatcagtgtcctgaatctggctgtctggaccatttgcagtctgatgtgccctttatcagaaaagtgactccacaatgcactgattttctgacgtccctcatctcctcctgtctgcacactatgggagggcagtaggctcactgaagggagcagtccccagaaagggatcatctccttcccggatagtgaccaggacaaaagtggtggggattgcaagtgttctgtagacctatcttgaaaattcaggattctgttgtgaccctggtcattcctagggawgatgcctcattctttccccatcagcctggtaggcacagccttctgagtgcccaggggattcagatttcactccagacacagctaatgaaaatgcttttgctctacttgtatctaattttgtggatggaagatctaagtgagaaaagagacaattaggagaaaaagatgaaggtacagccaccagaatggtacagacagattttgcagcagtgaagcaagagcaaaaatccagagatctaaggcaggaacacctccaaccctaggaggtatggaggaagcaggagcattggtgatatctgtctctcagaactaccctgga

SEQ ID NO: 72857 - DNA, 679 bp, Homo sapiens
cctcgagcaggtgtccagagcattttctgctttggggagtgttgacttctaaattacacacagaatttaaccgtacattgaagtctcttagaatgtgttaggataatacacacagacttaaatgaaaatgttataatgactcagtccaaataattttttaatttgaaaacacccattcttgttttttgtttgtttgttttgttttttaaagacagagtgtttctctgcctcccagactggagtgcagtggcacaattttgacttgctgcaacctctgccttttgggttcaagtgattctcctgcctcagcctcccgagtagctgggattataggcgcccgccaccacatccagcraaattttgtattttaagtagagacagggtttcactatgttgaccaggctgttctcgaactccaacctcaagtgatccatccgcctcagcctcccaaagtgttggggttacaggcatgagccaccatgcccggccaaaaacacccattcttaaaataaatgcaaccacttgtttttctttccaaacacaaatgtacatccacaagccgggcagacacttaaactggcaagaacagaagagcagaagatagatgattggtgaaaagaaacaattttcaataggactctaaaatcttactatacagatccactgattcaaaactgag

SEQ ID NO: 72858 - DNA, 679 bp, Homo sapiens
cctcgagcaggtgtccagagcattttctgctttggggagtgttgacttctaaattacacacagaatttaaccgtacattgaagtctcttagaatgtgttaggataatacacacagacttaaatgaaaatgttataatgactcagtccaaataattttttaatttgaaaacacccattcttgttttttgtttgtttgttttgttttttaaagacagagtgtttctctgcctcccagactggagtgcagtggcacaattttgacttgctgcaacctctgccttttgggttcaagtgattctcctgcctcagcctcccgagtagctgggattataggcgcccgccaccacatccagcgaaattttgtattttaagtagagacagggtttcactatgttgaccaggctgttctcgaactccaacctcaagtgatccatccgcctcagcctcccaaagtgttggggttacaggcatgagccaccatgcccggccaaaaacacccattcttaaaataaatgcaaccacttgtttttctttccaaacamaaatgtacatccacaagccgggcagacacttaaactggcaagaacagaagagcagaagatagatgattggtgaaaagaaacaattttcaataggactctaaaatcttactatacagatccactgattcaaaactgag

SEQ ID NO: 72859 - DNA, 924 bp, Homo sapiens
gtgaaaggaaaggcaggccccagcaggggcaggggagcctgtggtgctcagccagtcctccctcccccacgcctgcctaccytttcaaaacctctgaatcacaagtccacacttggccagtttattaaaggcagggagcttcggcagggtccaaaagggagaagttgggagatgccccctcctcagctccctccttccccaacaactcttctacagcccagcccccagggcccagaggcagggctggcgtcaggcagactgtactgcataaatacgtggaggccacagcccgaatcagcagcgtcagggggcagggaaactgggtttgggatgagaagtgggtggctctgggggcacgtcccccagtgcttgtccagagcccagggacccacagagccagagaggggaccagtgggccagcttggggtctggctacggccagccctgcccagcgaggctggcaggtggctctggttttgggggagaagtggggtggggtgtggccatgccacggcccacggggacagggtggggtcaggtgctgttgccctgctcctgttcaaagagtagcatggccagctgggttcgggagccgaggccctcaagcacgctctggaggcagcggtggtacaggtcctcactgagcctcgcgctgcacgtctgggcccggtagcgctgcagcagcgccggctccaccgcccgcagcacatgcagactggagaagtggaggaacagctcgtacacatccaggctctccagcagctcctcttcttgttctgaggctgccgccaggcgcccacgggctgccacatagtcggagttgtagaagcaggcctcgctggctgcctggcgatcaaagcggccagtgtcacggcccagctctgggggcccaggcccttgtggtggggccacagctgggtggaa

SEQ ID NO: 72860 - DNA, 511 bp, Homo sapiens
ctattgtcatccctgttttatagacgaggaaccaggctcacagagcttagatgacttgcccatgattacagagccattaattgatggagcctggaattggaccgaaatttggcaacagagttctctgcctttccagacctgttgattttggtctttcagacgttgctaggagagccctgaagtacttgatcagcccaagtctgtaagagggcataagagcaggtcctggttgtgtttggcccagtctgagagggcctagagttagaaggtagagtgcactttgaggagtttgtgggccagggttagctcatccctccctgggrtggggagtgatcagttggcagctgtgccgggagagggagctggtggcctggggcgcggtggttgtgtatgaagctggaggcttgggctcaggggagacctgagcatggggaaggagcatcgtgagcatggtgggagttgtggcactgtggggggggctcatggggaccgtgtccatcctccctccaga

SEQ ID NO: 72861 - DNA, 903 bp, Homo sapiens
atgtgtgtatttgaaatgcacttcaccatttagggaaacagtgtaaagatttgacttgtgcaaacagacattgtgaacaagcctgaaatgagcagatgtgagaagaaagaagagtcagaacaagaggtgaaaaggagcacctagaaaggagagaagaaaggaaaagagtgtttggtgcagcatcatgtgcaggggttggggcctggattgtcccctgctgtgttgaaggattgagagaagacagaaaacaatacagaaaaaagttttagatttgagaggaagaactcattgctaatgttggcttctcaattccccaaatctgaacaaaaggarctagatttacaccctgcagagagaatgccacttgggattaaacagttaggaaataagtgggctgaactttcatgtgttgaagggacgctgagcttgagaactcaagaatgtgtaaactcttctgacaattttatttcacatttccatctgttaattatgggagctctctaatttttctttttcctttttaagtgatgcaaagatggcttccaatttattggttgtggaaacagtttcattcctagtcggggactagtctgccttccctgtgatggagaaaagccacaggaagcaaagcactaaggctactgcctcatcaatatcagcctcagggctcctcaaagccccagcctttacacatttatctcttcctgttctgtgtcaatttcaacagtggggaatgccctggggctgaaatagacacaagatccaaatgaatcaatgtcctataagccaagtgctatgccttcaagcaaggcagagcaattattacccaacacgggtgctcctgctggttctcaaggacaagcaagggaagtgaatctatcacagccctgccacttaagatgc

SEQ ID NO: 72862 - DNA, 903 bp, Homo sapiens
atgtgtgtatttgaaatgcacttcaccatttagggaaacagtgtaaagatttgacttgtgcaaacagacattgtgaacaagcctgaaatgagcagatgtgagaagaaagaagagtcagaacaagaggtgaaaaggagcacctagaaaggagagaagaaaggaaaagagtgtttggtgcagcatcatgtgcaggggttggggcctggattgtcccctgctgtgttgaaggattgagagaagacagaaaacaatacagaaaaaagttttagatttgagaggaagaactcattgctaatgttggcttctcaattccccaaatctgaacaaaaggagctagatttacaccctgcagagagaatgccacttgggattaaacagttaggaaataagtgggctgaactttcatgtgttgaagggacgctgagcttgagaactcaagaatgtgtaaactcttctgacaattttatttcacatttccatctgttaattatgggagctctctaatttttctttttcctttttaagtgatgcaaagatggcttccratttattggttgtggaaacagtttcattcctagtcggggactagtctgccttccctgtgatggagaaaagccacaggaagcaaagcactaaggctactgcctcatcaatatcagcctcagggctcctcaaagccccagcctttacacatttatctcttcctgttctgtgtcaatttcaacagtggggaatgccctggggctgaaatagacacaagatccaaatgaatcaatgtcctataagccaagtgctatgccttcaagcaaggcagagcaattattacccaacacgggtgctcctgctggttctcaaggacaagcaagggaagtgaatctatcacagccctgccacttaagatgc

SEQ ID NO: 72863 - DNA, 903 bp, Homo sapiens
atgtgtgtatttgaaatgcacttcaccatttagggaaacagtgtaaagatttgacttgtgcaaacagacattgtgaacaagcctgaaatgagcagatgtgagaagaaagaagagtcagaacaagaggtgaaaaggagcacctagaaaggagagaagaaaggaaaagagtgtttggtgcagcatcatgtgcaggggttggggcctggattgtcccctgctgtgttgaaggattgagagaagacagaaaacaatacagaaaaaagttttagatttgagaggaagaactcattgctaatgttggcttctcaattccccaaatctgaacaaaaggagctagatttacaccctgcagagagaatgccacttgggattaaacagttaggaaataagtgggctgaactttcatgtgttgaagggacgctgagcttgagaactcaagaatgtgtaaactcttctgacaattttatttcacatttccatctgttaattatgggagctctctaatttttctttttcctttttaagtgatgcaaagatggcttccaatttattggttgtggaaacagtttcattcctagtcggggactagtctgccttccctgtgatggagaaaagccacaggaagcaaagcactaaggctactgcctcatcaatatcagcctcagggctcctcaaagccccagcctttacacatttatctcttcctgttctgtgtcaatttcaacagtggggaatgccctggggctgaaatagacacaagatccaaatgaatcaatgtcctataagccaagtgctatgccttcaagcaaggsagagcaattattacccaacacgggtgctcctgctggttctcaaggacaagcaagggaagtgaatctatcacagccctgccacttaagatgc

SEQ ID NO: 72864 - DNA, 1001 bp, Homo sapiens
aatatatatttgcccctcaatttaccaagtatgtatcagaagcatttctgtgtatacatataaaatagaattaggttctaagctcaaatagttataaagttgttttcagctacatgaatttctactaggacatggcaaatttaagtgtgcggaaaagactgttcatcaaaaaaatatatatataaatttttttctgggagcaaagctagacaaattccctggcctcacttgcagtctaagtaataaaataaagcagaaatcaggtctgccatttttagccaagtcttttaagaaacactgttatgtcttttatatcaaccacactccttgtctgaaataaatgataggctcacattgagtcatttaagaagagtttaataacatgattataaaagtgaagtcaggatataaggatgccataaaggatagtgcaactcccaggactaatagcagggaggtctttgaactccctaagcctggaagaacatgaggaggatacagatactagaaacacagagacagagaggcctrtagaggggaatatctgccaggagatagaaccttcagctgtggacacagccagcaggcagcaactccactgggaagggaatcagtaatccaatctctctcctccgtcccacttattgcttgctcatattccctattggccgagcccaaattcagcctagtggtgagacaggaccattggtgcaggtctcttggggcatagagcagcccgaagaagaataaagaggagtgtcagaaaaatgtcagcacattcctctgaagcacatttccactctcattgcctggcttcagtcaagaatgattgctctagggtagtggttctagaacttgctcccagagcagcagcttctcgcttggggaaattcttagaaatgtaaattcttcagccccactgcagccttacttaatcagaatatgtgaaggtaggacccagattcttgtgttttaacaagccattcagataatcctaatgc

SEQ ID NO: 72865 - DNA, 1001 bp, Homo sapiens
aatatatatttgcccctcaatttaccaagtatgtatcagaagcatttctgtgtatacatataaaatagaattaggttctaagctcaaatagttataaagttgttttcagctacatgaatttctactaggacatggcaaatttaagtgtgcggaaaagactgttcatcaaaaaaatatatatataaatttttttctgggagcaaagctagacaaattccctggcctcacttgcagtctaagtaataaaataaagcagaaatcaggtctgccatttttagccaagtcttttaagaaacactgttatgtcttttatatcaaccacactccttgtctgaaataaatgataggctcacattgagtcatttaagaagagtttaataacatgattataaaagtgaagtcaggatataaggatgccataaaggatagtgcaactcccaggactaatagcagggaggtctttgaactccctaagcctggaagaacatgaggaggatacagatactagaaacacagagacagagaggcctatagaggggaatatctgccaggagatagaaccttcagctgtggacacagccagcaggcagcaactccactgggaagggaatcagtaatccaatctctctcctcygtcccacttattgcttgctcatattccctattggccgagcccaaattcagcctagtggtgagacaggaccattggtgcaggtctcttggggcatagagcagcccgaagaagaataaagaggagtgtcagaaaaatgtcagcacattcctctgaagcacatttccactctcattgcctggcttcagtcaagaatgattgctctagggtagtggttctagaacttgctcccagagcagcagcttctcgcttggggaaattcttagaaatgtaaattcttcagccccactgcagccttacttaatcagaatatgtgaaggtaggacccagattcttgtgttttaacaagccattcagataatcctaatgc

SEQ ID NO: 72866 - DNA, 1001 bp, Homo sapiens
aatatatatttgcccctcaatttaccaagtatgtatcagaagcatttctgtgtatacatataaaatagaattaggttctaagctcaaatagttataaagttgttttcagctacatgaatttctactaggacatggcaaatttaagtgtgcggaaaagactgttcatcaaaaaaatatatatataaatttttttctgggagcaaagctagacaaattccctggcctcacttgcagtctaagtaataaaataaagcagaaatcaggtctgccatttttagccaagtcttttaagaaacactgttatgtcttttatatcaaccacactccttgtctgaaataaatgataggctcacattgagtcatttaagaagagtttaataacatgattataaaagtgaagtcaggatataaggatgccataaaggatagtgcaactcccaggactaatagcagggaggtctttgaactccctaagcctggaagaacatgaggaggatacagatactagaaacacagagacagagaggcctatagaggggaatatctgccaggagatagaaccttcagctgtggacacagccagcaggcagcaactccactgggaagggaatcagtaatccaatctctctcctccgtcccacttattgcttgctcatattccctattggccgagcccaaattcagcctagtggtgagacaggaccattggtgcaggtctcttggggcatagagcagcccgaagaagaataaagaggagtgtcagaaaaatgtcagcacattcctctgaagcacatttccactctcattgcctggcttcagtcaagaatgattgctctagggtagtggttctagaacttgctcccagagcagcagcttctcrcttggggaaattcttagaaatgtaaattcttcagccccactgcagccttacttaatcagaatatgtgaaggtaggacccagattcttgtgttttaacaagccattcagataatcctaatgc

SEQ ID NO: 72867 - DNA, 1266 bp, Homo sapiens
actttttcaattgaaatagggcatgagggataaaaggaagttggagaaatagcaaaaaagaatgagagaaattctaaaaaccaaaaccttaagatctgtgcaaaactgctgaatttccaatttcaaaaagacttactggaaggcaatcttcctacattaaatttctagaaatgcttaatattttaaatatctaaggctcccttgagcttcaacaggaacatgaaatcagacttgaatttattactgccaattacattgaaagaatctaaatggaaatgaatcgtatttttcatgacccatatgccaaagccagaggcatagcctcgtggaaaaagacactatgaccccaaaaccccctttactgtgcttcacaaaatagggagagacaggtaacccacagggtcttgctgagttgctatgactaaataggactggccccaccagcctaggtcaactccagttcaatttcacacttactgcatgactgatagtattctacaaggcttcgtttaatgatgcaaaaagaataaggtacagtccttgagctacttggaattacagagataatatggccttatgtctaatatgcatgttttagagttgcactgcttgggtttaaatctttcctaaactctaatcagctctgagtcattgcccaggttatttaagcctctggtactcygcatgaatatagaaatgatgatactacatgcctgtgtgtatgttgtatgtgtctgtttaggatctaatatatgtaaaatattgcaactttacagagttatgccacaaccgtataaaattcttaatgtttgactatttttatctacaaaagtgcaaattcctcatggttaaaccaagtaataagttatcagtaaattgtagcaattattaacaaactgtatagagaggttggttttgtctatcaaataactagaatatgcaccaatattttacataatcaacaataaaaacctggtaacactgtaattgctcaacagattcttcctgcccactgcacatacagaactaattcactaagaccatggtattgcaataaagaaagagtttaattaacaggagactggccacatggaagatagagttattactcaaatcagactccctgaaggcttggaaattggagttatttaaagatagtttggtggccaagggactcaggaacaggttttgctgattggttggggatgcaatcatagggttgtggaaaatgatccctacatactcagtctgcctctggataggggg

SEQ ID NO: 72868 - DNA, 1266 bp, Homo sapiens
actttttcaattgaaatagggcatgagggataaaaggaagttggagaaatagcaaaaaagaatgagagaaattctaaaaaccaaaaccttaagatctgtgcaaaactgctgaatttccaatttcaaaaagacttactggaaggcaatcttcctacattaaatttctagaaatgcttaatattttaaatatctaaggctcccttgagcttcaacaggaacatgaaatcagacttgaatttattactgccaattacattgaaagaatctaaatggaaatgaatcgtatttttcatgacccatatgccaaagccagaggcatagcctcgtggaaaaagacactatgaccccaaaaccccctttactgtgcttcacaaaatagggagagacaggtaacccacagggtcttgctgagttgctatgactaaataggactggccccaccagcctaggtcaactccagttcaatttcacacttactgcatgactgatagtattctacaaggcttcgtttaatgatgcaaaaagaataaggtacagtccttgagctacttggaattacagagataatatggccttatgtctaatatgcatgttttagagttgcactgcttgggtttaaatctttcctaaactctaatcagctctgagtcattgcccaggttatttaagcctctggtactccgcatgaatatagaaatgatgatactacatgcctgtgtgtatgttgtatgtgtctgtttaggatctaatatatgtaaaatattgcaactttacagagttatgccacaaccgtataaaattcttaatgtttgactatttttatctacaaaagtgcaaattcctcatggttaaaccmagtaataagttatcagtaaattgtagcaattattaacaaactgtatagagaggttggttttgtctatcaaataactagaatatgcaccaatattttacataatcaacaataaaaacctggtaacactgtaattgctcaacagattcttcctgcccactgcacatacagaactaattcactaagaccatggtattgcaataaagaaagagtttaattaacaggagactggccacatggaagatagagttattactcaaatcagactccctgaaggcttggaaattggagttatttaaagatagtttggtggccaagggactcaggaacaggttttgctgattggttggggatgcaatcatagggttgtggaaaatgatccctacatactcagtctgcctctggataggggg

SEQ ID NO: 72869 - DNA, 967 bp, Homo sapiens
tgcataaaattagacctgtaaataaagacattgcaatcaatcattattaaatgtttgtagaagacgctggagaatggctgtggaggtgctggccccaccatgctggcactttgccaactgtataattgctttcttcagactcccaaattctactatagcttaaattgaacaagccccattcttcaacacttttcctgaactttctaggactccctatgccctttggatctctcagatctcaggtactaaaaggaattacccaagggaatgatttaaattggagcagaaagaatgtaggttaaacaggaaatattacagtgggcactgaagaagttagcaaggtttttaaggctaccctagaggacaagctatgttctcatttgctggagcaagtgcagggttaatgcaatcttcagtagcttcccagatctatgtcttctgatttctagatactatacttatatgtattatattatattatgttataaaagtgttttcatttgttactcattttcattcttctggtcaaattaaagcttcttaagagtaggcattaatctatcatgttgtattgactgctacattcacaacaccagaatgagattgagaacaaagtagctggtcactaaatattgagttaatgaaataatgaatgaatgaacgctactctgagtttgtgtacaagacktgtatgcaggtgtgtaggtgcatttcctctggcattataaatgcttgaggaaagtactgtgtgtgtaacttttcatagaatcagaacttctagcacgctggtcaatagtaaaacattcatatcaagtctggattaaaactccatatcacggagatatgaagttttaaataaatgtaattagcctgaggctggtaataagatggctgtgttcagccattcaatctctactccattagttcccacaaacaacatcatacctgaggaccattaacccacatg

SEQ ID NO: 72870 - DNA, 1895 bp, Homo sapiens
ttgtcaacactctaggatggcttaaccagtaatgtgcttcattgctagtggttggaagtacaaggtgcaattatttttccttactttggaggggataagccagcatgactcataccccttttataaacacttgacatcttctctaatgtgacaagcccttgatgttttggggcgtgcatcccaccctctagagcacatgtgttttcacaagaaattcagagttcttacaatgtccagctcatcacgtctaattaccatgatgtcatcaatatagtgttgatgctttgtggaacgttcacaaagctttttcagcctacattgtgacagagagcaggagagttaacatagccctgggacgagactgaggatgtgagctgttattcaccccagataactgcagactctcccagagatggcgatggactctgccttcactctgcagctgtgccctggggtctggtcaagccctgccagagcctcagcggagctcgtctgcaggtgccagcagagggcgcttcacacccctcatggaaggggccgggagggcgctctcctggcaacagtgatttctgtttatttaaaccagcaggacatccccataatttgcatgtatcgttcctcctatatgtgaagaggccctgcctctcggtatcttaaaagaggttctttctctgggatgtggcatgagcaaaactgacaagtcaaggcaggaagatgtcgccatcacaactcattgggtttctgctgctctgggttccaggtgagaatatttccacaaacctaggcggagatattctttcaatctgtaatttctttcattggggactctgcaataggtgatttttggcttgattttaaaatcctaattttaaaaatgtaatgcatattctttcttcatgtctagcaagattaaaggtgattttcatacacagatatttatgttgtactgatgtttgctgtatattttcagcctccaggggtgaaattgtgctgactcagtctccagactttcagtctgtgactccaaaggagaaagtcaccatcacctgccgggccagtcagagcattggtagtagcttacactggtaccagcagaaaccagatcagtctccaaagctcctcatcaagtatgcttcccagtccatctcaggggtcccctcgaggttcagtggcagtggatctgggacagatttcaccctcaccatcaatagcctggaagctgaagatgctgcagcgtattactgtcatcagagtagtagtttacctcacactgtgttacaacccagaacaaaaactagttcagcctggctgaacggagaaactgggtgataccctagaatacttctgattgttgcaggtgctttgggggcaatgagttaaccaatacaatraagtctggctcacccagcagagaggaaactagagtcactgctgcatactttcatctttttaaaaatgatttatttcaatagtttttgggggtataggtggtttttatttacatggataagttctttagtggtgatgtctgagattttggtggacctgttacttgagcagtgcatactgtgcccaatatgttgtcttctagccttcacctccccttctatccttcctccccagtccccaaagtccattatatcattcttacgcctttgcatcctcatagcttagctcccacttacagatgaaaacatataggttttccattcctgagttacttcatttagaataatagcctccagcttcatccatgttgctgcaaaggtcattattttgttctgttctgttttatggctgagaagtatttcgtggtgtatatacaccacattttctttatccacccgttgcttgattggcacttatggtggttccatatttttgaaatggagaaa

SEQ ID NO: 72871 - DNA, 2627 bp, Homo sapiens
ttccgcacttggataatagtcagcatgttgtgcggatgccatctccagccccctccctgtgtcccaagtgagagggtcactgtcacctgcagggcctgctggagtatgaaaaacatcctagtctggcaccagcggaaaccagatctggctctgagctcctgctcctgcttgatcctgctgccccactggacatgatccctgcctgggtcaggggcggtgggcctgaacatatttcactctggccatcaccaaccaagatgccttcagaggtaggtgctccctcctcctgtttcctatcatgcacaaatcttccctagcaacagctctgcccaggggctgctaagggtctgaagtcttctcagggcaacaggctgagggacacctctgaattcactttgtctcaaactcccttcccacctcctctatggtcacctccagtgtatcttgtgggcatcactgcacggagcatgtcaggatgttttctcccacctccttctctgaattcatgatgcaaattcatcctcacttcagacatgggctggccgcgccttgtttctcttatatacatggcccagcacattgctgaacccatagttctgaccccactccatgaatctttgtggaagggtcatggttggcaagtcgtggttactggagaccagaaagtaaaatgtcaaatactgagaagcttgtgcatggagcagacataggccattgtcaacagagtcccagcagctggtgagtcatgaaacctgggcagtgagatcccacatcaccccagtcagaggggaagctgggaatgagccatggcgggtcttcatcctgtgactatgcagcctctgagccacatgtgctgctttgtttgatggaaatgaccagaagaggacttgtctatgctgagctctggtgacaaaacttccctccattcagggcccagagccactatccatctcctgggcatctgctgctctgtgattctgcacacccacctcaggtcacttattatcctcagcaatgggcagctctctgctctcagcccaggggaacgtggaagagggtcctgagctttatgaccctcaggtcctgtagtgagaaaggggccatgtggtggtacacccagtgctcattttcaatgttcatgttcaacttattaaagtttaaaactataccttatactagcaatcaaagttctctttatatataaacgtgcatcgcatattttttcataaacagatacatagtatatacaaatatataaatacaacttacttctaaagtattatatgtattcaatatgtaaagtttatattagaaattcatattacatatacacataattttacatttatttttgtagcgtgtgttccttttatttccaagcagaacagagtctggctgagtaaagactttgagtacatttgcagactctccctctttggctccaacaaggtcccagtcattcagtaccagggagggcacagctgacagcacccatcccaggaacccagagctagtcccgaggtctgggtcttgagacttttactcttgccaggctgcaggatatatgcttaatgcagctctcgtgaatttgtgagcagtttccttcccttaagcccctgccaggcagccctgtggccagggcctgtggttcctcccaggtcctcagctctgtggctcaggagagcagctgcttcctccacagcttagggtcagcatcgggcagctctcaggcactgccagcctgactgtagccctgggttaaggaccctattccaaatgtctcctcatttattgtagtactggaaagtctgtcttgttcttaaactcaaagtccacatttccataattgctaaagctggcatttgccatctggaaaagtagaaatgtgaattcattgtcattctcagagcctggcctcttccaagcccaccaggtaaagttgcccatatgttctcttctctccacacaactttacttagagttatagcgaaatgtaatgtgtggcaaagctcttattgcctgcacagaaaccatcttcttctcctttggtgcctaggacaccagctctatcctgctggacatggtgaggacagtgagcctctcccagcccgggacaggagcagggattaaggatacatgtgattagctccacaatgcaatgtcaggggagtgaaggaggggcagggactctgggaagaatttgatccttcataagaagatggaaggtgaagagctttgcttcacctttgataatcaatgactttattttagattttggagctgggacacatgtttcattgccctgaatccttccacatctcctctttctcttacaatatctctgactcagtttgtctttctcagattgtgtgctgaaaatcaattttccctcctaayatgaaaacaaactaacagaagtctcttcctcctatcatgtgctgtgagatctgaccgctaaactctgtgatacccagatcgtataagagatagtcatgggattttacccaagagattttctagctaaaaagaattcttgtcctagctcttctctcagaaacattttctctgtctcttgtcaaaactgacaccagaaaacaaggtggaaatatttccaagaacagaggaca

SEQ ID NO: 72872 - DNA, 741 bp, Homo sapiens
atgtgtcccctgaggaaccagactygacagcagataaagctgagtagaagggcatcctaatcctttctgccttccctatgcattttggtcaattaaacccattcagtgtaacaactttgtatttaaggctggttcacaccaaaccaaaactaatatgctttctgtattttattttgatgagtagttactggtttacatgcagctgggttagtttaggtatataaaaactgtttctctcccttcccccaccttcacacttccactgtttcttagtacctgtctttctgctggaaaggggctggaaagaccccttttaataccattgtttcagagagtagccaggtaaaactattggcattcttggcttttggctactaaatagatttcattaaatctacttaaaaactaaagtaggctaggcatggtagctcatccctataatcccatcttggggcgccgagatgggtggatcacctgaggtcaggagtttgagaccagcctggccaacatggtgaaaccccgtctctactgaaaatataaaaactagcctggcatggtggtgggtgcctgtaatcccagctgctcgggaggctgaggcaggagaattgcttgaacccaggagacagaggttgcagtgggccgacatgatgccattgcactccagcctcggcgacagagtgagactccgtcacaaaaaaaaaaaaaaaagtcatgtgtcaaatgtctgatcagtcagacaca

SEQ ID NO: 72873 - DNA, 741 bp, Homo sapiens
atgtgtcccctgaggaaccagactcgacagcagataaagctgagtagaagggcatcctaatcctttctgccttccctatgcattttggtcaattaaacccattcagtgtaacaactttgtatttaaggctggttcacaccaaaccaaaactaatatgctttctgtattttattttgatgagtagttactggtttacatgcagctgggttagtttaggtatataaaaactgtttctctcccttcccccaccttcacacttccactgtttcttagyacctgtctttctgctggaaaggggctggaaagaccccttttaataccattgtttcagagagtagccaggtaaaactattggcattcttggcttttggctactaaatagatttcattaaatctacttaaaaactaaagtaggctaggcatggtagctcatccctataatcccatcttggggcgccgagatgggtggatcacctgaggtcaggagtttgagaccagcctggccaacatggtgaaaccccgtctctactgaaaatataaaaactagcctggcatggtggtgggtgcctgtaatcccagctgctcgggaggctgaggcaggagaattgcttgaacccaggagacagaggttgcagtgggccgacatgatgccattgcactccagcctcggcgacagagtgagactccgtcacaaaaaaaaaaaaaaaagtcatgtgtcaaatgtctgatcagtcagacaca

SEQ ID NO: 72874 - DNA, 741 bp, Homo sapiens
atgtgtcccctgaggaaccagactcgacagcagataaagctgagtagaagggcatcctaatcctttctgccttccctatgcattttggtcaattaaacccattcagtgtaacaactttgtatttaaggctggttcacaccaaaccaaaactaatatgctttctgtattttattttgatgagtagttactggtttacatgcagctgggttagtttaggtatataaaaactgtttctctcccttcccccaccttcacacttccactgtttcttagtacctgtctttctgctggaaaggggctggaaagacccyttttaataccattgtttcagagagtagccaggtaaaactattggcattcttggcttttggctactaaatagatttcattaaatctacttaaaaactaaagtaggctaggcatggtagctcatccctataatcccatcttggggcgccgagatgggtggatcacctgaggtcaggagtttgagaccagcctggccaacatggtgaaaccccgtctctactgaaaatataaaaactagcctggcatggtggtgggtgcctgtaatcccagctgctcgggaggctgaggcaggagaattgcttgaacccaggagacagaggttgcagtgggccgacatgatgccattgcactccagcctcggcgacagagtgagactccgtcacaaaaaaaaaaaaaaaagtcatgtgtcaaatgtctgatcagtcagacaca

SEQ ID NO: 72875 - DNA, 612 bp, Homo sapiens
tgccttctccaggttcagaaagagcaatgaggggcatagatggccattggaagtcagcagcagtacagcgaaagggaaaggcatagcctgtagacagggattgcaatcttgatatattttctatttagtttcctttctaaaaacagaataatttcatgctaacagaagtgttgtaagtacagcacaaagtgctttcttccaattaagtgcatattgtattttttaaaaaataatctccatctccatacacgaataaaatacattactccatctagtcctcaggaatatttcraattttgacaattaactcaaaaaagttctttgtaaccaaacagcctccaggaagaaacacttatttacggacaaatctgtgatgccctggtccgacctgggacactggggacattgctcctatgctgagttactgagaagagccagccctgcagctgtgcccagcctgccctatcccctgctgatttgcatgttcgcagagcacagccccctgccctgaagacttattaataggctggtcgcaccctgtgcaggagtcagtcccaaccaggacacagcatggacatgagggtccctgctcagctcctggggctcctgctg

SEQ ID NO: 72876 - DNA, 679 bp, Homo sapiens
acaggattttatagtataatatakatttattgaaaatcattaagttcacattccataaataaaatgtgttcatacatatatatgtgtacatttgcttatatgtgtttgtatatatatatgtgtgtgtgtgtgtatacacacagatgtaacattcttattcttttttttaatataaaaaccttgctactcaaaatttgtccagaacccagtagcaacactaagagcatgttaccaattcaaaacagcaaaaccaccttagatcaattgaatgggaatctgtattttcataagataacagatgatccattgaaggtttaagaagctatgttttagggaatgtttacttcagctaagaaatttttgttgtttttatccaacatgtcaatttaagaaaatctgattaaagtcacatgttgaaaacacatccaattttttttactcaatttgatttaactttaattaatttaagaataaatttacttttttaatgctgaaggttgaaatacttaattatttgtcagtgacatgatcacataccttgaaacttaattggagaaaaggttttagaaccttgagtaattgctaaagcaaaagaagaaacccacatattgtatacgtgtgttgcagctgatgggacttaaatttgcttgtgtagcttgacctcaggatgttgttaact

SEQ ID NO: 72877 - DNA, 779 bp, Homo sapiens
ttttaaagaaagtttctacgaataattgtgtacaggtttttaattaaatgttttggagatataattcatataccacataattcacctttttaaagtgcataattcactggtttttaatatattcacaaggtttgtgcataggattttgtgtgaatactggttttcattcctcttggataaagatttaatttggcattacccttccagacaccattctgtgttttcatacgtatatatgtatgacagtctgaccttaggcagagtagcattttcaaaattttacatggggaaactttctagagttaaagtcattttatttttctgttctgtctggttttatctgcgtgttatttacaatctgctgcgtaacaaattactacaaacttagtaccttaacacatatttatttcacagtttctgtgggtcaggagatcagaaatggttctatttcaaggtctctcacagggctgcaatcaagatgttggcatggctggggtctcatctgaaggctggactggagaatctacttccaaacttatgtggtagttggaagagtttagttcctcaaggctgctaaactgatggcctgtgttccttgcctctgggatggtagcttgcttcaacaaagtgtgcaagcagagaagacagagagagkccactagcaagatagaagccacaatctcttgtaatctatcatttttgctgtattctactggttaaaaataactcattaggttagcctactggctctgaaggggaagagattatacaaaggcatg

SEQ ID NO: 72878 - DNA, 779 bp, Homo sapiens
ttttaaagaaagtttctacgaataattgtgtacaggtttttaattaaatgttttggagatataattcatataccacataattcacctttttaaagtgcataattcactggtttttaatatattcacaaggtttgtgcataggattttgtgtgaatactggttttcattcctcttggataaagatttaatttggcattacccttccagacaccattctgtgttttcatacgtatatatgtatgacagtctgaccttaggcagagtagcattttcaaaattttacatggggaaactttctagagttaaagtcattttatttttctgttctgtctggttttatctgcgtgttatttacaatctgctgcgtaacaaattactacaaacttagtaccttaacacatatttatttcacagtttctgtgggtcaggagatcagaaatggttctatttcaaggtctctcacagggctgcaatcaagatgttggcatggctggggtctcatctgaaggctggactggagaatctacttccaaacttatgtggtagttggaagagtttagttcctcaaggctgctaaactgatggcctgtgttccttgcctctgggatggtagcttgcttcaacaaagtgtgcaagcagagaagacagagagagtccrctagcaagatagaagccacaatctcttgtaatctatcatttttgctgtattctactggttaaaaataactcattaggttagcctactggctctgaaggggaagagattatacaaaggcatg

SEQ ID NO: 72879 - DNA, 1044 bp, Homo sapiens
tcatctttaagctatcttattttctagagwttgtaccctcctcatctgcctatattggtctcagggcatttcttgtgcatagctcgagtgggtagcatccccagtcactgagctcatcacacgcggtgctaatctataccttcagatgatgtgcatctaatttctaattccagcttctgctatagctaactgttccatagccagtaatttagtccttacttagagtgattgcccagtggggttcacatttattctgctcataaaatcccatcttttctgcaagaaaggactgacttcctggaagatgaaaacaatagcaatcatcctcctataaaaaggatttcctatctttgggttacttcttttgtaaaatttcttcaaagcattgggctccaggcaagtgacaatttttaaaaaactattatatgaagatggacaaattttatctcttagtacccacaactgtgttgtaggttatattttggcaaacggccttagtttgatctaccctatagaatcacagtaaggagatctcattttttccttttattgatgagaatactgaaaaactaagtgtgtttcacaaacaacagaaaggtccagaaagactatgtatgtttcagaaacaaagcttttaaatggcaaagatgtgataagaacatgaacgttctgatttttcctgatgttctaatttatcttatttccagaacaactaagagccattgggcacttgatttgtatacctaaaatatcttatttacttaatcttgtaaaactttgggtaaggaattcacacagaaaactaaatgcttacctgagggttatcaattccttggtgaatagtacagtcctggtgaagtatatctgatctatagagacatgtgaaattcagatgaaaactgtgatcttttctggagtttattagaaacgtgatggagaatctgctggggtcatgactgttgctcccccactgaatttatggtggaacagatggttctcccagaaagaccaacaaagttttaatgattataaaatctttgtcag

SEQ ID NO: 72880 - DNA, 1044 bp, Homo sapiens
tcatctttaagctatcttattttctagagattgtacmctcctcatctgcctatattggtctcagggcatttcttgtgcatagctcgagtgggtagcatccccagtcactgagctcatcacacgcggtgctaatctataccttcagatgatgtgcatctaatttctaattccagcttctgctatagctaactgttccatagccagtaatttagtccttacttagagtgattgcccagtggggttcacatttattctgctcataaaatcccatcttttctgcaagaaaggactgacttcctggaagatgaaaacaatagcaatcatcctcctataaaaaggatttcctatctttgggttacttcttttgtaaaatttcttcaaagcattgggctccaggcaagtgacaatttttaaaaaactattatatgaagatggacaaattttatctcttagtacccacaactgtgttgtaggttatattttggcaaacggccttagtttgatctaccctatagaatcacagtaaggagatctcattttttccttttattgatgagaatactgaaaaactaagtgtgtttcacaaacaacagaaaggtccagaaagactatgtatgtttcagaaacaaagcttttaaatggcaaagatgtgataagaacatgaacgttctgatttttcctgatgttctaatttatcttatttccagaacaactaagagccattgggcacttgatttgtatacctaaaatatcttatttacttaatcttgtaaaactttgggtaaggaattcacacagaaaactaaatgcttacctgagggttatcaattccttggtgaatagtacagtcctggtgaagtatatctgatctatagagacatgtgaaattcagatgaaaactgtgatcttttctggagtttattagaaacgtgatggagaatctgctggggtcatgactgttgctcccccactgaatttatggtggaacagatggttctcccagaaagaccaacaaagttttaatgattataaaatctttgtcag

SEQ ID NO: 72881 - DNA, 1044 bp, Homo sapiens
tcatctttaagctatcttattttctagagattgtaccctcctcatctgcctatrttggtctcagggcatttcttgtgcatagctcgagtgggtagcatccccagtcactgagctcatcacacgcggtgctaatctataccttcagatgatgtgcatctaatttctaattccagcttctgctatagctaactgttccatagccagtaatttagtccttacttagagtgattgcccagtggggttcacatttattctgctcataaaatcccatcttttctgcaagaaaggactgacttcctggaagatgaaaacaatagcaatcatcctcctataaaaaggatttcctatctttgggttacttcttttgtaaaatttcttcaaagcattgggctccaggcaagtgacaatttttaaaaaactattatatgaagatggacaaattttatctcttagtacccacaactgtgttgtaggttatattttggcaaacggccttagtttgatctaccctatagaatcacagtaaggagatctcattttttccttttattgatgagaatactgaaaaactaagtgtgtttcacaaacaacagaaaggtccagaaagactatgtatgtttcagaaacaaagcttttaaatggcaaagatgtgataagaacatgaacgttctgatttttcctgatgttctaatttatcttatttccagaacaactaagagccattgggcacttgatttgtatacctaaaatatcttatttacttaatcttgtaaaactttgggtaaggaattcacacagaaaactaaatgcttacctgagggttatcaattccttggtgaatagtacagtcctggtgaagtatatctgatctatagagacatgtgaaattcagatgaaaactgtgatcttttctggagtttattagaaacgtgatggagaatctgctggggtcatgactgttgctcccccactgaatttatggtggaacagatggttctcccagaaagaccaacaaagttttaatgattataaaatctttgtcag

SEQ ID NO: 72882 - DNA, 753 bp, Homo sapiens
aatggagctttcaggaatggaagctgctctgggtaagtcagtgagtgagtggtgagtgaatgagaaggcctaggacattactctacactactgtagactataaacactgtacacttaggctatactgaatttgttttaaaatcatttttcttcaataataaatcaaccttagcttacgtaaccttttactttataaactatttaattttttaactttttgattattttgttaacagtttgaaacacaaactgtacagctgtacaaaaatattttgtgctttttctataaatttttctctattttttattttcaaactttttgttaaacacaaagacacacacattagcctaggcctacacagggtcaggatcattaatatcactttggcccacttccacattttgtcccactggaagttcttcaggggcataataatatgtaatatacccttaaacaactagcagtgcagtagatttgtttacaataacatcaccacaaacacaygagtaatgtgtagccatatggcattatgaaggttatcatgtcactaggccataggaatttttcagctccattataatcttatgaaaccatatcatatatgcagtccatcactgactgcaatgactttatatggcacatgactgtgccttattccattggccaaagctcagagggagggattgtggggactatgaagctacagggttaagggcttggatgcaggaagaagtggagaattaggaccattt

SEQ ID NO: 72883 - DNA, 753 bp, Homo sapiens
aatggagctttcaggaatggaagctgctctgggtaagtcagtgagtgagtggtgagtgaatgagaaggcctaggacattactctacactactgtagactataaacactgtacacttaggctatactgaatttgttttaaaatcatttttcttcaataataaatcaaccttagcttacgtaaccttttactttataaactatttaattttttaactttttgattattttgttaacagtttgaaacacaaactgtacagctgtacaaaaatattttgtgctttttctataaatttttctctattttttattttcaaactttttgttaaacacaaagacacacacattagcctaggcctacacagggtcaggatcattaatatcactttggcccacttccacattttgtcccactggaagttcttcaggggcataataatatgtaatatacccttaaacaactagcagtgcagtagatttgtttacaataacatcaccacaaacacatgagtaatgtgtagccatatggcattatgaaggttatcatgtcactaggccataggaatttttcagctccattataatcttatgaaaccatatcatatatgcagtccatcactgactgcaatgactttatatggcacatgactgtgccttattccattggccaaagctcagagggagggaktgtggggactatgaagctacagggttaagggcttggatgcaggaagaagtggagaattaggaccattt

SEQ ID NO: 72884 - DNA, 704 bp, Homo sapiens
attgactggaaggtcaagacaggtgctttgctaattaattgggtaaatgttgttccttttttccccttccatatggattagactgtactctgcaggaaaaaaaaaaatcaaggcttgtccttagaaggtgagtttactttaataagtcaactaataggtcgtcagaagacctgtagcttgtaggaatactgaaaagggattgggggtacacatggagcccaagccctagaatgagagccatcccgacaagccacaaactgtagggcagtcgcaacaataccacaaggataaacttagggcaaaattcagaaaagaaattgtggtaacagacttgggacattgttcaggagtcaggacctagtggttgagaacgtttaaaaggtggcttccttgatgagattggagggaaagtccaagtcaactgraacatcattctttatcattcttgtgctgtaatccgtttctaaaactgccctggctattcatcggatagcttacatctaacccttttctacctttttgactttaacctatttatggagattgtgatatgtagcttgcatccttcccaggactatttgaagagtgataagagataatgcaggtgacagcactttgccagctgaaaagcactagacaaaggtgaggctccagcatcacataacctgcaaccctacttgctgaggccaggagaggtctgggcc

SEQ ID NO: 72885 - DNA, 264 bp, Homo sapiens
agcttggaaattggccctggcccttcaaagatagccttcttttagaatatgtttggctaagaaagattcttaaatatrtggaatatgattattcttagctggaatattttctctacttcctgttgcatgccataggcttctgaagcagccaatgtcgatgcaacaacatttgtaactttaggtatactgggattatgttgtagtttaacattttgtaactgtgtgcttatagtttacaagtgagacccgatatgtcattatgca

SEQ ID NO: 72886 - DNA, 786 bp, Homo sapiens
cctcaatctcctcatctgttgattagtgatacagcacttaccacatagggttgttttaaggatgagttacagaatgtatataaagtgcctagcagagcccagcacatagcaaatacacagaaaactttcttttacttctattgccttctccccaaactaccacaaaggaaaacagataagatgtttcytttaaataatctccaacactgtcaaattagagaacaccattattgaagaggcagcttctgagtgtccctaccagaaatacattaccctgcatggaaacagtaagtcactgttgagcatataggtataacatttttttttcttgacttgtgtcaaaattgatcattgagcccaagatcaaaaacacttccaaaaggtcacccatattccacaatgctgcggaatgctcctatgtgcaggcagaccaattttacaacatgggctgcagacatagaaagactcttgtcattagctaagaagccgcatgctgccacatgccagggcctccaacaatggaggtctgcacgcgtcttcctcaaaccaggagctgatttttctttcccttgatagagcatggctgtcaaggctgctcatgaagtgttttctaatttgaaaataacagcatgacctcgtaactgttagtagccttattggttagcatcgtgatcgtgtagagaaaacacaaatgaaaatgttactttgtaagtgcctgccatgattaaatgcaagaagaaaagggctcctacagactataaccatttcagtggctgtttacccact

SEQ ID NO: 72887 - DNA, 786 bp, Homo sapiens
cctcaatctcctcatctgttgattagtgatacagcacttaccacatagggttgttttaaggatgagttacagaatgtatataaagtgcctagcagagcccagcacatagcaaatacacagaaaactttcttttacttctattgccttctccccaaactaccacaaaggaaaacagataagatgtttcctttaaataatctccaacactgtcaaattagagaacaccattattgaagaggcagcttctgagtgtccctaccagaaatacattaccctgcatggaaacagtaagtcactgttgagcatataggtataacatttttttttcttgacttgtgtcaaaattgatcattgagcccaagatcaaaaacacttccaaaaggtcacccatattccacaatgctgcggaatgctcctatgtgcaggcagaccaattttacaacatgggctgcagacatagaaagactcttgtcattagctaagaagccgcatgctgccacatgccagggcctccaacaatggaggtctgcacgygtcttcctcaaaccaggagctgatttttctttcccttgatagagcatggctgtcaaggctgctcatgaagtgttttctaatttgaaaataacagcatgacctcgtaactgttagtagccttattggttagcatcgtgatcgtgtagagaaaacacaaatgaaaatgttactttgtaagtgcctgccatgattaaatgcaagaagaaaagggctcctacagactataaccatttcagtggctgtttacccact

SEQ ID NO: 72888 - DNA, 951 bp, Homo sapiens
tgttgttgttgttgttctgagatggagtttcactcttgttgcccaggctggagtgcaatggcacgatctcagctcactgcaacctctgyttcccgggttcaagcgattctcctgccttagcctcccaagtagctggaattacaggcgtgtgccaccatgcccagctaattgtattttcagtagagatgggtttcttccatcttggccaggctggtctcgaactcatgacctcaggtgggccgcctgcctcggcctcccaaagtgctgggattaccagcatgagccaccgagcccggccttgcatctatattttcaatgtcagttttcccccattcctaagtctccaactaaaaagctaaatatataactaatatactgggataccatatcatttctttattcaggagatgttggtattgaggacaggaccagaaggaaatcacataaaatcactacttcaaactggtcctctgaggaaatcaaaataggacaatccatttccatggattcccaacttccaaaagtattctaattttcccagacatggctttcttatttaaattaaaggctcagtttcctgtcttcttttcctgcctaactccagaaaacttctaagggagcaaagtaatagagggctccaattatctctagcacactctgggagcctttataagggcaaaatacaattcgttctacagcaaagcacctctaacacatggtctctaagagaactttgatcatgtgccttcgatttttttttttttttgcctatcagaaatattctatacttcttttttcctgcagagtcaacacataatattaaacagcctgtctgcagtatctaattaacaaactgactgcagatcacttacaacataaaatattaaatcatctaaaaaactaatattctccacacctcataaattaaaataaccaagagactgaaatgaa

SEQ ID NO: 72889 - DNA, 951 bp, Homo sapiens
tgttgttgttgttgttctgagatggagtttcactcttgttgcccaggctggagtgcaatggcacgatctcagctcactgcaacctctgtttcccgggttcaagcgattctcctgccttagcctcycaagtagctggaattacaggcgtgtgccaccatgcccagctaattgtattttcagtagagatgggtttcttccatcttggccaggctggtctcgaactcatgacctcaggtgggccgcctgcctcggcctcccaaagtgctgggattaccagcatgagccaccgagcccggccttgcatctatattttcaatgtcagttttcccccattcctaagtctccaactaaaaagctaaatatataactaatatactgggataccatatcatttctttattcaggagatgttggtattgaggacaggaccagaaggaaatcacataaaatcactacttcaaactggtcctctgaggaaatcaaaataggacaatccatttccatggattcccaacttccaaaagtattctaattttcccagacatggctttcttatttaaattaaaggctcagtttcctgtcttcttttcctgcctaactccagaaaacttctaagggagcaaagtaatagagggctccaattatctctagcacactctgggagcctttataagggcaaaatacaattcgttctacagcaaagcacctctaacacatggtctctaagagaactttgatcatgtgccttcgatttttttttttttttgcctatcagaaatattctatacttcttttttcctgcagagtcaacacataatattaaacagcctgtctgcagtatctaattaacaaactgactgcagatcacttacaacataaaatattaaatcatctaaaaaactaatattctccacacctcataaattaaaataaccaagagactgaaatgaa

SEQ ID NO: 72890 - DNA, 951 bp, Homo sapiens
tgttgttgttgttgttctgagatggagtttcactcttgttgcccaggctggagtgcaatggcacgatctcagctcactgcaacctctgtttcccgggttcaagcgattctcctgccttagcctcccaagtagctggaattacaggcgtgtgccaccatgcccagctaattgtattttcagtagagatgggtttcttccatcttggccaggctggtctcgaactcatgacctcaggtgggccgcctgcctcggcctcccaaagtgctgggattaccagcatgagccaccgagcccggccttgcatctatattttcaatgtcagttttcccccattcctaagtctccaactaaaaagctaaatatataactaatatactgggataccatatcatttctttattcaggagatgttggtattgaggacaggaccagaaggaaatcacataaaatcactacttcaaactggtcctctgaggaaatcaaaataggacaatccatttccatggattcccaacttccaaaagtattctaattttcccagacatggctttcttatttaaattaaaggctcagtttcctgtcttcttttcctgcctaactccagaaaacttctaagggagcaaagtaatagagggctccaattatctctagcacactctgggagcctttataagggcaaaatacaattcgttctacagcaaagcacctctaacacatggtctctaagagaactttgatcatgtgccttcgatttttttttttttttgcctatcagaaatattctatayttcttttttcctgcagagtcaacacataatattaaacagcctgtctgcagtatctaattaacaaactgactgcagatcacttacaacataaaatattaaatcatctaaaaaactaatattctccacacctcataaattaaaataaccaagagactgaaatgaa

SEQ ID NO: 72891 - DNA, 1527 bp, Homo sapiens
caaaataaagttggtgaataaaaatgcacacttgaaaagttttagaaaggccgggcgcggtggctcacgcctgtaatcccagcactttgggaggccgaggcgggcrgatcacgaggtcaggagattcagatcatcctggctaacacggtgaaacccagtctctactaaaaatacaaaaaaactagccaggcatggtagtgggcgcctgtagtcccagctactcgggaggctgaggcaggagaatggcgtgaacctgggaggcggagcttgcagtgacccgagatcgcgccactgcactccagcctgggcgagagcgagactccgtctaaaaaaaaaaaaaaagaaaagaaaagaaagaaaagttttagaaagaatcgaacaattactcctgtttctagtgtaggaggaaagagagacacattaaaaattattctttcagatgaaggctgctgacagttgaaatagttaattaacactggcttctttctccctaatccgaagcagtcttttctttcattggcttctgaaaagctatttagtctcctgcctacatgtagaggtaacacaggaaggctttggccagtgctgagatggctgggatcactcaactagtccactaactggaattaaagtcaacagtagtaataagggtttccagtggtgcatgccagtagtcccaaccactcagggggatcccttgagctcaggagttggaaaccagcctggacaacatagagctaaaccatctcttgaaggaaaaaaaaaaaaaaaaaaaggctgggcgcagtagctcacgcttgtaatcctagcactttgggaggccaaggtgggcggatcacgaggtcaggagttcgagaccagcctgaccaacatggtgaaacccagtctctactaaaaaatacaaaaattagccaggcatggtggtgcgcacctgtaatcccagctactcgagaggctgaggcaggggaatcgcttgaacctgggaggcggaggtcgcggtgagctgagatcgtgccattgcactcccgcctgggcaacagagtgagactccgtctcaaaaaaaaaaaaaaaattctgaaggcttagttaactttatctgtcatccagatgaaaccccaatgatttatgatttggagaattctctggcatctgtagagtgcccgacatcctcaaagttttcagtagcatctctccagcttattcccttaagacttctttcccaccaggatgctctgccaggaatttggtcaaatcgtacacccaggtgcttttgctatgattgtgctttgaatctcctccagggcgcagcacttcacggccttgtccgactgctgggccatctcggagggctgcgagccagtcccagctcacacagcggtgccctgccagcagcgtgcgcctctcatcaagctccgtcggggacattccccgcccgcaccagggacccctgccagaggcggggcagccggtctgtcattctcttaaattttggccacatggtggtgtggtggtatctcattgcgcctt

SEQ ID NO: 72892 - DNA, 1527 bp, Homo sapiens
caaaataaagttggtgaataaaaatgcacacttgaaaagttttagaaaggccgggcgcggtggctcacgcctgtaatcccagcactttgggaggccgaggcgggcggatcacgaggtcaggagattcagatcatcctggctaacacggtgaaacccagtctctactaaaaatacaaaaaaactagccaggcatggtagtgggcgcctgtagtcccagctactcgggaggctgaggcaggagaatggcgtgaacctgggaggcggagcttgcagtgacccgagatcgcgccactgcactccagcctgggcgagagcgagactccgtctaaaaaaaaaaaaaaagaaaagaaaagaaagaaaagttttagaaagaatcgaacaattactcctgtttctagtgtaggaggaaagagagacacattaaaaattattctttcagatgaaggctgctgacagttgaaatagttaattaacactggcttctttctccctaatccgaagcagtcttttctttcattggcttctgaaaagctatttagtctcctgcctacatgtagaggyaacacaggaaggctttggccagtgctgagatggctgggatcactcaactagtccactaactggaattaaagtcaacagtagtaataagggtttccagtggtgcatgccagtagtcccaaccactcagggggatcccttgagctcaggagttggaaaccagcctggacaacatagagctaaaccatctcttgaaggaaaaaaaaaaaaaaaaaaaggctgggcgcagtagctcacgcttgtaatcctagcactttgggaggccaaggtgggcggatcacgaggtcaggagttcgagaccagcctgaccaacatggtgaaacccagtctctactaaaaaatacaaaaattagccaggcatggtggtgcgcacctgtaatcccagctactcgagaggctgaggcaggggaatcgcttgaacctgggaggcggaggtcgcggtgagctgagatcgtgccattgcactcccgcctgggcaacagagtgagactccgtctcaaaaaaaaaaaaaaaattctgaaggcttagttaactttatctgtcatccagatgaaaccccaatgatttatgatttggagaattctctggcatctgtagagtgcccgacatcctcaaagttttcagtagcatctctccagcttattcccttaagacttctttcccaccaggatgctctgccaggaatttggtcaaatcgtacacccaggtgcttttgctatgattgtgctttgaatctcctccagggcgcagcacttcacggccttgtccgactgctgggccatctcggagggctgcgagccagtcccagctcacacagcggtgccctgccagcagcgtgcgcctctcatcaagctccgtcggggacattccccgcccgcaccagggacccctgccagaggcggggcagccggtctgtcattctcttaaattttggccacatggtggtgtggtggtatctcattgcgcctt

SEQ ID NO: 72893 - DNA, 1527 bp, Homo sapiens
caaaataaagttggtgaataaaaatgcacacttgaaaagttttagaaaggccgggcgcggtggctcacgcctgtaatcccagcactttgggaggccgaggcgggcggatcacgaggtcaggagattcagatcatcctggctaacacggtgaaacccagtctctactaaaaatacaaaaaaactagccaggcatggtagtgggcgcctgtagtcccagctactcgggaggctgaggcaggagaatggcgtgaacctgggaggcggagcttgcagtgacccgagatcgcgccactgcactccagcctgggcgagagcgagactccgtctaaaaaaaaaaaaaaagaaaagaaaagaaagaaaagttttagaaagaatcgaacaattactcctgtttctagtgtaggaggaaagagagacacattaaaaattattctttcagatgaaggctgctgacagttgaaatagttaattaacactggcttctttctccctaatccgaagcagtcttttctttcattggcttctgaaaagctatttagtctcctgcctacatgtagaggtaacacaggaaggctttggccagtgctgagatggctgggatcactcaactagtccactaactggaattaaagtyaacagtagtaataagggtttccagtggtgcatgccagtagtcccaaccactcagggggatcccttgagctcaggagttggaaaccagcctggacaacatagagctaaaccatctcttgaaggaaaaaaaaaaaaaaaaaaaggctgggcgcagtagctcacgcttgtaatcctagcactttgggaggccaaggtgggcggatcacgaggtcaggagttcgagaccagcctgaccaacatggtgaaacccagtctctactaaaaaatacaaaaattagccaggcatggtggtgcgcacctgtaatcccagctactcgagaggctgaggcaggggaatcgcttgaacctgggaggcggaggtcgcggtgagctgagatcgtgccattgcactcccgcctgggcaacagagtgagactccgtctcaaaaaaaaaaaaaaaattctgaaggcttagttaactttatctgtcatccagatgaaaccccaatgatttatgatttggagaattctctggcatctgtagagtgcccgacatcctcaaagttttcagtagcatctctccagcttattcccttaagacttctttcccaccaggatgctctgccaggaatttggtcaaatcgtacacccaggtgcttttgctatgattgtgctttgaatctcctccagggcgcagcacttcacggccttgtccgactgctgggccatctcggagggctgcgagccagtcccagctcacacagcggtgccctgccagcagcgtgcgcctctcatcaagctccgtcggggacattccccgcccgcaccagggacccctgccagaggcggggcagccggtctgtcattctcttaaattttggccacatggtggtgtggtggtatctcattgcgcctt

SEQ ID NO: 72894 - DNA, 1527 bp, Homo sapiens
caaaataaagttggtgaataaaaatgcacacttgaaaagttttagaaaggccgggcgcggtggctcacgcctgtaatcccagcactttgggaggccgaggcgggcggatcacgaggtcaggagattcagatcatcctggctaacacggtgaaacccagtctctactaaaaatacaaaaaaactagccaggcatggtagtgggcgcctgtagtcccagctactcgggaggctgaggcaggagaatggcgtgaacctgggaggcggagcttgcagtgacccgagatcgcgccactgcactccagcctgggcgagagcgagactccgtctaaaaaaaaaaaaaaagaaaagaaaagaaagaaaagttttagaaagaatcgaacaattactcctgtttctagtgtaggaggaaagagagacacattaaaaattattctttcagatgaaggctgctgacagttgaaatagttaattaacactggcttctttctccctaatccgaagcagtcttttctttcattggcttctgaaaagctatttagtctcctgcctacatgtagaggtaacacaggaaggctttggccagtgctgagatggctgggatcactcaactagtccactaactggaattaaagtcaacagtagtaataagggtttccagtggtgcatgccagtagtcccaaccactcagggggatcccttgagctcaggagttggaaaccagcctggacaacatagagctaaaccatctcttgaaggaaaaaaaaaaaaaaaaaaaggctgggcgcagtagctcacgcttgtaatcctagcactttgggaggccaaggtgggcggatcacgaggtcaggagttcgagaccagcctgaccaacatggtgaaacccagtctctactaaaaaatacaaaaattagccaggcatggtggtgcgcacctgtaatcccagctactcgagaggctgaggcaggrgaatcgcttgaacctgggaggcggaggtcgcggtgagctgagatcgtgccattgcactcccgcctgggcaacagagtgagactccgtctcaaaaaaaaaaaaaaaattctgaaggcttagttaactttatctgtcatccagatgaaaccccaatgatttatgatttggagaattctctggcatctgtagagtgcccgacatcctcaaagttttcagtagcatctctccagcttattcccttaagacttctttcccaccaggatgctctgccaggaatttggtcaaatcgtacacccaggtgcttttgctatgattgtgctttgaatctcctccagggcgcagcacttcacggccttgtccgactgctgggccatctcggagggctgcgagccagtcccagctcacacagcggtgccctgccagcagcgtgcgcctctcatcaagctccgtcggggacattccccgcccgcaccagggacccctgccagaggcggggcagccggtctgtcattctcttaaattttggccacatggtggtgtggtggtatctcattgcgcctt

SEQ ID NO: 72895 - DNA, 1527 bp, Homo sapiens
caaaataaagttggtgaataaaaatgcacacttgaaaagttttagaaaggccgggcgcggtggctcacgcctgtaatcccagcactttgggaggccgaggcgggcggatcacgaggtcaggagattcagatcatcctggctaacacggtgaaacccagtctctactaaaaatacaaaaaaactagccaggcatggtagtgggcgcctgtagtcccagctactcgggaggctgaggcaggagaatggcgtgaacctgggaggcggagcttgcagtgacccgagatcgcgccactgcactccagcctgggcgagagcgagactccgtctaaaaaaaaaaaaaaagaaaagaaaagaaagaaaagttttagaaagaatcgaacaattactcctgtttctagtgtaggaggaaagagagacacattaaaaattattctttcagatgaaggctgctgacagttgaaatagttaattaacactggcttctttctccctaatccgaagcagtcttttctttcattggcttctgaaaagctatttagtctcctgcctacatgtagaggtaacacaggaaggctttggccagtgctgagatggctgggatcactcaactagtccactaactggaattaaagtcaacagtagtaataagggtttccagtggtgcatgccagtagtcccaaccactcagggggatcccttgagctcaggagttggaaaccagcctggacaacatagagctaaaccatctcttgaaggaaaaaaaaaaaaaaaaaaaggctgggcgcagtagctcacgcttgtaatcctagcactttgggaggccaaggtgggcggatcacgaggtcaggagttcgagaccagcctgaccaacatggtgaaacccagtctctactaaaaaatacaaaaattagccaggcatggtggtgcgcacctgtaatcccagctactcgagaggctgaggcaggggaatcgcttgaacctgggaggcggaggtcgcggtgagctgagatcgtgccattgcactccmgcctgggcaacagagtgagactccgtctcaaaaaaaaaaaaaaaattctgaaggcttagttaactttatctgtcatccagatgaaaccccaatgatttatgatttggagaattctctggcatctgtagagtgcccgacatcctcaaagttttcagtagcatctctccagcttattcccttaagacttctttcccaccaggatgctctgccaggaatttggtcaaatcgtacacccaggtgcttttgctatgattgtgctttgaatctcctccagggcgcagcacttcacggccttgtccgactgctgggccatctcggagggctgcgagccagtcccagctcacacagcggtgccctgccagcagcgtgcgcctctcatcaagctccgtcggggacattccccgcccgcaccagggacccctgccagaggcggggcagccggtctgtcattctcttaaattttggccacatggtggtgtggtggtatctcattgcgcctt

SEQ ID NO: 72896 - DNA, 2994 bp, Homo sapiens
cattgaataattcagtgtttggaactcctgggtggtgaatatcttccaatagaaacactcagcagaaagaactgggaactcacacgctgtagattttctttaatggtttagccaagtatcacacgcagcagacataacggtgtttaaacagtctgcccagcctactgggtctttgcctttaggtagcaaatattctcttagtcttgttactttttcctctccatataagaatatttaaggacacaaaccacacactcttttcagctacttgtccccatgtaggcttaaaatagcaccaatatataatgctaaaattttacaactgactatttgaaacataattgttctatgcattgatgtaaagataaatacaatgattttgcaatacgatgtgatgttatttactgtaacttgatccaacttaatacactggttaaatatgttgcaaccaagtggaattacctcatataatactatgtcaagtttggttaataatccacttaccgtaaagaaaaccgattctgtgaaattgtacaacaaaaaatctgcataatctcttagatatgtacagaaatcaatgagatttgggaaataaagaaaaataatgttatatttctcttttcttgtagttaaatacttcaaacaattaaaatcattacagtatttgctttctttgaaaaaagatttttaaaaaattttaaagtttttgtatagacagggtctcattatattgcccgtgctggttttgaacttctagcctcaagaaattctyctacctcagccttgcaaagtgctaagattacaggcatgagccacgctcatattaaaaaggtttttttttggttttttttgtttttttgttttttttgagatgaagtctcacactgttgcccaggctggagcgcaatggcgcaatctcggctcactgcaaccacccgctcccggattcaagtgattgtcctgcctcagcctcctgagtagctgggattacaggtgcctgccaccatgcctggcaaattttttgtatttttttagtagagatggggtttcactatgttggccaggctggtctcgaactcctgacctcatgaaccacccgccctggcctcccaaagtgctgggattacaggcgtaagcaaccacgcctggcctaaaaaaattttcaacttggatagctaacactattttgacaaaacctcttcaatcataagcatcctatccgattatcatttggatattcaataaattcttttaaagtggttgcgacttcctttcatattcaacaatagagtactatgttggcagtagagataaaagaatcagctaatctggattagtccagttgtatttctgatttgagtcctgcactttatgataaaagaatatttactgtaatttttaacagtaaagaatcagtcttaaggaaaggcagggtgattacctttattgtcaggaatgcgttgctgactgaaaatatcaatctctcctctctcatagtttttgcaagcctgtgctgttatatttttttaatcaggtaaatagtaaagataacagttctcctgtatccaaatgaaagtattagtatttacagtagagaatttcaatggagaagccaactgaaatcctttcttgttcaagacagggtacaaataatatgcataaacatcaatagggatttgtttgttatatgtgtgtctgagtgtggagactaagggaagaagcacgctgatattcggtgctaaagacatattgtttgattgatatggtgccctatgggcgtctcattaagttgtagacaacctatgctttaagcaggaatttcaacttgtttatttgcactgggcagactgaaatatctttaccactttaggtgagactcaaggcactgccacatgtgagcagtctgagagaaatggactaacaaatcacagaacagtatagagaaatgaagagtatagactttagtgacaggaaaacacacaataccaacaatctgggtttgattcgtggctctgtttcagcctagctgtttgtcctcagataagccattcaacttctcagaagctcattttcctcttttgtaaatgggaatagcaggttatcttggagaatctttctgaggatgagatgagacaaggttttgaaagtacctgagcatatattaggaattcaaaaagctatattcacagacatgattaagtatcttcaatcacataggttttgtttaccctctttcatactacacatagctatttcatttttctccctttaacttgattttacttcataaatctctcctccaccaccccaacagatgtgctgtttaatcaaactaaacctgtctaattccaccttatgttataaatcatacctaacctgtctaaaatcctttaacacataatggcttcccataagcttttcaaatgagtaaatccaagacactaatcgaaaacgaacttgtacaacagagtagatctccgctgcttcacagaaggggagggtgcaggtctccttgaagtgcaagctcttcatttacagtgagttttttaaaaaaactactaagaatagagtggaagtgtgcagagccatgtttctaaaagcttgggctatagagaatgcactgctgtctcggtgcagagttcggatgccagcaaaatgagccaggtcattgtactaattaggactgctcctgcatgcactaatatatcatgaaaaaatagcaaggattacaagagagctcatcttctcttctacacattctcagggcaaaagttacttctaaataatgacaaaggagtcacacaaactgacacagaagaggttctctttgttgggataaattggcttatatcctccttccctttcctgcaatctaaaggaatattgtgaaacaagttggataacaacaataatgacttgtttaatgaagagctcataatagtgtgaagtgacattatatattctttagtcaggcaacctggcatgtgttggcat

SEQ ID NO: 72897 - DNA, 1934 bp, Homo sapiens
gctatttttgactggcttctgaaatggcagcagttttcctcagctgagccctcaaactgtgggatctgatactctatccaggtagatagcattgaaattagactgacttatcggatatctagttggtatcctggaggattgcttggaatgtgggggaaaaaactcacatatctgaccacagaagtgttctatgttgagtgagagtatagtagggaaaaacagtttgtattctcttatacaaaaacaaaataaacatgaataaattgaatctacataaataaaatttgataaggagagacctttacagtttgatcattagctttcatttacgaattcttccacttaatgctctgattttttagtttgcaattttttctccatggctggggcttttcagttcccgttacatctctgtgaagatttttagtcctgtttgtccatgagaagttaataaccacctttactgaataaacagacttgcatctagtgtttaaaaagggaccactggccgggcgcggtggctcacgcctgtaatcccagcactttgggaggccgaggcgggtggatcatgaggtcaggagatcgagaccatcctggctaacaaggtgaaaccctgtctctactaaaaatacaaaaaattagccgggcgcggtggtgggcgcctgtagtcccagctactcgggaggctgaggcaggagaatggcgtgaacccgggaagcggagcttgcagtgagccgagattgcgccactccagtccgcagtccggcctgggcgacggagcgagactccgtctcaaaaaaaaaaaaaaaaaaaaaaaaagggaccactgtgcagagtctaacaacagtgccctaactttaatgaggcagatcctaattatatttagtttcagaaggttgtaatattttttcttgtggctaaaacttgggtatgtcaaataattgataaagtaggatttttaaaaacttttaccatggatttttattgtagcaatatttaaaatgcatttttagactttaggattgcctaaatgaaactattcatataacagttttgttggtaacatacaaggttggaagaggaaaaaggtttagcattttccacattgaacagttaagaatagagatctgcataaaaattgttaccattactatggtttgaatgtttttgcctcctccaaaactcatgttgaggtttaattcctaatgcaacagtgttggtgggcggggcctaaagggatgtgtttacatcatgaagctgtgccctcataaatggattaatgacattataaaaaaggtttgcaggagtggtttttctctctttcattattctgccatgtaaggacacaatgtttgttcccacttgcgttctgccatccactacaggaggatgccataagaagactgacaccagatgcccaggttctgatgttggacttcccatcctctagagttacgagaaaatacatttctggttttttgtttgttttttttttgtttgtttgtttkttttttgtaaattacccactctcaggtatgctgttacaagagcacaaaacaacctaagacacctaggatacaactgctgtgcaaaatgaccttttttcatctgtgtgacttcacatttcctcacagatgttacatgagtctgtctactctattgggcataaacatctataactcactgtattacctttcaactgcataaatggtgctcaaagacatttaaacatcatggccaatctggtttcaagatgatgcacatattttgaaagtgagacgttatgtttatgactccagcaaaaaaatactatattaccattcaaaaatggcactgcctttttgagtgtacaatgttattaaaatatctcctattaccattttcctacagggcaaaaataaataggcaaggaaaatgtgttctcctaggaattc

SEQ ID NO: 72898 - DNA, 1685 bp, Homo sapiens
gatgactatcagtttaaagtttccaagttttgcttgatcaaacttctttatcaaattatagaaaatcagataaaattttaaataataaaaacactgtaaacaatatttattgatgttttgacctatgacctaagcttggcaaaatggtttaaatgtgtcccctcagaaagtgtatgttaaaaacttaatcaccaatgaaacagtgtagggaggtgaggtctagtgggaagcatttaggtcataagagttccaccttcatgaatagaaaaatgctgataataaaagagcttcagcctgaaagtttgatctcttgctctttctctctttctccttgcccttctaccctggatgatgcagcaagaaaggtttcaccaaatgtcaactccttgatcttggacttcccagcttccaggaccatgagctaataaatttctgtttgttataatttactcagtctggagtattctgttatagcagcacaaaacagactaaaatacttggcaatgtagaaatatacagaaatctaaaataggatatatgccctcaaaaaactttttaaacttatcaggaaaactaaatataaactagtaaaaaattacgctacagcaaaagagtaaaataatttaggataacaatgggaagaaaagaggaaggcaatgcatgtctaaattgacaagaaactctcaaagtcaaaaaagatactatatactcttgtggggaaagagagatcttagctgggtctacaagaacagccagaatgtacattggtagtagagaagataggaaataattctaggtggatwgtgctgcatgaacaaagtatgacaagagaaaatataaaaatagataagccaatttgcctagagataatggcttatgaaaaaaagtaggtaactatggtggaaaaaaatcggctatgaatgtaaagctctaaagtataattttgagtctacacttttttcttgggcatatttatatctaaatgctatgtaatttggcttaataaatttaaacaatgtattttcaattgcttggcactaaatgttttttgcttttggtggggcaaggcccattgattggagtgctcacatggacaaggggtaatgaatagcaagtttagcacagagataatgtacaatatcatctttctatttctggtgacagagttcagagaacaggaagtcaatttggcagcttcagcacagccttgcccacaataagcctcatgcagtaggacagttcctggataaaagcaggctaattctagggtccgaaaaagaaatctcaagaatcacctgataagaaagctgctctgacaaactactgaaataaattatgccctttgatgtatcatgccagctacactcagaagcagagatattttagttatgaaggaacagagtttgttgataaagattgtttaggttctcagagacatagcttgggtcctatggcacccaagaactgtgttgtctagattgtatgctacaccatgttgtggcagatatgtttagttttgagaggcatgttgctcatagatttcctactatcatgttctcattcttcaatcctgatgctgagattagcccagtttagttgatcagtttttcctttcctctatccccacttctttctttctctcttacttttccaataacctatactctctgtaataccttcttaca

SEQ ID NO: 72899 - DNA, 1685 bp, Homo sapiens
gatgactatcagtttaaagtttccaagttttgcttgatcaaacttctttatcaaattatagaaaatcagataaaattttaaataataaaaacactgtaaacaatatttattgatgttttgacctatgacctaagcttggcaaaatggtttaaatgtgtcccctcagaaagtgtatgttaaaaacttaatcaccaatgaaacagtgtagggaggtgaggtctagtgggaagcatttaggtcataagagttccaccttcatgaatagaaaaatgctgataataaaagagcttcagcctgaaagtttgatctcttgctctttctctctttctccttgcccttctaccctggatgatgcagcaagaaaggtttcaccaaatgtcaactccttgatcttggacttcccagcttccaggaccatgagctaataaatttctgtttgttataatttactcagtctggagtattctgttatagcagcacaaaacagactaaaatacttggcaatgtagaaatatacagaaatctaaaataggatatatgccctcaaaaaactttttaaacttatcaggaaaactaaatataaactagtaaaaaattacgctacagcaaaagagtaaaataatttaggataacaatgggaagaaaagaggaaggcaatgcatgtctaaattgacaagaaactctcaaagtcaaaaaagatactatatactcttgtggggaaagagagatcttagctgggtctacaagaacagccagaatgtacattggtagtagagaagataggaaataattctaggtggattgtgctgcatgaacaaagtatgacaagagaaaatataaaaatagataagccaatttgcctagagataatggcttatgaaaaaaagtaggtaactatggtgraaaaaaatcggctatgaatgtaaagctctaaagtataattttgagtctacacttttttcttgggcatatttatatctaaatgctatgtaatttggcttaataaatttaaacaatgtattttcaattgcttggcactaaatgttttttgcttttggtggggcaaggcccattgattggagtgctcacatggacaaggggtaatgaatagcaagtttagcacagagataatgtacaatatcatctttctatttctggtgacagagttcagagaacaggaagtcaatttggcagcttcagcacagccttgcccacaataagcctcatgcagtaggacagttcctggataaaagcaggctaattctagggtccgaaaaagaaatctcaagaatcacctgataagaaagctgctctgacaaactactgaaataaattatgccctttgatgtatcatgccagctacactcagaagcagagatattttagttatgaaggaacagagtttgttgataaagattgtttaggttctcagagacatagcttgggtcctatggcacccaagaactgtgttgtctagattgtatgctacaccatgttgtggcagatatgtttagttttgagaggcatgttgctcatagatttcctactatcatgttctcattcttcaatcctgatgctgagattagcccagtttagttgatcagtttttcctttcctctatccccacttctttctttctctcttacttttccaataacctatactctctgtaataccttcttaca

SEQ ID NO: 72900 - DNA, 749 bp, Homo sapiens
atattatttccattttatggatgagaaaattgaggttcttctatgttacgtaacgcttcttaaaaatgcagagagttttaaaaaaatgcttgttcccatagttagtaacagagctagacacttacctgaaccaaaggtttgtgtacctytcatcttatctaaatgtttgcttatctgtgcttattattgtgcttgctctcttcctcccttctctctcttactctctctctctctctttgcaggtatatgtatacatctactctcaactccactctcattcctccaatggtccatggtagaggcacagtcagaaaacaccctagtctctctatttgcatggggctactcaagccaatggaaaatgccagcagatgttttgaaatatgcaggtacatatcaataaaaatataataggttacttctaataagcataaattgatgttgcttcttctatccttagtcctttcacaatttccatttgaaaacaggacagagatagggccaggaaagatagcacgtgtgtgcacacacacacgcacacacacaagccccttccaaaattatgagaaagcataccagcagagcaaagagcttcaagtatcagtttgcacagagttggagattttcagttctgccaaatgagtctaaattcaacggcaacataaggagctaaatctgttgggtgagttatactttacctggataaattagatgtgcttgggggaagtattcattctttcaagttggta

SEQ ID NO: 72901 - DNA, 2006 bp, Homo sapiens
aagaaaccacagctcacagagcttaaatgactttgcccatgccacccagctagtaagtggaagagccagcattgaagtccagggctgtctgattctaaagccacatattttaataacaatatcacccgaggattctgagaccactcaacaaaccaatgtcacttaaggattttttagagactactttaaaagcaatgtgaataaaatgcttaatgaagaaccaaagctatatgaactgagttctcagtccctgccagtactgtgctagaaactgtccatgtatgctctcattcaagtatctccatagcctccatagatcttgttagttctattttgcaggtgaggaatctgaggctcagaaagaggaaggtaacttgcccaaggtcacacacagtggaggcaatatttaagtccagatctgcttgattttaaagccctatattttactaacaacatcacccagagcgttcctagggaaaatgctcattttcagaaaaaaatccagaaaatgcttaccaaatagcaacccctaakttagttgcctaaaggatacaggctgctgggtaggcttcatcttaacaagggtttcccttccccagacccatgcaacattatttttctcctattttaaaaaaactcttttttcccccttcttgcttggtaggaggacggggtgtgtgtgtgtgtgtgtgtgtgtgcatttgcggaatggaacaataaaaaggagagagacatgcatagagataaacggattgcagagaactcaggagatccaagttgatctaaaggccctggggtctggcttcttgcaatctctctttacctgttgataacagctcacttctggataagtcagcagggggttgggggtggggagtcatttttaaggagaaggagagcctctgtattagttaaatccttttaacatatatagtaaaagggaaagaatcccaccactcacaattttccctggaatgttgctgggttttggattctgattcagcttcagaaggctgggatcccacagagcattagaaggactggtgtgatgagaacaagatcatctattaagcacctattacatactggtgtgatgctgaggactttgcattcattacatctgctacggtttgaatgtagtgtccccttcaaaattcatgctgaaacttaatccccattgtggtggtattaagagttggacccttttaggaggtgattgagtcataagggtggagccctcatgaacgcccttataaaagaagctttagagagagtttgcctctcttgttcttctgccttcggccactgaggacacagcatcaaggtgccatcttgaaagcagagagcaaccctcaccagacagcaatgccagtgcctcaatctggtacttccatcctctagaactgtgagaaacaaattttgattcttaataaattcctcagtccttggcattttgttataataatgcgaatggactaagacaacctcatatgactctttcacctaccctgcaaatgaggcagttgtatgcccttttgataaggctaggaaattgtgggttcagagagacaaaacttttcccaagagacacataatgttctctaagattgtacagccagtatgacatagacctgggattcaaatctaagattagattttaagtgcaatttatgtgtctcttcagtggccaaatatctgcacttgcttcttctggttaaacataatttgctgtctgacatccttatctcagccactgacccctgagtcatctcccttctctatcccctttctcactgccaacatgtaatgggcttgcaagatggaatgcctcccctactacctgtcccttctagggaatccctacccttaaatattctttatgcaggaattcaaaactacatgttgaccagataatcccaatcatggattgggaatagacagttcatctaagagtagccaaccaatagcaggctggcaacctgtggggtgagctactgtgaagcctc

SEQ ID NO: 72902 - DNA, 2006 bp, Homo sapiens
aagaaaccacagctcacagagcttaaatgactttgcccatgccacccagctagtaagtggaagagccagcattgaagtccagggctgtctgattctaaagccacatattttaataacaatatcacccgaggattctgagaccactcaacaaaccaatgtcacttaaggattttttagagactactttaaaagcaatgtgaataaaatgcttaatgaagaaccaaagctatatgaactgagttctcagtccctgccagtactgtgctagaaactgtccatgtatgctctcattcaagtatctccatagcctccatagatcttgttagttctattttgcaggtgaggaatctgaggctcagaaagaggaaggtaacttgcccaaggtcacacacagtggaggcaatatttaagtccagatctgcttgattttaaagccctatattttactaacaacatcacccagagcgttcctagggaaaatgctcattttcagaaaaaaatccagaaaatgcttaccaaatagcaacccctaagttagttgcctaaaggatacaggctgctgggtaggcttcatcttaacaagggtttcccttccccagacccatgcaacattatttttctcctattttaaaaaaactcttttttcccccttcttgcttggtaggaggacggggtgtgtgtgtgtgtgtgtgtgtgtgcatttgcggaatggaacaataaaaaggagagagacatgcatagagataaacggattgcagagaactcaggagatccaagttgatctaaaggccctggggtctggcttcttgcaatctctctttacctgttgataacagctcacttctggataagtcagcagggggttgggggtggggagtcatttttaaggagaaggagagcctctgtattagttaaatccttttaacatatatagtaaaagggaaagaatcccaccactcacaattttccctggaatgttgctgggttttggattctgattcagcttcagaaggctgggatcccacagagcattagaaggactggtgtgatgagaacaagatcatctattaagcacctattacatactggtgtgatgctgaggactttgcattcattacrtctgctacggtttgaatgtagtgtccccttcaaaattcatgctgaaacttaatccccattgtggtggtattaagagttggacccttttaggaggtgattgagtcataagggtggagccctcatgaacgcccttataaaagaagctttagagagagtttgcctctcttgttcttctgccttcggccactgaggacacagcatcaaggtgccatcttgaaagcagagagcaaccctcaccagacagcaatgccagtgcctcaatctggtacttccatcctctagaactgtgagaaacaaattttgattcttaataaattcctcagtccttggcattttgttataataatgcgaatggactaagacaacctcatatgactctttcacctaccctgcaaatgaggcagttgtatgcccttttgataaggctaggaaattgtgggttcagagagacaaaacttttcccaagagacacataatgttctctaagattgtacagccagtatgacatagacctgggattcaaatctaagattagattttaagtgcaatttatgtgtctcttcagtggccaaatatctgcacttgcttcttctggttaaacataatttgctgtctgacatccttatctcagccactgacccctgagtcatctcccttctctatcccctttctcactgccaacatgtaatgggcttgcaagatggaatgcctcccctactacctgtcccttctagggaatccctacccttaaatattctttatgcaggaattcaaaactacatgttgaccagataatcccaatcatggattgggaatagacagttcatctaagagtagccaaccaatagcaggctggcaacctgtggggtgagctactgtgaagcctc

SEQ ID NO: 72903 - DNA, 685 bp, Homo sapiens
aataagcataattttgtttttcaagtgctcattgggcttcagaaaatgtgtattattactgctataggcaagcagccctgtgtagtagaaagagtgaagactttaaagccagaaagattatgattcaaattgtggttcttggccatttactttgttgcttgttgccttggcaaatccttccacctctcagatcctatttcttaagattctatttcttcatctacaaaatggggacaacagtactcaagtgatttacatcatttgcatatcttatccagggtcctttcctttgagtatcaactccacacacttttcataaaacttgggaagagttaaccccatgattggtcrgaagattacctgatcttgaccagagtcctcatcttcctggccacggacattagttcaggaatagacatatgatctaggccaggccaatgagagtctgtcaagtgacttttctgcaaaatgcatgggtaaaatgcctgctgttctgatatggcaagtaggatgatgaactcattcacatctgcctggggttttcttggttttagcattgactgtccccccatctcaggaaacttctcaatcttaggatggttggtcactgatatggtttggctgtgtccccacccaaatctcctcttcaattttaactcccacaattcccatgtgtcctgggagg

SEQ ID NO: 72904 - DNA, 685 bp, Homo sapiens
aataagcataattttgtttttcaagtgctcattgggcttcagaaaatgtgtattattactgctataggcaagcagccctgtgtagtagaaagagtgaagactttaaagccagaaagattatgattcaaattgtggttcttggccatttactttgttgcttgttgccttggcaaatccttccacctctcagatcctatttcttaagattctatttcttcatctacaaaatggggacaacagtactcaagtgatttacatcatttgcatatcttatccagggtcctttcctttgagtatcaactccacacacttttcataaaacttgggaagagttaaccccatgattggtcagaagattacctgatcttgaccagagtcctcatcttcctggccacggacattagttcaggaatagacatatgatctaggccaggccaatgagagtctgtcaagtgacttttctgcaaaatgcatgggkaaaatgcctgctgttctgatatggcaagtaggatgatgaactcattcacatctgcctggggttttcttggttttagcattgactgtccccccatctcaggaaacttctcaatcttaggatggttggtcactgatatggtttggctgtgtccccacccaaatctcctcttcaattttaactcccacaattcccatgtgtcctgggagg

SEQ ID NO: 72905 - DNA, 685 bp, Homo sapiens
aataagcataattttgtttttcaagtgctcattgggcttcagaaaatgtgtattattactgctataggcaagcagccctgtgtagtagaaagagtgaagactttaaagccagaaagattatgattcaaattgtggttcttggccatttactttgttgcttgttgccttggcaaatccttccacctctcagatcctatttcttaagattctatttcttcatctacaaaatggggacaacagtactcaagtgatttacatcatttgcatatcttatccagggtcctttcctttgagtatcaactccacacacttttcataaaacttgggaagagttaaccccatgattggtcagaagattacctgatcttgaccagagtcctcatcttcctggccacggacattagttcaggaatagacatatgatctaggccaggccaatgagagtctgtcaagtgacttttctgcaaaatgcatgggtaaaatgcctgctgttctgatatggcaagyaggatgatgaactcattcacatctgcctggggttttcttggttttagcattgactgtccccccatctcaggaaacttctcaatcttaggatggttggtcactgatatggtttggctgtgtccccacccaaatctcctcttcaattttaactcccacaattcccatgtgtcctgggagg

SEQ ID NO: 72906 - DNA, 1041 bp, Homo sapiens
tgcatggaagaccacaggccatgttgttcttttctgacacaattcaaatactagaatgggtatcatttcaacaacctgatccctggttcctgtacagaagtctcaagcacccaaccaaacatttccttctgtacttgatcagcaaagaaatgcagtggcgtatacacaacgtcagttttcactttcccaggtagattctctgtgtatgtctgtgtgtgtgtgtgtgtgtgcatgtatgtgacccactcaagattttgaagatgaataaaatgtggaaggaagaactaatttcttctctgatgattagagggtaaaagagggaagaacaaatttgatgaatcttcaagtcctttatcttatatttttagcccatgtgaaaaccattttaaaccagggatttaaaaagcctggtctgaaatggaatgggtatatctgagtgagaactgaatcattttctggtctaacatagccaattggagcatgcctgtaatgtgaggctctgaagtcagagctgagttcaaattccacctttgaaacctcagaccagtcattttaattcccctgagcctcttcatcctcactgagaattaaatgggataacaaatttgtaatacaatcatttggtgttccccagaccctaaaattcagttttttgagtctctttaccttatagaaaattctggctcaagttcaccctcccctctatacatgaaacccagggatccctcggtatttttagtgggggagttgcttttcttccagtagcttctctgatttcctgtttcttctgtatctttttctgccccatgttgaaggaaatgtggagwatttcattatccatccctatcaagagttggttaacacaagacaattgtgtggcccatgcccaaaactggttaggggcagcagagggtaattatctcccagcacaatacatcaatcaagccaacctccctgctatggtttgaacatctgcccctccaaacctcatgtgagaatttgatccccagtggtggagttggagcctggtggaaggtgttt

SEQ ID NO: 72907 - DNA, 404 bp, Homo sapiens
gattacaggtgcctgccaccacactcggctaatttttgtattcttagtagagatggggtttcatcatgctggccaggctggtctcaaactcctgacctcaagtgatctgcccgcctcagcctcctaaagtgctgggattacaagcgtgagccaccgcgcccagcccaattattggtttttaaggaggtgaggtggttgccgcactatattccaacrattgtgggacactttttttcttacaaaatcgctgaaatcgaagtttaattagcattgttttctttctgggctatatataaaataatgatatgacctatagtcaggggcgttttagaggtggtgaggtttggtgattacatttgcaattttagaagttcatgttagatgtaatatggagaatagattta

SEQ ID NO: 72908 - DNA, 1146 bp, Homo sapiens
ttttatgttataatttaagagatcagatggggagaaaatcagaacattrtagtccagaataacaaattaagatacttagatcagagaagaggctgaagtatttcataattgtactcttactccatttacagagaaaagaacaatgggaaaattgcagtggtttggagaaaagtgtaaaaacagtagattccttggaaaccagttggctaatactgagaaatttaagtgtcataacccaatgagtctaatttgtgagtggtgtgagttgtaaagtgttgaggattaaactcttcatttgttctgcgcatgttaaataacctcacctttcctcatttcttctcccatcaagaattctttctctctttctacaacacttacttatattctatcattcttcatcttctacctcatctcttaatactcatccttcttttttcagtcaatggtgtcaaaagaaaagagagggacaattaaaaggagtcagtgtgtcacccactggatgcttccagtaggtattttaaataaacaaaatacacttcaggttggacctgaagagtagcatatatgtttttaaaaatataaacctgtaagttttagattcttaaggattatggaagttagaaaaaaagaaaggatgtctagagtgattaggaaacaccaatggaagacgatggacttaaactttgttttgaaaagtagggaagacaagtgggaagcggagggacaggagggcaaatcaaggaagtagaagatcaaaggcataatgataggagtaccaggtattcttagaaggaagcctaggctgaactttcaaaaatgtaaatcagatcatgaccctcctctgcttaaaaaccttaaatgatttttcattgtaaatagaatagaatacaaattacttctatgaccctcaagatcctatatgatctagttgatgtaggtcctacccactgctgagatatcatctcctactattttcttgcttgttcattccaatgcagtcattagcctttttataaaaaaatattgatttgtttgacacattgtaattttacatatttataagatatgtttgttgttcttgatgtttcaatacatacctatgttgtgtaataatcgaatcagggtagtttgtgtatttatcacttc

SEQ ID NO: 72909 - DNA, 972 bp, Homo sapiens
attgaaacatacactgtatcccataaatatgtacaattcttatgtattaattataaataagaattaattaataatttttaaaagaagagctatacccagccttccctccaaaaaaactctcagcctaattaatgaagaatgcttagtatcctagaaaatgactatggcataatattaagagaaagaaagaaaaactttaaaaatattagttatgattaaaattatgttaaacggccaggcacgggggcttacgcttgtaatcccagcactttgggaagctgaggcaggtggatcacttgaggtcaggatttcgagaccagcatggccaacatggtgaaatcctgtctctactaataatacaaaaattagccaggcatggtggcacatgcctgtaattccagctactctggaggatgaggcaggagaatcgcttgagcccaggaggcagagcttacagtgaaccgagattgcaccactgcactccagcctggtagatggagtgggactctgtcccaaaaaaaaaaaaaaaaaaaaaaaaaaaaaaaawatatatatatatatatatatatatatatatatgtaaacatatacatgttaaaaatatgtatatttgtataacatatatatgttaaacattcacagaaaaaacttagaaggctacaaagtatatcaattggtatattagagtactgagattataggcaataattttttctctattttatgatatttttcagaaattattttactatttcttcacagttttttctctatacacttgaaaacttagcaagtttatattagggttccctaagatagtgtcagtaaatattagctttaaaataaagagctctgtatcatcaccaatagggaagaagtcatctcaagcagacttgcgattatcttaccatgggccagcagatttctgcctcttgagcaggaagcagctctatttaagggcaatgagaagaa

SEQ ID NO: 72910 - DNA, 238 bp, Homo sapiens
cagtaatctttaatacacttggtttctgagtgttgagctctattgtagcaaagtaggattatattacaattgatccattcttgttcctytaatggaatttgagcctggataatctggagcaactactcttcccatgaaagacatggcctatgaaattgactcactatttagattgcccttgaaccatgaaacatctggggcatatatgtttttcatagaccctgcaagcagaggaatg

SEQ ID NO: 72911 - DNA, 1153 bp, Homo sapiens
tccaagagcttgcttcccaaatgaagtaaggtctaaaagctgctccccacatgatagcagtgacacagcacaacaggagagtgcgacaggagggcatattgtgacacagcctctggagccacccgcagcctcasaatgacatgtgggagcagtgggaatttttcttcgcctccaagaggaccaaaaaagtgactgaaagagaaacagagcacctaaaggggccttggggttccaagtagagtgtgtgactggtgatcagagacagacagaaaacaaacattagctgcagattccaccttagagggacgaaggtcactaattggaagctctttccctccaccaagtttcccacactcagagatgccaccccatggggaaagaaggaaagggagaaatcctgagttaagtgaggaaacctggcattgactagagtaagccttggctatcaggcataatacagcatacagaaaacatacaggaaggaaagaaagcacaagggacagtatgcaattggaggggaggattaaaggcttagaatgactgctgtgctgaaagctcaccagggagaaggggctcaaaaaagatagatttgtggtgaggtttattcggtttgtttttactgtaagcaagaccctggggtaagcaaaagcattaccccagagttaacaaatttcctcttcccaggtataagtaatgtgaccagtggttttaatcagtcaccctgcctgtaacacagacacacttatcaagctgataagacacactgattcgagatttcctgtatataggatacatgattcaacaaggcatttttctcaggagctatagtgcagaccagtttcgctccttccttgtcaaatccaatttgattaccctgtgttaaaggaaatggaattgactacctgccttcacccagacacccagaaggatactgattgtcattctttaaggttacaccattgggttcaggcgcagtgacacacctgtaatcccagcactttaggagaccaaggagagtggaccacttgaggtcaagagttcaagaccagtttggccaacatggtgaaaccccgtctctactaaaaatacaaaaattagtcaggcgtggtggcacacacctgtggtcccagctactcaggaggctgaggtggaa

SEQ ID NO: 72912 - DNA, 618 bp, Homo sapiens
ttcaattctcttcttggaattctcaggtaggacaatctattgcttaaatggagattatgttatcacaattagaacaattttagaaatgccttttgaactgattatatatgtgtaaataatacaatgttgtctggaatttttcatgttggaatttcagtggctcaaaattatgaacaaaagtcattatatggttcaaattttaaattcaagaaagcatctatatttaaggccaactatttcccaaaaggctaactagagagagaccactcagagccagctgttttctttgggtacttgatgcctgcctgcacagaggggaaaaggcagcctgttttagaaggtggtttgcagggagagagagaygctttgctcccagcaacccaaagagctggaggtgccaaaagaatcttcataagttttggtgctgtctaaagaaaaggaagattgatacttattttttaaatgtctgcttaagcaggggcttgtcaatctttcttattctccctaaacagggggaaagtgaattgggtgacctgctgtctcagggactgccaggttaggagtggggccagggggaggtcagcgctgtttgtgatttctgggaggtgaaggtgatgg

SEQ ID NO: 72913 - DNA, 626 bp, Homo sapiens
ttagtatgaactttagtatgccaattttstaaagagttcggttaatgttactcattcatcattctgttccacagtttgttgagcatgtactgcacatttggaaattggagatccataggttgatgcacaatatatgaaaactaccttctctgacataaaaaatattacacatttttatgtcaaacacaagcatgatatgaaaacatacttttaacgacactttcaagtctaaactctcctgaaactgacattcattcaaatttctcaataagcttacacacacaatttttatcctagcatccattgttttccataccattctgcaattaaaatatttcactgcaaaatctactcaatattgtattttcctctgcaccgtttcttcatgccagagaaaatgaagtaatgtaaggaaaagctacaagagattggagagaaagtgtaacacgagctgagccctgaaaggagaatggaactccaaccaattgtagaaaggattcgactctcaggcaaaggaacttagaatcaatttcatggtaacctcagaaccttcatattttctctttctgtcttactttcttttgtgcaagtcctttcttagtttccaggtgtgggagctttgcctg

SEQ ID NO: 72914 - DNA, 1044 bp, Homo sapiens
taagttgccccatttagtcacggattttccaaattaaaaagaaaatatgtgtgtgtgtatatttgtatttgcacatttatatacatatacatacacactcatacacatatacagatatatatttcatgttctatacttccttaagtttcagtatattttatgttttttgttgctatcatgaatggagatatttgtctataactgtttccaaataattactttaaaattattacttttatatgtattttacatcctcagcttactattccttcatgtcatttctaataatttttctgcaaacacattttgacttttaggtagacaatgacatcgtatctgaaattattagactgctatctgaaattttcttgttcatttgtttccttattgtctttctctacacagtcactctaaataatacactccatgggcgcaggccttgcctgtcctgtgcacagtttgatctccagggcttagaaaagtaactgccatatggcagatactcaatacttaatgaaygaccctgttccttgaaataaaatcttgcaaaaacaatggcaatattcccttcatatttctaagaattatatctcaaaggttttcttcctgacacaatacattcattagaacttccagaataccatggtggaggtggcaacttttcccttattttttactaaaaatgtagtagttttctattacatatataattgatatttcaatctggcttgggaatcacttgttactattaagaaagcactttctataactatttttgtttcttgttttattttgtcttatctttttttttaagatatggaatagatatagaacatattttggatatttcctaaaggaaaaataccacgtaggttttctcctttggtctaccaagatgatttactgtttgagtggaaacaataactggatttttttatgagggagttccagactactttgagactctcatattcacattagaaaaacattattactacgtttagaaaaatgttactcacacacacatttgtatttaacctcaga

SEQ ID NO: 72915 - DNA, 983 bp, Homo sapiens
tttcagacatttttaatctctgttcttgtttcccttttctatttctgatattattttataaacctactcttgttttctatttcattacccttatcgattatattaactctttcttctaaaataaataacattttctgaagaaaaaagacatatacagatgctgatgattctaagatgccataatcactttgtttgccataataaacaaacacaacaagacatgtaaaactcaggaatttctctttcttagtgcagcctcatatatgtcttcaaaccttgatgatcttttatatttaaatactatcttttctgaaagctgcttgacttccagtctttcatattaatgttttgtaagccaagagttaatgatattaactgctttaattaagtgcattagggrcacgagatttggcttctagttccagatttatcactgtgtgctcttggagaatttggcaattcaatggacttctctggatcatgttccttcatctataaaatggatatgataatatcaaattctcataaaagctgaagggataccccagatactcaaagttctttcttaggtctaacatttgtatatcaaagaacatgtcattctgttcgtttgttaatagcaacttcataagctcttttatatccagtgctgtgtagacatctgaccttttttaaagaaaaaaaagtattccattgcttcacccacatcacatgtcagcttttattgtaatattttactggaacatttatctttctctttatttttggattaccttttatcttttttgaatttttagtatcttagcacttgcatgacaatgaaaaatgttaaatgtttaaataaatatatttagaagtattaggtgcatataaaatacacacatataagcacatttaaaatctccatatttttctatatagtggtacaacacttgcttggaaataacatgaagtgatttatctcagctcttattttcacacat

SEQ ID NO: 72916 - DNA, 400 bp, Homo sapiens
gggtgatgaaatcatctgtacaccaaacccccaagacatgcaatttacctatgtaacaaacctgcacatgtaccccggaactgaaaagtatgaaaaasaaaaagtctatggctatatagactatggtaactagggtcaattaagtaatatttgtactatactagtagcaaaactttcgagagagagaaggtattggaaaactttgctactagtatagtgcaaatattattcatttgaccctagttaccatagtctacatagccattgactttttgttttttacaattttatgttcgggggtacatgtgcaggtttgttatgtaggtaaattgcatgtcttgggggtttggtgtacagattatttagaatcaacttattgtgaaatatttatgcatttgtg

SEQ ID NO: 72917 - DNA, 400 bp, Homo sapiens
gggtgatgaaatcatctgtacaccaaacccccaagacatgcaatttacctatgtaacaaacctgcacatgtaccccggaactgaaaagtatgaaaaagaaaaagtctatggctatatagactatggtaactagggtcaattaagtaatatttgyactatactagtagcaaaactttcgagagagagaaggtattggaaaactttgctactagtatagtgcaaatattattcatttgaccctagttaccatagtctacatagccattgactttttgttttttacaattttatgttcgggggtacatgtgcaggtttgttatgtaggtaaattgcatgtcttgggggtttggtgtacagattatttagaatcaacttattgtgaaatatttatgcatttgtg

SEQ ID NO: 72918 - DNA, 733 bp, Homo sapiens
atttaggagctgagttagttcaagcagcttctggcaatggctaggctttgttttaatcaggaaacttgttttcacttggacaaagactaatttatcatgcaacagttgtggccagtctccgaacatgtacaaactcaaggattatgcacatatataaaagggtgctgctrgatattactattatattttgtagcccaacattttttttcctcttcccaaatctccccagtgtatttgggggaattacttccaatccatcaggttctgtgttggtggagtgaagttctaggtgcccgcctgctgcaggcattagagtctccctctgccttaggggtgcctctgtgggtgtctctttcccaggatttgaatcttgggaaggtgaagcaaggaccaagatcccctggagcccatttatcctggaggttccctcaccaggctcttctagtaaaagatcctcactatgttcctgcaacccagccccggagctttcaagactgatcctccagctgcccattgattgtgagcccccgatatcttcctgacaacttctctctggttgaagtgaagcagaatccatttctgttgcttgtaatcaagaactctaatggataccagatgagagaaggacagcagggcccaggtcgagaatgacggcaggaagagaagaatgaagagaccacagacgtggcagaaaacccttcccctccttactgcactgccttgcagaggatcc

SEQ ID NO: 72919 - DNA, 2295 bp, Homo sapiens
ctcctgaacctggtcatgktctgtcctgtctgtgatgagggagcgtgcggaagtgtccattcctgttctcatctagtactagaaggaaaaaccagcgcagctcaacttataatgagaatgttttccctcccccaacagaatcttctggaagttcagacctatatcagcatcctgcagcagatcatccacaccactcctccagcatccattgtgacgagtgggatgagggaggtaagaattgaagcaggaaaaggcaaaccagccctggagggaagctgtacctggagactcccagggaagggctcacaggttggactgtgagggcggccaccagggtccactccccactcctgccttgtattctcatctgaagtttcttcttctgatattttacttgtactgtaaatgccaatatttagacatgtgaggatgtaaaccgcatccttgaccattttcttcggtattttctcttgagaattatgagctgttcttccttgcatactttataagaaatgaccaagctgctttccaaagcgatgtgccattgttgcatctccacccacaatgcgtgagggtttctgtggcttcctgtccttgccagcacttggtatgtcagctttgtagtgtgtctttgctcttctaatggtggtggttttaatttgcatcccctaatgactaaggaagccgagcatccttttgtgcactcatctgccatccggatagcttctttgtggaagtatctgctcaagcctcttgcccatttaaaaaattggtttgtttccttattctccctatcaatctgataatgaatttcaaatacagataatctcagataattagtgaatatatttccaagacggagctctgctaatgattatgtgagcctgtggcattgaaactagtgggaaaggatagagattgttgaagccaatttgtaaaaattaagatttggatatgaaaaattacttctgatattatgttccaaattccttcttcatttgactctctagctgctcaacgggatagtaacgcttttcctaatatggtttatggaattttgtgatgcatagcatgatatatatatatatagactggtgctgagtgaggtggctcatgcttgtaatcccaactactcaggaggctgaggtgggaggatcatttgaggctaggagttcaataccagcctgaacaacatagcaagaccccatctctaaacaaacaaacaaacaagaagcaaaaaaaccccacaaacactggaaatgatgcaaattaaataaaaatgttacagtgtcccttcttcagaggttgtggtaggctactacagggtttggtggattggtcaagagataaggttctgggtctttttgcaaggatgacctaggatggtggctctcaaccctggtgacacttgaaattgcctagatgtgtgctcaggccatgctccgagtcaatgaatgggcttcccaggaggtggggcctgcccaggaccagcatgcagacaaactgctgcagaacccatgggctggggtcaccggctgcctgaactttttcgtcttaattattttatacaaagctaaagaaatccccaaatttgctttagaagacacttttgaaccctgcaaagtatcatctaagcgacaggaaagttactttttttggcattcatgaggatagtcttgtctgaattgcccaccagttaccatttcaggatcctgttctccttagtggatgtaactgatgttgctacaaaggcctaaaaaaacttttcctgaagccttaattttctttcccagagattcctttccagagatgttacttttatttttcaaacccaactctaactcaaaggtgttttacatccgagcataccttttgaattgtatcatctattcccatgtaataagacccttctaagtcataagtatacagacactaaactgactttgatgtcatcgatcagcatcgtctgggcttgtgagacgtgcagagtgtccagtccagcctcagacccactgaggcagaatctgcatcttagccagatccgcagggactcgtgtgcatgctcaggatagagaagcaccgattgagaaagtgtcacatctttatgagtcttagcttagcaattctacaatcaagttagacggtcactttcctgtatgtctatgtcattgctgcagccactttgtaaggtgtttgaagcagaggctgtcttccatgcagcctctggacacagaaaccctcattgtagacttggtgtttgattttgcatggcttcgagtcaatgtgctctgtgtc

SEQ ID NO: 72920 - DNA, 2295 bp, Homo sapiens
ctcctgaacctggtcatggtctgtcctgtctgtgatgagggagcgtgcggaagtgtccattcctgttctcatctagtactagaaggaaaaaccagcrcagctcaacttataatgagaatgttttccctcccccaacagaatcttctggaagttcagacctatatcagcatcctgcagcagatcatccacaccactcctccagcatccattgtgacgagtgggatgagggaggtaagaattgaagcaggaaaaggcaaaccagccctggagggaagctgtacctggagactcccagggaagggctcacaggttggactgtgagggcggccaccagggtccactccccactcctgccttgtattctcatctgaagtttcttcttctgatattttacttgtactgtaaatgccaatatttagacatgtgaggatgtaaaccgcatccttgaccattttcttcggtattttctcttgagaattatgagctgttcttccttgcatactttataagaaatgaccaagctgctttccaaagcgatgtgccattgttgcatctccacccacaatgcgtgagggtttctgtggcttcctgtccttgccagcacttggtatgtcagctttgtagtgtgtctttgctcttctaatggtggtggttttaatttgcatcccctaatgactaaggaagccgagcatccttttgtgcactcatctgccatccggatagcttctttgtggaagtatctgctcaagcctcttgcccatttaaaaaattggtttgtttccttattctccctatcaatctgataatgaatttcaaatacagataatctcagataattagtgaatatatttccaagacggagctctgctaatgattatgtgagcctgtggcattgaaactagtgggaaaggatagagattgttgaagccaatttgtaaaaattaagatttggatatgaaaaattacttctgatattatgttccaaattccttcttcatttgactctctagctgctcaacgggatagtaacgcttttcctaatatggtttatggaattttgtgatgcatagcatgatatatatatatatagactggtgctgagtgaggtggctcatgcttgtaatcccaactactcaggaggctgaggtgggaggatcatttgaggctaggagttcaataccagcctgaacaacatagcaagaccccatctctaaacaaacaaacaaacaagaagcaaaaaaaccccacaaacactggaaatgatgcaaattaaataaaaatgttacagtgtcccttcttcagaggttgtggtaggctactacagggtttggtggattggtcaagagataaggttctgggtctttttgcaaggatgacctaggatggtggctctcaaccctggtgacacttgaaattgcctagatgtgtgctcaggccatgctccgagtcaatgaatgggcttcccaggaggtggggcctgcccaggaccagcatgcagacaaactgctgcagaacccatgggctggggtcaccggctgcctgaactttttcgtcttaattattttatacaaagctaaagaaatccccaaatttgctttagaagacacttttgaaccctgcaaagtatcatctaagcgacaggaaagttactttttttggcattcatgaggatagtcttgtctgaattgcccaccagttaccatttcaggatcctgttctccttagtggatgtaactgatgttgctacaaaggcctaaaaaaacttttcctgaagccttaattttctttcccagagattcctttccagagatgttacttttatttttcaaacccaactctaactcaaaggtgttttacatccgagcataccttttgaattgtatcatctattcccatgtaataagacccttctaagtcataagtatacagacactaaactgactttgatgtcatcgatcagcatcgtctgggcttgtgagacgtgcagagtgtccagtccagcctcagacccactgaggcagaatctgcatcttagccagatccgcagggactcgtgtgcatgctcaggatagagaagcaccgattgagaaagtgtcacatctttatgagtcttagcttagcaattctacaatcaagttagacggtcactttcctgtatgtctatgtcattgctgcagccactttgtaaggtgtttgaagcagaggctgtcttccatgcagcctctggacacagaaaccctcattgtagacttggtgtttgattttgcatggcttcgagtcaatgtgctctgtgtc

SEQ ID NO: 72921 - DNA, 2295 bp, Homo sapiens
ctcctgaacctggtcatggtctgtcctgtctgtgatgagggagcgtgcggaagtgtccattcctgttctcatctagtactagaaggaaaaaccagcgcagctcaacttataatgagaatgttttccctcccccaacagaatcttctggaagttcagacctatatcagcatcctgcagcagatcatccacaccactcctccagcatccattgtgacgagtgggatgagggaggtaagaattgaagcaggaaaaggcaaaccagccctggagggaagctgtacctggagactcccagggaagggctcacaggttggactgtgagggcggccaccagggtccactccccactcctgccttgtattctcatctgaagtttcttcttctgatattttacttgtactgtaaatgccaatatttagacatgtgaggatgtaaaccgcatccttgaccattttcttcggtattttctcttgagaattatgagctgttcttccttgcatactttataagaaatgaccaagctgctttccaaagcgatgtgccattgttgcatctccacccacaatgcgtgagggtttctgtggcttcctgtccttgccagcacttggtatgtcagctttgtagtgtgtctttgctcttctaatggtggtggttttaatttgcatcccctaatgactaaggaagccgagcatccttttgtgcactcatctgccatccgsatagcttctttgtggaagtatctgctcaagcctcttgcccatttaaaaaattggtttgtttccttattctccctatcaatctgataatgaatttcaaatacagataatctcagataattagtgaatatatttccaagacggagctctgctaatgattatgtgagcctgtggcattgaaactagtgggaaaggatagagattgttgaagccaatttgtaaaaattaagatttggatatgaaaaattacttctgatattatgttccaaattccttcttcatttgactctctagctgctcaacgggatagtaacgcttttcctaatatggtttatggaattttgtgatgcatagcatgatatatatatatatagactggtgctgagtgaggtggctcatgcttgtaatcccaactactcaggaggctgaggtgggaggatcatttgaggctaggagttcaataccagcctgaacaacatagcaagaccccatctctaaacaaacaaacaaacaagaagcaaaaaaaccccacaaacactggaaatgatgcaaattaaataaaaatgttacagtgtcccttcttcagaggttgtggtaggctactacagggtttggtggattggtcaagagataaggttctgggtctttttgcaaggatgacctaggatggtggctctcaaccctggtgacacttgaaattgcctagatgtgtgctcaggccatgctccgagtcaatgaatgggcttcccaggaggtggggcctgcccaggaccagcatgcagacaaactgctgcagaacccatgggctggggtcaccggctgcctgaactttttcgtcttaattattttatacaaagctaaagaaatccccaaatttgctttagaagacacttttgaaccctgcaaagtatcatctaagcgacaggaaagttactttttttggcattcatgaggatagtcttgtctgaattgcccaccagttaccatttcaggatcctgttctccttagtggatgtaactgatgttgctacaaaggcctaaaaaaacttttcctgaagccttaattttctttcccagagattcctttccagagatgttacttttatttttcaaacccaactctaactcaaaggtgttttacatccgagcataccttttgaattgtatcatctattcccatgtaataagacccttctaagtcataagtatacagacactaaactgactttgatgtcatcgatcagcatcgtctgggcttgtgagacgtgcagagtgtccagtccagcctcagacccactgaggcagaatctgcatcttagccagatccgcagggactcgtgtgcatgctcaggatagagaagcaccgattgagaaagtgtcacatctttatgagtcttagcttagcaattctacaatcaagttagacggtcactttcctgtatgtctatgtcattgctgcagccactttgtaaggtgtttgaagcagaggctgtcttccatgcagcctctggacacagaaaccctcattgtagacttggtgtttgattttgcatggcttcgagtcaatgtgctctgtgtc

SEQ ID NO: 72922 - DNA, 2295 bp, Homo sapiens
ctcctgaacctggtcatggtctgtcctgtctgtgatgagggagcgtgcggaagtgtccattcctgttctcatctagtactagaaggaaaaaccagcgcagctcaacttataatgagaatgttttccctcccccaacagaatcttctggaagttcagacctatatcagcatcctgcagcagatcatccacaccactcctccagcatccattgtgacgagtgggatgagggaggtaagaattgaagcaggaaaaggcaaaccagccctggagggaagctgtacctggagactcccagggaagggctcacaggttggactgtgagggcggccaccagggtccactccccactcctgccttgtattctcatctgaagtttcttcttctgatattttacttgtactgtaaatgccaatatttagacatgtgaggatgtaaaccgcatccttgaccattttcttcggtattttctcttgagaattatgagctgttcttccttgcatactttataagaaatgaccaagctgctttccaaagcgatgtgccattgttgcatctccacccacaatgcgtgagggtttctgtggcttcctgtccttgccagcacttggtatgtcagctttgtagtgtgtctttgctcttctaatggtggtggttttaatttgcatcccctaatgactaaggaagccgagcatccttttgtgcactcatctgccatccggatagcttctttgtggaagtatctgctcaagcctcttgcccatttaaaaaattggtttgtttccttattctccctatcaatctgataatgaatttcaaatacagataatctcagataattagtgaatatatttccaagacggagctctgctaatgattatgtgagcctgtggcattgaaactagtgggaaaggatagagattgttgaagccaatttgtaaaaattaagatttggatatgaaaaattacttcygatattatgttccaaattccttcttcatttgactctctagctgctcaacgggatagtaacgcttttcctaatatggtttatggaattttgtgatgcatagcatgatatatatatatatagactggtgctgagtgaggtggctcatgcttgtaatcccaactactcaggaggctgaggtgggaggatcatttgaggctaggagttcaataccagcctgaacaacatagcaagaccccatctctaaacaaacaaacaaacaagaagcaaaaaaaccccacaaacactggaaatgatgcaaattaaataaaaatgttacagtgtcccttcttcagaggttgtggtaggctactacagggtttggtggattggtcaagagataaggttctgggtctttttgcaaggatgacctaggatggtggctctcaaccctggtgacacttgaaattgcctagatgtgtgctcaggccatgctccgagtcaatgaatgggcttcccaggaggtggggcctgcccaggaccagcatgcagacaaactgctgcagaacccatgggctggggtcaccggctgcctgaactttttcgtcttaattattttatacaaagctaaagaaatccccaaatttgctttagaagacacttttgaaccctgcaaagtatcatctaagcgacaggaaagttactttttttggcattcatgaggatagtcttgtctgaattgcccaccagttaccatttcaggatcctgttctccttagtggatgtaactgatgttgctacaaaggcctaaaaaaacttttcctgaagccttaattttctttcccagagattcctttccagagatgttacttttatttttcaaacccaactctaactcaaaggtgttttacatccgagcataccttttgaattgtatcatctattcccatgtaataagacccttctaagtcataagtatacagacactaaactgactttgatgtcatcgatcagcatcgtctgggcttgtgagacgtgcagagtgtccagtccagcctcagacccactgaggcagaatctgcatcttagccagatccgcagggactcgtgtgcatgctcaggatagagaagcaccgattgagaaagtgtcacatctttatgagtcttagcttagcaattctacaatcaagttagacggtcactttcctgtatgtctatgtcattgctgcagccactttgtaaggtgtttgaagcagaggctgtcttccatgcagcctctggacacagaaaccctcattgtagacttggtgtttgattttgcatggcttcgagtcaatgtgctctgtgtc

SEQ ID NO: 72923 - DNA, 1062 bp, Homo sapiens
tgcatatatatactgagttgcattgtggaagtgtgaacaggtttaatataaaatgtattgttacaatgtcagctgtggtcaaaaaagtttgggaaacattgtcaaggttcttactatgtcacagccacctctgcatgaggaagctatcaggttgaaacttctaaaaataaacatgtcaagaacccctctttacaaatattaccactaaataagtagcaaataatgccccacaataagaaaaacatatatttatgaaaagagacttttcaacaatgcttaaccctgcccaacagtggaaagaccatgttggaaggcagtgagttcctcatcagtgattagaacctatggaggaaagccccagacagtttctaactcttgaaaatgtgtgtttctatcacggagctttaagttacaaaattactttctaaatagaaatgartccatttctgtctagcttaatatttagttgttataattgttctttttttgatcagttacaaatgaactcttgatgaacaaaagaatatgcaatgcaatgtggaaaaccaaacagctattttaaagtcccacattgaaatactgtataatgtcagctcaactctcactcattctgggaggggggaagaaaacaggaaataaggcagctttcaaaaatgtctaaactctgctcctctctgcaggatctgagtggttttttgacgctgtggcagggcataatcgtggggaagaaataggtctgacatcagtttatgacggtacagagccagagaaagaagcaacccaggtccaatcattcagcagaatcatctctcaaggtgccctggggcctcatgcagagggttaacaaggacagaaagtctctagacctgggtctgttcatccaacttccatatatctgatggccatggtccagggtacacccaaaaatacaatctaccacattcactgtacctcctttcaatgctcaaaggggcaagtcaagcaacgtgctatactgttacattaatacaaaactgtatttaggtatgggcattactaaatccaaaggtaagtcatccaaat

SEQ ID NO: 72924 - DNA, 728 bp, Homo sapiens
atagagtattgttggccagtttcatatacatacacataccactctgaaggagtgacacagataatataattaatcagtaccacatggatggtgttaaaaatgcacatatatacatgcttgtcgaactaaaccagctcataaagtattgcaaattaatattttatttatttaaatatttacttatttaaaatatcaaagtactttcctttgtattatctcattttgtcttcacaatatctgtttatggcaygctactagaaactagtaaactataacacgacgaatgagagttgcttgttcaagaacatcaagcaaaattacaggcttctgtctcacaatccactaaactactctctgctttccttctaaatctctgaatacagttttagaaagaaaaatgctgttggaatgaaaagcttggacttgatgtttcaaagcaaatatctatttaaataaccacaaaatgagtggaaatgtaagagtttgagagcttgactaaattaatgctatcactgaaaaatggcaacttgaaatgcctctgtgtttactcacctagaaaaccactgctagtctgaatgtgtatttctaaattatcaaaatgagtaaaggccatatatttcagggagctgcactaaagtaaacagaaaaatcttcctctaagctgccagattttccttttccttcaaactgagataacagcacataaagagtctgatagaagaggagca

SEQ ID NO: 72925 - DNA, 693 bp, Homo sapiens
atggtcataaggatggaaaaccccacactgcctacctgctcctagaaattcacaaggcacttccacacattaaagatttaattttatatttcccaaatcccatccccaagcyacttttctgcagaatacacttgaggaataccaatttataaagttttatgtttcatttgatttcaaaaactggaatagaacacaaatatcaaagtatgacaattaggcttataactctaggtaagaaattacaatggtataatctggtagttctaacaattaaccttcatttgctcagatgagagtgaaatatgttccctattgtcccccaagtctgggtaggggacataaggctatctttaggtttatttcatcatgttctgcatttttactcttgaggtcttctcactcattttagctcatgctgctttctcattattctacccaaatatccttccttctttttctctatctaccttccttttatttctctatctataagtataccacagagaggtcagagaggaaacaaagaaccagatggtataggcatcaaaggccttgtatttactcttgtgatgtatcaatgaggaaaagaggaagagatgcaatggccagcagggataatccatgtagggagtatccagaaggagacaggtagggctgggaccccagcacaggtggcctgtttgccttggcaaa

SEQ ID NO: 72926 - DNA, 769 bp, Homo sapiens
taaagggattatttttatagatggcaaatactgtatagtacaaatatatttatttagtccattccatattaccgggcatataaatatttttcagtttcttgctataataaaaaatggttaaacatcctcgtacatgtaaatgctggcacrtttgtttcggcaggagggacctaactgtgagacacgtgagtcaaaggatgtgagctgtgcccggaagcactgcagcagtccacactcttgtcacagagtatgcaggaggtcgtttctccacccctcgtgcagactcatgtgcttttcaaattttctccttagataggtgaaaacccttttctcactgcctacttgtatgcagtagcattttagtgttttgttttgacaacatgcattttctcttccgtgaactgcttattcatattcttgtctatttttctatttgactgttccctacttaaaaattaaggttatcaaacctctgactgtcaaatgtgaaaataacatttaaaagctgtccaaaaaaacaacccctttaagccttgagagagatgtgactgtgatctgagtcacatatggttacaacttccattctcagattatagattaacttgctttcttatttttcttgttcagtacaatgactagagaattaaacaatgtcaggcacaaaaccttcctgcctttttttttttttttccagagactgggtctcactctggcacccaagctagggtagagtggcacaatcatggctcactgcagcctcgaactcatg

SEQ ID NO: 72927 - DNA, 769 bp, Homo sapiens
taaagggattatttttatagatggcaaatactgtatagtacaaatatatttatttagtccattccatattaccgggcatataaatatttttcagtttcttgctataataaaaaatggttaaacatcctcgtacatgtaaatgctggcacgtttgtttcggcaggagggacctaactgtgagacacgtgagtcaaaggatgtgagctgtgcccggaagcactgcagcagtccacactcttgtcacagagtatgcaggaggtcgtttctccacccctcgtgcagactcatgtgcttttcaaattttctccttagataggtgaaaacccttttctcactgcctacttgtatgcagtagcattttagtgttttgttttgacaacatgcattttctcttccgtgaactgcttattcatattcttgtctatttttctatttgactgttccctacttaaaaattaaggttatcaaacctctgactgtcaaatgtgaaaataacatttaaaagctgtccaaaaaaacaacccctttaagccttgagagagatgtgactgtgatctgagtcacatatggttacaacttccrttctcagattatagattaacttgctttcttatttttcttgttcagtacaatgactagagaattaaacaatgtcaggcacaaaaccttcctgcctttttttttttttttccagagactgggtctcactctggcacccaagctagggtagagtggcacaatcatggctcactgcagcctcgaactcatg

SEQ ID NO: 72928 - DNA, 769 bp, Homo sapiens
taaagggattatttttatagatggcaaatactgtatagtacaaatatatttatttagtccattccatattaccgggcatataaatatttttcagtttcttgctataataaaaaatggttaaacatcctcgtacatgtaaatgctggcacgtttgtttcggcaggagggacctaactgtgagacacgtgagtcaaaggatgtgagctgtgcccggaagcactgcagcagtccacactcttgtcacagagtatgcaggaggtcgtttctccacccctcgtgcagactcatgtgcttttcaaattttctccttagataggtgaaaacccttttctcactgcctacttgtatgcagtagcattttagtgttttgttttgacaacatgcattttctcttccgtgaactgcttattcatattcttgtctatttttctatttgactgttccctacttaaaaattaaggttatcaaacctctgactgtcaaatgtgaaaataacatttaaaagctgtccaaaaaaacaacccctttaagccttgagagagatgtgactgtgatctgagtcacatatggttacaacttccattctcagattatagattaacttgctttcttatttttcttgttcagtacaatgactagagaattaaacaatgtcaggcacaaaaccttcctgcctttttttttttttttccagagactgggtctcactctgkcacccaagctagggtagagtggcacaatcatggctcactgcagcctcgaactcatg

SEQ ID NO: 72929 - DNA, 825 bp, Homo sapiens
attacagaatcacccttgtgttggtcaaggccaagcttggtcacactgaggtcccttgtgctctttgtggcttgagtggggaatagtgtaacctgtggatttcctaggcaggcaaggttgcttggatagtttatgcaacccttccatgcctcagtttcctcattgacaaaatggaataacaatagtaactatcttgtgatggggcagtgaggattaatgagttaaaatacataaaatactgagaacagagtctggcatggagtgaacatgcaataaatattagttaatgctaacatattaattacaattcctagtcatcatgcaggtgctgcagctaaactgccctggtccatggtctttttgagctttctttctttctgatgacgcagtgatacttctaggcacggttaaactgagactcaactcacagtccatgttttggctcgcttgttcttttattacttataggaaaataaaccatgatcattaaccaatctcttttgtgcccagggcctttgtgctgttccctttgctggggaagcccttctctctaagcctggcatatggctgagctcatcacataggtcacagcttaaattactccctttatccacatatctaagtcagaccagccttggtggcctatccattggtgactatcccagccccctctttaccctttcaaacctctgataacaagtttcttcccctccctctctcatttcttctctctttctttctctgtttactgtctctgtccccacctcaattgtaagctwttgagaacagaaaccacatctatattttttgccactggttcccaaa

SEQ ID NO: 72930 - DNA, 631 bp, Homo sapiens
ctggttatgagtagaacactcaggaattacagggactgtcataaaatcacatagatttttttcaatgtgaaagtgttgtgttcaaagtctcccagtataagtgtaatactgcaattcaggtcctaattcaatgagatgaactatcagaccaatgtggcaatatggctttagtcatcaccattgtactatctgagataagatgaaaacaaaaagaaacattccaacactcacatattgatatttgatataytaaatcttctggaggactaaattctcaacataaaaaattacatgacattttatgatcattattggcagaatgcatcacacaaaagatgacagttataccaacaggttttttaaacctggtgtcatctttgaaaatgtgtttgtgttaaaatacatttccagtctgtgggattacacttttatttacttttatttctcaagaaaagatgtgacacgtttaatgttaataattccataacaaccaattaacagaaatgtgaagaagagatttttcataagaaaggagttatttgcaatggatttcaacaaattccccagttggctaaagatatatcatgctgggcaatggagtaggtaaaacatttccatggcaaactttcaa

SEQ ID NO: 72931 - DNA, 631 bp, Homo sapiens
ctggttatgagtagaacactcaggaattacagggactgtcataaaatcacatagatttttttcaatgtgaaagtgttgtgttcaaagtctcccagtataagtgtaatactgcaattcaggtcctaattcaatgagatgaactatcagaccaatgtggcaatatggctttagtcatcaccattgtactatctgagataagatgaaaacaaaaagaaacattccaacactcacatattgatatttgatatactaaatcttctggaggactaaattctcaacataaaaaattacatgacattttatgatcattattggcagaatgcatcacacaaaagatgacagttataccaacaggttttttaaacctggtgtcatctttgaaaatgtgtttgtgttaaaatacatttccagtctgtgggattacacttttatttacttttatttctcaagaaaagatgtgacacgtttaatgttaataattccataacaaccaattaacagaaatgtgaagaagagatttttcataagaaaggagttatttgcaatggatttcaacaaattccccagytggctaaagatatatcatgctgggcaatggagtaggtaaaacatttccatggcaaactttcaa

SEQ ID NO: 72932 - DNA, 2100 bp, Homo sapiens
aaaaatcttaacatgtctgtaatgctaaaattctactcagaggattttttttagttggttgtgcaagtgaaccaaatttgtcttcgcctacagatgaaattattttgattagctgaatcctaatgaataatttaaaatgtaaacaatagaaaataatacaattgttatatgtttatttatatagcagctactatgtatggatcttaattaggattaggatttataaattagtgcagctgagatgagaatgaatataaattacacaactgatcctgctggaaaaattaagattcacatatacctttacatatctaatgctaacagtgggaacagactccattcagaatgtttctctgatcaaacttagaaaagtctagggcattttctctcaaaatgcctgaaatcatatctaatagtcaatgccttggtctgtgtataagcttaaattacataaaaataataaaatttataatcttaaattacataaaaattataactttaaattatataaaattataaaaattcaattatcttaaattataaacatgcatatgtgaactaagacgtattcaatatcttcattaggcagacttttgtggcttttaactttcactgacggaagcattctcttctttgtattaatgccaaacaccatttgaaccagaattctttttggtttttggatccaaaaagacagagtctgatgaagccacatccttttatagctgggagaaacatattttcttcttacacatatattgtctgtaactgttggcagggttggaactactatcagaagttaggaatagaggtgttatagatccccatcagccactattctaataccaatgaggccttgggatatagcctgacatacatgtgagatagccatcccttctcacctttaaacctgaggctcaggaaaattgcttcaaccctgtcaagtaaggatgaccttacttgagaatattggctcttctatccatttagaagcatattgaggccaggtgtggtggcacacacctactgyaatcccagcagtttgggaggctgaggtgggaggatggcttgagctcctgaggttgaagcttcaatgagccctgattgtgccactgcactccaacctgggtgactcaaaacaaacaaacaaacaaacaaacaaacaaacaaacagagcatatggagaatagtggactctttcatgatcttcaatctttataaacgactttttgttgcccttttgactactttgcaagtcaagattgactttgatgtagaaaagtatccagctcttcctcatttgaatgataagtggcatagtcctacacatcaataggttccattaattatttcacaatttctgttataattgtctctttcttttcagttccactaacaccacccatcctaatttatttttactgtataactggatgatttaaatggttttctgactgaactctctgcttccacttcctttcacttgcacggttagttggatctttctaaacataagttttggttcatcacacctctgctcgaaactgtcaaagacttgcctttcctgaaaggtatcattgaaactttcttacttagctcatcagctttcaaaatctactcccaatctcagaatggtaggagcatgcatggtacattcataaaaattataacatccattaaatataatgattctggcacagccatttattcaacaagtatttatcaagtttctactgtgcacctgccactgtgctaggtgttcagaataccaaggctcctgtccacagagctttgagtctagagaaggaaatagtaaagaaacaatcatattaatgaatgtgcacttaaaacaaaaggagatagcaggtctgagagaaaggcctattgttccataaaagcgcatagcaaaggattcagacttttgttttttttgaaacggaatctcgctttgttgccaggctggagtgcagtggcgcgatttcggctcactgcaacctccgcctcccaggttcaagtgattcccctgattcagcctcccgagtagctgggactacaggcgcgtgccaccacgcctgggtaattttcttttttttgtatttt

SEQ ID NO: 72933 - DNA, 1181 bp, Homo sapiens
aggttgcagagttggggtttgcacactcccaaataattttggatataacaaaatatatagacattaggaaagcttctagttagctttgtgggacagagcttaaattgaggtctcttggttcttttcaaaaagacttttcatttctgatcaccctaccccagcctacaagagaaactgcttttgcccatcttgtcttgtggcaatccagggtccttcaccttgaagaccctgggttagggattctcaaatatttttctaccctagaatatatatgttcacacataggatacttccatgggtatacctaaattatggtaccctaggaattctattataatctttattttaaacatgtctccttttaataacacacctcttcctgagattctgcaatgtcctcttgagaaggcaaacccctttgtcctttttcatgttctccatcttcatatcccaccatgagagttgctgccttaagcaatactctaattatctgggtgttttttcttttgtcttttgcctagcttttgtgccctttgccctttctctatgaggcttacttcctgtaactatgtgtatgtatgtatgtatgtatstatctatctatctatctatatttataaaaatgagaaataaacccattctatgtgttttctatagttttgggtccatggttgttttaagcaatgaagattgttaaattatccacgagccttctcttctttggctttataatcttaatcctttaagttttcttcatatatcatatgatttttacccttggctcttttcttcgtttaaaaattgtgtgtattattttcattctgactgtactagtcttacatacatattgtacttggacataaagaaaattatggttgagaataaacttacctataattccaccatctagagttagttattgtttgaatttggttgtatttttctatctcttggcttattgttttatgtattgagactgcatgggtcactttataattttaaaattatttttgcctcccatttagcatttctcctctccaagttctccccattcctttcatgttgatgggtcccaagtgagaccaatataatacttcagtatctaaagcaagatttggcttgtgttctgggaaggctagctcacagcctctacatactatattttgatcttcttaatatgc

SEQ ID NO: 72934 - DNA, 652 bp, Homo sapiens
tgtacttgcttgctcacacaccctctcccaccaggggctgagcccgcagttgtggcagccatggaatttgygctggaatgcaagccaggtgtggcccaggtggctgagtaaatggagcatctcctgtggcagaccaaggcccaagcaaggcctgggcaggggtgtcactggctggtggtctctggctagcaaagcgactgagaaaaatcctgcatcaaaaatgtattgtaatgtaactggatgataatactattattacaggaaaactttgaacctgctttagtgtggagaaaatgtcatttgcaaatgatgcattattaagtagtaatatattactgatgtcactgtaactgtaatagatccattgccttatgtgcattgcggtaggcaccagccccacagggtcagtgggtttctccccatgtgcggagacgaaagagtgtagaagacacaagacaaagagataaaagaaaaggcagctgggcccaggggaccactaccaccaagatgcggagactggtagtggccccaaatgccagactgcactgatatttattggatacaagacaaaggggcaggataagaagagtgagccatgtccaataataggtaaggccacgtgggtcacgtgtccactggacagggggccctt

SEQ ID NO: 72935 - DNA, 3352 bp, Homo sapiens
caccagctacacagccatttcctcaagtggttagtttctaaacagcatgcttagcacaggttactctgagctcttggttgttaatacatgaaaagaacagaaagctaaggatattctgattctaccccagggctgcttcaaagacaaaaggaaagaaatgagaaatgggaaaatgcccaaggaatcagaaaatatcacaaggtcaacccacctcgtgtaaatcagcgcacaccgttccagagggtcgcatagaaacctcacgctcaggtttaatttgcccatcctgaagtatttttcctagtagtgccaaatgccataatgctctctgtcagtgatttgaaattattctataagccacatatcgggtacactattgttaatgaaatgcacacaagatgatgaacaacttccttttcctgctggagccccagctgcaaccagtgcctggatccttcatgctgtaaatcagccctttgtactccaggaggattcaatgagctgcaggtgtgggctgtggaaggccgcctgggattaggtagcagcatttgatatgagatcccaaatagcactggcaatctatgcgccacatgcggccacaggctttggagaaagcaaaggaaaaacgctgatgaaatgtggcacgggcccatggaatgcaatgtcaaagtttcacatctgcaggaaaagaaagagagttcctaattttacagtgatgatgtcattgagaattcatgacagtggaaatgatgggccaaggtttgcaaacttaaccactcaggaggttgctaactraaggctgagcttttcaagggacagtgtggatttgtgtggaacactgatttgccttcctgacctgagcagtcatagtgtctgtgtgtgtgtgtgtgtgtatgcatgtgtgtgcacacacatttgcgcacaggctctggagagacatggggagaggaaaagaacttgtatttgagaggttatgcattatgcaggcatatcaagctgatattttgcatgccaaatgtgtccttaaaaatatactgtctctgtgtcattcagcataaaacactgctggctgtccttaacaacaatataattttaaaagattgatttcagacgctccaaaaattcacgagccaagaaaaactatcatagttgttcactttctccctaatgttaactgccgaaaagagcttctttttaaatatttttttcttccttgagactgaagagacataaaaataagtctggttttgttattagtacatggataaaatatgtattgaagaaaacacatctttaattttttaagagtctgtttttcattagcttatcttgatagtttaagttaatcattattttcagccatatatgatttagatattatgtcattaattcatgtacagtccatctgagtaatgattgtggttttctactttacaaattcatctacttcaccaagaaaccaagagagtcaaattccatgcaacatctggtttccattgaatgtaattgccatttgcagagttataatcatgtgttattgtaagggccacagtgtcaatcactctcctaatggggaaaattcaatgcctaaatacctgggagaacaagaagctgacttaaacaggtgcattcagacactaggttttaagtagaattctaacctacccatttaaataaatcattttaaggagaaacaatattctttccatcccctgtagcaagggaaagcataaaatccaggacttcaatctcccatgctcagttccagtactatatcatgtttaatctttttaaaaatgttcaaatatgcctatatcatagtgattccttatgttccatactctcatgggaactcccaaaggccaggcaggatttttgaaaactttctgggggaagggaccatcttctgattcttcctgccttacatcttctgattcttcctgtctttttttcttacgatgaaaataagccacacttgatttaagaaaatattaaaccattcaaactactaaagtcattatagctttttctagcccatggggttttttggggggataatcacataagaggttgaaaaaatcatgaagcaccgtggtagagagtgcaatatgtaagcactttatggcaaaagtgaaccacatttccttgacctcattctccattgtgtttacaagccaagccttgtttgaactggtaaatgtttggccatgcattcaggaaacatttcctaaggcaaaaataacacgccaggaattgcactggacattcaggatgcaatgatgaataagacaatctagagggtgagagagcacacacgcaggtaattacaacatcagacaagaagtagaaataagcccacatattatagcagcagagaaaggccattttatccagccagcttaagaaggaggagtgagtcccagaaggctccctggagaaggtgacagctgagccaagttttaaaggatggatagaagtgaaaggctttctatataaaggcctttaattttagtacctgctaaggaaatgtttatgctagtaaactttttgattcaatagaaatactatgaaaaggtaatttacagttctgttcaattcattccttcacatagttatataaatgacatttactattctattcattgcacgtattcttctcatctatgcaaaacttaggaagcatgagagaagtagcaattcccacaagcaattttcattatctttggcattatcattactgaaataccatcttacatttgaggaacactctgaaatctgcaaaaggcttttgacaacattttattttcttgtcacagtaaggtaggaggtgcaagtattagattggtcccactgcaacacagatgttaaaaggtcttggtgacaaaagggctagaattcaagtctataacctccataactaagactgctgggcttaaaaacatgcagcctctcacctagatgaggaaagaaggaagaacttagcatctggaccatagttgatgctcaccatgattgaacaaacgaaaacatttccagctctcaattagtcatgcagatggagatgactttactccagaaaacttaaactaagagttaaccttcagaaccatttctgttggtttatcatgcattttgtgatcatattggcagcagatttattctcacaattttccttctttttaagcaactagttgaggttttccacatcctctgagcgcttccagacttaaaactgatgagataacccaaaaatgcctgaaaggatggcaggatgatgcaggctggaatgaataaatactggtaaataaacatatggataatgcataagtagcaatgtcaaaataaaataaaataa

SEQ ID NO: 72936 - DNA, 3352 bp, Homo sapiens
caccagctacacagccatttcctcaagtggttagtttctaaacagcatgcttagcacaggttactctgagctcttggttgttaatacatgaaaagaacagaaagctaaggatattctgattctaccccagggctgcttcaaagacaaaaggaaagaaatgagaaatgggaaaatgcccaaggaatcagaaaatatcacaaggtcaacccacctcgtgtaaatcagcgcacaccgttccagagggtcgcatagaaacctcacgctcaggtttaatttgcccatcctgaagtatttttcctagtagtgccaaatgccataatgctctctgtcagtgatttgaaattattctataagccacatatcgggtacactattgttaatgaaatgcacacaagatgatgaacaacttccttttcctgctggagccccagctgcaaccagtgcctggatccttcatgctgtaaatcagccctttgtactccaggaggattcaatgagctgcaggtgtgggctgtggaaggccgcctgggattaggtagcagcatttgatatgagatcccaaatagcactggcaatctatgcgccacatgcggccacaggctttggagaaagcaaaggaaaaacgctgatgaaatgtggcacgggcccatggaatgcaatgtcaaagtttcacatctgcaggaaaagaaagagagttcctaattttacagtgatgatgtcattgagaattcatgacagtggaaatgatgggccaaggtttgcaaacttaaccactcaggaggttgctaactaaaggctgagcttttcaagggacagtgtggatttgtgtggaacactgatttgccttcctgacctgagcagtcatagtgtctgtgtgtgtgtgtgtgtgtatgcatgtgtgtgcacacacatttgcgcacaggctctggagagacatggggagaggaaaagaacttgtatttgagaggttatgcattatgcaggcatatcaagctgatattttgcatgccaaatgtgtccttaaaaatatactgtctctgtgtcattcagcataaaacactgctggctgtccttaacaacaatataattttaaaagattgatttcagacgctccaaaaattcacgagccaagaaaaactatcatagttgttcactttctccctaatgttaactgccgaaaagagcttctttttaaatatttttttcttccttgagactgaagagacataaaaataagtctggttttgttattagtacatggataaaatatgtattgaagaaaacacatctttaattttttaagagtctgtttttcattagcttatcttgatagtttaagttaatcattattttcagccatatatgatttagatattatgtcattaattcatgtacagtccatctgagtaatgattgtggttttctactttacaaattcatctacttcaccaagaaaccaagagagtcaaattccatgcaacatctggtttccattgaatgtaattgccatttgcagagttataatcatgtgttattgtaagggccacagtgtcaatcactctcctaatggggaaaattcaatgcctaaatacctgggagaacaagaagctgacttaaacaggtgcattcagacactaggttttaagtagaattctaacctacccatttaaataaatcattttaaggagaaacaatattctttccatcccctgtagcaagggaaagcataaaatccaggacttcaatctcccatgctcagttccagtactatatcatgtttaatctttttaaaaatgttcaaatatgcctatatcatagtgattccttatgttccatactctcatgggaactcccaaaggccaggcaggatttttgaaaactttctgggggaagggaccatcttctgattcttcctgccttacatcttctgattcttcctgtctttttttcttacgatgaaaataagccacacttgatttaagaaaatattaaaccattcaaactactaaagtcattatagctttttctagcccatggggttttttggggggataatcacataagaggttgaaaaaatcatgaagcaccgtggtagagagtgcaatatgtaagcactttatggcaaaagtgaaccacatttccttgacctcattctccattgtgtttacaagccaagccttgtttgaactggtaaatgtttggccatgcattcaggaaacatttcctaaggcaaaaataacacgccaggaattgcactggacattcaggatgcaatgatgaataagacaatctagagggtgagagagcacacacgcaggtaattacaacatcagacaagaagtagaaataagcccacatattatagcagcagagaaaggccattttatccagccagcttaagaaggaggagtgagtcccagaaggctccctggagaaggtgacagctgagccaagttttaaaggatggatagaagtgaaaggctttctatataaaggcctttaattttagtacctgctaaggaaatgtttatgctagtaaactttttgattcaatagaaatactatgaaaaggtaatttacagttctgttcaattcattccttcacatagttatataaatgacatttactattctattcattgcacgtattcttctcatctatgcaaaacttaggaagcatgagagaagtagcaattcccacaagcaattttcattatctttggcattatcattactgaaataccatcttacatttgaggaacactctgaaatctgcaaaaggcttttgacaacattttattttcttgtcacagtaaggtaggaggtgcaagtattagattggtcccactgcaacacagatgttaaaaggtcttggtgacaaaagggctagaattcaagtctataacctccataactaagactgctgggcttaaaaacatgcagcctctcacctagatgaggaaagaaggaagaacttagcatctggaccatagttgatgctcaccatgattgaacaaacgaaaacatttccagctctcaattagtcatgcagatggagatgactttactccagaaaacttaaactaaragttaaccttcagaaccatttctgttggtttatcatgcattttgtgatcatattggcagcagatttattctcacaattttccttctttttaagcaactagttgaggttttccacatcctctgagcgcttccagacttaaaactgatgagataacccaaaaatgcctgaaaggatggcaggatgatgcaggctggaatgaataaatactggtaaataaacatatggataatgcataagtagcaatgtcaaaataaaataaaataa

SEQ ID NO: 72937 - DNA, 647 bp, Homo sapiens
ctcacagaaatcaattggaattctgtgtaaacaaaaatacttcctaatgaattctagggagaaccatttatgtgggtttacgtattcaatttgttatcactgctcctaatgctaggaggtgtgcgtaaaaggaagaaggattccaatattacattaagggaagccgtaaaagtcccttaaagggamgcgagataccaacggtttgaattgcttagtctcatttttgaaacaggccccctttttaaatgtctgggccttgaagctggagattccgcttctgcttctctgggctggtgtttcacagggcactgttgtagagatgtatttcagagaatgacattcagatattgggaagtaaatgatgaatgagcagacattatttgggcaatgcagttttcagacagaggctgcaagagaatatattttcgggtgcttctgttggtatttaacttgcagactgtatatacagtaaatcaggagggccaataatacagtacatagggagatgttttatgtagggttctgacaatgtacaacagctgccctagcagaaggggtatggatttatggacacgcttgcaggtgatgacagccaatatgtagcaaggttctctatcgatacctggaagtatttatttttttggttc

SEQ ID NO: 72938 - DNA, 533 bp, Homo sapiens
tccagctctcctggctcagggattccttgcctaggygccggcgccccaggctccttgcctaggcccctgtggcctgcatagagtggcgctgcctgtggaggcgatgggagagaagaaggagggcggtggtgggggtgatgcggcggccacggagggtggcacaggggctgcggccagccgggcgctgcagcagtgcgggcagctccagaagctcatcgtcatcttcattggcagcctgtgcgggctgtgcaccaagtgcgctgtgtccaacgacctcacccagcaggagatacagaccccggaggtaaggggttcggggacccgggctgggctccaggagcggcccggacacctccttcggggccccagttcactcctggccgagttgcatctttgagcccacgtcacccccttggaggcttcccctccctcctgcactcgctgatgcggcagccagaggacccaggaccagccctcaccttgggcaggatttgtggagcgggtgcgtggtgggaactgggatggaggctcca

SEQ ID NO: 72939 - DNA, 730 bp, Homo sapiens
aaacaaaaggaaaaaaagatgaacaaccactttggaaagcagtttggcatgatttactgaagtcaaaggtatgtacatccaacaattttaccccttggggtgtatatatatatatatatatatayatatatacacacacacacacacacacatatacgtacatctctacacccaacagaaatgtgttcactgtgctacaagagccatgtacaagaatgctctttatagcatccttcatagtaaccccaaactgaaaaaaatctaaacacaaccaacagtggaaaagaaaactgggattcaattaaacaatggaatgctaaagagcaatgaagatgagtcactgttcccggctacaatatgaaacaactgcacacaatgctgcacacagccagctcaatgtgaaggaatacaccctgtatgaatccatttctataaagttcaaaagcacagctgaaacaaaaatagaatatctaatggaagcaaagcaagtagttaccatgaaggtcagggcagtatttacctgtggcaggagggatggtgcagtaactgggagggagaatgaagggggttcccaatgtactggctcagtttacaccaatgctcacttcatgaaaattcattcatttcagttttttccacttttctatatgtattgtacgtcataataaaatagacttaaaaagcaaaatgcagaatatgtacagaatgtcaccatctgtgctttaaataa

SEQ ID NO: 72940 - DNA, 730 bp, Homo sapiens
aaacaaaaggaaaaaaagatgaacaaccactttggaaagcagtttggcatgatttactgaagtcaaaggtatgtacatccaacaattttaccccttggggtgtatatatatatatatatatatatayatatacacacacacacacacacacatatacgtacatctctacacccaacagaaatgtgttcactgtgctacaagagccatgtacaagaatgctctttatagcatccttcatagtaaccccaaactgaaaaaaatctaaacacaaccaacagtggaaaagaaaactgggattcaattaaacaatggaatgctaaagagcaatgaagatgagtcactgttcccggctacaatatgaaacaactgcacacaatgctgcacacagccagctcaatgtgaaggaatacaccctgtatgaatccatttctataaagttcaaaagcacagctgaaacaaaaatagaatatctaatggaagcaaagcaagtagttaccatgaaggtcagggcagtatttacctgtggcaggagggatggtgcagtaactgggagggagaatgaagggggttcccaatgtactggctcagtttacaccaatgctcacttcatgaaaattcattcatttcagttttttccacttttctatatgtattgtacgtcataataaaatagacttaaaaagcaaaatgcagaatatgtacagaatgtcaccatctgtgctttaaataa

SEQ ID NO: 72941 - DNA, 730 bp, Homo sapiens
aaacaaaaggaaaaaaagatgaacaaccactttggaaagcagtttggcatgatttactgaagtcaaaggtatgtacatccaacaattttaccccttggggtgtatatatatatatatatatatatatayatacacacacacacacacacacatatacgtacatctctacacccaacagaaatgtgttcactgtgctacaagagccatgtacaagaatgctctttatagcatccttcatagtaaccccaaactgaaaaaaatctaaacacaaccaacagtggaaaagaaaactgggattcaattaaacaatggaatgctaaagagcaatgaagatgagtcactgttcccggctacaatatgaaacaactgcacacaatgctgcacacagccagctcaatgtgaaggaatacaccctgtatgaatccatttctataaagttcaaaagcacagctgaaacaaaaatagaatatctaatggaagcaaagcaagtagttaccatgaaggtcagggcagtatttacctgtggcaggagggatggtgcagtaactgggagggagaatgaagggggttcccaatgtactggctcagtttacaccaatgctcacttcatgaaaattcattcatttcagttttttccacttttctatatgtattgtacgtcataataaaatagacttaaaaagcaaaatgcagaatatgtacagaatgtcaccatctgtgctttaaataa

SEQ ID NO: 72942 - DNA, 730 bp, Homo sapiens
aaacaaaaggaaaaaaagatgaacaaccactttggaaagcagtttggcatgatttactgaagtcaaaggtatgtacatccaacaattttaccccttggggtgtatatatatatatatatatatatatatayacacacacacacacacacacatatacgtacatctctacacccaacagaaatgtgttcactgtgctacaagagccatgtacaagaatgctctttatagcatccttcatagtaaccccaaactgaaaaaaatctaaacacaaccaacagtggaaaagaaaactgggattcaattaaacaatggaatgctaaagagcaatgaagatgagtcactgttcccggctacaatatgaaacaactgcacacaatgctgcacacagccagctcaatgtgaaggaatacaccctgtatgaatccatttctataaagttcaaaagcacagctgaaacaaaaatagaatatctaatggaagcaaagcaagtagttaccatgaaggtcagggcagtatttacctgtggcaggagggatggtgcagtaactgggagggagaatgaagggggttcccaatgtactggctcagtttacaccaatgctcacttcatgaaaattcattcatttcagttttttccacttttctatatgtattgtacgtcataataaaatagacttaaaaagcaaaatgcagaatatgtacagaatgtcaccatctgtgctttaaataa

SEQ ID NO: 72943 - DNA, 1294 bp, Homo sapiens
tgagttcctgccctacataattataccacttatgctaggtgtttggaaagagggcaataatcgacaaagactaagctcttataycctagaacttgtattattgttgcagaaggaggagtgagaaagatattaaattatgaataactattgattatttaaataaaattatgataaatgatacaaagtagaaatacagaaggccagtaaatattatcattgagggaactgactcagtctggaaaggagggtaacagaaactttccttgagaaaatggcttttaagtgaaggccgtaaagtagttaacagataagaaccagagagataaagattcattcatgctttgaggtagaaagtagcaagtgatgtgcatatcaagcttatgctgtaaattcagatgaggaaggaatactactttctattttcccttgaagcaaattaaaaatgattccaatactccaattctgcaagacaatgggagattcaatctctgttattatcctggcttcccatcacatttctctcagccacatgacagcagtgatcttaacctgaaccttaactaggaaagccttttcagttcagttcattatagtcacaaaaaagatgtgtgtagtctagcctttgtcataccttgaagtccagctgctctgctgattctgtacatttttaagcatagagaacacttcatggaaaagaatcctggctcccaagttacagcattcttaaattttttatacatcctccacggggccttacgaggaagccagccatgggccccttccattggcagagctcactaacagccatcaaatcctcacccttacagatgcttaccctccctactcaccttgcacaaaacctttaaataactcaggctatggaagaaagcaagtggcttgcaaattttgtttttgcgactcccaaagcaagagaacagaaaatcttgacaacttggtgagtttaaaaataatcaagaaaaactaatcaaaatttaacgtctcaagaaattttgatgcagcatataacatgtttaaaaatttaaaatgtttcacggtggccagagagcaaggaactgagagactttcattagttagagaggaataaaattatgccaggtcttgagtaccacctaaaattcatgtctattaacattttggagtaagattatatcactccattctatgtacagtgtaaaaatatttctgctgtttttatctctacttgccagcattagccacaagatgacaaagccagtttatcttttgtcaaagttcctctttttagccattatgc

SEQ ID NO: 72944 - DNA, 1294 bp, Homo sapiens
tgagttcctgccctacataattataccacttatgctaggtgtttggaaagagggcaataatcgacaaagactaagctcttatatcctagaacttgtattattgttgcagaaggaggagtgagaaagayattaaattatgaataactattgattatttaaataaaattatgataaatgatacaaagtagaaatacagaaggccagtaaatattatcattgagggaactgactcagtctggaaaggagggtaacagaaactttccttgagaaaatggcttttaagtgaaggccgtaaagtagttaacagataagaaccagagagataaagattcattcatgctttgaggtagaaagtagcaagtgatgtgcatatcaagcttatgctgtaaattcagatgaggaaggaatactactttctattttcccttgaagcaaattaaaaatgattccaatactccaattctgcaagacaatgggagattcaatctctgttattatcctggcttcccatcacatttctctcagccacatgacagcagtgatcttaacctgaaccttaactaggaaagccttttcagttcagttcattatagtcacaaaaaagatgtgtgtagtctagcctttgtcataccttgaagtccagctgctctgctgattctgtacatttttaagcatagagaacacttcatggaaaagaatcctggctcccaagttacagcattcttaaattttttatacatcctccacggggccttacgaggaagccagccatgggccccttccattggcagagctcactaacagccatcaaatcctcacccttacagatgcttaccctccctactcaccttgcacaaaacctttaaataactcaggctatggaagaaagcaagtggcttgcaaattttgtttttgcgactcccaaagcaagagaacagaaaatcttgacaacttggtgagtttaaaaataatcaagaaaaactaatcaaaatttaacgtctcaagaaattttgatgcagcatataacatgtttaaaaatttaaaatgtttcacggtggccagagagcaaggaactgagagactttcattagttagagaggaataaaattatgccaggtcttgagtaccacctaaaattcatgtctattaacattttggagtaagattatatcactccattctatgtacagtgtaaaaatatttctgctgtttttatctctacttgccagcattagccacaagatgacaaagccagtttatcttttgtcaaagttcctctttttagccattatgc

SEQ ID NO: 72945 - DNA, 1294 bp, Homo sapiens
tgagttcctgccctacataattataccacttatgctaggtgtttggaaagagggcaataatcgacaaagactaagctcttatatcctagaacttgtattattgttgcagaaggaggagtgagaaagatattaaattatgaataactattgattatttaaataaaattatgataaatgatacaaagtagaaatacagaaggccagtaaataytatcattgagggaactgactcagtctggaaaggagggtaacagaaactttccttgagaaaatggcttttaagtgaaggccgtaaagtagttaacagataagaaccagagagataaagattcattcatgctttgaggtagaaagtagcaagtgatgtgcatatcaagcttatgctgtaaattcagatgaggaaggaatactactttctattttcccttgaagcaaattaaaaatgattccaatactccaattctgcaagacaatgggagattcaatctctgttattatcctggcttcccatcacatttctctcagccacatgacagcagtgatcttaacctgaaccttaactaggaaagccttttcagttcagttcattatagtcacaaaaaagatgtgtgtagtctagcctttgtcataccttgaagtccagctgctctgctgattctgtacatttttaagcatagagaacacttcatggaaaagaatcctggctcccaagttacagcattcttaaattttttatacatcctccacggggccttacgaggaagccagccatgggccccttccattggcagagctcactaacagccatcaaatcctcacccttacagatgcttaccctccctactcaccttgcacaaaacctttaaataactcaggctatggaagaaagcaagtggcttgcaaattttgtttttgcgactcccaaagcaagagaacagaaaatcttgacaacttggtgagtttaaaaataatcaagaaaaactaatcaaaatttaacgtctcaagaaattttgatgcagcatataacatgtttaaaaatttaaaatgtttcacggtggccagagagcaaggaactgagagactttcattagttagagaggaataaaattatgccaggtcttgagtaccacctaaaattcatgtctattaacattttggagtaagattatatcactccattctatgtacagtgtaaaaatatttctgctgtttttatctctacttgccagcattagccacaagatgacaaagccagtttatcttttgtcaaagttcctctttttagccattatgc

SEQ ID NO: 72946 - DNA, 1060 bp, Homo sapiens
caggtaccccataaatatgtgcaactgttttatatatccactaaattgaaattaacataaaatttaattgaaatttaagtaagtcaaaaaaaatacttgaaaactgttaaaatattcagctagatggcctttaccatcctctttctcactccttccccaatctcatctctaccttaacggtgataattatgggtagaatggagacctaaaggactggccaatggatggccacaggttgttgccagcactagtaggtcttctatggtctgtggctagctccaacactttacataattgtccatgggaaagctctttttatgcaagttgcctcaatagaaagtcaggcccatataaaggagtcccagggaatataattgatagggttttggctgcgtctccacccaaatctcatcttgaattgtaatccccatgtgtctagggagagacctggggggagatgattggatcatgggggaggtttcccacatgctatttgcataatagtgagtgagttctcataagatctggtggttttataaggggctcttctcccttcgcttctctctcctcgctcctgacaccatgtgaagaaggttcttccttcccctttgccttccaccatgattgtgggtttcctgaggcctctccagccatgtagaactgtgggtcagttggwcctctttcctttacaaattatcaatcctggggtagtatctttacagcagtgtgagaacagactaatatagttagtacattatgaaataaatataattatatttcataaggtaattgtgaaacattgccagcaagattttcgtatctatgatacattgtaatttaatatataatatatatttcattctgtcctaaagtttggagtatcttaaacattcagctgacattatgaagctcagaatgttgaacaccagatatctccaaagtccaaagccttgcctgtattgaaaaccaattaacttaatagcttgaagtttttgatatcctgatgaagtcaaaaaatgtaccccttctaaaagaagttgaagtatgctacataagtatt

SEQ ID NO: 72947 - DNA, 1060 bp, Homo sapiens
caggtaccccataaatatgtgcaactgttttatatatccactaaattgaaattaacataaaatttaattgaaatttaagtaagtcaaaaaaaatacttgaaaactgttaaaatattcagctagatggcctttaccatcctctttctcactccttccccaatctcatctctaccttaacggtgataattatgggtagaatggagacctaaaggactggccaatggatggccacaggttgttgccagcactagtaggtcttctatggtctgtggctagctccaacactttacataattgtccatgggaaagctctttttatgcaagttgcctcaatagaaagtcaggcccatataaaggagtcccagggaatataattgatagggttttggctgcgtctccacccaaatctcatcttgaattgtaatccccatgtgtctagggagagacctggggggagatgattggatcatgggggaggtttcccacatgctatttgcataatagtgagtgagttctcataagatctggtggttttataaggggctcttctcccttcgcttctctctcctcgctcctgacaccatgtgaagaaggttcttccttcccctttgccttccaccatgattgtgggtttcctgaggcctctccagccatgtagaactgtgggtcagttggtcctctttcctttacaaattatcaatcctggggtagtatctttacagcagtgtgagaacagactaatatagttagtacattatgaaataaatataattatatttcataaggtaattgtgaaacattgccagcaagattttcgtatctatgatacattgtaatttaatatataatatatatttcattctgtcctaaagtttggagtatcttaaacattcagctgacattatgaagctcagaatgttgaacaccagatatctccaaagtccaaagccttgcctgtattgaaaaccaattaacttaatagcttgaagtttttgatatcctgrtgaagtcaaaaaatgtaccccttctaaaagaagttgaagtatgctacataagtatt

SEQ ID NO: 72948 - DNA, 985 bp, Homo sapiens
  misc_feature (1)...(985): n = A,T,C or G
gttctaaagcactttgtggtcaactcaagggcccagtgagagcaggactgttcttcatccccttctcatagctgctgaatgtgtgcttctgaaaggacaggcctgttttcctaaaagcctatgttggagtttgtatttgggtgtgctttactgccttattgactgttaaaatggcaccctagaagtttcatttaggggaaatacatgcacatctcatagggtggcggaccttctctgtatctgtgcctttaactaggccagtggtgctgcacacagtggcacccagaatccaagggctttgctgttctggctgatttctatgtttgcgacaattaccctctctcaccacctccagccctgctctcacagcccagttgtgttagttcctttcccctctattccatgtctgtacttancnctgctctggccttccccatgtcttctactcttagtcctgaggacagagttagaatttgagtggttttttttgtccctgtttcttagacccaggtagtgattgccttctgactgtatctgctacttcaagtgactgtccgctgaagaaaactccagtccctatttttacatcatggatggatccttccccctccctccctaattcgtaccccactaaaacaacttcctgacattckgtctctgtgcctgtgcatggggactagactgatgtatgagatttgtcttattgcagacatatcacaagatggtagaattaatagtctaactcactgcctatctaactttaatgtgcagatgaatcatctagggatcttattaaaatgcagattctaattgggtaggtctgggtgggcctctctgagaagctcctaggtgatgcaatgctgctggtatacataccacattttttgtagctagggtataactgatcccagaggcagtaaaatatagagcagaggttttgaacctctgcactggaattctttgatgtatggggctgttctatgca

SEQ ID NO: 72949 - DNA, 536 bp, Homo sapiens
gttgacatataaaattcacatgaaaatactcctgtacaaagctggatatgatatggcctctgaaggtaatgtggtgcattggaaagtgcatgctctgtgaatactgccttggtcatgtatagctgtgtgatcttcagcaatgtaattacctttctatgttcagcttcctcatgtgcaaagatcttccgtatataattatttgtgaaggtataatgaattaatgtgtctatatagaggttgaaacttaatgttggtttgtggcttcattctttagcaccaatgcattaagtgaatgtactggaactcacatacacacacacataacacacacayacacacacacacacacacacacacacccttacccttgtgtgttttacatttgaggtttattcttaaagatgttaatgctggagaaaacagagtgatttctttattaaatttaaggccataaagaccaatatgaatatcaaagtttagcttggggtgtttccataatattatggtgttttgtaaggtagtcagctggagtgttt

SEQ ID NO: 72950 - DNA, 746 bp, Homo sapiens
aaagtagtacacacacacgatggaatattattcagccattaaaaaaaaaagccaggagcgatagctcacacttgggaggcagaggcaggataatctcttggcgcaagagttcaagaccagcctggacaacatagggagaccccatctctactatattaaaaaaaaaaaaaaaaagccaggcatgatggtgtgtgcctgtagtaccagctactctggaggctgaggggaggattgcttaaacctgggagttcaaggctgcaatgagccgtgattgcaccactgcactccagcctaggcagcagatcgagaaaaaaaaaaagaaagaaagaaagaaagaaagaaaakatcctgtcacttgcagcaacatggatggaactggaggttgttctgtaaagtgaaataagctaggcacagaaagacacatatcacacattctcactcatacatgggagctaaaaacgcggctctcatggagagagagtagaatgttggttaccagaggctggaaggggagcagggagggaggaataaaggggaaaaaaagaatataaatgtatttataaccactgaactgcatacttaaatatggtaaagaggtactgaccatttttgatatgggttaataaaaaggaataagagcaaaaaatttaaaaaatgataaagagagcaaattacataggtatattttacctcaataaaaagaaaaaagaaaaaaaacttgaaaaattggcttcaaatcaggatcc

SEQ ID NO: 72951 - DNA, 692 bp, Homo sapiens
ttattcatattgattatatgtattttaaattcctataaaggtctcaaaaatttgacattgccgcaggcatastcttccatatccaaacacaaatgggagagttttgtttgtcattgttacacaaggtctaactaaaagtaatgagactggttttgatgacttagttttgatgacttagttattatctgtctcattgcttcataggtacattatgtaacagtagacaatagtaattattgtgagttccttatatggaactttcttgaagtgaactaaattatttttgacctcatgataaatgtttgcccttttaaggatgttactaatatttataggacatttgctagactttttttgtttgtttgtttttgttttttatttttttattttactttaagttctagggtacatgtgcacaatgtacaggtttgttacatatgtatacacgtgccatgttggtgtgctgcactcgttaactcgtcatttacattaggtatatctcctaatgctattcctcccccctccctccacccccctacatttgctagtcttttaaaagtaaacttgaggctgggtgcggtgtcccacgcctgtaatcccagcactttgggaggccgaggcaggtggatcacctgaggtcaggagttcaagaccagtatggccaacatggttaaacctcgtctctactaaaa

SEQ ID NO: 72952 - DNA, 692 bp, Homo sapiens
ttattcatattgattatatgtattttaaattcctataaaggtctcaaaaatttgacattgccgcaggcatagtcttccatatccaaacacaaatgggagagttttgtttgtcattgttacacaaggtctaactaaaagtaatragactggttttgatgacttagttttgatgacttagttattatctgtctcattgcttcataggtacattatgtaacagtagacaatagtaattattgtgagttccttatatggaactttcttgaagtgaactaaattatttttgacctcatgataaatgtttgcccttttaaggatgttactaatatttataggacatttgctagactttttttgtttgtttgtttttgttttttatttttttattttactttaagttctagggtacatgtgcacaatgtacaggtttgttacatatgtatacacgtgccatgttggtgtgctgcactcgttaactcgtcatttacattaggtatatctcctaatgctattcctcccccctccctccacccccctacatttgctagtcttttaaaagtaaacttgaggctgggtgcggtgtcccacgcctgtaatcccagcactttgggaggccgaggcaggtggatcacctgaggtcaggagttcaagaccagtatggccaacatggttaaacctcgtctctactaaaa

SEQ ID NO: 72953 - DNA, 692 bp, Homo sapiens
ttattcatattgattatatgtattttaaattcctataaaggtctcaaaaatttgacattgccgcaggcatagtcttccatatccaaacacaaatgggagagttttgtttgtcattgttacacaaggtctaactaaaagtaatgagactggttttgatgacttagttttgatgacttagttattatctgtctcattgcttcataggtacattatgtaacagtagacaatagtaattattgtgagttccttatatggaactttcttgaagtgaactaaattatttttgacctcatgataaatgtttgcccttttaaggatgttactaatatttataggacatttgctagwctttttttgtttgtttgtttttgttttttatttttttattttactttaagttctagggtacatgtgcacaatgtacaggtttgttacatatgtatacacgtgccatgttggtgtgctgcactcgttaactcgtcatttacattaggtatatctcctaatgctattcctcccccctccctccacccccctacatttgctagtcttttaaaagtaaacttgaggctgggtgcggtgtcccacgcctgtaatcccagcactttgggaggccgaggcaggtggatcacctgaggtcaggagttcaagaccagtatggccaacatggttaaacctcgtctctactaaaa

SEQ ID NO: 72954 - DNA, 475 bp, Homo sapiens
ccatgggctccacaaggtcattgatgacaccagtgtcactcagctgcagctagagacagagatcgaggctctcaaggaggagctgctcttcctgaagaagaaccacgaagaggaagtaaaaggcctacaagcccagattgccagctctgttgaccatggaggtagatgcccccaaatctcaggacctcgccaagatcatggcagacatccaggcccaatacaacaagctgactcagaagaactgagaggggctagataagtactggtctcagcagattgaggagagcaccacagtggtcaccacccagtccgctgaggttggagctgctgtgatgatgctcacrgagctgagacatacagtccaggccttggagatcgacctggactggatgaaaaatctggaggccagcttggagaacagcctgaagggggggtggaggcctgctacaccctgcagatggaacaactcaatggg

SEQ ID NO: 72955 - DNA, 910 bp, Homo sapiens
gcattcattccattattcattcatccatctattgattctacagttacttattgagcctctcctgtgtgaaaggccctgtgctgggcactgaggataccgtggggatcagagcagacagtgctcctaattctaatctcgtggagtctgaaatcaagtaaataggtgataatagttcagtgctgtaagtaccctgggaaaagagggaaagagagaactcttccaggttggagggcatattagtttcttgaggctgttgtaaccaattactacaaacttggtggcttaaagcaacaaaagtttattctctcaaggtcctggaggctagaaatctggcaggaccacactccatttggggactctaggggagaatcagtgccttgtttcttccagcttctggtggctccccagcatttctgggtttgtggctgcatcattccagtctctgcctctgacttcacatcaccttctgccttgtatgtttctatatgatcttcaatttcctcttttttataaggacatttatgatggcatctacgatccacccaaataatccagggtaatcttctcatctcaagatccttaactcagttacaactgcaaagacactttctccaagtaaggtaacattttcaagttccagggattaggacatatctctgggtagccattattcaacctactaccactacaagggataaggatgaaagaaggcttcctgggggaacagtgtataaawtaggacctaaaaaattaggcagaattttgtcaggaggagaagcagcaagagtgatagagaatattccaagcagagaaatcagtgtgtgcaaaggccctgagttgagggagtgtggtgaatcagagaatctgcacggagtgtggttatggctggagcacatagtaggtgtgtgtg

SEQ ID NO: 72956 - DNA, 662 bp, Homo sapiens
ttactgctacacatggatgccagaggacacagaatcctgaggaaacagacatttcatgtttggagccctcccagtcccagattcctcctatgtgtctcttcccttgaggggttctgaattgtatcctttttgctataataaaactgttatgatcaaagtatagttcaaagtatagatcaaagatcagctttcctgagttctgtaagtcatttagcaacttactgaacatgaaggagtttgtggggacccttgaatttgcagccagctggtctgaagtgagggtgaccctggggacccacaaacttggggctagtgtcagaagtcttggatagactttgcagtctgggaggaccttgcctttcacctcaagtttggataactccagatattaaataacatacctaaggccacacagctacgaactgttggagctgggatttgcaccttggtgtctctgtcacaatatgtccaggcagaagcttagttttgtaaccacatcccccaccccaaaaccccccagcaaataacatgtgactgtcactgtcattaatctatactgtcctgtttctcatttctgartatagagaagaggttttcatctggggcagtttttccccccatagaatatttggtaatgtctggaggcatcttttggggaggat

SEQ ID NO: 72957 - DNA, 610 bp, Homo sapiens
gtaatatctgcacagtacttggcccataacaggcagtgaatggtggttgttattattattaataactaccaacacattggccacatagtaggtgctcaataaaaatgtaaggattggaaattaggctcaaagtgttcgctttaattccccatttgaattccacccagagcagggaagatatgggagaagaaaggggaaacccaacatatttggtgtttggaaacatgacatccaaaaatgtctgttttcttttctttctttttctttttctttttttttttttttttgagatagggtcttgctctgtggcccaggctggagtgcatggcacaatctcagcttgctgcaacctctgccrccctacaggcacatgttaccatgcctggctaatttttgtatttttagtagagttgcggttttgggatgttggccaggctagtgttgaactcctgacctcaagtgatccttcctcagcctcccaaagtgttgggattacagacgtaagccattgtgcctggccccaaaaatgtctgttttctttctttttttcttttcttttctttttttttttttttttgagactgagtctcactctgtcacccacgctgga

SEQ ID NO: 72958 - DNA, 970 bp, Homo sapiens
aggagttgttggcagccatctttgtggtcaacctacctgggaattgtaggttcaaaaatggatgagaaagaaactaaaagacttactatccacaccaaagggtgtgaggagcagaattaacactgtggaaaactggaataatgatgtgggagacaaacatgagtagttctcccataaagtatgaatggatagagagataaaataatgaatgagaggatggaggacagggaaccaaggtcatagtgggaccccctttctgtgtttatggaatcctccatgttaggtgtcgtggtgacagaaactgccttacacatagaatctgaaaagggcggaatcacattttctcaggctgcttgctggggtaccagaacgtgaactatgccagccaatcaggcacacccatccaggactctgaaaaggaagcttgtagcacagagatgaaagaaaaaggaagaattcattttgaggttgacagcatgacgtccagggcagcaaaagccstggagcaagcggcagtaatgctgcaagccacgcccctagcattcagtggtatcataccttgagtcctcattaaatgtgttctgtgtgtaacgtggctgtcactctggctgctgctgagcctcgtactgtactgctcattttctaagcctgggtcttgaccttattgatatttttgtaagattcccaatatccttttaataaattatttcatgatgaagacagccagagttaatttctgctgcttggaagtaagatccctgactagtgcaagcacctgaacaaagaatgcagttggccttttgtttctgcaggttcaaccaactgtggatcaaaaatagctaaaaaaaataataaaaataacaatagaacaataaaaacaacacaagataacaactaatttacatagcatttacatagtattatgtattataaataatctagagatgatttaaagtatactggaggatat

SEQ ID NO: 72959 - DNA, 942 bp, Homo sapiens
ggcacaatgtttcaggaagtttcaggagcaggataagattccttcatatgcttacctagctgggatagaaagaaaaaaaaaaagactccaccacagtacagcagcactgtattaaaagaaagcctagaaaccagtccctggtagttgggctgagacctctgtggatacagagcccgcaaaagccctgttgctacagatataaggagactctactgattacacatgggcagtggtggaaccaagggaaatctatatattttgtccatcactaaaacagagtcttgatatatttcctttattttgaaaatgaatacaaaaggaaaacattcaacttggtctattaaaaaaaggcaaagggcaaagcaygagaaggaaacctcatcctgatgactcagaagtgcagagagtaactagaagacaattttagaaaactgtctggaaccctcactaacttgcaaaaaaaaaaaaaaaaagtgatctctatgacgaataactaaagaaaaccgtaaggagggagaagaccaagatgtagtaagatgagataaaaagatgacaaagtgagatggaaagggaactaggaaagatataaaggtgtgtcaagttacctattgtgatgtaatgagtggccctaaaatgtagtggcttaaaacataccattttgtttgctcacaattctgtgggaaagaattaggacagggtcatttgcaattctgctccccatggcctgctccaaggggtggtagcagttgagaactgggctgtggctggaatgtctcagaaggcttcacgtgcacatctggcacctggtagctagagaattttgggacccctttctgtcatgtgacttgagtttctttatatggcagctggatccccagagtgagaagtagaagtgccaaatcaggactcgaagtctctaaacattagtgcactaatctattg

SEQ ID NO: 72960 - DNA, 2417 bp, Homo sapiens
aaataaccagggacctcactcaaggtaatttctctgcccaaggaaagtggcaatcaagcagtttctttgtctgaagctcatgtcttttaatatgctgtcccagaaactgcctattccagaaggagaagcagggacaacaagcggcttggaaggctgcaaacagtttcaacttgttctgtcttcctggcctgtggcttatgattgtgtgtgtttrtttattttacattgctcccatgccattagagtgtaaaccccaggaggagggactttgttgtcttgctcactactgtatcctcagtgcctagcaaaaaacttgatgtgcgttagacactcattgcattgctgctgaatacatgaatgaatgtgtgttttacttctatctccccttctgtcttccaagtattcactgtgtcttgtggtttctgtttcctattgatgtcttgggactgcctacctctccctacctcctacctccatcagctgagttcgggctgctgccattgttcccctggatgtccacagtgcctcttaagtggcctgcccacatcccatccaagccctctccgatccactctccatactgtggctggaaggatccttgtaacatataaatagatcaggctaccccctggttaaaacccttcagtggcttcctattgccctgagaagttcccttaacacagagtccaaggcatgatttggcccctacacacttctctagcctcctcctgtctctcttgtcttttcttgtctctctctgtctcattctgagcgccagccaggctgcccttctttcacatcctcaaacagccccctttcttgcagttggagcccttttatacacaggggtcctacctggagtccctcacccctctggcccctgccacccagaggctctcctgaccctatcccctggctaggcttcctgtacgtccctcatcttcacgctctccttctcagcacacttgattctgagcatctgccagaatagctcctgggtctcattccctccgatacacacagtgctgcctggcatattgtgggctcttggggcatctttgtggaatgaagggcccagtgtctgacattgggaccccaaagttggctgcaccgaccctgcatgccctagccccttcccccacacaactgcagaaaccttaacagccgcagcttggggaggtttagcagttcctctctgcagggtccttgctgaactgacatagagtacctggcctgactgtcaggaacagtgatggggagggcttggcacatcttactttctgagtggggagagtgtgccactacttcccacaagagcacatacaaggaggattcccccggattggaaggaggctgaaggcaggaatggtggaagtatgataagtatggatcatatcctgcttagagagaaagtgctgggctttgtgggatttggaggcgtaggcagtgaggatagtaatgaggacagggatgttctcctcaaattccccatgggaccctgatgactccagccaaggaagggctggcagaaaagtagtacagcttggtgaccttgtgagcttggggacacacctgggtatggatggggtctcaggggacaatggcagcaagggctggggtgagccttcttcaggtggcttacaggtgagtagacatggatgaggaggaggcttgttctcaactacaagtgagatgctccctgggacctccagggagtgtaggagacaccaccatgcagaggggctgagatctggagctgtctgccttgtttaccactgtcataactccttaggtgggcacacgacggattctccaagtctcacaactcagaaccaagctctggccctgaaggagcaacttgaggggccctgagaggaaactgcttggtgcagagaaagatttgcaagactgtcagcccaagcagcctgcatggccaggatccttcaggggaaggagggggtatgggtagggaggtccatggctgccatctctgaggcccccacctaggtcaggaccctggcttgcttcagagacccctctgggctctggacttcaaaactttccatttctctcatttccatttctgacttgagacctcttggagaaaaggcctcagtgtcagtcctccggggatgggaaggtgtctgggtcttgaccagctcatctggggaaagagataacctctgttatccacctcagggcacagccacgcttcctccatcaaagtggcacttccaggagacgctggcagagcatcggtttgtctgcagacttctcctgagccttggggtccatcgtcaccgaggcccctcaagcccctcccctccaggcctctggatatcacttcctttgggaacaggagatgctagccgatttgggaaatgctcactgcagaggagtctggcactgtgtccggg

SEQ ID NO: 72961 - DNA, 2417 bp, Homo sapiens
aaataaccagggacctcactcaaggtaatttctctgcccaaggaaagtggcaatcaagcagtttctttgtctgaagctcatgtcttttaatatgctgtcccagaaactgcctattccagaaggagaagcagggacaacaagcggcttggaaggctgcaaacagtttcaacttgttctgtcttcctggcctgtggcttatgattgtgtgtgtttatttattttacattgctcccatgccattagagtgtaaaccccaggaggagggactttgttgtcttgctcactactgtatcctcagtgcctagcaaaaaacttgatgtgcgttagacactcattgcattgctgctgaatacatgaatgaatgtgtgttttacttctatctccccttctgtcttccaagtattcactgtgtcttgtggtttctgtttcctattgatgtcttgggactgcctacctctccctacctcctacctccatcagctgagttcgggctgctgccattgttcccctggatgtccacagtgcctcttaagtggcctgcccacatcccatccaagccctctccgatccactctccatactgtggctggaaggatccttgtaacatataaatagatcaggctaccccctggttaaaacccttcagtggcttcctattgccctgagaagttcccttaacacagagtccaaggcatgatttggcccctacacacttctctagcctcctcctgtctctcttgtcttttcttgtctctctctgtctcattctgagcgccagccaggctgcccttctttcacatcctcaaacagccccctttcttgcagttggagcccttttatacacaggggtcctacctggagtccctcacccctctggcccctgccacccagaggctctcctgaccctatcccctggctaggcttcctgtacgtccctcatcttcacgctctccttctcagcacacttgattctgagcatctgccagaatagctcctgggtctcattccctccgatacacacagtgctgcctggcatattgtgggctcttggggcatctttgtggaatgaagggcccagtgtctgacattgggaccccaaagttggctgcaccgaccctgcatgccctagccccttcccccacacaactgcagaaaccttaacagccgcagcttggggaggtttagcagttcctctctgcagggtccttgctgaactgacatagagtacctggcctgactgtcaggaacagtgatggggagggcttggcacatcttactttctgagtggggagagtgtgccactacttcccacaagagcacatacaaggaggattcccccggattggaaggaggctgaaggcaggaatggtggaagtatgataagtatggatcatatcctgcttagagagaaagtgctgggctttgtgggatttggaggcgtaggcagtgaggatagtaatgaggacagggatgttctcctcaaattccccatgggaccctgatgactccagccaaggaagggctggcagaaaagtagtacagcttggtgaccttgkgagcttggggacacacctgggtatggatggggtctcaggggacaatggcagcaagggctggggtgagccttcttcaggtggcttacaggtgagtagacatggatgaggaggaggcttgttctcaactacaagtgagatgctccctgggacctccagggagtgtaggagacaccaccatgcagaggggctgagatctggagctgtctgccttgtttaccactgtcataactccttaggtgggcacacgacggattctccaagtctcacaactcagaaccaagctctggccctgaaggagcaacttgaggggccctgagaggaaactgcttggtgcagagaaagatttgcaagactgtcagcccaagcagcctgcatggccaggatccttcaggggaaggagggggtatgggtagggaggtccatggctgccatctctgaggcccccacctaggtcaggaccctggcttgcttcagagacccctctgggctctggacttcaaaactttccatttctctcatttccatttctgacttgagacctcttggagaaaaggcctcagtgtcagtcctccggggatgggaaggtgtctgggtcttgaccagctcatctggggaaagagataacctctgttatccacctcagggcacagccacgcttcctccatcaaagtggcacttccaggagacgctggcagagcatcggtttgtctgcagacttctcctgagccttggggtccatcgtcaccgaggcccctcaagcccctcccctccaggcctctggatatcacttcctttgggaacaggagatgctagccgatttgggaaatgctcactgcagaggagtctggcactgtgtccggg

SEQ ID NO: 72962 - DNA, 654 bp, Homo sapiens
agctgaaggtatcctgggagatgatagataaaagggatgattagataaaacaataaaaaaagatggctgcttggataactaggtggtagatgaaaaagactgttggatgaaccacagtgaggtaccacttcacacctactaagataatagtaataataataaaccagaatatagcaagtgttttgaggatgtggagaaattgctggtgtgctgggacattggtggtttgagtgtaaaatgattcggctgctgtggaaaactgtttggcagttccttgaaaagctgatcatagaattgctaatgaacaaagaatcctactccaggtgtgtgtgtaccccaaagaattgaaaacagggactcagacatttgtgtgctaacgttcactgcaacattattcataatatgaagttaaaagatgggaacacctcaagtgtccatcaacagatgaatgaatgaacaaagtgtggtacaggttaaatataacttatctgaaatgcttggaacagaagtgtttcagatttctgatgctttttggattttggaataattgcatatacttaataagatatctttgggataggacccaaatctaaatacaaaatttttttcatatatactttgtaagcatagcctgaagggaattttataraatat

SEQ ID NO: 72963 - DNA, 629 bp, Homo sapiens
ttttttctctctgggatgaaagaatgctgtgactccttcaatgattcaaccgtcagcttagtttctgaagtgttgttttgggtaataaaagtaacttttaaaagctgtacagggtgattaatcagagacaattttataagaatctcacagcaggccgggagggagaagtaccacatgtgggtcacgggagcactgggctgggagaccgactctgctacacgtagtgccagggctgtgaagatgggggtctggaacaggatgtggtgcacagggtagcctccctgccaggcgtcgatgatggatgggtcaccccctgtgccagggaaccccaggcaggtcacccggcccctttcaagtcacgcttacacrtctaatcgcgtcttcttggtgcccttagatacaagttcaaagcgagggaagtgcagaaggacctgtccgatccagccacctgccccggaatccctcccaggtgctcttgggaagggggtctcactatggccctcttttggttccttggactcaccaagccaccctgcccagaacccaccagtccactgcccccctaaatcaccatgcacttcctggcctgctcattcttcaggtccccctacttagtggggcttctttag

SEQ ID NO: 72964 - DNA, 1346 bp, Homo sapiens
tttgaatccaggcaaagaagcaagaaaacagacatgcaacccaaccaagagattgtgcttgagcatgcaagaactgattgaacgcgtacctgccatgagacagggattgwccaggtaatcaatgtctttcttctcatcgaagcacctctgtctcccggttctccaccccagagccacgtacccctttagcctcggccgcagcacagcatatacactgccctagtgttgggacatgatcaccttttgttttgaggatgtcgagcaagaggtgaggattttttttccaggaagccaaatagtttcagtcacaacagttgttgtttaggatacagatcccactgtaccagggccaggcacacccaatccccaagtgagcattggctttgacaacattcaaaaatcacttatttataaagcaaacaaaacaaaacaaaaattccatgaataaaatttaaaagcaaaaatacatctgcaacagacatgacaaaccaaagattcaaaccatagtgccactactgtgtgaaaacaaaacaaaacaaaacaaaaacaaaaaaaaataaggtttttagaattatccctaaaggaaaattgaaagataatgacaccaagcaactgacaaaagaaaaacgatagatggccccaaaaaagtcattcaaacttattagtagcacttggcttccagggaaagggcctggatggatttcctggcaggtggcaggcctagtgtttgcaagtttaggagaaacaggaatgggagtccatgagggagggggattgggaggagagccaaggccccgaagatccactttcaggaagccatgtggggtcatcaccgtcgctgtcacagagagatccaggaggtgatggacttgcagattcaccttgggagtcaggagatgcaggaaaagagaggctgtgctttgctttggacgagggcattttgttacgtgagaggaggacagaggataactattacccctgttgctctgtgggcccattttgtgccaacctctgtgcagggcaccttcaggggcacttgtctgaaacccgacagtcttttttctcatttgccagtgacctctgaaagagctgactctgtaaaatgatggctttgccaaatgcagattccatgatcattcaataatcagggatttgaagctgttttaagtaaccatttcttctactagcacaaaaattaaaatcaccagcttttgcttagatgtattaaactggatgtctaaaacatcatttcttctttcataaaatacatagctaaaaattttctgttaccatgattaacaaactagcagtaagcatttaactagaagttcaggaccaatggccag

SEQ ID NO: 72965 - DNA, 1346 bp, Homo sapiens
tttgaatccaggcaaagaagcaagaaaacagacatgcaacccaaccaagagattgtgcttgagcatgcaagaactgattgaacgcgtacctgccatgagacagggattgaccaggtaatcaatgtctttcttctcatcgaagcacctctgtctcccggttctccaccccagagccacgtacccctttagcctcggccgcagcacagcatatacactgccctagtgttgggacatgatcaccttttgttttgaggatgtcgagcaagaggtgaggattttttttccaggaagccaaatagtttcagtcacaacagttgttgtttaggatacagatcccactgtaccagggccaggcacacccaatccccaagtgagcatyggctttgacaacattcaaaaatcacttatttataaagcaaacaaaacaaaacaaaaattccatgaataaaatttaaaagcaaaaatacatctgcaacagacatgacaaaccaaagattcaaaccatagtgccactactgtgtgaaaacaaaacaaaacaaaacaaaaacaaaaaaaaataaggtttttagaattatccctaaaggaaaattgaaagataatgacaccaagcaactgacaaaagaaaaacgatagatggccccaaaaaagtcattcaaacttattagtagcacttggcttccagggaaagggcctggatggatttcctggcaggtggcaggcctagtgtttgcaagtttaggagaaacaggaatgggagtccatgagggagggggattgggaggagagccaaggccccgaagatccactttcaggaagccatgtggggtcatcaccgtcgctgtcacagagagatccaggaggtgatggacttgcagattcaccttgggagtcaggagatgcaggaaaagagaggctgtgctttgctttggacgagggcattttgttacgtgagaggaggacagaggataactattacccctgttgctctgtgggcccattttgtgccaacctctgtgcagggcaccttcaggggcacttgtctgaaacccgacagtcttttttctcatttgccagtgacctctgaaagagctgactctgtaaaatgatggctttgccaaatgcagattccatgatcattcaataatcagggatttgaagctgttttaagtaaccatttcttctactagcacaaaaattaaaatcaccagcttttgcttagatgtattaaactggatgtctaaaacatcatttcttctttcataaaatacatagctaaaaattttctgttaccatgattaacaaactagcagtaagcatttaactagaagttcaggaccaatggccag

SEQ ID NO: 72966 - DNA, 1100 bp, Homo sapiens
gtttgagatctttctccttttttgatgtaaatggaaaacaccaatttaaatccctatttaaatccaattgatatccatgttgacatgactagtagttactgatttttttttatttatttatttatttatttatttatttttgacagggtcttgctctgttgcccagcctggagtgyagtggtgccgtctcggctcactgcaacctccgcctccaggattcaagcaattctcctgcctcagtctcccgagtagctgggattacaggcgctcgccaccacacccatctaatttttgcattttttagtagagacagggtttcgccatgttggctaggtctgtctcaagctcctgacctcatgtgatccggccgcctcggcctcccagaatgctgggattacaggcatgagccaccgcgcccatccctgatttttttttttttttttttttttttttaagaaataaagcaacttctcccaggccatgtggaaaagccatgtgtgaaccagaggaacaagtgtgagtaaatctcagccctctgggcagaatgttctgctgttcgtgctatttcttaatcacaagactggctgtggattgcaaacctgtcacctcttttttacattcccaaactcaccaaaatgcctttgttaaattttcatagtttgacattgaaatattaacgtgcagacaactggccttgtacagttttgattctatgctttgcaggactttctgggatttgaggtaacctgcatgtctggcctggtgttccttggcctcgcagaaatatcccactctccttgccagacacagaaagccctttgctccttccctggaacttcctcaaacctccaaactttgcacttgcagattctgcctgggatgtctgtcccctagttctgtttctctttttttttttctgagacggagtctcgctctgtcgcccaggctggagtacagtggtgcgatcttggttcactgcaacctctgcctccccagttcaagcaattctcctgcctcagcctcccaagtagctgggattacaggcacacgccaccacagccagctaatttttgtatttttagtagagacagggcttcacc

SEQ ID NO: 72967 - DNA, 1100 bp, Homo sapiens
gtttgagatctttctccttttttgatgtaaatggaaaacaccaatttaaatccctatttaaatccaattgatatccatgttgacatgactagtagttactgatttttttttatttatttatttatttatttatttatttttgacagggtcttgctctgttgcccagcctggagtgtagtggtgccrtctcggctcactgcaacctccgcctccaggattcaagcaattctcctgcctcagtctcccgagtagctgggattacaggcgctcgccaccacacccatctaatttttgcattttttagtagagacagggtttcgccatgttggctaggtctgtctcaagctcctgacctcatgtgatccggccgcctcggcctcccagaatgctgggattacaggcatgagccaccgcgcccatccctgatttttttttttttttttttttttttttaagaaataaagcaacttctcccaggccatgtggaaaagccatgtgtgaaccagaggaacaagtgtgagtaaatctcagccctctgggcagaatgttctgctgttcgtgctatttcttaatcacaagactggctgtggattgcaaacctgtcacctcttttttacattcccaaactcaccaaaatgcctttgttaaattttcatagtttgacattgaaatattaacgtgcagacaactggccttgtacagttttgattctatgctttgcaggactttctgggatttgaggtaacctgcatgtctggcctggtgttccttggcctcgcagaaatatcccactctccttgccagacacagaaagccctttgctccttccctggaacttcctcaaacctccaaactttgcacttgcagattctgcctgggatgtctgtcccctagttctgtttctctttttttttttctgagacggagtctcgctctgtcgcccaggctggagtacagtggtgcgatcttggttcactgcaacctctgcctccccagttcaagcaattctcctgcctcagcctcccaagtagctgggattacaggcacacgccaccacagccagctaatttttgtatttttagtagagacagggcttcacc

SEQ ID NO: 72968 - DNA, 1100 bp, Homo sapiens
gtttgagatctttctccttttttgatgtaaatggaaaacaccaatttaaatccctatttaaatccaattgatatccatgttgacatgactagtagttactgatttttttttatttatttatttatttatttatttatttttgacagggtcttgctctgttgcccagcctggagtgtagtggtgccgtctcggctcactgcaacctccgcctccaggattcaagcaattctcctgcctcagtctcccgagtagctgggattacaggcgctcgccaccacacccatctaatttttgcattttttagtagagacagggtttcgccatgttggctaggtctgtctcaagctcctgacctcatgtgatccggccgcctcggcctcccagaatgctgggattacaggcatgagccaccgcgcccatccctgatttttttttttttttttttttttttttaaraaataaagcaacttctcccaggccatgtggaaaagccatgtgtgaaccagaggaacaagtgtgagtaaatctcagccctctgggcagaatgttctgctgttcgtgctatttcttaatcacaagactggctgtggattgcaaacctgtcacctcttttttacattcccaaactcaccaaaatgcctttgttaaattttcatagtttgacattgaaatattaacgtgcagacaactggccttgtacagttttgattctatgctttgcaggactttctgggatttgaggtaacctgcatgtctggcctggtgttccttggcctcgcagaaatatcccactctccttgccagacacagaaagccctttgctccttccctggaacttcctcaaacctccaaactttgcacttgcagattctgcctgggatgtctgtcccctagttctgtttctctttttttttttctgagacggagtctcgctctgtcgcccaggctggagtacagtggtgcgatcttggttcactgcaacctctgcctccccagttcaagcaattctcctgcctcagcctcccaagtagctgggattacaggcacacgccaccacagccagctaatttttgtatttttagtagagacagggcttcacc

SEQ ID NO: 72969 - DNA, 1998 bp, Homo sapiens
accataagaacgaagccgtggggtgtggtgacctggagccgtcggtgatggctgtagcaggggcgttttggtcaagttgcgggaggtagggaaataggcgtgtcgggctctgtagagaagtttctatgagaaagggaaggagttgctgtgggatgcaaagcaagggagggtggttgttttgggagtggagtgggggccggaataaacccaaagagacttgaaaactaacagaaataaggaagctrgcaagtgcatggggcgcattggggcgggaaagactggtgtggtgtgaagggactctctgtggattgggagaagacccactttaacctccagaagaggaggagttgatggacagtgtgcattggatggggtcctgagggattcctcccaggcagccccaaagccagagcctgtggtgtttaatgtgggagagggaaggaggatgggcccattgtccagatgccatgtgcagaaggcttcccctcgagttttggggcatgttgggaaggaagcaggatggaataaacatgcagcaaaaaagcctaaattgtatttctttgtactttataagagtattttcccccgccccttttttgagaaaaggtctcgctctgtctcctaggcgggagtgcagtggtgtgatcacagctcactgcagcctcgaactcctgggctcaagcagtcctcccacctcagcctcccaagtagctgggactacaagcaggtgccaccacacccagctaatttttttttttttttgtctgtagtagagacaaggtttgattgtgttgcccaggccggtgtggaactcattgagctcaagctatcctcccacctcagcctaccaaaatgctggtattataggggtgagccaccatggctggacaagaatatctcttgaagcaagttcccagactctggccgccacggagctattcctgtcaatggcgttttgttggaactcagccacacccattcccatctgcatcgtctgtggctttcaggcttcgtgtgtcccacaaaggcaaaagtactatctgtccctttataaagttcagtcaccctgactgaaatcatggtgtactcactgtaacaaaattccagttgaaaccagggtagtgcagcagtccatcgagtgtttcctggtgtacctgtgtgcccataaaaagaggaagctgcaaggatcaagttcatagagctagagcctcctgctgtgaaatttttctattgctaagaattggttggcacccaaaatttgtcctttaaaaatatgcatcagttatgccttgttgatggtgtgggtggtttgtaacaaactaaaccagggctgggctcagtaaaagttgtgtaagtgagtgagggagagatgccttcattcttggtgttggaagtgccgacctctcctttcatctgggatccatggaaatgggaccttggctgcccctggatggagtccaggcgctctccttcccaggggccagagaacacctgtgtttcccaggaccttggggacctgtgcccagttcccctggggagagagcggttttgatcactcgcaccaggaatgactcgagtcagaagcaggtgactttgacctgttctgttacctagaaaatgaggccactttggagcccaggcagctgtgcacacagccagattagcttggtgtgtgctgagtagccacgaaagagctgagttggggacattgagtgacttcgtgtcaaaccctgtggtggtccagcacaccttcccaggaccacagacgaggctgccaccacagcaagaaaattaggatctgacagcctaccagctaactacacaccctcctgacacgtgaatacacacgtgtatgcttttatcttctgaaacaaatctagtcaacatttaattttttaaaacaatttgttttgaatatatccaaattcaaatagaaacagaccttcttctgaaatatataaatagttgatatgaagcataatccagaccggtattaca

SEQ ID NO: 72970 - DNA, 1998 bp, Homo sapiens
accataagaacgaagccgtggggtgtggtgacctggagccgtcggtgatggctgtagcaggggcgttttggtcaagttgcgggaggtagggaaataggcgtgtcgggctctgtagagaagtttctatgagaaagggaaggagttgctgtgggatgcaaagcaagggagggtggttgttttgggagtggagtgggggccggaataaacccaaagagacttgaaaactaacagaaataaggaagctagcaagtgcatggggcgcattggggcgggaaagactggtgtggtgtgaagggactctctgtggattgggagaagacccactttaacctccagaagaggaggagttgatggacagtgtgcattggatggggtcctgagggattcctcccaggcagccccaaagccagagcctgtggtgtttaatgtgggagagggaaggaggatgggcccattgtccagatgccatgtgcagaaggcttcccctcgagttttggggcatgttgggaaggaagcaggatggaataaacatgcagcaaaaaagcctaaattgtatttctttgtactttataagagtattttcccccgccccttttttgagaaaaggtctcgctctgtctcctaggcgggagtgcagtggtgtgatcacagctcactgcagcctcgaactcctgggctcaagcagtcctcccacctcagcctcccaagtagctgggactacaagcaggtgccaccacacccagctaatttttttttttttttgtctgtagtagagacaaggtttgattgtgttgcccaggccggtgtggaactcattgagctcaagctatcctcccacctcagcctaccaaaatgctggtattataggggtgagccaccatggctggacaagaatatctcttgaagcaagttcccagactctggccgccacggagctattcctgtcaatggcgttttgttggaactcagccacacccattcccatctgcatcgtctgtggctttcaggcttcgtgtgtcccacaaaggcaaaagtactatctgtccctttataaagttcagtcaccctgactgaaatcatggtgtactcactgtaacaaaattccagttgaaaccagggtagtgcagcagtccatcgagtgtttcctggtgtacctgtgtgcccataaaaagaggaagctgcaaggatcaagttcatagagctagagcctcctgctgtgaaatttttctattgctaagaattggttggcacccaaaatttgycctttaaaaatatgcatcagttatgccttgttgatggtgtgggtggtttgtaacaaactaaaccagggctgggctcagtaaaagttgtgtaagtgagtgagggagagatgccttcattcttggtgttggaagtgccgacctctcctttcatctgggatccatggaaatgggaccttggctgcccctggatggagtccaggcgctctccttcccaggggccagagaacacctgtgtttcccaggaccttggggacctgtgcccagttcccctggggagagagcggttttgatcactcgcaccaggaatgactcgagtcagaagcaggtgactttgacctgttctgttacctagaaaatgaggccactttggagcccaggcagctgtgcacacagccagattagcttggtgtgtgctgagtagccacgaaagagctgagttggggacattgagtgacttcgtgtcaaaccctgtggtggtccagcacaccttcccaggaccacagacgaggctgccaccacagcaagaaaattaggatctgacagcctaccagctaactacacaccctcctgacacgtgaatacacacgtgtatgcttttatcttctgaaacaaatctagtcaacatttaattttttaaaacaatttgttttgaatatatccaaattcaaatagaaacagaccttcttctgaaatatataaatagttgatatgaagcataatccagaccggtattaca

SEQ ID NO: 72971 - DNA, 1092 bp, Homo sapiens
ggaggttgtgaaaaactaatatagaggactgaaaaagttctgtctaaactgaacaaagccattgtaaagataccttcacctaaccatatatggaatattttttgaaataaaaattaaattcctacagaatctaggtggaataaacaggtcatccacagagaaatgaaaaacaatggaataaaaataaaatctaaccttgaatatgcatcttaatcaactgagagaaaacaaatctgagaaagatgaaaataacatgtccttctctaatctgtagctgttaagaaagaaatataatcctacatcattaattcacaaataatacaatgcagtttaataataataatgagaccacattattgagaatttcatgagaatatgaatgatatctcctagaatgyctgattctactttgtattaatatcaatctctctgtattattgctatatatggtgaatcattttaggcatctgaatttcagaaattgttgccgtttccttattatgtaattttaaagttgaatctctaattctggttcttagttgattactttattgctctgataatgttttagtcaacatctcagtatttcttaatattatgaaaatttatgagcccttccttcccaactagaagagaattattggcactgtccagtatctaacatgaggcaggaaacaataatgttacattattgttttgaatttctgtaaaaaaagtttctggttaaagatcactaaaatgataacaaaggaattagattcacaatgacaaagagaatggcagaggacaatgagcagataagagatttcaagtaaaatcttgaaggtgaaaagtggtcagaaaagtgctagttgcaatagcagataggggatggatgctttcagaggttaggaatcatggtgccctacagaatttgtaagaaacaatggagatttgaagggagacacagagccaaaaactgatgtgttatttgagaaatgaacagaacagtgtgtgccctgcccgtcaacccacatcctgaccatatgcaaccaggcagtctctcagggcaaccactgctgtcattttttccatcgtatcttaatactgccc

SEQ ID NO: 72972 - DNA, 2184 bp, Homo sapiens
taaattgagaaatttcaaaagaagatcagtcttactctcttgcaaaatatggaagtgtgtcttttcataaccgttactgatttgttctgttctatgttaacataaacttgtccttaggagagctatttgaagaggtcttgtaataatcccacaaaatagaaaattactgccacttctcatgaaaccagtttccaaagaaacctgtaattctgatcgatggttttatttgataatttttgggcctggccataatattttaagtgacatctggatccctaaacttataaatgcttgtaaaattttatattaactaagtggcattctgattctctcatatgcaagtaggtaataaattgactacagatttccttttaaataaagattttgagagtcttgtctcatttaaattccctccagttattatgtaatagaaaaaaagatattcatagcaacacataaatttatacaatgtataaaacttttttaaaatgccagaattgtacaaaaaaatttttagtggaagaacattacataagacatgaataaaagagtaaaagtctctgttcttcccaaattaaccttcaaattcaatgcttttttttttktttgttttgttttgagacagggtcttgttctgtcacccaggctggggtgcagtggtgcagtctcagctcactgcaacctctgcctcccgggttcaagcaatactcctgcctcagcctcctgagaaactgggattataggcataagccatgatgcctagccagttcaatgcatttctgatcagagctttcaatggacttgggaaggagttgggagagatcttcttgagctcattctaaaattcaccccaatgaagcatcaggatggttctacctctgagctcttctttcttttctgtagtgccttcaattacaaaagaagaacatagaatatagacaggtaaaggcagtgtgtaatcaaagtggtgattcaaatcaccatgtcaccatgccatagtgtggagaatatttttaaaattcccacctcacttacacagaaaggcaaaccccctgtagattacatatgtaaacattaaaaatgatcagttatatcaaacttctagaatcaaatataaaacaatatttttaaaatattgaggaagaaatagctgttgtaaatatgatatggaacccaagaaccagtcagaaaaaggctgacaaatttgactacataaaaatttaaaacttctctaggacaaaagattcccttaacaaatctaaaagaaaaacaacaaatggacaaaatactagcaacgtatatgaccaagatttaatatatataatatttaagagttctatattcattcagaataataagaaaaacaccatgacttaaaacactgagagggccgggcgtggtagctcatgcctgtaatcccagcactttgggaggccgaggcaggcagatcacaaggtcaggagatcgagaccatcctggctaacacagtgaaacaccgactctactaaaagtacaaaaaattagccgggtgtggtggcaggtacctgtaatcctagctactcgggaggctgaggcaggagaatggtgtgaacctgggaggcagagcttgcagtaagccgagatcacaccactgtgctccagcctgagcaacagtgcaagactccgtcaaaaataaacaaaaacacaacaaaacaaaacaaagaaacacagagcattctctgacaaagagttttatgaagaagaaaaagaaatgaccgataataaatgaaaaattcctgacgacactaaaaatgaaaacaatgcacattaaagcagctctgaaataagactttttatatttcaatttaaaacgtttttattgtccaggtatattagtttaaaaagcaagaaaggacaagtgtgtacagagttactcatttaaataaaactatattccaaaacgtgttaatacatgcatagtaaaattctggaaagatagacaccaatgttcacaagaacatctattttcaaatcagaatgaaaagcaagatgaagacagaataaagcaacatgagcattttgaaaaaaataaatggctactttaaaaggcattcaggttttatcttatgaaaggagtagaaaaaaatgctcctggaactgacaaatttagtaaagtttcagaatacaaaatcgatgcataaaaat

SEQ ID NO: 72973 - DNA, 2184 bp, Homo sapiens
taaattgagaaatttcaaaagaagatcagtcttactctcttgcaaaatatggaagtgtgtcttttcataaccgttactgatttgttctgttctatgttaacataaacttgtccttaggagagctatttgaagaggtcttgtaataatcccacaaaatagaaaattactgccacttctcatgaaaccagtttccaaagaaacctgtaattctgatcgatggttttatttgataatttttgggcctggccataatattttaagtgacatctggatccctaaacttataaatgcttgtaaaattttatattaactaagtggcattctgattctctcatatgcaagtaggtaataaattgactacagatttccttttaaataaagattttgagagtcttgtctcatttaaattccctccagttattatgtaatagaaaaaaagatattcatagcaacacataaatttatacaatgtataaaacttttttaaaatgccagaattgtacaaaaaaatttttagtggaagaacattacataagacatgaataaaagagtaaaagtctctgttcttcccaaattaaccttcaaattcaatgcttttttttttgtttkttttgttttgagacagggtcttgttctgtcacccaggctggggtgcagtggtgcagtctcagctcactgcaacctctgcctcccgggttcaagcaatactcctgcctcagcctcctgagaaactgggattataggcataagccatgatgcctagccagttcaatgcatttctgatcagagctttcaatggacttgggaaggagttgggagagatcttcttgagctcattctaaaattcaccccaatgaagcatcaggatggttctacctctgagctcttctttcttttctgtagtgccttcaattacaaaagaagaacatagaatatagacaggtaaaggcagtgtgtaatcaaagtggtgattcaaatcaccatgtcaccatgccatagtgtggagaatatttttaaaattcccacctcacttacacagaaaggcaaaccccctgtagattacatatgtaaacattaaaaatgatcagttatatcaaacttctagaatcaaatataaaacaatatttttaaaatattgaggaagaaatagctgttgtaaatatgatatggaacccaagaaccagtcagaaaaaggctgacaaatttgactacataaaaatttaaaacttctctaggacaaaagattcccttaacaaatctaaaagaaaaacaacaaatggacaaaatactagcaacgtatatgaccaagatttaatatatataatatttaagagttctatattcattcagaataataagaaaaacaccatgacttaaaacactgagagggccgggcgtggtagctcatgcctgtaatcccagcactttgggaggccgaggcaggcagatcacaaggtcaggagatcgagaccatcctggctaacacagtgaaacaccgactctactaaaagtacaaaaaattagccgggtgtggtggcaggtacctgtaatcctagctactcgggaggctgaggcaggagaatggtgtgaacctgggaggcagagcttgcagtaagccgagatcacaccactgtgctccagcctgagcaacagtgcaagactccgtcaaaaataaacaaaaacacaacaaaacaaaacaaagaaacacagagcattctctgacaaagagttttatgaagaagaaaaagaaatgaccgataataaatgaaaaattcctgacgacactaaaaatgaaaacaatgcacattaaagcagctctgaaataagactttttatatttcaatttaaaacgtttttattgtccaggtatattagtttaaaaagcaagaaaggacaagtgtgtacagagttactcatttaaataaaactatattccaaaacgtgttaatacatgcatagtaaaattctggaaagatagacaccaatgttcacaagaacatctattttcaaatcagaatgaaaagcaagatgaagacagaataaagcaacatgagcattttgaaaaaaataaatggctactttaaaaggcattcaggttttatcttatgaaaggagtagaaaaaaatgctcctggaactgacaaatttagtaaagtttcagaatacaaaatcgatgcataaaaat

SEQ ID NO: 72974 - DNA, 1039 bp, Homo sapiens
ctcgcatgtggaatttacaacagggtttgtgctcctatgagaatttaatgctgctgctgatctgacaggaggtggagctcaggcagcaatgccagcaatggggagctgctgtaaatacagatgaacccctcactcactcgcccaccactaaccttctgctgtgtggcccatttcctaacaggccatgrgttggtacaggtccttatcccggaagttggaaacccctgttttgtagaagagtttaggagaagggagagggactcctcacaccagagctgtcctttctcattgaaggatacaatacagaagttacaatcattggatacagatcgcaacatgcaggctcaaatgtatccatgcaagacaatcagtaaaactctaagatccagaaataaatcagtgtccttttcagggtcactgggttatgcattaatcactgtgtcaacaatttgagagactcatgataagattcagggacaagatttcaccatgaatcacaagaccttcccaaggtgggttaattggaaagcctgtttacttttaaactaaactgccaaatgtgacctgtagattatcacattccctttttgattaaaaaaaaaaaaaaatcttcccatggaagtattgctgatcaatctgctaggttaaggggatagatgttcttcattccttgtcaatgggaaggcttattccaggaggtcatgtccctcggtgggggaaaaaaaccttgttattgcaatcaggccagtttgctgacaagatgaggtaggtcatgacacacagctacctgctattctcctgaatgataaatcatctcactgggaaatcagtattttggccttagccatggatcgaaagcaagcacaatgcaaatcatgagtgacttaatagccaagaaaataaactatgtttattattaggttgaggcaaaaaagtagttgcggttttcgccatcagaagtaatggtgaaaactgcaatgacttttttgcaccaacctaatattataatcataacaacttgaaaacacaatagaaaaaa

SEQ ID NO: 72975 - DNA, 1039 bp, Homo sapiens
ctcgcatgtggaatttacaacagggtttgtgctcctatgagaatttaatgctgctgctgatctgacaggaggtggagctcaggcagcaatgccagcaatggggagctgctgtaaatacagatgaacccctcactcactcgcccaccactaaccttctgctgtgtggcccatttcctaacaggccatgagttggtacaggtccttatcccggaagttggaaacccctgttttgtagaagagtttaggagaagggagagggactcctcacaccagagctgtcctttctcattgaaggatacaatacagaagttacaatcattggatacagatcgcaacatgcaggctcaaatgtatmcatgcaagacaatcagtaaaactctaagatccagaaataaatcagtgtccttttcagggtcactgggttatgcattaatcactgtgtcaacaatttgagagactcatgataagattcagggacaagatttcaccatgaatcacaagaccttcccaaggtgggttaattggaaagcctgtttacttttaaactaaactgccaaatgtgacctgtagattatcacattccctttttgattaaaaaaaaaaaaaaatcttcccatggaagtattgctgatcaatctgctaggttaaggggatagatgttcttcattccttgtcaatgggaaggcttattccaggaggtcatgtccctcggtgggggaaaaaaaccttgttattgcaatcaggccagtttgctgacaagatgaggtaggtcatgacacacagctacctgctattctcctgaatgataaatcatctcactgggaaatcagtattttggccttagccatggatcgaaagcaagcacaatgcaaatcatgagtgacttaatagccaagaaaataaactatgtttattattaggttgaggcaaaaaagtagttgcggttttcgccatcagaagtaatggtgaaaactgcaatgacttttttgcaccaacctaatattataatcataacaacttgaaaacacaatagaaaaaa

SEQ ID NO: 72976 - DNA, 766 bp, Homo sapiens
acttgkgacaaatgcctccttgatgggaagtgggcaggaaacatctcctgaagtgcagggagccggccctctggatgtagcaaagtcccacctattcatgtgggcaccaacctgggcaggtatgaagtgacagagaggaggaagcttagcacctgctgtcagggcgtgtagactggcagggtaggcagcagtactgctgctgaggtcatgaatcttagtcctctcactcagctggtgacacaaatcacttgtcccacagctgcttccacgatccattctgtggggctggtggaaacccatcacctcggctcctctggggttgtcctcctgcctctcagattccttctctgggcatggctcatcccaggagtcagagagagggtcctctgggtgtcacccctcaggcccctgggccctcactctccctgcctgtaaggccccttcagggcacagcctgctctctgctgccttccagccctgactaaggcacaaggctcctttctgtggctgtccccagccctggcccccagaggtctccccaggagcctttgctgtgggctcttgctcagcaggagcagagaaggcagggtccctctctcgaggaatagctttcactactctcctccctccagcttggggaaatctccttttggtttgggagcaatacttccacatttacgtttcttccaagatcccctgcttcttgctaagaccctggctctcctgctttctttctccacaaagcctccacatcttctaacagatt

SEQ ID NO: 72977 - DNA, 754 bp, Homo sapiens
catgggtggtttttgaacagggatgtgagtggtgagagacaggaaaggtcctgagtgagtttgaagagaaaggtggaatggataatcactgagctgggagttctttggaaggcttcctgaaggactcattcattcattcattcattcactcaacaaaggcttctctagcaccttccatgtgccagacactgctcatggtgatgaatataatagagtgtctttcctatagcacttacattgtgggtaggggagatgggcaaaccttaaccaacatataaacattttttccaggtggtgatgtagactcagaagatatcatygcagggtaaggagactgagagtgagaggggatgctcttccagctagggaagccaggggaagcttctagaggaggtggcattggagtagagacctgaagagaatgtgggggttgattttgtcctaaagaacacgttggctttgcgcagctatgatggacagggagtgtgagtgaagcctttggggaagagttcacaggagctgcaacctgccagtcttgttgctgcagagactctgtgggggtgagctttgggtggtgaggttggaagggagacagtgccatttgggatgagagttctaaggctgggttgaggacttcagtcttgctcggtgagcctcagaaagttgctgtgcaggaggtgagcaatggaatgaaaagcgcttgggtctctgcagaaggctcccttccaaaattacagtgggttggccagggcag

SEQ ID NO: 72978 - DNA, 822 bp, Homo sapiens
tgagtaaattttagaaagacaagataagggaaaaaagaagcataaatagtgaagaaggatactacatgaagaaagagaagactaccattaagcaggggagagagatgagaatagtattggaaggttgtgggggctgaaagactaaattcaccctcatgactctggagcagctcttttcctaagatacctatgagttaaaactcagaaatcttagtatatacacaatcccactttggcaaatgagctcaaagcctaatgaggaccatgaaacaagacttcatttttttggtgggatgaaggggtcatgggagaatccaaatgtcctccagaaagactagatatacttggtctctcgggttggttaacagtagggagcaactctgaaagagatgaagattctattccatgtggtagatgattgtgggaaatgtgtgactaatgcacacttcctgagccaaatcacatttgggcagctaacaacttggctaatgtgcctgctctgtgtggatctgatagcatgagatgaggatgctatattacgggctttgactcaatctttaccaggccattaagttaaaggaatcatgaaaatgaaatartcaatgaatatgttatggttcaatgcaacaaagatgaaaactcataattactatacaaaaggggaaactctatgagttttgtgaaaaacaatcaatataacggaagaagaaactcttttttaaaaaaaaataacataaggatgaaccataacatttccactagaccagtgttattcaagcttcatataatccattagtaaattgtgaaataagttttggggat

SEQ ID NO: 72979 - DNA, 1114 bp, Homo sapiens
gctaccactagcatcaatttttgtttttttaaaaaatgtatgaacatatttatttttaaaattgcttttagcctgatgctctcaatgtttggtatcagttcaattttcattttttccccaaaattgaaagtaatattttttaagcagcatgaaggtaaaaataggcattttaattaaattatcagaatgttgcttttgcttccttatgactggcctggccatgtraactaagtaagccttgttgtaacagaaagcagaactaattttgctatctcggaaattaagttagaattattttcagttaaagcaaaaagacctgtaccttttcccgaaagtgttaactttgctgtcttcctgtgccattacaactctctcggctggacccggtggctcacacctgtaatcccagcactttgggaggccgaggtgggcggatctcctgaggtcaggagtttgagaccagcctggccaacatggagaaaccccgtctctactaaaaatacaaaaattagccgggtgtggtcacacatacctgtaatcccagtactcgggaggctgaggcaggagaatggtttgaacccaggaggcagaagttgcagtgagccgagatgctgccattgaactccagcctgggcaacagagcaagactgcatctaaaaaaatttaaaaaataaaaaaaaaaacactctcacaaatgaaaaatatttatgaagcatgtctacctattgagagattgttaacaaaagtcttggtcaaatagttgtgcaacttattttaatgaaaactccatattctattaatgctgaagtaatggaaagtaatactcaattggacacttcttgatgaattaagaagaatgcttgtcttaccttagcatcattgtttacagtaacaaatgtggatccatggccttctgtctctgagctccttctatgcaatgatttccagtacttggttttcctttctactcactgccttcctctcctgcctgtgctggtggtttattttacttgacagagctttgcattggctactgctctcaaattctggtttctcttgttctccagtttttgcctataacgagagtcacatcctaaagcccagcaccacagcc

SEQ ID NO: 72980 - DNA, 671 bp, Homo sapiens
cctggtggcgggcactctgtgggatgggctctctctctctctctctgttggggggggtgtgtgtgtgtgcacgcgtgtgtgtgtttaggtggagggtaaagtggatggggaggggatttaccctctgcagcctcaggcttccctggcawgccaccgccttggacatgacatttgctggcttggctggggccctgtggccagatgtcagaatttaagttctgcgcttagggcttgtgcaaccttagacattaaacgtctctaagcctgtttcttatcagtaaaaggaagatcaaagtacctagctctttgggttctttgttaaaaataagattatgctttggattcctcagaaatagatcctgagagattcagacataagtagtttatttgagaagtgactccaggaaaaaccacttggggagggcgatgtgagccaggagtggggaagaagatggcaagagtgacttatccagcaagtgttttgccactgagggcacctgcacaccatccctctcagtaggaccttgcctgaggggcaagggagctggggtatttatccacagattcccatcattcactgtgggaggaccactcctggggtgccttaatgcctcagctctctcattatttgacacgtgggcacggtgggcaccagcaaccagagaggatcc

SEQ ID NO: 72981 - DNA, 671 bp, Homo sapiens
cctggtggcgggcactctgtgggatgggctctctctctctctctctgttggggggggtgtgtgtgtgtgcacgcgtgtgtgtgtttaggtggagggtaaagtggatggggaggggatttaccctctgcagcctcaggcttccctggcaagccacygccttggacatgacatttgctggcttggctggggccctgtggccagatgtcagaatttaagttctgcgcttagggcttgtgcaaccttagacattaaacgtctctaagcctgtttcttatcagtaaaaggaagatcaaagtacctagctctttgggttctttgttaaaaataagattatgctttggattcctcagaaatagatcctgagagattcagacataagtagtttatttgagaagtgactccaggaaaaaccacttggggagggcgatgtgagccaggagtggggaagaagatggcaagagtgacttatccagcaagtgttttgccactgagggcacctgcacaccatccctctcagtaggaccttgcctgaggggcaagggagctggggtatttatccacagattcccatcattcactgtgggaggaccactcctggggtgccttaatgcctcagctctctcattatttgacacgtgggcacggtgggcaccagcaaccagagaggatcc

SEQ ID NO: 72982 - DNA, 671 bp, Homo sapiens
cctggtggcgggcactctgtgggatgggctctctctctctctctctgttggggggggtgtgtgtgtgtgcacgcgtgtgtgtgtttaggtggagggtaaagtggatggggaggggatttaccctctgcagcctcaggcttccctggcaagccaccgccttggacatgacatttgctggcttggctggggccctgtggccagatgtcagaatttaagttctgcgcttagggcttgtgcaaccttagacattaaacgtctctaagcctgtttcttatcagtaaaaggaagatcaaagtacctagctctttgggytctttgttaaaaataagattatgctttggattcctcagaaatagatcctgagagattcagacataagtagtttatttgagaagtgactccaggaaaaaccacttggggagggcgatgtgagccaggagtggggaagaagatggcaagagtgacttatccagcaagtgttttgccactgagggcacctgcacaccatccctctcagtaggaccttgcctgaggggcaagggagctggggtatttatccacagattcccatcattcactgtgggaggaccactcctggggtgccttaatgcctcagctctctcattatttgacacgtgggcacggtgggcaccagcaaccagagaggatcc

SEQ ID NO: 72983 - DNA, 671 bp, Homo sapiens
cctggtggcgggcactctgtgggatgggctctctctctctctctctgttggggggggtgtgtgtgtgtgcacgcgtgtgtgtgtttaggtggagggtaaagtggatggggaggggatttaccctctgcagcctcaggcttccctggcaagccaccgccttggacatgacatttgctggcttggctggggccctgtggccagatgtcagaatttaagttctgcgcttagggcttgtgcaaccttagacattaaacgtctctaagcctgtttcttatcagtaaaaggaagatcaaagtacctagctctttgggttctttgttaaaaataagattatgctttggattcctcagaaatagatcctgagagattcagacataagtagtttatttgagaagtgactccaggaaaaaccacttggggagggcgatgtgagccaggagtggggaagaagatggcaagagtgacttatccagcaagtgttttgccactgagggcacctgcacaccatccctctcagtaggaccttgcctgaggggcaagggagctggggtatttatccacagattcccatcattcmctgtgggaggaccactcctggggtgccttaatgcctcagctctctcattatttgacacgtgggcacggtgggcaccagcaaccagagaggatcc

SEQ ID NO: 72984 - DNA, 638 bp, Homo sapiens
ttctgcagtcagatgtcctggattcaaatactgtctcttgccgggtgcggtggctcacgcctgtaatcccagcaatttgggaggctgaggcaagcagatcacctaagatcaggagttcaagaccagcctggccaacacggtgaaaccccgtctctactaaaaatacaaaaattagccaggcatggtggtatgatcctgtagtcccagctactcaggaggatgaggcaggagaatcacctaaacccgggaggtggaggttgtggtgagctgagattgcaccactgcactccrgcctgggtgacaaagcgagactccatctcaaacaaaaacaaaaacaaatacaaatactgcctctgcaactttactggcttgtgccaactcctttcacctacatgtgcctcactttcctcatccatgaactgggtccatgaatcgggtgttgtaaagattaatgaggtaatatatgtaacacatttagcacagtgcttggcacatagtaaatgcacagtaaagttagctgagattgcctgtgttgtgagcaagggatgaaaggagtgggtattagcttggtggggaggtaagctatggaagtggagtgcagagttctggaaagagaatgctacagacaaatttcttca

SEQ ID NO: 72985 - DNA, 725 bp, Homo sapiens
caaacaaataatggcaacaggtaaggtagaggtggacagggggctgaggaaccacagaacagtgagatctaggaggtattgcagggcaggcagaagagtggacacagactggaaggacagattttaaacaataaaattaatggaaagattttcatattggatgaacggaatatacaaagtattgaagttgagacaaagcacagarcccttgaagaatagaaagatttttttaatgtgggtggaacatggagtgagatgacggagtggtgagagatagattcaagtattaaaccagagttttgaattctaaagcctttacaaccaacttccagtttccaggaaatacaggggatggagtgtgaagttaactgacacacacacaaataaacaccaagcaaatctagaatgtgtgatagttctgaggacatgtcatccacttaatcagtaagttcattgcatgggaagaaaggagggtgaatgtcctttgccgaatataaaacataacaactaagtgtagggaaggttccaggtttgggggagactaaagttgatgtaatttcaattgttctgtttaagaaaaataatacaaaattaggaacagaaatttgctaaggcccttgcagggtcatggaaagggcctttgcaaatgaaagaatccaaaagttaagcttcaattgctgtgtagaaaattcaaaactgatcaaatgcaacatgtcaaccttgtg

SEQ ID NO: 72986 - DNA, 1358 bp, Homo sapiens
gtgtgagaggggcctcgaattgactgagtgtttggtaagttagcagccatcgtcrtcgtcatcatcatcatcatcatcacagaactggaaggtcttgcatctgaaaactctccatgccccatgccaagcctcttgtttgttcccagctgtgcggagatctgtctgtccacagggcagcacacacatacacacacacacaccatacacatgcacagaggtctgtctggctggctctctccctggccccctcaacaaagctctcttgtcaagctggccaggacgagaatattgatgagacagagggcaaccagggtacaaacagcctgctcagccgtcgtcctctgtgggacaagctgtcacctctccctggccccctctgaccttccatggcgctcccaggctccctccccagtggagcatccatgggtgagttttggggatgaggggtggcaaacctagggggaggcggggatggcgaagttcacgtggagacagagcctccctcgtgtgcacctgagtgtatacagctggtgctcccattgctggagcacctcccagtgcccgatcccatgccttatgtttcccaggtggggtctctcataagccccagacaaccacaggaatgggcattttgattctcaaggtacaggtgacgaataggctcagaggttgggtaaaagtgtccatgggagcaccaggtagtgaatggcagtagaggaaggtcagctcaggaatcctgagtcctttgaggacacagggtcagtggaaagggttgagcaggaagggggtgggagagcttgcctgcctggtaaccttcagaggtctcagatttagggttttgatgatatctccacatgaggttacccacgaagtcagggagttcagactgaaggaagacagcaattcactatcttacaccaccaaattaatttacactccagtgtcatgattgaatatggggggggggagatggatttggagctgcaactggtagggacaagatgacgaactctctagacctctgcatgttgttccatttgcttcaccaagaatgtatcaggctgggcgtggtggctcacacctataatcccagcactgtgggaggccaaggtgggaggatcacttgtgcccaggagttcgagaccagcctaggcaacatgtgaaaccctgtctctacaaaaaatacaaaaagtagccgggtgtggtggtgtgcgcctatagtcccagctacttgggaggctgaagtgggaggatcacttgagcctgggaaatggaggctgcagtgagccaagattgcaccactgtactccagcctgggtgacagagcaagactctgtctcaattaaaaaaaaaatgca

SEQ ID NO: 72987 - DNA, 622 bp, Homo sapiens
tgtttccaccgcttgcccagctttcttactacccagttttcacgcattcatcattctaaatgcaaaagcaccccaaatgttctaaagactcagtgcttgataaggcccctggaacgttttttgccttytgcccttccttttgcaggactggtgtttctgcacaccctccactttctccagcccctgtgcaagtaaggctccaccccagaccccctactcaaggacagtggttctcaaagtggggcgattttgcaacccgggtgtgggcattggccaatgtctggagacattttggggtgtcaagcctgggatagagggtgctattagcatctggtgggtggaggccagggcggctgctatgcacaggactggaagatgtaacgtgatctcctgcagtgcacatgactgccgctcacaccaaagaatgatctggccccaaatgtcagtagtgctgaggttggggaatatggggtgagtccccctccaggtggggcacttgtcatcagatacggttgagtcatgagtcctgggtctggggggctgggaggtcagtcaattaccagaatgcagaagtctgaaaaacatctcaaaagaccaatctaaggttctataatagcaatgt

SEQ ID NO: 72988 - DNA, 727 bp, Homo sapiens
ggatccatttctgttaaacaaaacaaagtgtgtaataggatatatatacaaatataattgatctgagaaatgtctgtaaggatgtgcttcaaactaattatggtgggaccactggagagggggatttacggagggcagggataagaaagcggaatttagaaatcttatgtattggtttttttaaaaaacaaatatgtattcatgaattacttatgtcaatttcaagcagacgtttatttttaaaattaaaagtgcatccatagttggcacccagagggtatggtggccttggagaccaggctgaagggacattatgtttagctgcttagatgggcctagtctagttctcagggaagtctctgccgctgatgtccccctccctgtcttcctgcagtgccgcaaggtgtgtggcctgaatgtctctgaccgctgtgacttcatccggaccaaccctgactgccacagtgatggggggtacctggactacctggaaggcatcttctgccacttccctyccagcctcctccctctggctgtcactctctacgtgaggccctgccctggggggctggtgagaggggctggtgtctccagctggacttgactctcccttcctcgcccgctccccacccaggtttcctggctgctctacctgtttctgattctgggagtcaccgcagccaagttgtgagtttggctctgggctccggtctggcttatcaatggg

SEQ ID NO: 72989 - DNA, 526 bp, Homo sapiens
tcaccatgtaagattaattaaaaaaagaaaaaaagaccattcacactaggctgctttgcagaccaatgtatcaaggatgacgttccaggctggactttaggtctctgagtagtttgcaagttggttagattttttttttttttttttttgagacagagtcttgctctgtcacccaggctggagtgcagtggcacgatctcggctcactgcaagctccgcctcctgggatcatgccattctcctgcctcagtctcccgagtagctgggaccacaggcgcccgccaccaygcccggctaattttttgtatttttagtagagacagggtttcaccttgttagccaggatggtcttgatctcctgacctcgtgatccacctgcctcggcctcccaagtgctgggattacaggcgtgagccaccgcgcccttttttttttttttttattctatagaaactctactcacttcctaccagtaacatttttaaatcacggttttgaattaagtacaattcaattgaaaaatcac

SEQ ID NO: 72990 - DNA, 526 bp, Homo sapiens
tcaccatgtaagattaattaaaaaaagaaaaaaagaccattcacactaggctgctttgcagaccaatgtatcaaggatgacgttccaggctggactttaggtctctgagtagtttgcaagttggttagattttttttttttttttttttgagacagagtcttgctctgtcacccaggctggagtgcagtggcacgatctcggctcactgcaagctccgcctcctgggatcatgccattctcctgcctcagtctcccgagtagctgggaccacaggcgcccgccaccacgcccggctaattttttgtatttttagtagagacagggtttcaccttgttagccaggatggtcttgatctcctgacctcgtgatccacctgcctcggcctcccaagtgctgggattacaggygtgagccaccgcgcccttttttttttttttttattctatagaaactctactcacttcctaccagtaacatttttaaatcacggttttgaattaagtacaattcaattgaaaaatcac

SEQ ID NO: 72991 - DNA, 646 bp, Homo sapiens
gttgggggaggtgcatgcacagctcagtaggtttaaatacctctctcaagatcaccaagccagtaagtgtagcattgaacccacctggaacaaataatacttggtcgttttaagaatacctggaatttgttttagtcaggtataataaggcacacagacacagaaatgattgtcatgaaggaagaagtatattgtatccatagttccctagaagcagaaggcatgccataccatgaagggacacacagggaagtgccaaggcaagatgagtgggcagagagagagatctagagggcaggagcctttattgtgttttccatgggaagmaagagggaaagcaggccaaccaggcttagcgttggacagtcaatcatctcagtgggcactggggtagaggggctgccccgagttgtctgatacctggtcctggggtgattagggcaggtggtatgacctcgagtgtgagagcctgatgaagggaggtgattggaggcatgggctgtggattggttggtttgtgtatcagaaatgcacttgcaggccagttgcttactatctccaggaattagctaaccctaggagggggagtccctccaaggtcataaggcctcagacatcagagcaataatactacagaaaaatccaa

SEQ ID NO: 72992 - DNA, 1008 bp, Homo sapiens
ttgtttttaccactgtctgtgtccagctgatgaaaattactgaaattgaagtcttgtcttaatcaactaatattacaccataatttagttttagtcattgtttataagaatctttgaggcatccttttgaagacagtttagtcaactcagagtattttagggcctggctatagaatatagcctttaggatttataagttctgagtacagcagtgcagaaaatccagggaggtaatagtagctgcttggctggacaggctgtggattccataataattctccttcccttcctgtctacatccagttatttcccttcctaccagagtcagcccttcttgatcgtttcatcttcctcattctgcttctatgtaaagagccttgggaatgtcactgtttgccactcttcaaagtagcaatgccatcaaaatgtgatattccagtcatctgtgccyatataaacattggcttcacgttgcgtcagttaaggggttttggaccatgtaacatcggtgagcaagtattcttctatggtcattaattaaatcattgtttatagtctcagattgttatagtatggaggcagcataacatttttcatctcaagtgtcatgaggtccagagggcccccttacatattttcaccctgactcagccaagttctgcagtgaaatgaagcattagcattcagggaccagagcagacccaaggagcgtcgaaggaggcagaactaacgcactgggcctgaccacagaatgaccctgggagggagcaagaatcatgagggctctcacgttgtccctgagttagtggtcaaggacctgctatcagtgcaggacttcttccttgggagtctggtagccatggagacagttcttagctagcagatctcagacactttcctctggaaatgaatgtctggggacattcgtaccccttgcaatagttctctgcctcctccagtctaccagcaaaatccagggaggcctggagcttgtgagtttatttcatt

SEQ ID NO: 72993 - DNA, 628 bp, Homo sapiens
gagaggtgaacccaggcagcaacactcagaactcggtgctcctgatactaaccaggtcatttggtggtctgcagagacccctaactggagggaagtattgttcttgaccctgtgatatgtagaattcccagtcttcatagaggttactgtcttacatatctgagagcattcaatcctagctttgtaggcattttagaaaatacttctgccagcatccaaggaagaaggttgsggttcaaatctgttaaactcataggtcaagtgttttctaaactgcagaacaccatgaaaatttgatttttatataatcacaatacccccaggcccataaaatctgtgacttcactgaagtgatgctgctgttcacccaatctcaaaaataattcctttcaaatgtgtctttcttgaaccaaaccctggggttaactctcctattgacccatgggtgaaggtgattaaccctcaaatttgtcaactctgtgtaaatacaaacgtaactggcttctaatgctaagtaaataaaagaggatagacgtacacttttcagtgtgtgatactaaggaaagcctaatcaagagaaaagaaagaaatctctggcaccatctcaaagagggacccctgtttccag

SEQ ID NO: 72994 - DNA, 1455 bp, Homo sapiens
aaagtaagccttattgaatgaggaataccatatttattaaccatatcaacattctaaataatggcacatgtagtatgtcttccattgggtttcttagaggtggagtctgagacggaagtctcaggataacttcaagggggttactgagggacagcttgcyagagaaaatccagtaagaaagagggaagcagatcagggcaaattcggaggccaaggggagttgtggttcagctgaagtctagtcttagcctgatatggactggatttgtgtccccacccaaatctcctgtcaactgtgatccccagtgttggaaaaggggcctagcggaaggtgattggatcatgggggtggatgtccctcttgctattctcctgatagtgagttctcacaagatctggttgtttaaaagtgtgtagcacctccccctgctttctcttcctccccctccagccatggaaggcgtgactccttcctcttcgccttctgccatgattgtaagtttcctgaggccttcccagccatgcttcctctacagtctgcagaactgtgagtcaattaaacctcttttctttataaactacccagtctcaggtagtttttttatagcaatgcaagaactaactaatacatctgatcttgtggggagctcaggaacactgttcccctaacccctctaggtaagggccctggcctttcatacctggcattagtcagtcgttggaaactgcctccccacagcatcaagaacacaattttttagggaaaagaacagttgtgagctgttagcagccaacattcccagcaagttgggaaatgggtgcaccagcccagtaaaggattctacaccagacaccaagagtgtctactatattatgcataaataaattatcatgatgacttattctcatgtcaacatgccatgtaagcctgaagtccccattggctattttatgtccttgccttgggagtcatacagcattacttctgctgtagtcataagcctacctggactcaaggagtggggacctaggcccccagttcttgatgagaagaatcagagtcacattgtaaaatagcatgtagactaagatacattgttgaggctgtatttggaaaatagaatctcccataatatgtaattggataatccttgtttttttaactggagagtataatttgatatgtcaattgatatgatattttaatctttacatttgatatgactactgtttagatttattgccagcatttctatgttgagtttgtttaaactgaattgtttctctcttcttttttctgtttctcttctgccttttagtaaatcaaccacattttgtttatttaaactccaccactgtttggaagttaaaaattatctcaccatctcagtagtcatcccttaaattttgaacacccacatttgactgacagtctaaaggtatcaatatttctat

SEQ ID NO: 72995 - DNA, 688 bp, Homo sapiens
tcatttgtgtagtcaagagttctgatgcttgagaattggaagtttgaggacccataggtttagtgataatggggttctcagttattttcatcaatgtgctgtctttyagtaactcgaaacatcacacatgcatatgatgtgttcctaagaaatttgaggtcaggagtttgcaaaaatgccgccggaatgggagtgggtggatgcatgtaagacttgcctgagtcagttgtagaacatgggtcatgcttgaaggctaaagctattgttctggctttttctgtaacaggttaagagctaactagagaccccttccaagccactcaaaagaccagtgtgccctgtagcccacgcagttttatcaagtccccagggatgtcttactgtcttatggtgctgactagtccatcatgtcacttggttcaagggaaggaaaatcttggatgtaaaaagaatttcacgtagaatattttctacatgaatatattccattattctgaaggttttgctaatcagtacccaaagggccagctagaggttcccactcattacaaaaagtctgcatttacattgggagcagcagtgtcaaacctaggatgagtgcttcactgacattcagcaccaggtccattgacacaagcaacagtggctgtgaagaggtattcacccatccaacaggggtagggaatct

SEQ ID NO: 72996 - DNA, 688 bp, Homo sapiens
tcatttgtgtagtcaagagttctgatgcttgagaattggaagtttgaggacccataggtttagtgataatggggttctcagttattttcatcaatgtgctgtctttcagtaactcgaaacatcacacatgcatatgatgtgttcctaagaaatttgaggtcaggagtttgcaaaaatgccgccggaatgggagtgggtggatgcakgtaagacttgcctgagtcagttgtagaacatgggtcatgcttgaaggctaaagctattgttctggctttttctgtaacaggttaagagctaactagagaccccttccaagccactcaaaagaccagtgtgccctgtagcccacgcagttttatcaagtccccagggatgtcttactgtcttatggtgctgactagtccatcatgtcacttggttcaagggaaggaaaatcttggatgtaaaaagaatttcacgtagaatattttctacatgaatatattccattattctgaaggttttgctaatcagtacccaaagggccagctagaggttcccactcattacaaaaagtctgcatttacattgggagcagcagtgtcaaacctaggatgagtgcttcactgacattcagcaccaggtccattgacacaagcaacagtggctgtgaagaggtattcacccatccaacaggggtagggaatct

SEQ ID NO: 72997 - DNA, 706 bp, Homo sapiens
atctaggcctgtagggtcaacaggagtttgactaggtttttagagtcagtttctccgtaaccagtctcaggatggacacttagtacaactgtgatgtggttgccaccatacctgatgccayagggcaaagggagagcctagacagaagatcagacaatgccgaagcccgattaaggctggctcagttttggaaatcgaagctggccaaacacccagctcatccatatgagctatgagagtagcatttcactagatgcctttatctagctctgatcttgaacacatttaatagctgctgttctttggccaggaattctctccagtgccaagtcatagattcttctttagccatcagaacctgagccaccgagcccacgatgcttatcaagagtacaggaaggaaatctttagacagccttttgtaagtatgaactggattctggaattaaatttctaggttgtaagccccatcaatatcagaatctagcaaaataggaaaaagaatcaaggatctcacttatgtagtagccataaagcaggggaagcaaccatgacaaagggacattgttcagcttcatgatatggctattttagcatcctcagctgtgggacaccctggcatgcacctctaggcaggatgccaggagctacccgtgacctccatgggattcctgccaagaagggttctatccacctcttagaagga

SEQ ID NO: 72998 - DNA, 706 bp, Homo sapiens
atctaggcctgtagggtcaacaggagtttgactaggtttttagagtcagtttctccgtaaccagtctcaggatggacacttagtacaactgtgatgtggttgccaccatacctgatgccacagggcaaagggagagcctagacagaagatcagacaatgccgaagcccgattaaggctggctcagttttggaaatcgaagctggccaaacacccagctcatccatatgagctatgagagtagcatttcactagatgcctttatctagctctgatcttgaacacatttaatagctgctgttctttggccaggaattctctccagtgccaagtcatagattcttctttagccatcagaacctgagccaccgagcccacgatgcttatcaagagtacaggaaggaaatctttagacagccttttgtaagtatgaactggattctggaattaaatttctaggttgtaagccccatcaatatcagaatctagcaaaataggaaaaagaatcaaggatctcacttatgtagtagccataaagcaggggaagcaaccatgacaaagggacattgttcagcttcatgatatggctattttagcatccycagctgtgggacaccctggcatgcacctctaggcaggatgccaggagctacccgtgacctccatgggattcctgccaagaagggttctatccacctcttagaagga

SEQ ID NO: 72999 - DNA, 706 bp, Homo sapiens
atctaggcctgtagggtcaacaggagtttgactaggtttttagagtcagtttctccgtaaccagtctcaggatggacacttagtacaactgtgatgtggttgccaccatacctgatgccacagggcaaagggagagcctagacagaagatcagacaatgccgaagcccgattaaggctggctcagttttggaaatcgaagctggccaaacacccagctcatccatatgagctatgagagtagcatttcactagatgcctttatctagctctgatcttgaacacatttaatagctgctgttctttggccaggaattctctccagtgccaagtcatagattcttctttagccatcagaacctgagccaccgagcccacgatgcttatcaagagtacaggaaggaaatctttagacagccttttgtaagtatgaactggattctggaattaaatttctaggttgtaagccccatcaatatcagaatctagcaaaataggaaaaagaatcaaggatctcacttatgtagtagccataaagcaggggaagcaaccatgacaaagggacattgttcagcttcatgatatggctattttagcatcctcagctgtgggacaccctggcatgcacctctaggcaggatgccaggagctacccgtgacctccatggrattcctgccaagaagggttctatccacctcttagaagga

SEQ ID NO: 73000 - DNA, 1673 bp, Homo sapiens
gggccaggctcaggcttctctctgctgcaaaccttgtgaacttcccaaggctccacctcagtgggcaggctaattggagtttctccagggaccccttcccacctggctgtctcagtattagtaggaggggctagagatgtaaaaaagaagaagagaaagcaggcacatttagaagattattaagagaggcaaatgggagatttgggggaagttttaaggggagagttacacattaccctagtagcaatgaaaaagaattacggaagtcttagtattctgaacctttaagacaattttgcrttagtgtagaaccagaaagaataaaggttgatatttttatatgagccaaaatccaaacgatatttactgcttaagatcatccaatcttacccatctttccccctgtctagaatttaagctgaagctccctgttattcttgtagatgtatattaaacggacgaaagttggcagggacttttaaagtattataatttatattcagtaaaattcactcttttggtgtagatttctatggtaaacatatatactcatgttactaccataaaagtcaagatatagagccatacccacccactcgaaattccctcatgtccctttgtagaatgtctcttcctctaccgctagcccttggcaaccactcatctgttttctgatcttgcacttttgcttttccagaatgtcacatcgatggaatcttgcagtaggtaaatgtagaatctgacttcattcacttagcaataatgcattttcaagtcatctgtattatagtatgtatcatttgtcaaagaaaaacaagtctggacttagggagaaactttattcaaaaggactgttgcaataggaataacactgatttcaaaaatatgttaggccaggtgcggtggcttatgcctataatcccagcaatttgggaggctgaggcgggtggatcacgaggtcaggagattgagaccatcctggctaacctgctgaaaccccgtctctactaaacaaaatacaaaaaattagccgggcatggtggtgggcatctgtggtcccagctactcgggaggctgaggcaggagaatggcatgaacccgggaggtggaagcttacagtgggccgagatcatgctcctgcactccagcgtgggcgacagagactctgtcttaaaaaaaaaaaaaaagttagtggtgtgggagagagcaggcaaagtctaggcgtttcagcaggaaatggtgcaatgtggtctgtggtcaggttaaggcaggatgttttttgcaagtctgtgctttgaggcatttaggcaaacttgcgggcaaacacgtgtagggcctgtggggaggagaaaaacctgacaaaagtttggccagctaacacacagtaagaaattgacaattgtgaatgtgtgatcgagttttttcttttattagggctgaggaatagttgtttacctcttcagcagctgaagcatatttgagttgttgctagttttttgtgataatgaataaacctggtgtaaaatattccttacaggtttttgggtaaacacaagttttcacttcccttgtttaaatacctagggataggatggctagggcatgtggtgaatttacatttaccataacaaactgcttaactgttttccaaaatgcccataacattttgcatt

SEQ ID NO: 73001 - DNA, 661 bp, Homo sapiens
tcccattccaggggcatgagatgtgttttcatgtctaacatttgttgagggtgtgttctctgcctggaaccctgtsagacattttagatatatttccccatgtaatgctcatggtgagctggtaagatgagatgtattgttctcattctattaagaagtaaggtaattatataatttgtcatctagattaagacatatagggcattaaaagtgatcattaatacattggtggaatgacaagcataaactgagaatttcccaatgaaactgggatttatgctcactttaaataaagtaatttaggatcagagacgttaaatgacttaaactgagaactgggaattagtctcactccagaatttatgctgcttaattataccacgctgccagtgaaaaagagaagggatagggaagagagactccagagtaatatgaaagaaaggggctcatggtgttagtttctgttttattatagaatttcctgaaaagatacaaaggcccttctgaccattggattggccttagaagagaatcatcccatcgcatttggaaatggacagacaacatggaatataataacatgtatgttttgagacttctcatcttttgctgtgtttatgtatggttatgtgtgtgagttgtgtttatgagataagaaatg

SEQ ID NO: 73002 - DNA, 661 bp, Homo sapiens
tcccattccaggggcatgagatgtgttttcatgtctaacatttgttgagggtgtgttctctgcctggaaccctgtgagacattttagatatatttccccatgtaatrctcatggtgagctggtaagatgagatgtattgttctcattctattaagaagtaaggtaattatataatttgtcatctagattaagacatatagggcattaaaagtgatcattaatacattggtggaatgacaagcataaactgagaatttcccaatgaaactgggatttatgctcactttaaataaagtaatttaggatcagagacgttaaatgacttaaactgagaactgggaattagtctcactccagaatttatgctgcttaattataccacgctgccagtgaaaaagagaagggatagggaagagagactccagagtaatatgaaagaaaggggctcatggtgttagtttctgttttattatagaatttcctgaaaagatacaaaggcccttctgaccattggattggccttagaagagaatcatcccatcgcatttggaaatggacagacaacatggaatataataacatgtatgttttgagacttctcatcttttgctgtgtttatgtatggttatgtgtgtgagttgtgtttatgagataagaaatg

SEQ ID NO: 73003 - DNA, 772 bp, Homo sapiens
tattatctgttgaaggaagtattttaagctttttgacatctttggcaggtttctctagaatccaaatcctaaattaagccttttggcctaaaaatgactgggatttttccaggtggaccccctagatatgctcctccaaaggcttgtctttcttgtagagttattaaatgattaggcttatttggcaaatactgctagaagcattgtcaaataagaaatggtgttttacctttctttaagctgtgtttgtgtaagttcatcatttatagaaatgtgaaattttatgagattcctaagatactgacatgctgagatacctgtaataattgcaatttttatgttggatgattgtatgccacagaagcacttaaatttcctggttaattggtaacgttaatcagatctttacctatggctgttctgggtttttgtcattcacagttattattttaatttcttctttggaagcgttcgcaatcagctatagtccaaaattgctaattaagatcaagcaaaacaaaattaattacgtaaaattaatttataaggatgtttttatgacgtaaatgttttattttccagagccaaggaaattttctgtcacaagctatctaccgtttgcaataatttgataaataatcctttgtgaacaaatatggaagcatttgctttttctctctacttgattccttcaaaattcrgaaactatttgtggatatttttagttttatttatacaacttcagtaaaaatccactctctctttataagca

SEQ ID NO: 73004 - DNA, 934 bp, Homo sapiens
ttctaacaactaaggagagggaacaatgagagaaagatgtaagacaatgagataaggttaagtttaggattgaaaataacagttaatttcactaaaaaaaaatctatacaaactctaaagtgttactcagatacaagataccatcattattacataggtagaaaacctatcatggaagctcttaagagagaaaaggtagaaaatagtatgtaaaggacatttacaaatcaaaaaagtaacaaaggttgagtagaaacttagtagggcattctaatggaattatgttacattggatgcactggaaatatatatatatatagctttatatgatgctttagtaagtgaaaaaaatgacttttgccacagttagggaatatcarggttttataacttaggacttaaaagtttggagttttctcctcccaacttaaaaggtaatcaatttggagaaaaggtaattcagaggcagaaaaagatgaactctaaatgttgttaaatgacttcatttatttcttcattcattgggtattttgagcattttataccaaatgctttaaactgtttgtcggatagttccaacatctctgtcatgtcctccttggcttgtgttttctttccccatggaagttgacattttcgtggttcttcatatactgtgtaattttggattgtaatttgaacattttgaacaaatatttagttagactggatcttatttaaattttggagtatattgatactattgttttagcaagcaatcaccctggtgagatgaagacaatctgtgggatctggttccaatgtcagttccattctgaaagcctttgtagtgctattcagacatgtgcatcaaccaggggtgaaattgggaactgtgcaatgctctactcattagttcaggtcttagcatctttagtgtgccaattagaaccat

SEQ ID NO: 73005 - DNA, 934 bp, Homo sapiens
ttctaacaactaaggagagggaacaatgagagaaagatgtaagacaatgagataaggttaagtttaggattgaaaataacagttaatttcactaaaaaaaaatctatacaaactctaaagtgttactcagatacaagataccatcattattacataggtagaaaacctatcatggaagctcttaagagagaaaaggtagaaaatagtatgtaaaggacatttacaaatcaaaaaagtaacaaaggttgagtagaaacttagtagggcattctaatggaattatgttacattggatgcactggaaatatatatatatatagctttatatgatgctttagtaagtgaaaaaaatgacttttgccacagttagggaatatcaaggttttataacttaggacttaaaagtttggagttttctcctcccaacttaaaaggtaatcaatttggagaaaaggtaattcagaggcagaaaaagatgaactctaaatgttgttaaatgacttcatttatttcttcattcattgggtattttgagcattttataccaaatgctttaaactgtttgtcggatagttccaacatctctgtcatgtcctccttggcttgtgttttctttccccatggaagttgacattttcgtggttcttcatatactgtgtaattttggattgtaatttgaacattttgaacaaatatttagttagactggatcttatttaaattttggagtatattgatactattgttttagcaagcaatcaccctggtgagatgaagacaatctgtgggatctggttccaatgtcagttccattctgaaagcctttgtagtgctattcagacatgtgcatcaaccaggggtgaaattgggaactgtgcaatgctctactcattagttcaggtcttagcatctttagtgtgccaattaraaccat

SEQ ID NO: 73006 - DNA, 654 bp, Homo sapiens
aggggtcacagaggcaaaagtggaagctgacccagctgatgcctagactggagtccacccccagccctctcggccccacattagggctcattagcacttcttctaacttaccaagaaattcaatgtcctacaaaataaccagccgagccccaagggagccagaaggcctattcatcacagctggggtttccaaggacctcactgtctgtcccatggatttcatcctgtgaagaagctggcccaccatgggaagagagactaattggtatctccatagcttggactattttttccactggatctgcagtttctgggtaaacagkcatcaaatcagcattcagcatgagctgaaggaaagtttgcacacttgccatgtggcctaaattaagtgagtggtgcagtcagtaaagcatgtgtgctaaaaaataaacatttaagatgtcagggttgaagatactcttgtagccttttaaggaaggagatgtcaatttcttcttttaaaattccaaataaaaatgtcactaacaatatttctgatatcacttcacaagtgtcagcccatgcaagcaatagtgtgtgtgcatacatacaagggtgtgtgtgtgagagagagagaatgaaaaggcatgtacatacacatgcacaatagatatg

SEQ ID NO: 73007 - DNA, 636 bp, Homo sapiens
tttacttcttgaatgatctgttaattggttaatagacacaacttctggcccctcttagctagcactgcctaggaccttgtgacacatttgcttgcaaatatgctttctagtggtagtacattttaatttatagttttactcctcatagggcattataaaagtaggctttaccctcarttgtctagatgttgaaaatgaagttcagaaaaattacacttttcacacctgtaatcccagcactttgggaggcaggtggatcacttgaagtcaggagttccagaccagcctggccaacatggtgaaaccctgtctctactaaaaatacaaaaattagctgggcatggtggtgggagcctgtaaattccagctactcaggaggctgaggcaggagaatcacttgaacccagcaggcggaggttgcaatgagccaagattgtgacactgcactccagcctgggcaacaaagcaaggctctatctcaaaaaaaacaaaaaaaaaaaaccagtttgttgcatttcatattcactgattggctgcctgggagcactttttaaaaatgcctgtatttctcttccagggctctcttccatgttaatctacgtgaaacattatttagacgctgctgttgttctgaca

SEQ ID NO: 73008 - DNA, 636 bp, Homo sapiens
tttacttcttgaatgatctgttaattggttaatagacacaacttctggcccctcttagctagcactgcctaggaccttgtgacacatttgcttgcaaatatgctttctagtggtagtacattttaatttatagttttactcctcatagggcattataaaagtaggctttaccctcagttgtctagatgttgaaaatgaagttcagaaaaattacacttttcacacctgtaatcccagcactttgggaggcaggtggatcacttgaagtcaggagttccagaccagcctggccaacatggtgaaaccctgtctctactaaaaatacaaaaattagctgggcatggtggtgggagcctgtaaattccagctactcaggaggctgaggcaggagaatcacttgaacccagcaggcggaggttgcaatgagccaagattgtgacactgcactccagcctgggcaacaaagcaaggctctatctcaaaaaaaamaaaaaaaaaaaaccagtttgttgcatttcatattcactgattggctgcctgggagcactttttaaaaatgcctgtatttctcttccagggctctcttccatgttaatctacgtgaaacattatttagacgctgctgttgttctgaca

SEQ ID NO: 73009 - DNA, 671 bp, Homo sapiens
ttgagtggaacaggacattttgaatttttggaaacagaacttgagtggaaattccaccatgtggccttcagaaatagaaaacccagagccagaaggctagatcccagtgcagacttccagctcgaggaacaaaaaaacctccaattgactttttgtgaagctgacatttttgacatttacagcaaggcaaagacaaccaaccagagcctggggtgggtactgtagagtattagaccaggcaaagtgaaaagsggtcagtggggttaaggtcatgccctcagctgacaaggaagctgcatgagccctgccatttctcctgcaagtgccctgaaatttttcttctgctaattcttattacataggggggaaaatatgatgggttcctggagaacccatcttgggagtgagtacctgcaccccactctgtggctgttcctggtgtgaccggactctgagatgagcctgcaaacccctgccccagccacctgcaccactcacctccacggcagcagggtgggggggtggtcctggcagccacggggccagcactcgctggccctcatattcacagtcccagagccccagttcttatcaacaaatccatgatcctatggcctgtcttcattgcccataagccacccaaatatcctgaacatcccaccatagcgaca

SEQ ID NO: 73010 - DNA, 1361 bp, Homo sapiens
tgagcctgtaatcccagcactttgggaggccgagaagggcagatcacttgaggccaggagtttgagaccagcctggccaacatggcgaaaccctgtctccactaaaagtatacaaattagccaggcgtggtagcgcacgcctgtaattccagctactagggagactaaggtgggagaattgcttgaacccagggggcggaggttgcagtgaaccgaaattaagccactgtactccagcctgggtgacacagcaagacttggtctcaaaaataataataataaaatttaaaaaatgtaaacagctcccccttgccaaggttctaatccctcagctagctgccaaggtatcaccttttttcccttgtgggcaggattattctggaggtcctctgcccacccgcttcctgaacatcctccagggtaaatcgtctctgtagcttcacacatggtatgaggtattctacctttatctagagcaggtacacacgaaaaaggtattctacgtttctctaagatacctgctgcgcccctttgcctgtatgaaccttgtccgtctttcaagggcaagactcagatccccttcctcacccacccatgaagcctttgctgacctattccccccccccactccgtgtccccctaactctttttttttttttttaagacagggtcttgctctgtcacctaggccggagtgcagtggcatgatctcggctcattgcaacctccatctcctgggctcaagggatcctcccacctaagcctttggagtagctggaaccacaggtgtctaccaccaagcccggctaatttttaaatttttttgtagagatggggtttcgccatgttgcccaggctgatctcgaactcctgagctcartctgcctgcctcaacctcccagagtgctggaattacaggcgtgagccaccatacctggccatttctctcttttatctcttctcaccagacaactaaaagtctgaattgtgtgcattaccagtcacagaggacactgtcttagacttccactggtggtgtcactcacctgtttccacatcagtaaaagcagagaatgcctgtcctaatgacaaatgtgactgtgtataggaagacaaaggtgtatagaccaaccaagggtttgttcctctctctccctaactagcacatgctgaaaacagtcaataaataactgatagtttgtccggcccagcctgatgatgaactaaaaggtgggcatccattctcagagtgctgagcagtagtgcccggcctccgcacaccttcagggaacaatggggttttgatgctgggtctgtatcaccagaggagtggaatgagaaagccagcaaaatcactttca

SEQ ID NO: 73011 - DNA, 574 bp, Homo sapiens
tgacctcgtgatccacctgcgtcagcctcccaaagtgctgggattataggggtgagccaccgcgcccagcccaacttttccttttttgaatctatgtcggtttacatcttaatcctttcattatgccattctcccaaaaagcttcccttctctgggatactgggtgatatccaataatacctggcatagagtaggtgccaaaaagaaaaagtttttgaaacagcaatcaatagcaatatgaatgtattaccaggtgccaggtaccacgctaattgctttacatacattagtcacctataaccctcccatcttacacaggagctaattactagtattatccccattttacagatgaggaaactgaggtgctcagttcatttgtccaaagtcacataactagtaagatgtagggatgggatatgagcctagatgattggattttgaagacygctcttttgaccaccatagtaaatatgtaattttcagagccatttaagcctacagtgactcctgtggaataatgaaggaggcaggcacttctgtattccaggactttggggatttcagaatgggt

SEQ ID NO: 73012 - DNA, 1165 bp, Homo sapiens
tgcatctgtagtcttagctacttgggaggctgagttgagaggattgtttgagcccgggaagtggaggctgcagtgagacaagattgtgccgtgcactccagcatgggcaacagagggagaccccatctcaaaaaaaaaaaaaaaaaaaaaaawtttttttttttaaaagagttagcctttcttcttaagtatttatattagtatgaactcatgggtatttattttatcctgttactctcattatttatcttgctgttcaaattgtctcatcctcttttaaaatatttcaacccatctgtttcctgttaagctgcttttcctaatgagatgtggcccacggctaagtcactccctcagtgtcaccccccagccatagcacgtcagacactccctggtatgcagggcaggtggttgggagacctctgagcctttgtgtgagcaactaggtttcccgtttccctgaaactcactgaggcatcttcccaacaagggctgggctttttcctggaatgggcaggttgcagtcggaggagtcagtcctaattccacaggcaaagagttccaggaagggctgagcctggccaggtagccccagatcccccacccccacccctgctctccatcaggcatcctccctccagcaccaccaagctcatgctctgattgccccttcttgagtctggcagctcttgacagcctggtttttgatgggagagccctgggttggccctgcctcatcctctgtctcactgtttctttttcttttatttctctgtcttccttgggcaaaattcaccccattctggcttaactcatgagagagtcagtccagtccttctctagggccttaaaactttgaattcctaggctacaaacttgccctccaatttagaagcctggttagagcccacatttactcacttttatttgctgttatgccagaacctcagatcttcctaacatgctccattgacggcacaaaaggaaggaaatgatgctcctctcacctcttccacttcctctttctgtgctgtccccagcctggcccccgctggccactcagactgtgttatctcctcttttgtacatctgcccaaggcacccttcagctaaggggttatgtataatcctttccccaactgccagtcccttgccttgctacaaa

SEQ ID NO: 73013 - DNA, 678 bp, Homo sapiens
caccttcccacgaggcagcaggagaagcaggagaaggggacctcccagctggccctccagctccccaggccctggggctcccaggccacacatgctgaggtatgcctcttacctgaattgtccccatgatctcctttttggctccttggtcctggaattccaggagcccctgggtttcctgggggccccaacttcccaggagggccctgcaaacctctgagcccttgatctgttgcaagacaaagggaagatgacccagtggccagcagtcattttttttccaaaaagctcaatactccattcatgttcacccccggaacagccagcaagctaatggtgacccaaagaagaaagatgccccatcctgcatcctaggggagggcctgcaccaaggccagctctctaaccaggtgggacacccctctgtagggacaaccacacatccccaattcctgtgtggaaatatgggatcccagagagtcagcgagcagctttgttttrgaggcaatggcattttacagggattgttctgagtgtagcatgggtcctgatgaaaggggagcctccccaagtctgtactcaaaccctcatttggaggagacacctgctggaggtggagattcagaaagacacagaccaaacctggatctcccttttccccactgggtccgtctcacc

SEQ ID NO: 73014 - DNA, 752 bp, Homo sapiens
ctgagttccaggaagcaacttgctcatgagtagggtgtgaaccccaggcagctccygtgatactggcattcacacagccccctaggagactcagtccacggtgctgcaatccacattgccccagaacactcctggtcacagctttgtccttcctcctcttctccccatgctccataaaatcagtccatctgctgggtccaaatgtcagaattttacaagagataaccaaaacagtgcatttggtgcagcacaccaacatggcatatgtatacatatgtaacaaacctgcacgttgtgcacatgtaccctaaaacttaaagcataataataataaaaatagaactagagaagcaagagcaaacacattcaaaagctagcagaagtcaagaaacaactaagatcagagcagaaatgaaggagatagagacacaaaaaacccttcaaaaaatcaatgaatccaggagctggttttttgaaaagatcaacaaaatagatagaccactagcaagactaataaagaagaaaagagagaagaatcaaataaatgcaataaaaattataaaagggatatcaccaccgatctcacagaaatacaaactaccatcagagaatactataaacacctctacgcaaataaactagaaaatctaaaagaaatagataaattcttggacacatacaccctcccaagactaaaccagtaagaagttgaatctctgaatcgaccaataacaggctctgaaattgaggca

SEQ ID NO: 73015 - DNA, 752 bp, Homo sapiens
ctgagttccaggaagcaacttgctcatgagtagggtgtgaaccccaggcagctcctgtgatactggcattcacacagccccctaggagactcagtccacggtgctgcaatccacattgccccagaacactcctgstcacagctttgtccttcctcctcttctccccatgctccataaaatcagtccatctgctgggtccaaatgtcagaattttacaagagataaccaaaacagtgcatttggtgcagcacaccaacatggcatatgtatacatatgtaacaaacctgcacgttgtgcacatgtaccctaaaacttaaagcataataataataaaaatagaactagagaagcaagagcaaacacattcaaaagctagcagaagtcaagaaacaactaagatcagagcagaaatgaaggagatagagacacaaaaaacccttcaaaaaatcaatgaatccaggagctggttttttgaaaagatcaacaaaatagatagaccactagcaagactaataaagaagaaaagagagaagaatcaaataaatgcaataaaaattataaaagggatatcaccaccgatctcacagaaatacaaactaccatcagagaatactataaacacctctacgcaaataaactagaaaatctaaaagaaatagataaattcttggacacatacaccctcccaagactaaaccagtaagaagttgaatctctgaatcgaccaataacaggctctgaaattgaggca

SEQ ID NO: 73016 - DNA, 729 bp, Homo sapiens
tgtcgcctttattcgctttctctttatttttcttttcttctttcttacattgtatttctgtttggaaaagaccatgtacaaacagagtaatatgtggatccatgcctatccatcttagtataatcatgtattcattgtgctttgttgtatacatttggtacgtattctaaatatggacatatgctatgtatcataatgtacataaccatttctctattgatagactgttacagtattttcaatttctgataacagcaaaaatgatccttcagttgctatcatcartatttatttgtacatatcaatgatcattttagaggattaaaaacagaagaagaatttttagggaaaccatgtatagttaaaatgtgtatatacttttcacattttcatagataaagagcatccctatttttttccccactaacaacaagacaagatggctggagaaaaataaatcaccaaatatcataaagatacttgcatgttttataagtaattaataactactttctcataacagtaaaaactattttgttttgtatgagaggatttttctctctaagttttaaaaaatcattacatacaaatatatcacatcaaacccaaaagccattgctagcacactggttcctgtcttaatattaagtatgagataaaaggcctttatcttccagaaagttgttcataacatgccaaatatgtgaacacccaatagtcaaaggacat

SEQ ID NO: 73017 - DNA, 1200 bp, Homo sapiens
ccttgaagggtccaggctgtgggccctattcatctcttttcattctcaggtcgctgatttcttggagcctgaaaagaaggtaactgggcatatgagggacagatggagtgagtcagtgagtgagtgacctcatccttcctyctaacagcctgggagggacagggcaggttttctgcagagcatggaagattcagctgaaatcagagaggtgaagccagtttcccagggtaacatagtgaggcactgaaagaaaggagactgcactggagcccaggtccctgggctccccagagctccttactcttcctcctcctcagcagtcttgagaccccacaacctccagccggaggcctgaagcatgaggccatgccaggtgccaggtgatgcttggaattttcccgggtgcttcgggtcttcccagcactctggtctcgcccgccctgcctctcgggctctgcccagcttcctgagtcctgacagagcacagtgggggagatgttggcagaggtggcagatgggctcacggccatccctccggcaggagcagcgactggacccagagccatgtggctgtgccctctggccctcaccctcatcttgatggcagcctctggtgctgcgtgcgaagtgaaggacgtttgtgttggaagccctggtatccccggcactcctggatcccacggcctgccaggcagggacgggagagatggtgtcaaaggagaccctggccctccaggtactgtgctgcagaccccaccctcagctgagggacacagaccccttttcaggaggcccatctgtccaggcccctaggctgtgggccatagtgagctgggggctatagtaagctgggtgggacttcagtctgcaggggtggtgggttcctggggcccttatgatggcgcatcctggagagtctgtcctcatagtgcccacggagtgatagctgagccagccccggtgataatgggcatcgagtctcactagctccaaccagttgtgggtgacagatcctacacatccatgtctcttttctctgcaggccccatgggtccgcctggagaaacaccatgtcctcctgggaataatgggctgcctggagcccctggtgtccctggagagcgtggagagaagggggaggctggcgagagaggccctccaggtgagcagggcggggcaggtgggcagtggaaacatggg

SEQ ID NO: 73018 - DNA, 1200 bp, Homo sapiens
ccttgaagggtccaggctgtgggccctattcatctcttttcattctcaggtcgctgatttcttggagcctgaaaagaaggtaactgggcatatgagggacagatggagtgagtcagtgagtgagtgacctcatccttccttctaacagcctgggagggacagggcaggttttctgcagagcatggaagattcagctgaaatcagagaggtgaagccagtttcccagggtaacatagtgaggcactgaaagaaaggagactgcactggagcccaggtccctgggctccccagagctccttactcttcctcctcctcagcagycttgagaccccacaacctccagccggaggcctgaagcatgaggccatgccaggtgccaggtgatgcttggaattttcccgggtgcttcgggtcttcccagcactctggtctcgcccgccctgcctctcgggctctgcccagcttcctgagtcctgacagagcacagtgggggagatgttggcagaggtggcagatgggctcacggccatccctccggcaggagcagcgactggacccagagccatgtggctgtgccctctggccctcaccctcatcttgatggcagcctctggtgctgcgtgcgaagtgaaggacgtttgtgttggaagccctggtatccccggcactcctggatcccacggcctgccaggcagggacgggagagatggtgtcaaaggagaccctggccctccaggtactgtgctgcagaccccaccctcagctgagggacacagaccccttttcaggaggcccatctgtccaggcccctaggctgtgggccatagtgagctgggggctatagtaagctgggtgggacttcagtctgcaggggtggtgggttcctggggcccttatgatggcgcatcctggagagtctgtcctcatagtgcccacggagtgatagctgagccagccccggtgataatgggcatcgagtctcactagctccaaccagttgtgggtgacagatcctacacatccatgtctcttttctctgcaggccccatgggtccgcctggagaaacaccatgtcctcctgggaataatgggctgcctggagcccctggtgtccctggagagcgtggagagaagggggaggctggcgagagaggccctccaggtgagcagggcggggcaggtgggcagtggaaacatggg

SEQ ID NO: 73019 - DNA, 1200 bp, Homo sapiens
ccttgaagggtccaggctgtgggccctattcatctcttttcattctcaggtcgctgatttcttggagcctgaaaagaaggtaactgggcatatgagggacagatggagtgagtcagtgagtgagtgacctcatccttccttctaacagcctgggagggacagggcaggttttctgcagagcatggaagattcagctgaaatcagagaggtgaagccagtttcccagggtaacatagtgaggcactgaaagaaaggagactgcactggagcccaggtccctgggctccccagagctccttactcttcctcctcctcagcagtcttgagaccccacaacctccagccggaggcctgaagcatgaggccatgccaggtgccagrtgatgcttggaattttcccgggtgcttcgggtcttcccagcactctggtctcgcccgccctgcctctcgggctctgcccagcttcctgagtcctgacagagcacagtgggggagatgttggcagaggtggcagatgggctcacggccatccctccggcaggagcagcgactggacccagagccatgtggctgtgccctctggccctcaccctcatcttgatggcagcctctggtgctgcgtgcgaagtgaaggacgtttgtgttggaagccctggtatccccggcactcctggatcccacggcctgccaggcagggacgggagagatggtgtcaaaggagaccctggccctccaggtactgtgctgcagaccccaccctcagctgagggacacagaccccttttcaggaggcccatctgtccaggcccctaggctgtgggccatagtgagctgggggctatagtaagctgggtgggacttcagtctgcaggggtggtgggttcctggggcccttatgatggcgcatcctggagagtctgtcctcatagtgcccacggagtgatagctgagccagccccggtgataatgggcatcgagtctcactagctccaaccagttgtgggtgacagatcctacacatccatgtctcttttctctgcaggccccatgggtccgcctggagaaacaccatgtcctcctgggaataatgggctgcctggagcccctggtgtccctggagagcgtggagagaagggggaggctggcgagagaggccctccaggtgagcagggcggggcaggtgggcagtggaaacatggg

SEQ ID NO: 73020 - DNA, 1200 bp, Homo sapiens
ccttgaagggtccaggctgtgggccctattcatctcttttcattctcaggtcgctgatttcttggagcctgaaaagaaggtaactgggcatatgagggacagatggagtgagtcagtgagtgagtgacctcatccttccttctaacagcctgggagggacagggcaggttttctgcagagcatggaagattcagctgaaatcagagaggtgaagccagtttcccagggtaacatagtgaggcactgaaagaaaggagactgcactggagcccaggtccctgggctccccagagctccttactcttcctcctcctcagcagtcttgagaccccacaacctccagccggaggcctgaagcatgaggccatgccaggtgccaggtgatgcttggaattttcccgggtgcttcgggtcttcccagcactctggtctcgcccgccctgcctctcgggctctgcccagcttcctgagtcctgacagagcacagtgggggagatgttggcagaggtggcagatgggctcacggccatccctccrgcaggagcagcgactggacccagagccatgtggctgtgccctctggccctcaccctcatcttgatggcagcctctggtgctgcgtgcgaagtgaaggacgtttgtgttggaagccctggtatccccggcactcctggatcccacggcctgccaggcagggacgggagagatggtgtcaaaggagaccctggccctccaggtactgtgctgcagaccccaccctcagctgagggacacagaccccttttcaggaggcccatctgtccaggcccctaggctgtgggccatagtgagctgggggctatagtaagctgggtgggacttcagtctgcaggggtggtgggttcctggggcccttatgatggcgcatcctggagagtctgtcctcatagtgcccacggagtgatagctgagccagccccggtgataatgggcatcgagtctcactagctccaaccagttgtgggtgacagatcctacacatccatgtctcttttctctgcaggccccatgggtccgcctggagaaacaccatgtcctcctgggaataatgggctgcctggagcccctggtgtccctggagagcgtggagagaagggggaggctggcgagagaggccctccaggtgagcagggcggggcaggtgggcagtggaaacatggg

SEQ ID NO: 73021 - DNA, 1455 bp, Homo sapiens
aagaccctccaggggaggggaaggaaaatagcataaacacaggtggggaggcaggaacacatgtgcagggcgggaacacaccagcgcagaggaagccaaggtgcagtgggagatgaggcaggcaggtgaattccatgttccagctgaactagcggcgggccagcccacatgggctcattccttccactcctcagtgaagacaaagactgggtctcttcagtcttgtgctaccaggagcacagtcttagtgacagctccctgtgcattttaccatcatgtaaaatgctagccatagccattgttatgattgttgtctgcgttaagggctttctgactaccaggggctggcagggaacttggtttgcaaacattattgcatttaaccctcactgctccatggataagcatcactacaacaagaaaggtcagggtcagaagggtgaagcagcctgcccaggttcctcagacagtaaatggcacagttgagactgcctgggtgcagcgtctgcgtcaccccgcaagggtggscttgccaacagtgtgttcagttgaaggggtcttggtctcagcaggaaaccaagccctctgaccatctccttccctcaagaatctcccccagatggatccactggaaaacaaacccatccctggccactccagcctctgaatgcaggggatggggagaagtgagtgggaaagtttgaataaaatcctcagtccgtggggcggtagggagtgtggactctagatccaagcgctgccactttcctggagagaagcctgggaaagatccccaactactatgcccctctgtgttctaccctgtgaggcagggatcataagaaaagcaacaatcataactgcactttcctcttgaggttaggacagaggaggaaagtactttgaacagtgctgcacacagtaagagctttgctcatggagtggctttactttgctccctcccattcacccacaacttggcttttcaagtcctttgaaacacagtggggagcaggatgctgccttccctgtcctcttccctgctggggagggttcagctctctggtgcctctctgctctgctccaagaagcccagctggctgcaccagtggcctcacagctgtgccctatcttgtgacaaggcccggctcatggagtggggccagcttggccctgtagccagggagaaactggttggctcccaaggagtgctctgctctgaatgggacctggccaagtgggatagtgccctcagaatgccctcagtcacctagctggcctctcaggcaggtgacatgcatgctgacccccaaccccaggcccctcccaccccacagtacccaccaaagcccgcggaggcttttagttagcaaagacagggtggaaaaggggtagtgggggccaggagctcttgggctcaaaccaaagagaaggccagggttacaagggctttga

SEQ ID NO: 73022 - DNA, 555 bp, Homo sapiens
cccaccagcagtgtaaattgttcccgtttcaccacatccagatgaaaattaagtccacaatgagatgccaccttactcttgaagaatggccataattaaaaagtcaaaagagtcaataaattattacamccaaatctcttctcaggcttgatttctaatttaagtcaaacatgcacttaagaaaatgtaagtgttatggaagctgatgtaagacaactcatatccctggaagtggaaccagagacaatgatgaataactttaaagaaattgcttactagaaaggttgcacaataatatcatacttcccacctcagaggttcaagggtatttactacatctttatcagcattgactgtgaatgtgcaaaaaaagaagaggggtggccattttgatagtgaaaacagacatcttgctttcagtgtaatttactatacttcaatgactagtgaagttggaaggtttctaatatgtctattgacaattcttatgagttcttcagatttttatggggatagaagtagaaattagtattatttattccatcataaaaataa

SEQ ID NO: 73023 - DNA, 555 bp, Homo sapiens
cccaccagcagtgtaaattgttcccgtttcaccacatccagatgaaaattaagtccacaatgagatgccaccttactcttgaagaatggccataattaaaaagtcaaaagagtcaataaattattacaaccaaatctcttctcaggcttgatttctaatttaagtcaaacatgcacttaagaaaatgtaagtgttatggaagctgatgtaagacaactcatatccctggaagtggaaccagagacaatgatgaataactttaaagaaattgcttactagaaaggttgcacaatartatcatacttcccacctcagaggttcaagggtatttactacatctttatcagcattgactgtgaatgtgcaaaaaaagaagaggggtggccattttgatagtgaaaacagacatcttgctttcagtgtaatttactatacttcaatgactagtgaagttggaaggtttctaatatgtctattgacaattcttatgagttcttcagatttttatggggatagaagtagaaattagtattatttattccatcataaaaataa

SEQ ID NO: 73024 - DNA, 635 bp, Homo sapiens
ccaaagtgctgggattacaggtgtgagccaccgtacctggccagaatttctatttccactaggtggcgctattgtcttaggaataccatgtcttaccagcgaattagtagcaagtaacctcaccacgtggtggggaggtggtggtgtggtgggggaggtggcattggggggatggcgtggaggggtgggaatctctgttcctagaagattgcaaggacattttcctgagctatatccccagtgctacagcatttcctgatcttgcttaacaggattactcccttaggctgtaaaaattcctgcacattctacacacacagagagagtaagagaccacggatagaaagagaaagaaagtttggcgacagaatagcaggaagagagccttgagattaaaggacagatttgagtttgagatttgctccactctgtactcaccaatccgttgaatgaattcccggccaatgcaccaaaatgatatggctcygatgactggaggaacaccagagtccttggtctcatgatgaccgacatggacacaagtctggagtggttttaaggagcagagaatttaataggcaagaaagaggaaaggaagaagaaaacagctcccccatacagagacagagggaggg

SEQ ID NO: 73025 - DNA, 619 bp, Homo sapiens
agcagcaagggaaagggatgaagcggcctggagtgcatgttgcattagagggcagaagacctagattctttaggtcttggaaaactcacaaatgtccaccagctttatataccttgtctttcaaataagggsgggggggtgggattccttagccataaattccacagttctctagttctccttggctactaggagaaatgctgggcttcgtattatggcaaaagcagcaaatacaggtatctcagtggaggatatgttttcatggcctagtctctagtcagatgcttttacagaaacgaaatgaaatccttaacaatgctgttaataggtaatattatgtttgttttattatcagcagttttacagctgaaaaaactgaagcccacagaatttcagtcacttgcccaagatcattcagctagtaaggggcaggaacaagaatccaatccatgtgtgtctggctccaaagcccatgctgttgacactttataatacttcaaagttggacagaaatcatatttttatgggcttgatattattgatttaatgacacacattcataagttctacactgattactcctcctctaaagaacttttatttcaaaggtacttaatgg

SEQ ID NO: 73026 - DNA, 619 bp, Homo sapiens
agcagcaagggaaagggatgaagcggcctggagtgcatgttgcattagagggcagaagacctagattctttaggtcttggaaaactcacaaatgtccaccagctttatataccttgtctttcaaataagggcgggggggtgggattccttagccataaattccacagttctctagttctccttggctactaggagaaatgctgggcttcgtattatggcaaaagcagcaaatacaggtatctcagtggaggatatgttttcatggcctagtctctagtcagatgcttttacagaaacgaaatgaaatccttaacaatgctgttaataggtaatattatgtttgttttattatcagcagttttacagctgaaaaaactgaagcccacagaatttcagtcacttgcccaagatcattcagctagtaaggggcaggaacaagaatccaatccatgtgtgtctgkctccaaagcccatgctgttgacactttataatacttcaaagttggacagaaatcatatttttatgggcttgatattattgatttaatgacacacattcataagttctacactgattactcctcctctaaagaacttttatttcaaaggtacttaatgg

SEQ ID NO: 73027 - DNA, 1223 bp, Homo sapiens
tatgcactgtaacatgtttttaatgcaaaaaaagaaatcagtttggaaataaaagtttatgaaaaaggaaggcattcatcgttcccctgcccattgttttgttaaataaatatatatgaatagacatatacatatatacatgtgtggtattgcatggttctgaaggaaaacaaaatcactgtgtgaaggtttcaggctcagctagaaatcctagcgcgctggggaagccagcaaggcttcttatcaacgttcttgcttgtgtggataaagcaattctctttagccctttatcagaaatactgctgagacttggttataggaagcagaaactcaagtagacctccctcccttcctcttgcttgcagtcagttgttgsgataagatctagatttggcattttaaaggggaaagctgtgagcaattgatggggaatgttctgcagggacatctcaaagcctgggatgggtgggacggaaattactattctttggtgtggaatcttcattctctaggccagtgatgtcccctgctcattttaccaaggttaacagggtcagtctctttctctggatttaaattgtttaaaatgatcatttaggtggctcagagggtttgcaattgatgcctgggaaccagtaacaaattgtgagcagattacaaatttcagtctggtggcctgttttttctttcctccaacccccttcccccgtgctcagaacatttttgctgggatttaagttgttcttacctgcacgcacatttaacactcaacattgtggttcctgggttaccatctggggataattcaatatgctgatggcattttaggcatattcattggcaaaacatctatttttacaccttttcctatcagagggatctaacttctgtttttttacatcattttagattttgtatgctgccccatggatactgtcagtaataggtttacgtaatgatcagttctgtacgtttctagaagctttaaaagcttaattgagcacccaggtggagaaaatgaagtcagaataagtgaaatcattttgaaaagaagtatatttcagtaattaaaggaaaaaggtggcagatctttgtttttggtgattaagaattacacaggtttctcattagacccttaaagagaactgaagcatatttcaataaaaatatcaattagaatttctgcttgacacattctcctcctgcatccatccctaaaatga

SEQ ID NO: 73028 - DNA, 758 bp, Homo sapiens
aagagggcacctggcagtaaataactgttttcataagaggaaattacaattaacagaataatttccacaagtccctaaatatcctctttcatgttctttatttaaccttcatttaagagcccttgaaattcattcatgctttcctaaaaaatgactagggacaacttgaaacagacacaattccctaaactcattctttaaataaaaaggtgcattattgcagcttcactaaagacctgtgggagtatacaaagcgaatagaaggactattttcaaatagagacccgatataattcttmaaaaatatgctggctttcaaggggagaaaattgttccattctattttcaaaataacacaaaacttacaaagaaaaactaaatagtttttggtgactaagatgtactttgcatctatatctgggtacttactatctgatttttgtgccatatgtattctcttccctttagaaaacgttaaaatttgttggtttcccaacactgcccttccactcttctgtattaatacaagtgtgtcttaaaacaccatgtgctagtacacatacttgaaaaactagaggaggtgcaccagtatttgaccacagtcctacagaacatttcagttataaacctcttcaatcttagagaagttgatgctacagtaaataatgctaaaataagacttcagtaatcaaaaacatttttcaataacaaaagtaaaatgcacacacacacactgaagcaaatatcgagtgtttcat

SEQ ID NO: 73029 - DNA, 794 bp, Homo sapiens
cctcaatcttgttaaatatttttagcaagaggccaccatgttccagaatgatgctggctgacctgccagaggcaagaagaagccccgaagatctaagacaacataaatgaatgactaattaagggccattctaagggaaaggacaattatgttgactcataactgtctaggttcctaccattcaaggcctatacaatttacataaaaatcattgtcattagaaaagtttctgtcccactgttaagacagtgtttgtgcaatgtgaggttacttcctgcttccacaatatgactgtgctttactaaacaaacttctgagctaagatgtttacttgactgggaaatgactactaataagctgttaaaggatgtatcctcaagttactacttgtggcatttgtaacacgctccctgttgaacaaaggtgtcacagtagcacagtgaataaacaatccttttttctccctgtaagttatacgatattaaatgttaataattaatttgtctttgtggattaacayacaagagcttttcaaacaggtactggtgcaaccccacccttgtgagatggctaatcatttcacatacttcacacttacccagctatcagtatcactgacctcagctagcaaagtgtgaaacggcagatggtttgtagtgttcagtaatgtcctatgaaaatgtagcacagaaaactgcaaaaggttttgggagagaatggtggtttatatgaacttttcaagaaactcaagagaaacaaaatgccaccactgtccacgtcaaaggatctggtga

SEQ ID NO: 73030 - DNA, 1008 bp, Homo sapiens
atctctgagcttgtgattttgcttagccaaactgccttccaaactcttgcctattacaaataagcattttttatatctcacctcagaaacacattcctttctacatttatggctgacttttagaaaatgtttggtctactgaaagctgctatttgtaattgtattgtatttgtatgatttttccctagaatctaaaggtttaatatttgcaaatatcaagaaaaagtttactgatctacacattaatagcattctttctctgaaattaaaatttgtttggtaatagtctagtaggaagaaaaaaaaatgaaggcccccagattaattttttaattagttagttaacatttggactaagccaaaatgggcgactactactgctgtgaaattactgagttttcaaaaggttggatatcatttattctgaaatatttaggcattacaagaatatgatagctcattgaactgaaaattccatctatacataatgttacttctcagcccagattaatttaccagcaggtaatatttactaagaactcagaatgagttaagaaatgagccacattctttacatatattatttcatttaaccctttgagcattatattcttttcccattttataagtaaaaatgttgaggcttaaagagatcaagtagcatgcttaaagtcacacaaatgatagtagagcaataatttaaaaccacatatggttccaaagccacagtggtcatgtttagcctggcaaaagtcacttccaggtataacagcatctaaataagaattacagtgcattttgcatcccactgagcatttctttttataagtgttaaagtgagtaataacagagcaacgggcacggtggctcacacttgtaatcccagcactttgggaggctgaggcaggcagatcacaaggtcaggagttcgataccagcctggycaatatggtgaaaccccatctctacaaaaaacacaaaaattagccgggtgtggaggcgggcgcc

SEQ ID NO: 73031 - DNA, 1064 bp, Homo sapiens
cccctatgccactggtggaagccaagcattataacactatattacaactgatgtacaacttaacataactgaatgatgtttctaaaaagcaagcaagcaagcaaatcttacttacaatattattctatatgaaggaagcaatttttattttctaatattttgattttctaaattctagtacaaagtaattctaaaattgaaatagcacccatgtcaacagagtgtagaaaatatgaattttaaggagactgctgttgaataatttaataattcttctgttatctatataaagaacaaaccatttggaccaaaatgtgctttatttttgttttaaagaatatttttcaaagactgctactatcagacgggcattattcactccatatatcagtgatacaactagtattcatgagtggctgtaagatggaacaagcgatttgctcagccactcattatagaaattctgcagtagatagatggccctagaaaaagggcaatattcttgacatgactggaacagatctcattaaatataatatggtttgaaagactttcaaytggaatggaccctcatgattgccagtaggcttttaaaatatgtaattaatactgtctaacatctctaggccttggcttcagaagcagtctctgaaaaatagttctcaatgcaaaattataacctccttaagataggaagatgctagatgtaactgtagcctcagtaatctgagatactaataatagggattttaacccctttggtacactggaaaggaaagcacatgcttgtagctgatataacatattaaaatattattctgatcataacaaaaaatattaaacatctgatgacatcaaatacaatattcagatgaaaacaaattctgctatcagccaaagtcttaagttctttcttctatcaagactgttgatctaagcgttccattagactgtctttaaagggagctctacattttaaagatactgttaaaaacagaggtaaatcgttatgtcacgtccagtaaaaataccattgcgattaattctaatttcattttcctata

SEQ ID NO: 73032 - DNA, 616 bp, Homo sapiens
tgggaaaaatccttttttctttctagtttagtgggaactggcaggttatcagtaggtctaagctctaggtttgcctctagagacaaagagtttaaaaaatagtaactagttttattttgttctaaaaaaacacatgcacaagaaaaatattgtcaataaaacataaaaatgtacaacataaaaagtgagtttcttacccaaatctgacctcctacacctcctccctsagagacactgttactagttgcttatatatgagaactgcaatattcacgacactttaaaaaatcagtcaatcttggcttgtatttcaagtttcattaacaaaaaacagccccctttacaatcactggggtactgaatgcactgatatttaaaaatacccaaagctatttggatcaaaatcaacaaatatttaataagtaccttcaatgtgcacaatgttgcctaaacaagccatttctaatgaggattttacacatatatgtttcatactttttttctggtgtataacaactaatctaaaattatgttagtgaaagggtagtcagtctttgttttaaatgtttttctcagaaacaaaaattatctctttctctccctcacccctctaact

SEQ ID NO: 73033 - DNA, 645 bp, Homo sapiens
acccccaaatcttaaacatactgggctcctctgctggtcactccccttcccagtcttcctaggcatcatctattctttatcctgcccttatttatcctgcctccacagtacattgtcagccatggcagaccccacaaaattcactacttgtggctgcttgtttgtcacccacacacccatcagtgcttagagtctcttctctggaagtagggctgttttcacatgtccatttacagtctactgctttctagatttctctcctttaactctctacactgctacaattaaagtgaactacatattgctcttccctttttayaaaaattctatttcccctccctttgttaattttgctcagaatgctttgttcttccagaaagtcttttcctattccatttctgtagccccccttttatctagaaaaaagtctctctgaacgtctgtagcacttaacataaacttccttgagatacacttcattttttactaacatgtggacctatctacatctctcccctattggactggaactccccgtggccgcgatgtcttcactaatgcctgtgttcccataacgcgccatgtagacacccaggaataacctagtgaatgaatggaagatttctcggtttttgtgcaagttct

SEQ ID NO: 73034 - DNA, 1379 bp, Homo sapiens
attgtcttgtaagtttttcctgggaagacacagtccacggataaatttaactgagataacattgtttgaaaagatgatttatggaggttcagggtttgcataaacagcttaggaggtccaggatatctgtgcacttcctaggagaccttttacatcagactttctgtggcttcctaaggaaatggatattgatgttatgacctcagacagggagcagcaggtacagctggcacatggattcacaaatgcttgactggccctctgatttcagctgtgactatactggacaattctctgcaggcttccacttatttttagctgagattgtctcacttcaagtgcttcatctaatatctcaggtattagattaatttattaatctaaagaaaatataargaaattagatttttggtgctgtaaggaactttctaggccatggcacatgcccagaggtcaggggaataacccttgatctgtggggtctgggggtcaatggttaaatactcctctacctctcgtaagtcaggcaaagcctcattatgaaggttatgaatactgggcccagggttttatcccacggacagggttttatccacggcttgagcggaagagtgacggcagggagaatgttaattaggatcctagccacttgaataacgtggacgttagattgatgtgggaagtaaataggggcaggaacagataaccaggagtcaactacagttgtcttgattggaaataaattgtgaccaaactaggcagagcagtgctgtagaaatttgaaggtggagacctgatagtaaaaccccaactatgctagtacatttcccttactgacttggtgtgtttggtagccaatgaaatgggctcggtctcagttatctcttgctgtataacaaacctctcccaaatgtagtggcttaaattggcaatttgttcacgaagttgagcagggctcaattaggcagttatgttgctgctgtttccgggggtatattcaaataattaactgttatcaggaggttgtcctatggtctgaatgtgtcccccaaaattcatgtgttagaaacttaacccccagtgcaacagtgctgggaggtggggcttttgggatgtgtttggctgagccctgatgaattaatgctgttataggaagagcttgtgggagtagacttgctctttgtccttctgctaagggaggacacagcatttctcctctctggggatgcactatccaaagcaccatcttggaagcagtgagcagccctcatcagatgctggccccttgatctttgtcttcccagcctccagaactgagacacttctgttcttgatactcagtctgggtattctgtgatagcagcacaaatggactaaga

SEQ ID NO: 73035 - DNA, 1379 bp, Homo sapiens
attgtcttgtaagtttttcctgggaagacacagtccacggataaatttaactgagataacattgtttgaaaagatgatttatggaggttcagggtttgcataaacagcttaggaggtccaggatatctgtgcacttcctaggagaccttttacatcagactttctgtggcttcctaaggaaatggatattgatgttatgacctcagacagggagcagcaggtacagctggcacatggattcacaaatgcttgactggccctctgatttcagctgtgactatactggacaattctctgcaggcttccacttatttttagctgagattgtctcacttcaagtgcttcatctaatatctcaggtattagattaatttattaatctaaagaaaatataaagaaattagatttttggtgctgtaaggaactttctaggccatggcacatgcccagaggtcaggggaataacccttgatctgtggggtctgggggtcaatggttaaatactcctctacctctcgtaagtcaggcaaagcctcattatgaaggttatgaatactgggcccagggttttatcccacggacagggttttatccacggcttgagcggaagagtgacggcagggagaatgttaattaggatcctagccacttgaataacgtggacgttagattgatgtgggaagtaaataggggcaggaacagataaccaggagtcaactacagttgtcttgattggaaataaattgtgaccaaactaggcagagcagtgctgtagaaatttgaaggtggagacctgatagtaaaaccccaactatgctagtacatttcccttactgacttggtgtgtttggtagccaatgaaatgggctcggtctcagttatctcttgctgtataacaaacctctcccaaatgtagtggcttaaattggcaatttgttcacgaagttgrgcagggctcaattaggcagttatgttgctgctgtttccgggggtatattcaaataattaactgttatcaggaggttgtcctatggtctgaatgtgtcccccaaaattcatgtgttagaaacttaacccccagtgcaacagtgctgggaggtggggcttttgggatgtgtttggctgagccctgatgaattaatgctgttataggaagagcttgtgggagtagacttgctctttgtccttctgctaagggaggacacagcatttctcctctctggggatgcactatccaaagcaccatcttggaagcagtgagcagccctcatcagatgctggccccttgatctttgtcttcccagcctccagaactgagacacttctgttcttgatactcagtctgggtattctgtgatagcagcacaaatggactaaga

SEQ ID NO: 73036 - DNA, 975 bp, Homo sapiens
acactaaccaaagtattcaataaatggtggcttttaactgattttctcctctcccttttttttctgggtgggcctgacccttctggttattaggaagggagagaaagagtcgatcaagtggccagctgtgtcactagctcaggccccaggccaactcacacaagctaccagaagaaagacatctgcaattttaagatgtttcttacaggcaactctaacagcaggtagaagacatgacacagcatggatgaattgtctgcattkgtattgaccaaagtcagtgacacaaagaacaggtgtgtaccataaccagaagttctcaatgatacatgctcagattagttcttttacacacattttaactactttttagcagaacattattctttgcttataagaaaaccagttctgatatccttcacagaacttgtaagatatctaccccaaggtagttcacttctggctttgtctctaattactatttgttcagttttatttgttgcaccttgtttttctcaggatatattagcatttggtgatgatgctatgacctgggcaattggaaatgccatgtacacaactgttcttgatttactcactacattcatggcttacctcacttttgaagtcaaaagaatgtttaacacctccatagttctaagaccttccccatggtcctagtgcctcatacatttgtgctttaattcattgacttcactcatctaatcctactatccaagcctgaagcaaatttccttcctgtatccaatttgcattgcaaattctttttgcaaaaatgttgactcaactatcactatgattgttggtgttatcttgccattctaatttgcttacttttgtttaaagctctaactatgggttagcttatcagagcgttggagtttacttggggagaaaggaggagaaataatttgataatttgtgccatttcctagagaaaacttgcctaaatga

SEQ ID NO: 73037 - DNA, 700 bp, Homo sapiens
aagccccttatgacgtacaagctcctaccctgacctacctgcaattacctgcagttggttgtctccttggaatgtataaaaccaaagtgtaacmcggttgccttgggcacgctttcagaacctcttgagatagtgtaacccaggccttggtcacttatactggctctgaataaacctctttaaatatattttgacagaatttggtttttgtgtatttttctgtgtatttctacctctgagaagaggagtaatttatactctttaaaaatcatggtcaggtatgactggtgctagaatgaggatgaagggaagagaaagggaagaaataattctccactctttgtttccaattttagttctttaaagtaaaagtacaaaacattttgtagagatgtagtttgtggtggcacggttgaaaaacttctgcagtttatgattcctccactacagtgtgataatgttttaaatagcatttaaaatgtagattctgtccaatccttacaattaacttttttattgtttggaatccatgaagttggtatatgcatgagcagatacatatttatttaagaaaaaaaattaggccttacagaaaattggtttctcagagacatgataaaagttaccagataatgtctctcagactatatctatgaaaaaatacataaccaaatagacaccaattgcaaatgaattaatt

SEQ ID NO: 73038 - DNA, 700 bp, Homo sapiens
aagccccttatgacgtacaagctcctaccctgacctacctgcaattacctgcagttggttgtctccttggaatgtataaaaccaaagtgtaacacggttgccttgggcacgctttcagaacctcttgagatagtgtaacccaggccttggtcacttatactggctctgaataaacctctttaaatatattttgacagaatttggtttttgtgtatttttctgtgtatttctacctctgagaagaggagtaatttatactctttaaaaatcatggtcaggtatgactggtgctagaatgaggatgaagggaagagaaagggaagaaataattctccactctttgtttccaattttagttctttaaagtaaaagtacaaaacattttgtagagatgtagtttgtggtggcayggttgaaaaacttctgcagtttatgattcctccactacagtgtgataatgttttaaatagcatttaaaatgtagattctgtccaatccttacaattaacttttttattgtttggaatccatgaagttggtatatgcatgagcagatacatatttatttaagaaaaaaaattaggccttacagaaaattggtttctcagagacatgataaaagttaccagataatgtctctcagactatatctatgaaaaaatacataaccaaatagacaccaattgcaaatgaattaatt

SEQ ID NO: 73039 - DNA, 565 bp, Homo sapiens
taaattccgatatatatgtaaagtaaattattactaatatcaaacatagtttaaagaattagtgactatgtgcacttggatctccatatgtaatgtactatcagcatcttcacaaacacagtaaattttamtaggcaagtaaaacttattttactaaacgatgattactccttctatattcatattcctaaacacatacagtttcttaatgtaattaagtttttaactaaaaaaagggaaatgcattattgaggcgataggattactgggtggctataaacacatctgctgcacagctgacatttatcttctacaatgagcagtgacaattttattttttaataatcagtatggactaatcctgatgattttttttaacattttcaaatagggctgcatatggcttaaaattaatatatacatgtgtacctatataatattcttatttattaatggacttcctacatagctcatattgacgttagatttaaatgaaattccagaagggttttctataggtaagtcatacattggatttccatattacctatgattattgaagtat

SEQ ID NO: 73040 - DNA, 565 bp, Homo sapiens
taaattccgatatatatgtaaagtaaattattactaatatcaaacatagtttaaagaattagtgactatgtgcacttggatctccatatgtaatgtactatcagcatcttcacaaacacagtaaattttaatasgcaagtaaaacttattttactaaacgatgattactccttctatattcatattcctaaacacatacagtttcttaatgtaattaagtttttaactaaaaaaagggaaatgcattattgaggcgataggattactgggtggctataaacacatctgctgcacagctgacatttatcttctacaatgagcagtgacaattttattttttaataatcagtatggactaatcctgatgattttttttaacattttcaaatagggctgcatatggcttaaaattaatatatacatgtgtacctatataatattcttatttattaatggacttcctacatagctcatattgacgttagatttaaatgaaattccagaagggttttctataggtaagtcatacattggatttccatattacctatgattattgaagtat

SEQ ID NO: 73041 - DNA, 565 bp, Homo sapiens
taaattccgatatatatgtaaagtaaattattactaatatcaaacatagtttaaagaattagtgactatgtgcacttggatctccatatgtaatgtactatcagcatcttcacaaacacagtaaattttaataggcaagtaaaacttattttactaaacgatgattactccttctatattcatattcctaaacacatacagtttcttaatgtaattaagtttttaactaaaaaaagggaaatgcattattgaggcgataggattactgggtggctataaacacatctgctgcacagctgacatttatcttctacaatragcagtgacaattttattttttaataatcagtatggactaatcctgatgattttttttaacattttcaaatagggctgcatatggcttaaaattaatatatacatgtgtacctatataatattcttatttattaatggacttcctacatagctcatattgacgttagatttaaatgaaattccagaagggttttctataggtaagtcatacattggatttccatattacctatgattattgaagtat

SEQ ID NO: 73042 - DNA, 565 bp, Homo sapiens
taaattccgatatatatgtaaagtaaattattactaatatcaaacatagtttaaagaattagtgactatgtgcacttggatctccatatgtaatgtactatcagcatcttcacaaacacagtaaattttaataggcaagtaaaacttattttactaaacgatgattactccttctatattcatattcctaaacacatacagtttcttaatgtaattaagtttttaactaaaaaaagggaaatgcattattgaggcgataggattactgggtggctataaacacatctgctgcacagctgacatttatcttctacaatgagcartgacaattttattttttaataatcagtatggactaatcctgatgattttttttaacattttcaaatagggctgcatatggcttaaaattaatatatacatgtgtacctatataatattcttatttattaatggacttcctacatagctcatattgacgttagatttaaatgaaattccagaagggttttctataggtaagtcatacattggatttccatattacctatgattattgaagtat

SEQ ID NO: 73043 - DNA, 710 bp, Homo sapiens
gaaaaacccttggccctgggtcaatagagtcagagaatcataagatcctggaaccctcatcttacagaaaaactggatcgtggagccatagaatattttaggattcatggaagcttcagatcaaccaattacacacattcactcacaactttagaatcttaaattctatgaatctcagtgtcaagaattgtgaagttggaagtgaccctggagtgtgattttgttcccgttctaggaggaatttttagtttccagccttcctgttccttttggaatggaaagctttttcccttgtcccttgaacgactgcctctatggtgtcgcctacatttgtgaagatagatgttctttccatcttggtgcagaggcagtcggcagaacccctgcatttatggagtaagtgagctgggaaatgacttctactttccatttagaaccagcacactctggcccacaaaacagatcttgcttgttgataaaaatgaattcaaaaggacattattgctgtcttgttaaagcaaggatattggttgaacatggacaacagaggttaataagcttatggggcctctggtcgaggaaatgaaagaaagagaaagagtgccaaggggcagaggaatgctactggagattaatagacgagtgtgtgtgtgtgtgtgygcgcgcgcacatgcgtgcatgtgagtatgtggttgggggagggttggatg

SEQ ID NO: 73044 - DNA, 710 bp, Homo sapiens
gaaaaacccttggccctgggtcaatagagtcagagaatcataagatcctggaaccctcatcttacagaaaaactggatcgtggagccatagaatattttaggattcatggaagcttcagatcaaccaattacacacattcactcacaactttagaatcttaaattctatgaatctcagtgtcaagaattgtgaagttggaagtgaccctggagtgtgattttgttcccgttctaggaggaatttttagtttccagccttcctgttccttttggaatggaaagctttttcccttgtcccttgaacgactgcctctatggtgtcgcctacatttgtgaagatagatgttctttccatcttggtgcagaggcagtcggcagaacccctgcatttatggagtaagtgagctgggaaatgacttctactttccatttagaaccagcacactctggcccacaaaacagatcttgcttgttgataaaaatgaattcaaaaggacattattgctgtcttgttaaagcaaggatattggttgaacatggacaacagaggttaataagcttatggggcctctggtcgaggaaatgaaagaaagagaaagagtgccaaggggcagaggaatgctactggagattaatagacgagtgtgtgtgtgtgtgtgcgygcgcgcacatgcgtgcatgtgagtatgtggttgggggagggttggatg

SEQ ID NO: 73045 - DNA, 1008 bp, Homo sapiens
tgggaaataaatccattggcgctggcrgccgtgtgggcgctgcagtgccttgcgggcagcatcctaatgccgggaggatgcagggggagggagacgacataaggccaccaggactggggtgaggccagtaagacacctgcctctggtgcacaatttaaggggatgctgaaaacttgattaagataaataactttttatgcaatttttttttaaattaatgcaaaaaaaccgtgatgaataaaatatcaaaattttaaatcaagacaggatacaaaagagcagggattagggtgaggaaggtgaaatgaattgtgcataagcaggacctaatcttggcccgaagacatttgcttaactgcagggacactgcctgggccaagcactgttcccactaggagccagtatcaagagccagtctgctcatggtgaaccaaaaataagaaactgttcctggtgggggccccagagaacactgcctgccttggctgtggagacagaagcccagagaaaggatcacacatcaaggaggtgatactgggcctgtaccctaaggtgctgtgtaggatcagacccaccccttgtatgctttgggagcctagtaaggtgcattgcctctccagcctcaatttccccatctgtgaatccagaactaataaaacttagtcaccaggattcagtagggtactggttaaagtcctctagcgcctggctactcaatgtgtggtccacggaccggcaacatcaacatcagctgggagtttattagaaatgcacgatctcagctgcatctcagaggcattgaatcagaacctgtgttttaacaagaccccccggtgattgacacaccccggtgattgacacacacgtttaagtctgaaagcctggtcaactcttggcacataaaagatgctcattaaatgttagtgctactcccctgactacccaaccctgttagattctgacttcagacaagaggaaaaacccaagacgtaagaagagatcctgagg

SEQ ID NO: 73046 - DNA, 1008 bp, Homo sapiens
tgggaaataaatccattggcgctggcagccgtgtgggcgctgcagtgccttgcgggcagcatcctaatgccgggaggatgcagggggagggagacgacataaggccaccaggactggggtgaggccagtaagacacctgcctctggtgcacaatttaaggggatgctgaaaacttgattaagataaataactttttatgcaatttttttttaaattaatgcaaaaaaaccgtgatgaataaaatatcaaaattttaaatcaagacaggatacaaaagagcagggattagggtgaggaaggtgaaatgaattgtgcataagcaggayctaatcttggcccgaagacatttgcttaactgcagggacactgcctgggccaagcactgttcccactaggagccagtatcaagagccagtctgctcatggtgaaccaaaaataagaaactgttcctggtgggggccccagagaacactgcctgccttggctgtggagacagaagcccagagaaaggatcacacatcaaggaggtgatactgggcctgtaccctaaggtgctgtgtaggatcagacccaccccttgtatgctttgggagcctagtaaggtgcattgcctctccagcctcaatttccccatctgtgaatccagaactaataaaacttagtcaccaggattcagtagggtactggttaaagtcctctagcgcctggctactcaatgtgtggtccacggaccggcaacatcaacatcagctgggagtttattagaaatgcacgatctcagctgcatctcagaggcattgaatcagaacctgtgttttaacaagaccccccggtgattgacacaccccggtgattgacacacacgtttaagtctgaaagcctggtcaactcttggcacataaaagatgctcattaaatgttagtgctactcccctgactacccaaccctgttagattctgacttcagacaagaggaaaaacccaagacgtaagaagagatcctgagg

SEQ ID NO: 73047 - DNA, 1008 bp, Homo sapiens
tgggaaataaatccattggcgctggcagccgtgtgggcgctgcagtgccttgcgggcagcatcctaatgccgggaggatgcagggggagggagacgacataaggccaccaggactggggtgaggccagtaagacacctgcctctggtgcacaatttaaggggatgctgaaaacttgattaagataaataactttttatgcaatttttttttaaattaatgcaaaaaaaccgtgatgaataaaatatcaaaattttaaatcaagacaggatacaaaagagcagggattagggtgaggaaggtgaaatgaattgtgcataagcaggacctaatcttggcccgaagacatttgcttaactgcagggacactgcctgggccaagcactgttcccactaggagccagtatcaagagccagtctgctcatggtgaaccaaaaataagaaactgttcctggtgggggccccagagaacactgcctgccttggctgtggagacagaagcccagagaaaggatcacacatcaaggaggtgatactgggcctgtaccctaaggtgctgtgtaggatcagacccaccccttgtatgctttgggagcctagtaaggtgcattgcctctccagcctcaatttccccatctgtgaatccagaactaataaaacttagtcaccaggattcagtagggtactggttaaagtcctctagcgcctggctactcaatgtgtggtccacggaccggcaacatcaacatcagctgggagtttattagaaatgcacgatctcagctgcatctcagaggcattgaatcagaacctgtgttttaacaagaccccccggtgattgacrcaccccggtgattgacacacacgtttaagtctgaaagcctggtcaactcttggcacataaaagatgctcattaaatgttagtgctactcccctgactacccaaccctgttagattctgacttcagacaagaggaaaaacccaagacgtaagaagagatcctgagg

SEQ ID NO: 73048 - DNA, 1344 bp, Homo sapiens
tgaaaggcctcttattcttggtcccacaggccttcccaaggtgactttcagagtgtktttggactgcataatttcaaggcctctctgccctggctacgcctcctgattccaagtcatcaagttttaaatgttttcccaaagatgcttttttctttgcaatagcctctcagatgtgtctccttagcttgttgttgtttttgcttagttttgttttggttcccactgtgatggtcagaccatgccaggctgtagttggaggagggaccctgtatgctaggttggtgaggctcatggaggctccatcgtcttgtgatgccatcagatcacgtggcttctctggtagcaagagggagctgtgtgtcaccaaggtttccatgctggaaagtgatccttcggactatcttgtttctttctccggttctgccctttcccttccactgctgccctgtggccaggaggctgccccacatagaccaatcaacaggctcccttggtcttcagctttcttgggttttatcaaagaggtactggcagggattagaggcaaggaaaagagcacaatcagagtgtctctcagctgaaggtggaggcttttttgcattttgcagccggtgcctataacttcgcaagatccttccatgctttggccccatcatcatgtcattttgtcactgggatatttttggtgtaatatattgtgtacatttcctgcttgtaccctctctaggcttggcagctgctcctccttcgcccctcaggttggaggtgctaatggctccccactgacactggcccccgggggctgagccatccttgtggcatctgttcacgctgcccatgccttgatgtagctctcctcaaatgggccagataaagtggcccatgctccctgccagggtcttcgtggattcaccaatagccacatttctgctcaccattcattggccaggcctagtgccttgggcctgcccgctgcagggggctgggaagggtggtgtcgcttgtgctcagaagaggggtaagtgggtatggttgtgctctggtcatgtccaccacaggcaccagctcacgattcccagtcctcagtattgagcactttggggctccaggagggtctcaccgaaggagttctcttacctcctattatgtactgttcttcagagctcttttccccggggaatggcaggaaggggcattgggtttgtatccagactttgccaggccctcactgtgtgactttgggcaagtcagctttccactctgagcctaagtttcctcatttgcaaagtgggatgttgacactttccttgcaggcacgttgctgggctgagacagtgtatgcac

SEQ ID NO: 73049 - DNA, 1344 bp, Homo sapiens
tgaaaggcctcttattcttggtcccacaggccttcccaaggtgactttcagagtgtgtttggactgcataatttcaaggcctctctgccctggctacgcctcctgattccaagtcatcaagttttaaatgttttcccaaagatgcttttttctttgcaatagcctctcagatgtgtctccttagcttgttgttgtttttgcttagttttgttttggttcccactgtgatggtcagaccatgccaggctgtagttggaggagggaccctgtatgctaggttggtgaggctcatggaggctccatcgtcttgtgatgccatcagatcacgtggcttctctggtagcaagagggagctgtgtgtcaccaaggtttccatgctggaaagtgatccttcggrctatcttgtttctttctccggttctgccctttcccttccactgctgccctgtggccaggaggctgccccacatagaccaatcaacaggctcccttggtcttcagctttcttgggttttatcaaagaggtactggcagggattagaggcaaggaaaagagcacaatcagagtgtctctcagctgaaggtggaggcttttttgcattttgcagccggtgcctataacttcgcaagatccttccatgctttggccccatcatcatgtcattttgtcactgggatatttttggtgtaatatattgtgtacatttcctgcttgtaccctctctaggcttggcagctgctcctccttcgcccctcaggttggaggtgctaatggctccccactgacactggcccccgggggctgagccatccttgtggcatctgttcacgctgcccatgccttgatgtagctctcctcaaatgggccagataaagtggcccatgctccctgccagggtcttcgtggattcaccaatagccacatttctgctcaccattcattggccaggcctagtgccttgggcctgcccgctgcagggggctgggaagggtggtgtcgcttgtgctcagaagaggggtaagtgggtatggttgtgctctggtcatgtccaccacaggcaccagctcacgattcccagtcctcagtattgagcactttggggctccaggagggtctcaccgaaggagttctcttacctcctattatgtactgttcttcagagctcttttccccggggaatggcaggaaggggcattgggtttgtatccagactttgccaggccctcactgtgtgactttgggcaagtcagctttccactctgagcctaagtttcctcatttgcaaagtgggatgttgacactttccttgcaggcacgttgctgggctgagacagtgtatgcac

SEQ ID NO: 73050 - DNA, 1344 bp, Homo sapiens
tgaaaggcctcttattcttggtcccacaggccttcccaaggtgactttcagagtgtgtttggactgcataatttcaaggcctctctgccctggctacgcctcctgattccaagtcatcaagttttaaatgttttcccaaagatgcttttttctttgcaatagcctctcagatgtgtctccttagcttgttgttgtttttgcttagttttgttttggttcccactgtgatggtcagaccatgccaggctgtagttggaggagggaccctgtatgctaggttggtgaggctcatggaggctccatcgtcttgtgatgccatcagatcacgtggcttctctggtagcaagagggagctgtgtgtcaccaaggtttccatgctggaaagtgatccttcggactatcttgtttctttctccggttctgccctttyccttccactgctgccctgtggccaggaggctgccccacatagaccaatcaacaggctcccttggtcttcagctttcttgggttttatcaaagaggtactggcagggattagaggcaaggaaaagagcacaatcagagtgtctctcagctgaaggtggaggcttttttgcattttgcagccggtgcctataacttcgcaagatccttccatgctttggccccatcatcatgtcattttgtcactgggatatttttggtgtaatatattgtgtacatttcctgcttgtaccctctctaggcttggcagctgctcctccttcgcccctcaggttggaggtgctaatggctccccactgacactggcccccgggggctgagccatccttgtggcatctgttcacgctgcccatgccttgatgtagctctcctcaaatgggccagataaagtggcccatgctccctgccagggtcttcgtggattcaccaatagccacatttctgctcaccattcattggccaggcctagtgccttgggcctgcccgctgcagggggctgggaagggtggtgtcgcttgtgctcagaagaggggtaagtgggtatggttgtgctctggtcatgtccaccacaggcaccagctcacgattcccagtcctcagtattgagcactttggggctccaggagggtctcaccgaaggagttctcttacctcctattatgtactgttcttcagagctcttttccccggggaatggcaggaaggggcattgggtttgtatccagactttgccaggccctcactgtgtgactttgggcaagtcagctttccactctgagcctaagtttcctcatttgcaaagtgggatgttgacactttccttgcaggcacgttgctgggctgagacagtgtatgcac

SEQ ID NO: 73051 - DNA, 579 bp, Homo sapiens
cagccctacacatatgcatatgatctctgaacacacaatccctgttgcagtctctgccacgcattatcatgcatgcatggatacagtttcctccctcatgtgacccctcttccctcaccatccccacacaactgactgagcagaaagctttgataatttgagtgggggacaaatgccagtcccagacgtcccagaggagagtttgtccttggccartgagatgaatggatggacgccttctgtcaagtgggaattggcttctcaccaaaggcttggggctttggccaggaagcgtcctcctggggaccgtggggccctggaagcgcatggacaggacggggtggggagaggggtggataggaatgggggcagcttggccacaccaatggaggtgttccccatggcatagaccatcgctacccgatggctccaagtgttttctgggggcctggcagccccttgactgagcaagctgggcccagcctggcagtgggggcccaggacctaagtggggtgggggtgaggaacaaggggcgtccctacctggggttcctccacaaatgagctaaagtccacaaa

SEQ ID NO: 73052 - DNA, 1139 bp, Homo sapiens
gccctgcaggaamctgggcctccaggttagatgggtccccagctcaccaggaaaggggatgtgagggaggaaaaccagaggcaggcaacagaaggtaggtagcagccgagcctgcggtctgggcaaagttttcaaagaaggggcctggctatggcaggaaggggcggagagagtcccctcagtctggggactgactgattttggctgtggaatccctctccagcctcccatccccaccccagatcctaactgctaaattcttccaaaccatacctgcccagtggatgtgtcaaacagtgtttctcaaagagtcctggagtgggatctaggctttgggctggagcctttgacctattgcataccaggcccccccatttccatttgcctggctaactttcttcctctggtctcagcttagatgtctgctccttcagaaagcttttcttgactttccaacttggaaacgagtcccctgtgtcccttgtacagccccccatgcttctttgtattacagacttgagcaccctagaggccttctgtgcgtttgtgtttcttcaccacgagttctttggggtcagggactgtactctcttcatctctgtatcccaagcagccagcccttctcatctgcaaaatcagggtggcaattcctaatcacaaggtagattatgaagcctccgtaacaaaagagatttcaaaaaatcccaaagctttgtggaggccatgcaatgcagattaatccttttttcttttcctttcttttcttttctcttttttttttgagatggagtttcacttttgtcatctaggctggagcatggtggcgcgatctcagctcattgcaacatccgcctgctgggttcaagtgattctcctgcctcagcctcccgagtagctgggattataggtgcctgccactatgcctagctaatttttgtatttgtagtagagacggggttttaccatgttggccagcttggtcttgaacttctgacctcaggtagatctgcccacctcggcctcccgaagtgctgggatcacaggcatgagccaccacgcccagcctaatccttttttcttagctcacattaaagaggcaagcagagtgctaagggcttcatgtgtggggcctgcctggg

SEQ ID NO: 73053 - DNA, 1139 bp, Homo sapiens
gccctgcaggaaactgggcctccaggttagatgggtccccagctcaccaggaaaggggatgtgagggaggaaaaccagaggcaggcaacagaaggtaggtagcagccgagcctgcggtctgggcaaagttttcaaagaaggggcctggctatggcaggaaggggcggagagagtcccctcmgtctggggactgactgattttggctgtggaatccctctccagcctcccatccccaccccagatcctaactgctaaattcttccaaaccatacctgcccagtggatgtgtcaaacagtgtttctcaaagagtcctggagtgggatctaggctttgggctggagcctttgacctattgcataccaggcccccccatttccatttgcctggctaactttcttcctctggtctcagcttagatgtctgctccttcagaaagcttttcttgactttccaacttggaaacgagtcccctgtgtcccttgtacagccccccatgcttctttgtattacagacttgagcaccctagaggccttctgtgcgtttgtgtttcttcaccacgagttctttggggtcagggactgtactctcttcatctctgtatcccaagcagccagcccttctcatctgcaaaatcagggtggcaattcctaatcacaaggtagattatgaagcctccgtaacaaaagagatttcaaaaaatcccaaagctttgtggaggccatgcaatgcagattaatccttttttcttttcctttcttttcttttctcttttttttttgagatggagtttcacttttgtcatctaggctggagcatggtggcgcgatctcagctcattgcaacatccgcctgctgggttcaagtgattctcctgcctcagcctcccgagtagctgggattataggtgcctgccactatgcctagctaatttttgtatttgtagtagagacggggttttaccatgttggccagcttggtcttgaacttctgacctcaggtagatctgcccacctcggcctcccgaagtgctgggatcacaggcatgagccaccacgcccagcctaatccttttttcttagctcacattaaagaggcaagcagagtgctaagggcttcatgtgtggggcctgcctggg

SEQ ID NO: 73054 - DNA, 1139 bp, Homo sapiens
gccctgcaggaaactgggcctccaggttagatgggtccccagctcaccaggaaaggggatgtgagggaggaaaaccagaggcaggcaacagaaggtaggtagcagccgagcctgcggtctgggcaaagttttcaaagaaggggcctggctatggcaggaaggggcggagagagtcccctcagtctggggactgactgattttggctgtggaatccctctccagcctcccatccccaccccagatcctaactgctaaattcttccaaaccatacctgcccagtggatgtgtcaaacagtgtttctcaaagagtcctggagtgggatctaggctttgggctggagcctttgacctattgcataccaggcccccccatttccatttgcctggctaactttcttcctctggtctcagcttagatgtctgctccttcagaaagcttttcttgactttccaacttggaaacgagtcccctgtgtcccttgtacagccccccatgcttctttgtattacagacttgagcaccctagaggccttctgtgcgtttgtgtttcttcaccacgagttctytggggtcagggactgtactctcttcatctctgtatcccaagcagccagcccttctcatctgcaaaatcagggtggcaattcctaatcacaaggtagattatgaagcctccgtaacaaaagagatttcaaaaaatcccaaagctttgtggaggccatgcaatgcagattaatccttttttcttttcctttcttttcttttctcttttttttttgagatggagtttcacttttgtcatctaggctggagcatggtggcgcgatctcagctcattgcaacatccgcctgctgggttcaagtgattctcctgcctcagcctcccgagtagctgggattataggtgcctgccactatgcctagctaatttttgtatttgtagtagagacggggttttaccatgttggccagcttggtcttgaacttctgacctcaggtagatctgcccacctcggcctcccgaagtgctgggatcacaggcatgagccaccacgcccagcctaatccttttttcttagctcacattaaagaggcaagcagagtgctaagggcttcatgtgtggggcctgcctggg

SEQ ID NO: 73055 - DNA, 1139 bp, Homo sapiens
gccctgcaggaaactgggcctccaggttagatgggtccccagctcaccaggaaaggggatgtgagggaggaaaaccagaggcaggcaacagaaggtaggtagcagccgagcctgcggtctgggcaaagttttcaaagaaggggcctggctatggcaggaaggggcggagagagtcccctcagtctggggactgactgattttggctgtggaatccctctccagcctcccatccccaccccagatcctaactgctaaattcttccaaaccatacctgcccagtggatgtgtcaaacagtgtttctcaaagagtcctggagtgggatctaggctttgggctggagcctttgacctattgcataccaggcccccccatttccatttgcctggctaactttcttcctctggtctcagcttagatgtctgctccttcagaaagcttttcttgactttccaacttggaaacgagtcccctgtgtcccttgtacagccccccatgcttctttgtattacagacttgagcaccctagaggccttctgtgcgtttgtgtttcttcaccacgagttctttggggtcagggactgtactctcttcatctctgtatcccaagcagccagcccttctcatctgcaaaatcagggtggcaattcctaatcacaaggtagattatgaagcctccgtaacaaaagagatttcaaaaaatcccaaagctttgtggaggccatgcaatgcagattaatccttttttcttttcctttcttttcttttctcttttttttttgagatggagtttcacttttgtcatctaggctggagcayggtggcgcgatctcagctcattgcaacatccgcctgctgggttcaagtgattctcctgcctcagcctcccgagtagctgggattataggtgcctgccactatgcctagctaatttttgtatttgtagtagagacggggttttaccatgttggccagcttggtcttgaacttctgacctcaggtagatctgcccacctcggcctcccgaagtgctgggatcacaggcatgagccaccacgcccagcctaatccttttttcttagctcacattaaagaggcaagcagagtgctaagggcttcatgtgtggggcctgcctggg

SEQ ID NO: 73056 - DNA, 458 bp, Homo sapiens
cctgctcctagaggagcccgggagggaggctgggcggccataggagggcctgcacttcttcctaggctgtgaagattggccccaggcttgagcccagccttagaaaggtcgctgggattcccgaggtcatgggcaacgttccagcctcgtggagcaagagccaagttaaccactgtcacctctggacactagagcacgcgcgggtacatctcgggctactgcagctggcgggccagtctacactgggcgccttgcgcttgggcctccatattgagattaattgaaaaatacgtttccgacctacgaaaatgtttatctgttttcatcagagggatcacactgtaatgaatatatttacatctcatttcaagaaaggcaggaaagatcgctgagctctccgaggcagctcgtctcccctccccctcggaatcyggttgcagcccaccccaccccaatcc

SEQ ID NO: 73057 - DNA, 732 bp, Homo sapiens
aagtgactaaaaggcaggggatcgtccaatgaaaatactaccctgaatatccttgacttatcacttgttttaaaaaatgaactgtagcaaattttaaaggagtgaaaatagcaaaagtggtgaaaaagattagaaactctaagaatcaagaatgagactataaatcatatgagaaagatcaaattgctaaaatgtgtcatttgttttcccaaaagactacatatttaagaaaaagtgccttgtaatagaactgacaaagagggaggctacattcatgtaatagcatttagaaaaaatggttaaaaacagcactgagggtggaatagcaaagaataggataagagagatgaaaacattactgcatcttctgtcttatctattycccttacttctgcctgtgaatgactctgattcaagtgtttcttatacatcaaccctgcccacactcctctttacttgatcttagtgtttagaagtatttttgcgggggcaggggcaaaaagtaatcaaagtatgctactgaattagcagccaaaatcctgatgtttactttggcagatgtatattattttgaagctatatgtcattttatgcagtagatgtcttaagttatatgggaatataatttctgttaatgaaatctatttttaaatgaagacatgggttatttaccttttcaatgaatcccttaataaagtgaataattttctggtaaagcaaataatcattctt

SEQ ID NO: 73058 - DNA, 1687 bp, Homo sapiens
tttttttatttttatgttttttgagatggagtctcggtctgtcgcccaggctggagtgcaatggcgcgatctccgctcgctgcaaactccgcctcccgggttcacgccattctcctgcctcagcctccggagtagctgggactacaggcgcccaccaccgcaccggataattttttgtatttttagtagagacggggtttcaccgtgttagccaggatggtctcgatctcctgaccttgtaatccgcctgcctcggcctcccaaagtgctgggattacaggcaagagccaccacgcccagccaaaaaaatttttaaggtacaattttatgtaaggcataggattcttctttttcaaaacccaacctaattatttctttactcatttccctacttgatatgaatgcctgataacctgggacttcaatccagctccagcatgaactacctttgtgatcttggactgtggtgtaaactcactgagcctcatctttaaaccaagcaatacctctttgatatgctaaaacatcaaatataagtgtattttgtctaggcatgcctgacacacagagtttctagaggaaagatcctgccctctaagccctggtgcracagacatcaccacacccattcctgggatccctgactgtacttcctgcttcctggatatcttttcaaataatgtattatattttatttcatctctgaatgattaaataagaggtcaaatttgctcctattttacaaagtccctttcatgaatacattcctagtaaaagttaatgtttagagattgcttggcagaaaataatcttctcagttggtaataaaatcactaatttttgttttttatggcttgaaagataattgtaataagaacaaatataaaatggtgacttctttggtgtattttttctgtaagtcaattttttccatttcaggtcatatccatagtgaaattataatatgtcttcatcagagtcaaatattctatttacaaaagcatcaatgtaaatagaaaatattctatttacaaaaaaaaacaatttcatgatcagatattattctttactgttaataaagtaataacatgccagactgaagccaacatttcacacccatgtgttaatattctaccatgggcagggtatggtatctcacacatgtaatgacagctctttgtgatgcagagtggggaggataccttgaggccaggagtttgagaccagcccaggctatatagaaagatcctgtctctacaaagaaattattttataaattagccatgggtggtagcacacagacctaaagtcctagctattccgagtgctgaggtggtaaggttcccttaggtgtaggaggtagagattacagtgagctacaattgtgccactgcatcccaactgttacaggaccaacagattcatatgcctgctgcacacttacataccaattacactgagacagcagagtttgcatcagagaaagagtttaatgattacaggcttctgagtgaggagacaggagcaaaccttcaaattcatcattccagagagttctgggctacagtttttaaggggattgtggagggtgagaggctggaaaattggagaaattgatcagttggggtagggagatgaaatcatcaggatgtggaaactgcattttctggtgactcaccttctcatg

SEQ ID NO: 73059 - DNA, 694 bp, Homo sapiens
ttctcttcgttcctacccctactcttgtcaccattctaggtgacttcaacctcctcacagatgattaatccaacaccttggcctcttagttccctgactctgtcacctctaataatcttccccagatctgaccttagccatcaaatttcagagacacattcctgaactaatcatccctcaaactgcactacctctgaaatcttgacttccagaatcctattctttgaccacaacttctcatccattcagctcagctgctctagttctccaagtccagaaattctgcaaccttatgaagtcctccagtccacagttctagccctttttcatattcttcatctctatgtccttacttccctccttaccatgtttagattccatggtgccagtctgttttygctgccataacaaaatacctgacactaagtaattttaaaaaaacagaaatttattttgcacattcagaccatagcacatggtccacctatgaaatcacttctatgcaaacacttacctccctcaccattcttttcctccattagactagttggtcagaatcctaattctgagattaaatccaactgctacttgctttgtttctgtacctgaacagctaaatggtactggagaaaaacacacagccatactgtagtagacattgctagtgttcatcaatatctgcttcttctcttct

SEQ ID NO: 73060 - DNA, 599 bp, Homo sapiens
tgctgctttggcactgcaaaggcagagttgggaagttgcaacagagaccatcttgtccacaaatctgaaatatttactacctgaccctttaaaaaaacatttgccaacctctaacttagcatatttttgcgtttcatccatgctgtagcatgtcccagtcattcattcctttttattgcagaayattttgcaatatatcacatttaatatatagcatgattgcttatacattaatatatcacatttatattcatgtgtattaatatatcacatttgactatccattcatttgctgatggacatttggattgtttctaatttggggccattatgaataatggagctataaacattcatgtataggtttttgtaggaacatatgggttcatttctcatggcagacacctagtacccaggaatgaaattgctagattctacggtaagcttatgttgaacctcataagaaactggcaaactgttttccaagtggctgtaccattttacgttcccaccagtaatgtatgagggttcctgtttctccacattcttactgcctcttgtcaccatctgtcaattttattttgctattctaatgggaa

SEQ ID NO: 73061 - DNA, 1481 bp, Homo sapiens
tacaggaccatcatcagttttcaacgaagtgctcactgagttcctttgtctaagagaagtaaaatctaggtacttaatactcaatagattagcactagtgatcaacatttataccagtaagaaactctaagtagtctacaactgagataacttaggtaaagaacttagcactctatttagagcataggaaaaaatcactaaatgcttagttattattattctattggtatattccaaaaaatacagtacatgaatattttatttttaagaaatgtattttacagttatgagtgtgaaatttctttaatgaaagaaactgaagcacataaaatttctccaagtaataagacaggactagaagaaagcaggaaaaacatgggaaaattaaaagagtaaaatagttaaaaaaatgaaattagaattgaaatttggtatgttattgtgcaaaacatgttctcagaagggtctgaactagctagatacagaataaaatcataagtgaagcaaagaaattttagtaagataaatgccatggtctgggtaaaaggaaattcttaaattagaggccatgggaccgtaaagaagttgataatgtttcagggtccttccatgacttttagtaacaatgcactccttgaccagacccaagacaaccttattttttttctgagttttgggcttgaagtcagttcgacgggatcctaggtttgtagaaaagacagtgaggtcatttttgtgttgatcatgaaattattcttccaatgtacattcagttattctgtacaacattatcatgcaaaagtcctaacggctgttcttttcaggtggtttcatttattcttattttagttttattattccaaagtaaatattctttctttcattgggttgggcgccaggttaactctctctcaaaggtacacaggcaaatacctggcctttagctactaatgtcctgtatttacagagaactgaaccccaagacatccctgttaaaaagatttttcatagtggttgytctcttgcaataaaaataattttagtgtaagggttttcaagatatggagatgaaacttcattcactagataggtatgaggtaaaactgagagggatatttcattatgtcactattccattataatgtcatatgcatgtacaagaagcttttgtaatgttgaggacatttacagtggaaaagttgaaataataatttttaaaaagaaatgtaaaatagccaagtctgataatgccttagaggccatcacaacataggacaatattgtagtgctggttgttgggtggtaagacttccaaagagtagtctgataatgaaagaaatgagtatttccagatactggatgagacttgaaaatagcattcaatcagaatctaattttaaggaagatgaaactgaatgactgcttcacaagggtctgggcttgcctttgagaaactgctttcctctgcttaagcagagatg

SEQ ID NO: 73062 - DNA, 697 bp, Homo sapiens
atacatatatgtactcatgtttctggggactacggatgatttctatttgtatatttatactttacataatttccttatcttttataatgaatattattttaaaaaatcagtcaaaataagcattatttttaaagaaatccctacagactcaattaaagcctcattaaaatgtttcctattgttgcatgatccaggacaacatgataagtaaaactgtcatataatgatgcttttgtggtgtctctgtaattacatcttttgagacagaatctgaggtacacttgctttacaccagattttgttctacagagagcagatgtagacaaagatatkgtgaaaggttagtgtgtttgtgagaaagcacagactggatttgcacaacttagatgtcaagacatctagttaatttctagttaatttctaatcaagattaatattctggcaaaacatcaatagctagcaatttttgagatacaaatttcaaagaaaatatatttctcctggagaaacagagtactaaataaatctgtgttttaatgatcactggctttctttaaagatcactaactttctttgaatttttttcctccatgttagagataactcccacttcctgtttatttgtggcatggctacatttctttcttttagtctatggaatatgattatttctatctctcccctccttctttttttt

SEQ ID NO: 73063 - DNA, 564 bp, Homo sapiens
caccacctctcagtcgcacccttccacttttgtagttttgcaagatgaaccaatggattttaatatcatagaatatgaaaagttaattgatttggtttcagactccacattataactaacctctaaaaaactatcacttgttgaattttggtgtatcaaagatgaacatccacaatgatctggaaagcctattaaaatctcctttttttccaactacacatctgtgggaagctggattttcttcatatacttcaaccaaaatacattgccacagcttcaatgcagaagctaatatgaacatccaactttctcccagtaagtcatatgtaaaagggatttttcaaaaatataaaaccatgccacttttctcactaattatttttggttttggaaaawacagcttttaaattgagagaaaaaaatcacatatcatgaaacataaataaatcataatttattattattaaaaaatgtttccaactttaatttttgattcggggtacatgtgcaggtttgttacctgagtatattgtgcaatgctgaggtttggagtatataggatcc

SEQ ID NO: 73064 - DNA, 712 bp, Homo sapiens
ggatccaccctcatgaatggattagtgccttatgaaagggctgaagagaatgagcttaaggccctttttgcctttctgtcccttctaccaagtgaggacagagcgtttttcccctcctgaggatgcagcaacaaagcccatcttggaagcagagactgggccctcatcagaaaccaaacattgatcttagacttcccagaccckagagcaatgacaaaataaatttctgttctttgtatattagccacatgggctaagtccagcagctcacacaatcttactccatctctatctcccaaatgcaagttaagctgctgctatgccatgtgacttaacccagtactccccccccacttttctgttataaactcctatatatgtcaatctcaacaaggaagaaaagtgggatgctcttttattttaaacaaaagctgtagggaagagaggggagaagaatgggcaagcaaacacaaaaacacactcagacctttccatcttgtgctgaatgctttttacatttgtatttactttcaagatacttaatagggtcagcttctaatctcctacagtcttcattaccggataactcctggtcctccttgaagacttggctcagaagtcagcaactgcaggcccctttggcctctgggcatccttagcacccattcatacatctactagggactaattagatggtgttgactcacctttc

SEQ ID NO: 73065 - DNA, 765 bp, Homo sapiens
ataattttatgaatatgtctatacaaaggagattaaattgcctcaccatacaatgtaaccaatcactcttacaaactatttcataaaatagtgccttgaagtcagattaggaactaatcctccctttcaaggttagtctcaaagaaagcaatcaattggctgcagacataaagaggtacttccattgccccaaacataattcatttgactctataataggccctgggatttttgactatgatgactcgtgacttaactgtgttaaggttggtaaaagaaaattatctggattggatggcaaattaaaccattctaagtcaatrgcattttagtctcaatgactttgttagattataatacagtcaaaaacagagctttaggggaatgagataaagatctggtaagttttgtttttgtttgttttgtttgagacagggttcattcaaagctggaatgcagtggtgtgatcatagttcactgcagccttgaactcctgggctcaagcaatccttccacctcaatctcctaagtagctaggattacaggtgcacaccaccacacctgggtagttttttttttaatttttttattttttgtagagacagggtctccctatattgcccaggccggtctcgaactctagcctttagtgatcctcctgcctctctcccaaagtattgggtttataggactgagccactgcacctggcctctggtaaattttgatgaaaggaaaccaaaaggaaaaggtttgggacatcgagt

SEQ ID NO: 73066 - DNA, 641 bp, Homo sapiens
aaaatgtaagaaatggtgtgctcagttttaaaaggtgggtaaccttttattcttaatgaaaaggtcatctcaactcttagcaactattttattttccaaatgcaatggtgggaaagcgattgaacaattttaatatgaatcagaatactctagtggtgttctggggtttcttaatcccagtaggaagtctttggcctttggtctatgatgatctaacttcagggctctgatcaagttatggctcaccccctccctgttatcagycccacacacgttcactctgacacaggcaacaggaagggaaggttgagtgacctacttcaggagaaggccagtcccgggagagaccctgcactggagaacttgctagagtccacaaaagactgatctgataatggcgaccacaaggagtgaaagaggagaaaagagaaatgatgctgttagtcagtagaaacagtattcccaagcaaatcccgggcctgagcagaattgctgaagttggaaagaggacttcttgagcacctccagcagaggagagatgagtatggccaagggccaagggccagggttgaggagagcaaatacaaaggaacagaagagatgagggcagagagaatcaggcagggcccaaggctgatacc

SEQ ID NO: 73067 - DNA, 1500 bp, Homo sapiens
acaaataccaggaacatagcattacaacaactttcatttcttggccaatgggccagacattgccatttaaagatttgatattgatgggctagaaactcaaaaaaagaattagcaacattccttcccttctcttatggcacatactgcagaattgttcaygagaagaaaatctcatggtcaaaagtgaaatcagctgtggatcttatcaaagcaaaaaaagctgtttgtatcttgatgtagccgtggcttattattattattgtcatcatcattatcatctcagatttgagtggaaaggaactatggtttctccaattttgtgaataatagttttgttattgaacagggaacacaatgtgtggctagattatctcccgcagggcttgcaaacactgtattgtccccaaatgtggtagccacatgtttgtttttcagctgacagagtcctaagccagagagattttagaggaaatgaaggagagtgaaaatcaactaagcttttcattagcatgtgtgacaaagggtagtgtgtttttctcttttggtagtgtgtacatgttttaagaaaataaatattgcacatcattactgctctagtcagttatttatactctgataagaattttaaagtctgttggagcaaatctggaaaaaaggatcaacttcattcagctctaaacttttagtgctcacgtgtgcaagtcaccattatggtatactacacttcggaacatatatatgtgttcaagaaatgtttgtaaaacaaataaatatgtattgactttcactattggaaaatatgtagaataagaaaattgcagtctgcagattctaactcacacaaaatgcatccaatgttttaaactccaactaaaaaaatttgattaaatattaataatcataatgaacacattattatcaatgaatcgaaagtaattggaataacttgaatattcacaaaaatcagagattttaaaactaggaaaaatactttagaaagaatttggttaatccttgaatcctaaatataacaaaagccagagatagtaaacaaactgtccaaagagacacagctttttttttttttattggagcactaggattggaaacagggcattttatctgggatccagtgtaaactttctaccctcccattaggggtgctgctttggtctgccattctgacactatgtctggcatagcagaggtcttccctcaggaacctgtggtcaagtaatagcagtttcagacttctctagtctagggaataagctgttcatgggcacatgcagagcctttttcagatgagggataattacattctttcgtttcctgcttctcctgtaatttggcctgtccattgaaattataatctatacacctgtttcttctttttcactccatctttcttagtgggtttggaggagttgagtagtttaattttaagcactgcagcaagtctgtaaaatgacagctagggatgtctctgacccttatagg

SEQ ID NO: 73068 - DNA, 586 bp, Homo sapiens
ttaggaaacaaggaaatgactgatcgttgatctatgcaatgaaggaaccattcctgttaataagggtgagcacccaacaattatatcacctaggaaactacatgctccagggttgacaaattattgggaatccccctcccccaactgccttttgttttatctctgaaatataaagcaagtatactttagtgacatgattttttttttctggcacctttccatagccaattccattcatgcagaaaaaggatgaaattccatcattcgagcatgacatctcaaaattcaaacttaatgagagctttggcagcttctgtcgaaggcagacagtgattaacaaaacacttcagagtacaaggcacagcagtgctcaaagaaaacagtgatgatctccacttaattgtagaaaagcccaaagcatctgccagccgaggagagctggagscataaggagctattgctcagataggctgtcatctccagagatcaacaaccatatgctcagctcaagcacaaactccaaagaagttaattttctgacaaaatacagggataaatatgacattcaaacaagtgtgctcactca

SEQ ID NO: 73069 - DNA, 959 bp, Homo sapiens
atatttaagtgatgtgctcacgaaagtgaaatattcaaaacagcttttatgaaaatctcccatctggcagttacaattgatcagaaatctactcttcagcattattttgaatatagcatgcatttttaattaaaactgttcattcgatttattaatgtaagtaaaacctcccatctgatcatgtttaacttgagaaagtggttttctaaaaccccttttatgaattgaatgatacaattttcaagaaggaatagttataaaagatgtcagatatttatttgctattaatcgtttttgtccttaatttcacaattgatctatgaacatgcttgcttaaaaatatttgatgaattcatggtcttaattcttatattattttaaatctaagtgagctccaaaggatctaagataaaaatctttaataaatcatgttaagggatactttatgttagttaaattaagttttaatggacaagatataagcagattattaaggttaaaatttctcacagtgagaaataaaagcaaactatcaaatgcttttattcagttgctatgttcatgacgtacattatcaaaattaatccttttaaaaatcctgtttctcagcaaaaggatttcagstcaggcaactggacttcgaatcacaggcatttcatcctgccctgcttgtcttggctatgggaggtttataaggacggctctgctggattctctccaggaagctctgtacctggattagatgccgtgataattcccagacatggttgcttgtcaaatggattattaaggctatgaactcataccttataaaaatggaaaacaaatttctttaacatgtattctggataatgtctatatccttcattctggataaatgtctatatccttcatgtttcacactggttaaacatcatgccaaccatcttaggttacaaagtaggtaatttctgtgttca

SEQ ID NO: 73070 - DNA, 828 bp, Homo sapiens
gccatcttctgatcatttaacatacattttctcatttaattattaccattgtctcataatgtaggttgcattatccctattgtctggagagaaaacagagactcagaagattaaactttgcataaaatcacataatgaatcagtcattgggacatacttcaaactcaggtttttatatctaagttcacctagaacattaaaaaatacatatattaacaattgtaggctaaaatacttctgaaaatccgaaagtacctgcagtagtttgttaaagtgtactctcgtaataaatagggtaaacacaaaatatacaaaataatattttattaaattatacccttctgatcattcaactttttgaaaacaaacgaartgaggcataggtttctcagtaaaaaaaaaaaaaaaagaaaaaaaaacctctagcatgcttaataaagtaaccaatattatctcaaagaacacaaaatataagaacattcttctttcagtggggcacttggcaacttgtacgggaaatcaggcagctgggtcacagcatagtaaattatttaaaattcaaacgtattcacttcacatcataccctgaaacaaattccagatgtgttaaaaagtaaattttactgaaaattaagtcaaagtaaaaagaaaattatattgaatatttatcaaacctctaacaaagaaataattttcaatgctttgaatacgtaaagaatgcacaaaggaaaatatcagtaaatggtaccataacatttaaaatgtgaatataaaaaaatttaaaagttaaactgagaaattttccaacaaatgtagtattggtttaat

SEQ ID NO: 73071 - DNA, 646 bp, Homo sapiens
ggatccaggcctgctgcgtgcagaacctccgtcagtcctcaatactggtgtaggggctggcgctgtgcccagctcaaaagtgggaaagccaagctcaggaactggatatgcgctgcctggctgtggcctcctgtatygatagcctccttccagggggacagcaatggataccaagagctttgctagggaatgaacaccgcctaagcacgggtaaagctcagggcgcccctgctgcagctggacatgggacagcctctccccggacaagtccttgccatgctgaaccgctgcctgtcaacaagcagccatctctgttgctccccaacatgagcccatgagtgacccaatatctcctttgtgagtgtgtgcctgtgtgtgagtgtatgcctgtgtgtgtatgtgtgtgtggtggtgggacattagaaaggtgccctgcctaccctcccaaatgccagatcgtgccgggtaaaagtgtttgtagccacaggagaaaactgaggctgcatcagccctcccttcacaggctgtgagcccatctgggcaaagcctgggcgttcacgaaacaccattgcccagggcctggcctacatttggagtgtgacaagcatgagttgaatgaagacatcaatggattgtttatttgttt

SEQ ID NO: 73072 - DNA, 846 bp, Homo sapiens
aaaattaattcatacagctttgtcagggacattcttaagtgaaactagcatctgtattttttaaagcaacaagtacatggtgacactgaagaatccaacgatggccacggcagcgtgccgccacttccctccacccctgccaaagctccagcaggttcccctctgctgcttctgcaccctcagtgcacgcatcacttaggagccaaccacacttctaagctctctgcacatatgacctcatacaccagcctccacaagtggccttgtttccatggagacagttgcccagctgaggactacatttcccagcctgccttgcttccagggccggccacctgacgggtcctcacccttgaaacaaatgcaggctgaagtgactcctgccagctcctctgactcaggtgtgccttcctggcactctcttccccttccaccacaggatgtgtgtgaatggtggattagagacgaaaagaaggagatatagtctggacatcaataggcagtggaatgagaggagtatggaaggaagggtgtgaaggaggaaggagtagagaaagatgctcaaattcatcaccttcccaacmatgtggacgttgatgttgctaccagcatgacgatcaccgaaggagaaccgggatatcagttaatgtccaggcagaaatcctgggctgttattttgagtatgaatttctattacacaaggactttaaaaaatgtaaagctataatcacatccaatgaaataaaccatatttatgtaatattagtagcatccaataccgagtctatgttcgttttttgcccccataatgtcatttaacaatcggtttgttagaatccaagtaaa

SEQ ID NO: 73073 - DNA, 846 bp, Homo sapiens
aaaattaattcatacagctttgtcagggacattcttaagtgaaactagcatctgtattttttaaagcaacaagtacatggtgacactgaagaatccaacgatggccacggcagcgtgccgccacttccctccacccctgccaaagctccagcaggttcccctctgctgcttctgcaccctcagtgcacgcatcacttaggagccaaccacacttctaagctctctgcacatatgacctcatacaccagcctccacaagtggccttgtttccatggagacagttgcccagctgaggactacatttcccagcctgccttgcttccagggccggccacctgacgggtcctcacccttgaaacaaatgcaggctgaagtgactcctgccagctcctctgactcaggtgtgccttcctggcactctcttccccttccaccacaggatgtgtgtgaatggtggattagagacgaaaagaaggagatatagtctggacatcaataggcagtggaatgagaggagtatggaaggaagggtgtgaaggaggaaggagtagagaaagatgctcaaattcatcaccttcccaacaatgtggacgttgatgttgctaccagcatgacgatcaccgaaggagaaccgggatatcagttaatgtccaggcagaaatcctgggctgttattttgagtatgaatttctattacacaaggactttaaaaaatgtaaagctataatcacatccaatgaaataaaccatatttatgtaatattagtagcatccaataccgagtctatgttcgttttttgcccccataatgtcatttaacaatcggtttgttagaatccaartaaa

SEQ ID NO: 73074 - DNA, 625 bp, Homo sapiens
ttaaggcagtggcatatccacctaataagtttttttcaggaaacaggtcctggagcacagggtatcttccaaggccacacarctagtcagctcacagcaggtactacccctgtgctctcctagcctttgctattttccaatgcccagtacacacttggcctttggtaaatgacgagagcgtgaatgagtggatgttgggcttttcccaaagataatctgctgtctgtgcagagcagttcaacaaagagctcatagctatggattttaaacacagtcttatgatttgattatttgaatctcggattgggttttttttttttttttttttgagatgaagtcttgctctgtggctcaggctggagtgtagtggcaggatctcagttcactgcaacctctaccctctgtctccagggttcaagctattctcctgcctcagcctcccaagtagtgggattacaggtgcctgccatcacgcccagcaaatttttgtattttagtagagatcgggttttgccacgttggtcaggctggtctggaactcctgacctcaggcaatccacctgcatcagcctcccaaatgctgggattacaggcatgcgccaccatgcctggctctggattgggg

SEQ ID NO: 73075 - DNA, 625 bp, Homo sapiens
ttaaggcagtggcatatccacctaataagtttttttcaggaaacaggtcctggagcacagggtatcttccaaggccacacagctartcagctcacagcaggtactacccctgtgctctcctagcctttgctattttccaatgcccagtacacacttggcctttggtaaatgacgagagcgtgaatgagtggatgttgggcttttcccaaagataatctgctgtctgtgcagagcagttcaacaaagagctcatagctatggattttaaacacagtcttatgatttgattatttgaatctcggattgggttttttttttttttttttttgagatgaagtcttgctctgtggctcaggctggagtgtagtggcaggatctcagttcactgcaacctctaccctctgtctccagggttcaagctattctcctgcctcagcctcccaagtagtgggattacaggtgcctgccatcacgcccagcaaatttttgtattttagtagagatcgggttttgccacgttggtcaggctggtctggaactcctgacctcaggcaatccacctgcatcagcctcccaaatgctgggattacaggcatgcgccaccatgcctggctctggattgggg

SEQ ID NO: 73076 - DNA, 927 bp, Homo sapiens
ctggtcttggttgtggtggacacagacacaagatagaaatgaatgattgctatcctgttccagaaatgaaaatgtggtatcaagtgaatttttacaaaatacttattcttccagttaaaacaaaaaggtccttcagcacaactgtgctgtagttaaaccatggcctataatcccagcactttgggaggctgaggcaggcggatcacttgaggtcaggagttcgagaccagcctccaacatggcaaagccctgtctctactaaaaatacaaaaagaattagccgggtgttgtggtgcaygcctgtaatcccagctgctcgggagcctgagacaggagaatcgcttaacccagtaagtggaggctgcggtgagctgacacggtgccgctgcactccagcctgggcgacagagtgataacatctcaaaaaaaaaaaaaaaaagaagcaaaagataatgtattttctcatgctgaagaaatacttgcaggtctgagatttgaattaagatacctatttcacagtttcaaaagtaccagtggcgcacacaaccttcccacccctacccttgacccttcatcaggatcaagtctctgtcttgaggcgggaagcttgtatagtttttattgtttttgctgtgtgttttccagccaggttgtttgtagatgtctgaggtttttcttccatcaggctatctttagacccatttcttctctaaaatatatttgaaaaatgtagaaagattcagaagaaaacagccaaatgaagtattttaattacatcagaaaccaagctgctcttaaatttaagatactgagttaattcaaaagtttcataataccaaaagctattcaataaatgttccctctaaatagctgtgcaaaataaagtttgtatttaaactttaatatacaaagttagtctgacattta

SEQ ID NO: 73077 - DNA, 927 bp, Homo sapiens
ctggtcttggttgtggtggacacagacacaagatagaaatgaatgattgctatcctgttccagaaatgaaaatgtggtatcaagtgaatttttacaaaatacttattcttccagttaaaacaaaaaggtccttcagcacaactgtgctgtagttaaaccatggcctataatcccagcactttgggaggctgaggcaggcggatcacttgaggtcaggagttcgagaccagcctccaacatggcaaagccctgtctctactaaaaatacaaaaagaattagccgggtgttgtggtgcacgcctgtaatcccagctgctcggkagcctgagacaggagaatcgcttaacccagtaagtggaggctgcggtgagctgacacggtgccgctgcactccagcctgggcgacagagtgataacatctcaaaaaaaaaaaaaaaaagaagcaaaagataatgtattttctcatgctgaagaaatacttgcaggtctgagatttgaattaagatacctatttcacagtttcaaaagtaccagtggcgcacacaaccttcccacccctacccttgacccttcatcaggatcaagtctctgtcttgaggcgggaagcttgtatagtttttattgtttttgctgtgtgttttccagccaggttgtttgtagatgtctgaggtttttcttccatcaggctatctttagacccatttcttctctaaaatatatttgaaaaatgtagaaagattcagaagaaaacagccaaatgaagtattttaattacatcagaaaccaagctgctcttaaatttaagatactgagttaattcaaaagtttcataataccaaaagctattcaataaatgttccctctaaatagctgtgcaaaataaagtttgtatttaaactttaatatacaaagttagtctgacattta

SEQ ID NO: 73078 - DNA, 1729 bp, Homo sapiens
tgaaagctattcttccaacttagaatatgtgtaagtttttttaattcctgagtggaaataaaaattactacttgtattgaaaccaactaatacatttaagacaaaaaaaaaaaaaaaaaaacaccgaaagataactgcttattawtcatcacaataaccctaaggaggtaggttatctacatctgtataaaaattgaggcttagaagtttagcagtattaaagttacacaagtagtacacagagatgaaacacaaatgattcaggtcagtcagaatgcaaagcctaaacttaatcatgaatataattttgaaaaagtactgtcaactttaaaccaatcgtctatttggacaacctattagctctcccaggctgatctcatcaaatattatgcagattatagtagaagctgcgtttaccatgcagatcgccattctagactgaggcattcattctctagctgctgggagtgttgcctgccgtgtagctcaaaactgagcccctccccaggaactgccctcagttgaagagaaatcccccttcccagaacatcccttacccagtgacttctatggggtgagtgtgaatgtgtaaaagttcaacccccttgtcccaaagtagaatgaatttgaagagccatctcagctctagagctccctgtgcggatcagctcttgcctctgcccaaacccgtctttgactttctccccaacaactatggatcccgtgggcactttccaacaagcttcctgcatgcagatctccatttcagaatctatctagggaacctaacctaaattagcacaggccttgctccagtcattgataaaaacaaaaagggccatacatgatagatactgctggtgtcaggcttcttacgtggtccaaaaactgtacatgtgcttagatgcatttttatgggatgagagtcagtagatacaactggcttttctaaaggatccatgatcaaatgacactgaaaaccacaacacgacgaacaacgggctgaccctgatccatcagacacatcaactttgtttttagagttttacagtggttgtttaaccagatataaatccatctaactgtcttattcagcccacattttttcccatcttattaaaaaatacatcatgagaggcggtatgaaactcttcctgaactatgtttgctacagtgttcccctgattatcaaattcagctaagtgttaaagtgattttgttaaggcagctaggtgttctgtctgaattcctttttaactacattttaaaaacatttccagaattaaggtaattgtgatggagaagacagaaataaaacaggacttaagtaattcttctgtctgctatcagttaacaaagtgagtctatcactttctctttgtttctctggctcaaaatacctgttgttactatcgctttttaattagtgaaacaattgtttctttattctggctccaaatggtcttacaatctttgttatcctcagctgtgccccactacctctacctgttattcctaactcttcccagattgtgccagggttcttgatcatgcacttttccttccatgatttctccacgttcttttaaaatacagaatctcagaatgacattaaggtttcattgcctgccctacctccctaaaggaactttccaaagcacaaaatgcttctcaaaattgtcatcaatacaacaccttcttcaaaccttactattactaacctgatgaa

SEQ ID NO: 73079 - DNA, 671 bp, Homo sapiens
aaacaaataaataattcaaatctttgacctaaagatggggacggagggtggctggggtgtaccaacctgctatttaactgtggtgggaaagcagcatagctacagaagggaaacaaagcaggcactcactttctcttaaccaagtactggtaaggcagaaaacacagtcaacaggtacggttcctcttacactggtgactaaggactcctgctgtgctttcacgaagcctgctcaatgtgctgcttctatgccagggatgggactgggctcatatgagagttttatggtcaacataattctcttggtgtaaaataatggataaaaaactttatcagtgagaatctcagaaaagaatttattttaaaactgacattaatcaggaaaagcccccttgtacctaccaagtacaaagaggtggctaataagagatgatagtgattatagtgtagaataagtagctttaatgcacacttttcttcctctttcgctactgtcacctagttttgkttaaaatgtaaagacaaattaaagcactgtctggaacacaattgaagaattagaatggattactcacaagcactaataaagctttggtgagaagattctgaaaggcactcactctattttagtgtatggaatctcttttaattgttcttcggacaatccggat

SEQ ID NO: 73080 - DNA, 1138 bp, Homo sapiens
  misc_feature (1)...(1138): n = A,T,C or G
acacatatacacggggttaatttctaattgaaaggtaaacatctaagactgagaagtgtcccttagtgtcccacagtamaaagagtcctggtgtgaaccccccggtacactccagagttctttcctaatctcttttaacctgatgtggcactcacagctgtcctcttgtcaccctcctgcctggctccctcagagctccctacctacctacccagtctctacctccactacccaacatcctttcatttccttatcatacacgactggacttaatccctcctcctgtgagtaatcaacatcagacatctaactacccacgatcacaaaagatctgtacttatcttggctcactttaaaaaggtttgggaaagncccantnggnttnntnggggcccanaangnntggagtngggagtgaggcgtctaaatcttgataatgcacagatttaaaacacacacgcacagaaactttaccgctcaagacattatttgggggactggccaaatcaccaccattacggtgtaattgtgctcancacatggcgttgcctagcacnaggaggagcacgccaaaattccacactgaggtgtaatgaatcactcactgactactgttcacaattgtattttgatgggaagatattcacatctggttcagtctggaacaagacttcagagaattgtgcagactcaaaactgagaagcagcaggtatttcaccaacagcctggctctacaacaaagaagactattcctatttattcaggtgaatgtatactttggttaaaaacaacactaaacctaaaatatggctttgagggccttgttttcatgacattttgttttgactgtgcttcaacttctatggcttcaaacatggttaataaatgtcacaaatattagaaggtaaatatgacaaataaacaatgaaataatcctagttgaactaaaacactttagaagacctgaatatccacatgctacttcaaattcagtgtttttgaatcaaggtataaaaagagtccacatacgaacgagatctgtgtctggatcgcctgttgttggggtcggcttggtttttttccttttgtctccttaatacagcttcccactgaggcgctgaatcaaccatatcattc

SEQ ID NO: 73081 - DNA, 1138 bp, Homo sapiens
  misc_feature (1)...(1138): n = A,T,C or G
acacatatacacggggttaatttctaattgaaaggtaaacatctaagactgagaagtgtcccttagtgtcccacagtaaaaagagtcctggtgtgaaccccccggtacactccagagttctttcctaatctcttttaacctgatgtggcactcacagctgtcctcttgtcaccctcctgcctggctccctcagagctccctacctacctacccagtctctacctccactacccaacatcctttcatttccttatcatacacgactggacttaatccctcctcctgtgagtaatcaacatcagacatctaacyacccacgatcacaaaagatctgtacttatcttggctcactttaaaaaggtttgggaaagncccantnggnttnntnggggcccanaangnntggagtngggagtgaggcgtctaaatcttgataatgcacagatttaaaacacacacgcacagaaactttaccgctcaagacattatttgggggactggccaaatcaccaccattacggtgtaattgtgctcancacatggcgttgcctagcacnaggaggagcacgccaaaattccacactgaggtgtaatgaatcactcactgactactgttcacaattgtattttgatgggaagatattcacatctggttcagtctggaacaagacttcagagaattgtgcagactcaaaactgagaagcagcaggtatttcaccaacagcctggctctacaacaaagaagactattcctatttattcaggtgaatgtatactttggttaaaaacaacactaaacctaaaatatggctttgagggccttgttttcatgacattttgttttgactgtgcttcaacttctatggcttcaaacatggttaataaatgtcacaaatattagaaggtaaatatgacaaataaacaatgaaataatcctagttgaactaaaacactttagaagacctgaatatccacatgctacttcaaattcagtgtttttgaatcaaggtataaaaagagtccacatacgaacgagatctgtgtctggatcgcctgttgttggggtcggcttggtttttttccttttgtctccttaatacagcttcccactgaggcgctgaatcaaccatatcattc

SEQ ID NO: 73082 - DNA, 1138 bp, Homo sapiens
  misc_feature (1)...(1138): n = A,T,C or G
acacatatacacggggttaatttctaattgaaaggtaaacatctaagactgagaagtgtcccttagtgtcccacagtaaaaagagtcctggtgtgaaccccccggtacactccagagttctttcctaatctcttttaacctgatgtggcactcacagctgtcctcttgtcaccctcctgcctggctccctcagagctccctacctacctacccagtctctacctccactacccaacatcctttcatttccttatcatacacgactggacttaatccctcctcctgtgagtaatcaacatcagacatctaactacccacgatcacaaaagatctgtacttatcttggctcactttaaaaaggtttgggaaagncccantnggnttnntnggggcccanaangnntggagtngggagtgaggcgtctaaatcttgataatgcacagatttaaaacacacacgcacagaaactttaccgctcaagacattatttgggggactggccaaatcaccaccattayggtgtaattgtgctcancacatggcgttgcctagcacnaggaggagcacgccaaaattccacactgaggtgtaatgaatcactcactgactactgttcacaattgtattttgatgggaagatattcacatctggttcagtctggaacaagacttcagagaattgtgcagactcaaaactgagaagcagcaggtatttcaccaacagcctggctctacaacaaagaagactattcctatttattcaggtgaatgtatactttggttaaaaacaacactaaacctaaaatatggctttgagggccttgttttcatgacattttgttttgactgtgcttcaacttctatggcttcaaacatggttaataaatgtcacaaatattagaaggtaaatatgacaaataaacaatgaaataatcctagttgaactaaaacactttagaagacctgaatatccacatgctacttcaaattcagtgtttttgaatcaaggtataaaaagagtccacatacgaacgagatctgtgtctggatcgcctgttgttggggtcggcttggtttttttccttttgtctccttaatacagcttcccactgaggcgctgaatcaaccatatcattc

SEQ ID NO: 73083 - DNA, 1138 bp, Homo sapiens
  misc_feature (1)...(1138): n = A,T,C or G
acacatatacacggggttaatttctaattgaaaggtaaacatctaagactgagaagtgtcccttagtgtcccacagtaaaaagagtcctggtgtgaaccccccggtacactccagagttctttcctaatctcttttaacctgatgtggcactcacagctgtcctcttgtcaccctcctgcctggctccctcagagctccctacctacctacccagtctctacctccactacccaacatcctttcatttccttatcatacacgactggacttaatccctcctcctgtgagtaatcaacatcagacatctaactacccacgatcacaaaagatctgtacttatcttggctcactttaaaaaggtttgggaaagncccantnggnttnntnggggcccanaangnntggagtngggagtgaggcgtctaaatcttgataatgcacagatttaaaacacacacgcacagaaactttaccgctcaagacattatttgggggactggccaaatcaccaccattacggtgtaattgtgctcancacatggcgttgcctagcacnaggaggagcacgccaaaattccacactgaggtgtaatgaatcactcactgactactgttcacaattgtattttgatgggaagatattcacatctggttcagtctggaacaaracttcagagaattgtgcagactcaaaactgagaagcagcaggtatttcaccaacagcctggctctacaacaaagaagactattcctatttattcaggtgaatgtatactttggttaaaaacaacactaaacctaaaatatggctttgagggccttgttttcatgacattttgttttgactgtgcttcaacttctatggcttcaaacatggttaataaatgtcacaaatattagaaggtaaatatgacaaataaacaatgaaataatcctagttgaactaaaacactttagaagacctgaatatccacatgctacttcaaattcagtgtttttgaatcaaggtataaaaagagtccacatacgaacgagatctgtgtctggatcgcctgttgttggggtcggcttggtttttttccttttgtctccttaatacagcttcccactgaggcgctgaatcaaccatatcattc

SEQ ID NO: 73084 - DNA, 1138 bp, Homo sapiens
  misc_feature (1)...(1138): n = A,T,C or G
acacatatacacggggttaatttctaattgaaaggtaaacatctaagactgagaagtgtcccttagtgtcccacagtaaaaagagtcctggtgtgaaccccccggtacactccagagttctttcctaatctcttttaacctgatgtggcactcacagctgtcctcttgtcaccctcctgcctggctccctcagagctccctacctacctacccagtctctacctccactacccaacatcctttcatttccttatcatacacgactggacttaatccctcctcctgtgagtaatcaacatcagacatctaactacccacgatcacaaaagatctgtacttatcttggctcactttaaaaaggtttgggaaagncccantnggnttnntnggggcccanaangnntggagtngggagtgaggcgtctaaatcttgataatgcacagatttaaaacacacacgcacagaaactttaccgctcaagacattatttgggggactggccaaatcaccaccattacggtgtaattgtgctcancacatggcgttgcctagcacnaggaggagcacgccaaaattccacactgaggtgtaatgaatcactcactgactactgttcacaattgtattttgatgggaagatattcacatctggttcagtctggaacaagacttcagagaattgtgcagactcaaaactgagaagcagcaggtatttcaccaacagcctggctctacaacaaagaagactattcctatttattcaggtgaatgtawactttggttaaaaacaacactaaacctaaaatatggctttgagggccttgttttcatgacattttgttttgactgtgcttcaacttctatggcttcaaacatggttaataaatgtcacaaatattagaaggtaaatatgacaaataaacaatgaaataatcctagttgaactaaaacactttagaagacctgaatatccacatgctacttcaaattcagtgtttttgaatcaaggtataaaaagagtccacatacgaacgagatctgtgtctggatcgcctgttgttggggtcggcttggtttttttccttttgtctccttaatacagcttcccactgaggcgctgaatcaaccatatcattc

SEQ ID NO: 73085 - DNA, 1138 bp, Homo sapiens
  misc_feature (1)...(1138): n = A,T,C or G
acacatatacacggggttaatttctaattgaaaggtaaacatctaagactgagaagtgtcccttagtgtcccacagtaaaaagagtcctggtgtgaaccccccggtacactccagagttctttcctaatctcttttaacctgatgtggcactcacagctgtcctcttgtcaccctcctgcctggctccctcagagctccctacctacctacccagtctctacctccactacccaacatcctttcatttccttatcatacacgactggacttaatccctcctcctgtgagtaatcaacatcagacatctaactacccacgatcacaaaagatctgtacttatcttggctcactttaaaaaggtttgggaaagncccantnggnttnntnggggcccanaangnntggagtngggagtgaggcgtctaaatcttgataatgcacagatttaaaacacacacgcacagaaactttaccgctcaagacattatttgggggactggccaaatcaccaccattacggtgtaattgtgctcancacatggcgttgcctagcacnaggaggagcacgccaaaattccacactgaggtgtaatgaatcactcactgactactgttcacaattgtattttgatgggaagatattcacatctggttcagtctggaacaagacttcagagaattgtgcagactcaaaactgagaagcagcaggtatttcaccaacagcctggctctacaacaaagaagactattcctatttattcaggtgaatgtatactttggttaaaaacaacactaaacctaaaatatggctttgagggccttgttttcatgacattttgttttgactgtgcttcaacttctatggcttcaaacatggttaataaatgtcacaaatattagaaggtaaatatgacaaataaacaatgaaataatcctagttgaactaaaacactttagaagacctgaatatccacatgctacttcaaattcagtgtttttgaatcaaggtataaaaagagtccacatacgaacgagatctgtgtctggatcgcctgytgttggggtcggcttggtttttttccttttgtctccttaatacagcttcccactgaggcgctgaatcaaccatatcattc

SEQ ID NO: 73086 - DNA, 678 bp, Homo sapiens
gaatgaagccactattatttaccaaaaaaatatcaagtagatgatctaagaagtctttgcaggtcacatatctctgattgctgggatttccccatgatgtatggggggcaacccctatagagaaagtgagctcatgaaagctgctcattgttgtttataatgctgttccgtgaacataattggagagaagaaaaaatgactctgcaacagtgtcttaacagaaaacaaggcttagctctcagggaaacaatccaygtaatatattaagagaaggcttttccactggggaatgccccctgggaaagcagatgcagaggaccatgacaagtcttcatacatatgcaatcactgacttctgaggatctgatgcctctaaatgccataaaccctctttccagggctacagttcagtgcaccactataatgaacacagtacattaaacatgaatatcatctactttattttacaagtccctctgagttagtccattatatcatgccattttcaaaatcacaagaaatttttaattttctgcggagaatgcagaccacagacaatctgtgagttcaccttgtgacaaaaagagcactttcttcaaataagagagtcaggtcctgatgttttatatttcattggtgttttaatgtattatttggcccagagatttattggatccc

SEQ ID NO: 73087 - DNA, 1075 bp, Homo sapiens
aacttgtgaattaaatgagcgaattcttaaaataattgatgttgctggagaggatgtggagaaataggaacacttttacactgttggtgggactgtaaactagttcaaccattgtggaagtcagtgtggcgattcctcagggatctagaactagaaataccatttgacccagccatcccattactgggtatatacccaaaggattataaaacatactgctataaagacacatgcacacgtatgtttattgcagcactattcacaatagcaaagacttggaaccaagccaaatgtccaacaatgatagactagattaagaaaatgtggcacctatacaccatggaatactatgcagccataaaaaatgatgagttcatgtcctttgtagggacatggatgaaactggaaaccatcattctcagcaaactatcgcaaggaaaaaaccaaacaccgcatgttctcactcataggtgggaattgaacaatgagaacacgtggacacaggaaggggaacatcacacaccagggactgttgtggggtcgggggatgggggagggatagcattaggagatatacctaatgctaaatgacgagttaatgggtgcagcacaccaacatggcacatgtatacatatgtaacaaacctgcacattgtgcacatggaccctaaarcttaaagtataaaaataataaaataaaataaagtaaaaaataaaataaaataaaataattgatgtggtaacatatgacagatgttgctattagtaaaatattaaaaatttttaaaagaatatatgaagtctagtaagtcaggtttggatgtaatgaagttaactcacaggaattgacttgactgggtttcttaagtatgaaacccacaagaacaacaccctcttccaaagaccttttccactaactccaccaaacaaaacagacatagtctttctcttttccagagtccatttcttatgtagcagccagatttctccctacactatttacaactctcccaccccaattttatttgatcatcttgttctctgagccagtaatcagtaagattctaattacctt

SEQ ID NO: 73088 - DNA, 711 bp, Homo sapiens
agccataaaaaaggataagttcatgtcctttgcagggacatggataaagctggaaatcatcattctcagcaaaccaacacaagaacagagaaccaaacactgcgtgttctcactcataagtgggagttgaacaatgagaacacatggacacagggaggggaaaatcacacactgaggcctgtcggagggttgggggctaagggaggtatagcattaggagaaatacctaatgtagatgacgggttgataggtgcagcacaccaccatggcacatgtatacctgtgtaacaaaccatcatgttctgcacatgtatcccagaacttaaagtaggataatttaaaaaaaagtaaatggaagccagaagaaaccttgattcattcaggtggatagaatttatcactactccctgttagaatgcaaagccttgcagtctttttacttgccagcatttttagtcctgctacagggagatttcttaataaatattattcagtyggatttggcttgggagaagcaaagtgagcatcaggagaaagtgaaacatggttagattaggaaaacaaaagaagccctcctacccgaggcaattaggaacaatgggtggtgaattaattgagagagttatttggagagagaatcataaaaaatgaagcgcatacactcgacttacagtggcgttaagtcctagtaaacttaaggtaaattgaaaa

SEQ ID NO: 73089 - DNA, 711 bp, Homo sapiens
agccataaaaaaggataagttcatgtcctttgcagggacatggataaagctggaaatcatcattctcagcaaaccaacacaagaacagagaaccaaacactgcgtgttctcactcataagtgggagttgaacaatgagaacacatggacacagggaggggaaaatcacacactgaggcctgtcggagggttgggggctaagggaggtatagcattaggagaaatacctaatgtagatgacgggttgataggtgcagcacaccaccatggcacatgtatacctgtgtaacaaaccatcatgttctgcacatgtatcccagaacttaaagtaggataatttaaaaaaaagtaaatggaagccagaagaaaccttgattcattcaggtggatagaatttatcactactccctgttagaatgcaaagccttgcagtctttttacttgccagcatttttagtcctgctacagggagatttcttaataaatattattcagttggatttggcttgggagaagcaaagtgagcatcaggagaaagtgaaacatggttagattaggaaaacaaaagaagccctcctacccgaggcaattaggaacaatgggtggtgaattaattgagagagttatttggagagagaatcataaaaaatgaagcgcatacactcgacttacagtggcgttaagtcctastaaacttaaggtaaattgaaaa

SEQ ID NO: 73090 - DNA, 654 bp, Homo sapiens
aatcagtaaatcccctggctggggtctggtacccttggctgtaataatcattagtacaagatgttctgtcaacagggattgtttggacatattctttgggctgacaatttatgtcaagccctatgtgggacacggaataggaaaatgctattcctgtcctgaaaggagagaactgggaaggctagagttacacaaatgagataaataccaagacagcatataattactgctaaactgtgtagtaagaaattaagtgctataggaattgggaaaagtagggagcagggagggctcmaacagttgaggagtctacactgaagagctgggattgagctgaaccttgagaaatgacacaaactatggatagtctgaaaggaaggagggtacaaaagacgcaggaggaagaacacagccaaaccagcatacttgtttgttactttattttcgggacagcaacacaaggaatgtgaaaggttgccgtcccaaatcccgaagcaaggctatttctgaatagttgtccaacattcaaacttctgggcctttatttattgtttcctccgcttgcaatgcctttcttccttctccacctggcaagctcttattcacatttaaaggccccgctcaaatgcaactacttttctgaagccttccaag

SEQ ID NO: 73091 - DNA, 721 bp, Homo sapiens
aaggtgattaaggtctctggagactagattatggcagaggggagagttgttacagctctgggcaataatgcaraagtgtatttttgatcttttgaaataaaagcagatgttttcttatgtttcttgcatattattaaagcactttctagcatagtatcttcatatcaggtgctagaggctagattcgctctagaaaaggtacttcatttggtaaatcagccacatcagagtcactgtctgaatgggtttgtgttaatccagtcactttccaatctgtctgctttctgcatagaccaaagtggtaagttagacagtgatgtaataggagttaccacccttaagtatcaagtttttgatgatagtattaacctctacagttctcccatggatgcagtatttattttggttttctgttgtggtagggaggggaagttcagtcttccagttggtcattcctatctgttgtaatagcccatattccatcgtcagggagccattgtgggacttctacccacaatgtggagtacgtttactgtcaagtggagtattaagttttatacaatccccaccttaccccccttccaaaatttaacataagttatctctcaagtaatcagtcaagtaacataatccagctacccaagtggagtgtatttactgcaataatacattcaaaaactgcaaaataaccataagaggggttcgtggacttactggatcc

SEQ ID NO: 73092 - DNA, 1159 bp, Homo sapiens
tgtgtgtgtgcgtgcatccatccattggttattgtagcccacttytgtggttagctgatactgcttatagctttcagatgctttgacatttgctgtttcctcacagaattttgtgtagatcttagcacactgagcactgttgtggttcaggacacagttggtttattggcttttagggtcagatatacagctggctgtttggactctaactgtcaaaatgctaaatattgggcgcctactcccagatccttctcctgggtgttcagaaagctgtaatgagcactggggacttaagaaaccatgtagacatgcagcacctctttcaaagccattgcccaaaaagcttgaggggatttctgtggctaaaacttgtattgactgctgaaataaggaaataatgaaatgcaaattctgttttactgaagcctagttttagttattttaggttatgactataaaacaacattacaaagggttgatagtcttgtacatttctgcagtgtggtctatggttgccatgtttctgtttatgaactactggggctaacgtttttggtgagaaccagaatgatctatactcaaagtttgacttctgtcagttttttgtaacctctaggcattttattagttctttcacttttggtttcttttgttaggtaagagcatacaggctgggcgcagtggctcatgcctgtaatcccagcactttggaaggctaaggtgggtggatcacaaagtcaggagtttgagaccatcctgaccaacatggtgaaaccccatctctactaaaaatacaaaaattagccaggtgtggtggtgcatgcctgtaatcgcagctacaggaggctgaggcaggagaatcgcttgaacccgggaggcggaggttgcagtgagccgagatcacaccactgcactccagcctagacgacagagcgagactccttctcaaaaaaaaaaaaaaaaaaaaaaaaaaatgcaatgtacctaactttaaagaatttttttctaccaggtgtgtttcatggaattacaacatatggttatatctttgtgaataaatgatgtggcatcccaaaacgatggcagtcttggaaacagcaaaaataattgtggagtgtgtggctaacagtcttgttcttagtctttctagtaatctaag

SEQ ID NO: 73093 - DNA, 1246 bp, Homo sapiens
gggccaggagaggggtaattaccagcacaaagtacctgatatgatttggctgtgtccccacccaaatctcattttaaattgtagctgtcataattccaacatgttgtgggagggaattggtgggagataattgattgaatcatgggggcagtttcccatatactgttcttgtggtagggaataagtctcatgagatctgatggttttataaggggaaaccccttttgcttggttcttattctctcttaccaccgccacgtaacacatgcctttcaccttccaccatgattgtgaggcatccccagccacgtggagctgtgagtccagtagtcctccttttctttgtaaattacccagcctcaggtatgtctttatcagcagcataaaaatggactaatacaatagttggactaaagcagtaggaaagagttagaaaattcaccagattcaacaatcattctgtgctagcggtttttattgtgaactatacattacataaattcaaccctgtttcaagaaacgttatattcttcctgaatcctagttctaaagctggtggtacacctcaggccctgattttagacagtgattttttttaaagttagtcctgataacagcttaatattgcaaagcaaactggattttcaacagtactcaacttgaaaactcaattcaaaagccaacaatgaatttagtgaaaagaggacagctctcctgaatcaaattacacctcaacaatagaaaggaaaatacagccttaataagtaaatttgataatagttgttactgagaaattataaacatgaagaaatattttgtaggaccagggtttgtagtggtatatgcaggcacagccataatgtgtgccgtttgatgaataatgatgaaatagaagtatagatattaaatatccttcttcccaaatggccaagagagatcaaggcagaacactcagagtgaggccaaacctgcacctacttccctgggcacaatggctctgccaagcccaaggtcagcctcattttgcctgccctttcccacgagggcagcctgctggctggtagagttccgtgtcttcccttctagctggagcctggcagctgcaaatgtccataattatggaagatccactagttttctgctctgtggttgaaacaaggacagtttctctttttattgctgttctgtggcttcatgttctgaatcgccgstattattaataatggccaaggggatcttattagca

SEQ ID NO: 73094 - DNA, 586 bp, Homo sapiens
ttctacaccctaaccccacaaagtttcagatttagtatgtctagaatagaacctggtatttatttgtttttttttttgtttttttgtttttttgttttttttttagacagagtctgtctctgtcactcaggctggagtgcagtggcctgaacacagcttactgcaccctacctcatcctcctgagcttaagcaatccttccacctagctgagaccacaagtgtgcaccaacacacctggctaattttttttttttttttttyagtagagatgaggtttctccatgttgcccaagttgttctagaactcctggcctcccaaagtgctgggattacaggcataagccactgcacccgaccctgatattttcatttctaacaaatttcacatgatactgattctgctgatctgggaccacactttgagaataactaccctagacttttgcaatgatgcctgaatttttctctgcttacacttttgcctacctccttacagcaaaaccatccttccttgaacccaagaggacttaaagatatctgctcaccttctgtaaggcaaactgaaacttctatttgagctggtgt

SEQ ID NO: 73095 - DNA, 605 bp, Homo sapiens
ctccccagtgaggcctctccttttgtagaattgcagccctcctcccatctgtgctttattttctgcaccagctgttttcgtctgatgggctattttagatattatattttattatccgttcttgcccattagaaagtaagctctaagacagtaagaatatttgccatctttctggcccctggcacatagtggcactcaatcattttttaatgaattaaaactgaattcagtatgggatttttcaagcaccgccctctccctytcttgctttagttcccggactggggcgttctctaggatttctgcccaaaatgcctcgcctgcgggtggtccacatgtttctgtggtacctcatctacgggcaccctgccagcaacaccgtggagaagccaagcttcatcagtgaacggagaacgataaagcaggagtcaggcagggcaggcgtccggccgtcctcctctggaagtgcctgggaggcctgctctgaagccccatctaaaggcagccaagatggtgtcacctgggaggctgaagtggagcttgccacggagacaggtgagaggcccctgccactcctgcacctggggcgggcaggcccagtagta

SEQ ID NO: 73096 - DNA, 942 bp, Homo sapiens
tctactgggtgattcatgtcatgaagaaaatgcaaggcagtgaaacacatcgacgtagtgcagctgggaagatggcattttgctgcctggtgatctcactccatatttccaccatgttaaaggaaggttttctgcattgtgtgagtcatctcatgaagggttttaacaccagttcttaaatctcctgcatgtatttcattatatacttagaagttaaggtgcttattaaagacacagcttcgtattttccctggctatatctccttcactaataaaccagattttggagcttgaaatgttaacaagtaaacgttcagtgttttaattcagatatcaattgctttcatattgcgctgtggtttaaaatctcatatggttacaatcactgtgcaatgaaatgtcatgatctttcgagtcccctgggatcctcgccattgtgataagtgtgttgtgttaatggccagggctttgcctggctgaggtctttgtcagcagggaacaaacagtgatgctcctatggctgctcccatgaagactgctgcgagcacccgggtatgttctctttcagacaggctttaattacgttcattactatatggtgtcaggggcctctgttcttggccagaacggagtttagagattaaaaaaaatgtatgcagaacccaaggaacccatgaattcaagggtcctgaatgtaattctccaaacagacaacyggccagctctatttgcttgcaggaatgacaacttgatagaatgccaggataaaaataaactcccttaaaaccacagcctgtgcacaccggctcgatgtctgggtggcaatatgataggtcagaacgggagactagggagagagattgagcagcccctgggcggctcacagaggcctcctggaccgatggggcgtagagacctcctgcttcaggaggctgagcatgc

SEQ ID NO: 73097 - DNA, 664 bp, Homo sapiens
agttctggcacatagctggaattgatctttgggggagctctgcttgactttagaagaaagatgattatcacgttagatttaagttgggagtattcccaatgcattttgaaatgtttggaagtttctggaggaytatatttttctctaatttcttcttgattttattataaactagaataaaagaaaccttaaaaatagttacttttatttaatttatgggtagcttttcctgtgtttgatagagcaggttcctaaatctcgattttccctttctagcaagagcatatgtctctgtgttacatgagcaatttctgttactaaatcactctggtaaagttcctggggttgacggagtaggtattaccttctatgagagacaactctataaataccttgtttgagggaaatttattaatcagtagccctaggtaagctgctgctttatagtaaagtatgcttatattgggagagaggagggggacttcgtttttttaaaatcatttaaaaaaatgcagagtattaatttgccaacttacactgactaaaagttattgctgagctcccacacgataaatcagaaagaaagatccaacctaacaggccaagtcggttctcaaatgaaaactgatacccacaacagtatctcctgtcgtcttctttgcca

SEQ ID NO: 73098 - DNA, 782 bp, Homo sapiens
ctgcaccaagttatttgaaccttattcaccggcatgctctagtttcctatggctggtgggacaacaccaggtttaattacctcagcttcaggacactggcttgtttaaagcttgcactgttaggatgtcgtattgaaatttttgtctctcagacactgaatatgttttctcytgaaatgtttatgttgtttttacagaaagtcaaatatacccaagcaaaatgctacacacaaacacgggggcaagccttgcgttctttagcaggtgatttccaggaaaactgcattaattaaagttaacacaggtgtacgatcaaacgataacctcgcttattctttgcagcttggatgaattccaaggtgaagaggttttaataccaggaataattaacctgtcacctgagaagcccggcatgttcagcaaccccctccccaactgcgcactcacacaaaagacaatgaggttgtatcttccctgactagtcagactagaaatagccctgtccacacatgcccccaccatgcacagaaaaagagcagcatcccagaactttaacatcgaaggcatcttagatcttatgaatgatctcgggtttcatctaaaaaattctttgttttataaataagaaaactgtagctaaaaggagactctgaaaacgtcagcaagggtggagctgaggctgggctcttggctcctgtccagtacccactctcctttgcccagtcaatgattagcttggggaaaaatggaaatgagaacattttgtgcctaaaatgcctccc

SEQ ID NO: 73099 - DNA, 782 bp, Homo sapiens
ctgcaccaagttatttgaaccttattcaccggcatgctctagtttcctatggctggtgggacaacaccaggtttaattacctcagcttcaggacactggcttgtttaaagcttgcactgttaggatgtcgtattgaaatttttgtctctcagacactgaatatgttttctcctgaaatgtttatgttgtttttacagaaagtcaaatatacccaagcaaaatgctacacacaaacacgggggcaagccttgygttctttagcaggtgatttccaggaaaactgcattaattaaagttaacacaggtgtacgatcaaacgataacctcgcttattctttgcagcttggatgaattccaaggtgaagaggttttaataccaggaataattaacctgtcacctgagaagcccggcatgttcagcaaccccctccccaactgcgcactcacacaaaagacaatgaggttgtatcttccctgactagtcagactagaaatagccctgtccacacatgcccccaccatgcacagaaaaagagcagcatcccagaactttaacatcgaaggcatcttagatcttatgaatgatctcgggtttcatctaaaaaattctttgttttataaataagaaaactgtagctaaaaggagactctgaaaacgtcagcaagggtggagctgaggctgggctcttggctcctgtccagtacccactctcctttgcccagtcaatgattagcttggggaaaaatggaaatgagaacattttgtgcctaaaatgcctccc

SEQ ID NO: 73100 - DNA, 522 bp, Homo sapiens
tcaagccgtccacttgcccsaaagtgctgggattacaggcgtgagtcactgtgccaggcccagcactcattctggaggggccatagcacttctggtttccctgattagactgagattggttagatgtctttgcaaagggcacagtggagggcaaacaggtacccaaagacgatcaggtgggcctcagcacggtggcttctgtgggtgagacacacagtcccgtgtccaccccactgggctctctctcagcagagagggcaaaccttgggatctacagaacaaagctctaatgactctggaagggcccctcatggttacttcttccccctgcaagtactccaaagttgagtaaaactggctctcattccagaagcacaaagaaagtaactgcagagagccactgcctgcggaccttggaggctcacacccatgatctgacaacagtatagaatggcttcttgaactcaagtaatgaatgcatagtagatttgctaaaacaccaagcattctaatacaatcccc

SEQ ID NO: 73101 - DNA, 731 bp, Homo sapiens
catctggcaatgcaattgcaggagcctgcaaggctgcaggacggcctctgggtgctgaggaggaggctggggctccagccagcacagcaggtttcctttttcatttaagttaaaagtgataaggctgtggattaagatgttttacaggttccacccctcaatccttgtggaaccctccttcaagttgaacatgaaacatcagatcacaccccactgagccccacttagtgtcagacagagcacgaactgtggggaaggagagtgcggcttattccctcggggctgtggctccagctttgccaggctgctgaggacagagctcggagtacctgcagcctagaggccagggaagcctctcagggaggcagaattcagtaagaaagatgcacactccatcctcagagaaacggaacatgggtttcctgaacatttaatcaggaacaaaaaattgttagtatccaggacataatagaaatatattttgcatttcagaagaaaagtaaagcaacattttaaattaaaatctatgttcccaactcaattgttaaaatcatacaatgaaacaacaatccccaagggttgacatatgccatgtaggtccattattctgtgtttttgccatggatagttttgctttatagactaaattcataactgktgtgaatttctttctccttttacagcaacaataatcatagccaagatttagtgagtgtttatcacacctgaga

SEQ ID NO: 73102 - DNA, 2258 bp, Homo sapiens
  misc_feature (1)...(2258): n = A,T,C or G
cttgagccccggagttcgaggctgcagtgagctatgatggcgccactgtactccagcctgggtgacagagtgagaccctgtctcaacaacaaccaaaaaggtgggagtgggctgaggagtgtttaaatgcttaggcttcttatccacacaactctggggataagaggaaaactttaggtttggccctggctctgagactgtccttttcttatccgaccctattgtccagcagcacggccacacctgcctgccttgctgtgtggccatgctctgacctcaagaccggattctgtcacggcccaggcctcttaaccaaacgcacacttggtgatctcagttctgcaagcaagataccagtcactgccactcgcttccctaccctgctcgtctttcctgtcaaataacacagttccccaggagtgatgtctgattagaattcccgctctttcactaattggctgtgcaatttagggtaaataattcagccagtcagaacctcagttttcttgcatgtaaaatgaagtgtttggatgaaatcgtttcaaaggtctctttgaattctagcataccactgcctctctgtcaggctcttagagactgtggctgtccctgattagtcttttgtccatagaaagggtgagtagcaattaagtgcaccaaacaaacatgttacaacatattctttgtaaaatatatgctttcctgtcaattcatccttaaagtaactgtaatttttagattaatcattcccagtctagaattggaccatatatagaataaaattttcttcttacataacactgtatatcttattcttacatagattatgaaacaaccagtattcttgaaaatgaggaaaccaatactggctaacatatgcagaaaataaatttattgaaaggatactgggtgtctcaaaaatgtcatgaagggccgggcgtggtggctcacgcctgtaatcctagcactttgggaggccgaggcgggcaatcacaaggtcaggagattgagaccatcctggctaaaacggtgaaaccccgtttctactaaaaatacaaaaaattagcaggagaatggtgtgaacctgggaggtggagcttgcagtgagccgagatcatgccactgcactccagcctgggtgacagagcgagactctgtctcaaaaaaaaaaaatagaggtcatgaacgggctgggtgcagtggttcatacctgtaatcccagcactttgggaggccaatgcaggaggaccacttaagcctaggaggtcagggctgcagtgagccatgatcacaccactttactccaacctgggtgacagagagagactctgtctcaaaaacaaaaaaaagagtcaggaaaaatggagaattaaccttggaaacaggaactcaggtacacagggcacaataaggatcccaccagagatttagtctgcaaagggtgccagccctaacatcatcagctccagacacttgtcaatatccactgacatctcaattccatccagcagccactctgaatagtctctgctctctctggccttggtatcactccctgaagatccaaagcctcagggaagaacatgtgattggcagagcattggtcaaatgttcacacacagagccccgctcaaatgtccacacacagagcctcgctctgtcacccaggctggagtgaagtggagtgatgttgtaattattctagaatctggagggagattctttgctcctctccagcttccagattgggaagtaagatcctggccttcactraccttgtacttgccccaaaataagaannnagggttgtttgggatgctggggaacaacccaaaaatgacaaatgtttactacagttttctcacttatgattataaatgtaacacatcctgaaggcatctgtaagaggtttcattatattatggacaggtttatatctggtcaattattccaacattactttatctcttcattgatttacatgaatcagtatccagctaatgaaaacatattcatcagtatactgactaatttcttgggctggcttttcttatgtgcatgactcctctgcatgacaaaatgagtgtttaagagtgaatattgaatcactgggaaaaaaaaaacacatcttcattctgagcacaggctgtcattgactttttttttttttttttttgagatggagttttgctcttgttggtcaggcagtagtgcaatggtgcaacctcagctcactgcaacctctgcctcccgggagg

SEQ ID NO: 73103 - DNA, 780 bp, Homo sapiens
ctctggcttcagccctcagagtggctgggactataggcacaaaccactgtgcccagctaaggacctgtttctgatgtctccgaggcccaatatggggtgagctgatccttccgtctgcccctgtgcctgctttgccactgatggcccctctccccagagcctctaggtacagttgcataggttgtgcactgcatataggctccgtatgtaaggggctgccactggtgttccaggtaccctgcatttacatatttattacaagtttcccagcagatggaggtcaagtacctccaggaaggggcatgtcttttacacaaaagcaccatatgggctacatcagccctggtcccgtctgcccggtgccctcaggtttatgaatggctcatgtgtgaggacctgcccctctctccccatgtgtcacccccagatgggttgtgcaggctccctggctctggtgtgctgctccaccctcaggctcaaccccaggaggccacaccaccttggccagcagactccagggcccacaccattcctagctgagccgccagccctggcacaactgccacctttcacagagcctytgtgtatgctcgccatgacgccccctaggccagctttcctccatggcattcacagaccacccccaaaacacacacacacacacacacacacacacacactctctctctctctctcacacctggaagagctgtgaccagctatcttgtctctttttcctccctcccttcttcctgtccttcattcagcaaaaatttatga

SEQ ID NO: 73104 - DNA, 780 bp, Homo sapiens
ctctggcttcagccctcagagtggctgggactataggcacaaaccactgtgcccagctaaggacctgtttctgatgtctccgaggcccaatatggggtgagctgatccttccgtctgcccctgtgcctgctttgccactgatggcccctctccccagagcctctaggtacagttgcataggttgtgcactgcatataggctccgtatgtaaggggctgccactggtgttccaggtaccctgcatttacatatttattacaagtttcccagcagatggaggtcaagtacctccaggaaggggcatgtcttttacacaaaagcaccatatgggctacatcagccctggtcccgtctgcccggtgccctcaggtttatgaatggctcatgtgtgaggacctgcccctctctccccatgtgtcacccccagatgggttgtgcaggctccctggctctggtgtgctgctccaccctcaggctcaaccccaggaggccacaccaccttggccagcagactccagggcccacaccattcctagctgagccgccagccctggcacaactgccacctttcacagagcctctgtgtatgctcgccatgacgccccctaggccagctttcctccatggcattcacagaccacccccaaaacacacacacacacacacacacacacacacactytctctctctctctcacacctggaagagctgtgaccagctatcttgtctctttttcctccctcccttcttcctgtccttcattcagcaaaaatttatga

SEQ ID NO: 73105 - DNA, 780 bp, Homo sapiens
ctctggcttcagccctcagagtggctgggactataggcacaaaccactgtgcccagctaaggacctgtttctgatgtctccgaggcccaatatggggtgagctgatccttccgtctgcccctgtgcctgctttgccactgatggcccctctccccagagcctctaggtacagttgcataggttgtgcactgcatataggctccgtatgtaaggggctgccactggtgttccaggtaccctgcatttacatatttattacaagtttcccagcagatggaggtcaagtacctccaggaaggggcatgtcttttacacaaaagcaccatatgggctacatcagccctggtcccgtctgcccggtgccctcaggtttatgaatggctcatgtgtgaggacctgcccctctctccccatgtgtcacccccagatgggttgtgcaggctccctggctctggtgtgctgctccaccctcaggctcaaccccaggaggccacaccaccttggccagcagactccagggcccacaccattcctagctgagccgccagccctggcacaactgccacctttcacagagcctctgtgtatgctcgccatgacgccccctaggccagctttcctccatggcattcacagaccacccccaaaacacacacacacacacacacacacacacacactctytctctctctctcacacctggaagagctgtgaccagctatcttgtctctttttcctccctcccttcttcctgtccttcattcagcaaaaatttatga

SEQ ID NO: 73106 - DNA, 780 bp, Homo sapiens
ctctggcttcagccctcagagtggctgggactataggcacaaaccactgtgcccagctaaggacctgtttctgatgtctccgaggcccaatatggggtgagctgatccttccgtctgcccctgtgcctgctttgccactgatggcccctctccccagagcctctaggtacagttgcataggttgtgcactgcatataggctccgtatgtaaggggctgccactggtgttccaggtaccctgcatttacatatttattacaagtttcccagcagatggaggtcaagtacctccaggaaggggcatgtcttttacacaaaagcaccatatgggctacatcagccctggtcccgtctgcccggtgccctcaggtttatgaatggctcatgtgtgaggacctgcccctctctccccatgtgtcacccccagatgggttgtgcaggctccctggctctggtgtgctgctccaccctcaggctcaaccccaggaggccacaccaccttggccagcagactccagggcccacaccattcctagctgagccgccagccctggcacaactgccacctttcacagagcctctgtgtatgctcgccatgacgccccctaggccagctttcctccatggcattcacagaccacccccaaaacacacacacacacacacacacacacacacactctctytctctctctcacacctggaagagctgtgaccagctatcttgtctctttttcctccctcccttcttcctgtccttcattcagcaaaaatttatga

SEQ ID NO: 73107 - DNA, 725 bp, Homo sapiens
atcacctgaggtcaggagttcgagaacagcctggccaacatggtgaaaccccatctctactaaaaatacaaaaattagctgggcatggtggtggacacctgtaattccagctgctcaggaggctgaggcaggagaatcgcttgaacctgggaggtggaggttgcagtgagccgagattgtaccactgcactccagcctgggcaacaagagtgaaactctgtctcacacacatmcaaaaaaaaaaaaaaaaaaaaaaaaaaaaggatctgagtgagacctcaggtgagtctagaggtttggggcagcagccagtctgctacctctgtggctttgcccctcccatctgtgcagcaagagcctgggttagacagcagaggggactaggagtttgaggtcataggtcttgatttcacagcaagaagggtctggatgggaccacaggtgagactaaaagtcaatggcagtttaatagcagggggtgacaaactactatagcaagaagggtctgggtttgaccaccaggaggcctgggatcaagtgtggagctgtggcagtaagagggacctggatttgattccagggaggactagagattccgggcagcccttctgctagctgctggtaggggctgcacccatggtgctgaaggggactggaggtctggggcaaggggtggaacttgggccagtgatttgggttcgattagaggggcttgggtgtgacgg

SEQ ID NO: 73108 - DNA, 708 bp, Homo sapiens
aaatgaggatgataacaagctcaagagatctgttatacaacgtggcgaccatagttaatagcaatgtattgtatagagtgcttgaaaatcactgagagtagatttcaagtgttctcactttaatatctggtaagtatgtgaggtaagccatatattaattagcttgatttagccattgcacaatgtgtacatagtccaaaacatactgttgtacaccataaatatatacaacttttttgttagttaaaaaaatagtaaaatgatgatgacaaacacagaccaggaagtaatagtgtggcttccactaagcctattttataaaaataaaacattctgttgtttgtatcagttggcctgcaaaatccagaaaaattattcccrtttaaatcataacactttctggtttcatttaattccactgttattgttaggttgagaaatgtaaataaatgtatagagatgcaaactgaaaataacagggactaaaccttctccccatggtttcccaggaagaagatggtgaagttagaaattcttcctagtttcctttcatttatacaaaatcacacagtagctaggctatataatgttttggctgatgatttcaatgcctgttacacatatcattttgttattttgcggcttttctggtttttttcattatccttcatctgtctattttcagttgcaaaggaaatgtttgtgttg

SEQ ID NO: 73109 - DNA, 759 bp, Homo sapiens
tggatgctccatagaacaggaggcctgggtctgcagctgctgtttaggtggctgcagtggaacagggacctcccgtcccaactcagaaggggyagatctcctgctggctccatggagcgtgcagccccagctgcgcttctctgttgcagctggcatgatggcagcagccactgccgtcactgttgggagagaagcacagacaggaggaactgaggtcgaggctcagaggccgggcagggacgcagttattaaggatttcattggtgcctggggtacgacaggtgccactaggcttaggtacagtggtggaacaacatggcatcctgtggcatgccagcattcacagtgcaaacacttgcagttatggcatcccatatctttatggccaatttctctaccctaccccctacacaatttagtttagaagcaaacaatatcattgaagaagagaaagtgtgaacgaaatgtacccacagaaaatctgaatttgtgaattattgctcagtgcagtatcagatgtgttgtgtccagttgcacacactgagactgagcattggggaatctgagactcgatggactctgaaccagacctaggagcatgtcggggtggatgcagtgagatgagccctctgtgcctggattcccaacccagtgaccctgtcaggaagagccagggtgtcaagtcatgaagatgagcctaaagagccacccagcatgcactggccaagtcacaggggtgagccacttggtggcttgcgg

SEQ ID NO: 73110 - DNA, 759 bp, Homo sapiens
tggatgctccatagaacaggaggcctgggtctgcagctgctgtttaggtggctgcagtggaacagggacctcccgtcccaactcagaaggggcagatctcctgctggctccatggagygtgcagccccagctgcgcttctctgttgcagctggcatgatggcagcagccactgccgtcactgttgggagagaagcacagacaggaggaactgaggtcgaggctcagaggccgggcagggacgcagttattaaggatttcattggtgcctggggtacgacaggtgccactaggcttaggtacagtggtggaacaacatggcatcctgtggcatgccagcattcacagtgcaaacacttgcagttatggcatcccatatctttatggccaatttctctaccctaccccctacacaatttagtttagaagcaaacaatatcattgaagaagagaaagtgtgaacgaaatgtacccacagaaaatctgaatttgtgaattattgctcagtgcagtatcagatgtgttgtgtccagttgcacacactgagactgagcattggggaatctgagactcgatggactctgaaccagacctaggagcatgtcggggtggatgcagtgagatgagccctctgtgcctggattcccaacccagtgaccctgtcaggaagagccagggtgtcaagtcatgaagatgagcctaaagagccacccagcatgcactggccaagtcacaggggtgagccacttggtggcttgcgg

SEQ ID NO: 73111 - DNA, 759 bp, Homo sapiens
tggatgctccatagaacaggaggcctgggtctgcagctgctgtttaggtggctgcagtggaacagggacctcccgtcccaactcagaaggggcagatctcctgctggctccatggagcgtgcakccccagctgcgcttctctgttgcagctggcatgatggcagcagccactgccgtcactgttgggagagaagcacagacaggaggaactgaggtcgaggctcagaggccgggcagggacgcagttattaaggatttcattggtgcctggggtacgacaggtgccactaggcttaggtacagtggtggaacaacatggcatcctgtggcatgccagcattcacagtgcaaacacttgcagttatggcatcccatatctttatggccaatttctctaccctaccccctacacaatttagtttagaagcaaacaatatcattgaagaagagaaagtgtgaacgaaatgtacccacagaaaatctgaatttgtgaattattgctcagtgcagtatcagatgtgttgtgtccagttgcacacactgagactgagcattggggaatctgagactcgatggactctgaaccagacctaggagcatgtcggggtggatgcagtgagatgagccctctgtgcctggattcccaacccagtgaccctgtcaggaagagccagggtgtcaagtcatgaagatgagcctaaagagccacccagcatgcactggccaagtcacaggggtgagccacttggtggcttgcgg

SEQ ID NO: 73112 - DNA, 759 bp, Homo sapiens
tggatgctccatagaacaggaggcctgggtctgcagctgctgtttaggtggctgcagtggaacagggacctcccgtcccaactcagaaggggcagatctcctgctggctccatggagcgtgcagccccagctgcgcttctctgttgcagctggcatgatggcagcagccactgccgtcactgttgggagagaagcacagacaggaggaactgaggtcgaggctcagaggccgggcagggacgcagttattaaggatttcattggtgcctggggtacgacaggtgccactaggcttaggtacagtggtggaacaacatggcatcctgtggcatkccagcattcacagtgcaaacacttgcagttatggcatcccatatctttatggccaatttctctaccctaccccctacacaatttagtttagaagcaaacaatatcattgaagaagagaaagtgtgaacgaaatgtacccacagaaaatctgaatttgtgaattattgctcagtgcagtatcagatgtgttgtgtccagttgcacacactgagactgagcattggggaatctgagactcgatggactctgaaccagacctaggagcatgtcggggtggatgcagtgagatgagccctctgtgcctggattcccaacccagtgaccctgtcaggaagagccagggtgtcaagtcatgaagatgagcctaaagagccacccagcatgcactggccaagtcacaggggtgagccacttggtggcttgcgg

SEQ ID NO: 73113 - DNA, 759 bp, Homo sapiens
tggatgctccatagaacaggaggcctgggtctgcagctgctgtttaggtggctgcagtggaacagggacctcccgtcccaactcagaaggggcagatctcctgctggctccatggagcgtgcagccccagctgcgcttctctgttgcagctggcatgatggcagcagccactgccgtcactgttgggagagaagcacagacaggaggaactgaggtcgaggctcagaggccgggcagggacgcagttattaaggatttcattggtgcctggggtacgacaggtgccactaggcttaggtacagtggtggaacaacatggcatcctgtggcatgccagcattcacagtgcaaacacttgcagttatggcatcccatatctttatggccaatttctctaccctaccccctacacaatttagtttagaagcaaacaatatcaytgaagaagagaaagtgtgaacgaaatgtacccacagaaaatctgaatttgtgaattattgctcagtgcagtatcagatgtgttgtgtccagttgcacacactgagactgagcattggggaatctgagactcgatggactctgaaccagacctaggagcatgtcggggtggatgcagtgagatgagccctctgtgcctggattcccaacccagtgaccctgtcaggaagagccagggtgtcaagtcatgaagatgagcctaaagagccacccagcatgcactggccaagtcacaggggtgagccacttggtggcttgcgg

SEQ ID NO: 73114 - DNA, 2042 bp, Homo sapiens
tggccataaaatccccctcagattgattcaactttagacaggcttcttcctaaggcctctgacctcctttttaaaatgtgtttcctttagaaaactttccattataaattcttgctctgctactttaagacataaatattctacaacccaggaatgtctttctcaagaacctgggagccatcccttttgacatgtaatcaagaaagatagtaccctctcagcctctgtaggagagtgggagcctaacttcaataagcaccagtggcccaatcatgttgatcagccctccrctaacatcctcccgcaattttccaccagctcaccccagtgcttagaaactcctccccctttggtttagtggagttgagttcaatccttctcctctattgcaattttcttgaatgtcttttttttttttttttgcccgtttagctagtctagtgcaatttttcttttacacatcaagtgccagaatgaggaccttaaactgtgtctctactgcctgtgaaggtatgtcagcagagtgaggggctcagaaacccatgtaaggtgctagtgaacgaacacaaggatgactctgcagacctaagacctcaaaagtattaaactctcaaagataaggacttctccttaatatcccaggctgtgtaccccaaagaaaagagaaggcttgctgcacaagttttgcctctggacaatggctaagcatgtaaagaggaaaaaaaaatacttttaagaagatcatagtccccagattggcacatatcccagccccagagagcctaaactggttcacaaggggagagaagcagtaaggaacagtgagtcataggcagggccccatacctgaaggggtaagaggcaaattctgcttgtaatcaatgcataagtcattagagaatacaacagaagtagggacggagggcattctctccaacttttgcatgataaacgtgacactaaaatttttaaaaagatggctcttttccaactttggaagcagaaaaagtcattgtggtgacctggaaaaaaaaaaaaaaactattagggtcagagaaggaaactataaggatattgaggtgaggaaactgaagataattattgctatggttgtttgtgattacatgaggctatcctcgaaacctcagagatccggaagggaaatacctagaggaaggagtagagcccagctgctatagggtgacagctatattcctagactggtgcagctgggtaatgtgtgctacgcttagcaaacaataactagtgcatattatgcaccagacattgtgctaagtgttagagctacaaagatggaagacgacagaggctctcaacatcctaatggggtccaatattgtggaaataatgtaatgttatcaatggtaataggagtatggaaagtactgtggaaaaaaggcaataactgagtttgggaataatcagggaaatcttcactgtgtatgacatccaaattgtgtctttaaggataaagtggttggacaagatatgagaaagggcattctaggaataaagacaatctattttaggatgggggcctcaaaaattaaggtgactgttggaatggcagcctatttacatattttgaaaggtagggtgagagcagattgtaaactgtcttaagaactatgactgagacaaccagattttaattataaaggtaattttgaggataaaagataatcaatgaggaggatgaatgttaaggagatgaaattagggaccaggacacatattaggttattccagaaataatataactgagaaaggttgacggtttcaatgaagatagtagcagtaggggtatagataaggtgcaggatctgaggaatctttaatggttaggaaataagggagtcaactggaagataaggaacgaacaaaacctaataaaagattgaggctacctccttgagagactggaagtgtaagaaaagacaggaagagaggcagtgtttctggaggaggataaaatattcagattcaaaaatcaggcctacagctcagaagaaagctaggga

SEQ ID NO: 73115 - DNA, 2042 bp, Homo sapiens
tggccataaaatccccctcagattgattcaactttagacaggcttcttcctaaggcctctgacctcctttttaaaatgtgtttcctttagaaaactttccattataaattcttgctctgctactttaagacataaatattctacaacccaggaatgtctttctcaagaacctgggagccatcccttttgacatgtaatcaagaaagatagtaccctctcagcctctgtaggagagtgggagcctaacttcaataagcaccagtggcccaatcatgttgatcagccctccactaacatcctccckcaattttccaccagctcaccccagtgcttagaaactcctccccctttggtttagtggagttgagttcaatccttctcctctattgcaattttcttgaatgtcttttttttttttttttgcccgtttagctagtctagtgcaatttttcttttacacatcaagtgccagaatgaggaccttaaactgtgtctctactgcctgtgaaggtatgtcagcagagtgaggggctcagaaacccatgtaaggtgctagtgaacgaacacaaggatgactctgcagacctaagacctcaaaagtattaaactctcaaagataaggacttctccttaatatcccaggctgtgtaccccaaagaaaagagaaggcttgctgcacaagttttgcctctggacaatggctaagcatgtaaagaggaaaaaaaaatacttttaagaagatcatagtccccagattggcacatatcccagccccagagagcctaaactggttcacaaggggagagaagcagtaaggaacagtgagtcataggcagggccccatacctgaaggggtaagaggcaaattctgcttgtaatcaatgcataagtcattagagaatacaacagaagtagggacggagggcattctctccaacttttgcatgataaacgtgacactaaaatttttaaaaagatggctcttttccaactttggaagcagaaaaagtcattgtggtgacctggaaaaaaaaaaaaaaactattagggtcagagaaggaaactataaggatattgaggtgaggaaactgaagataattattgctatggttgtttgtgattacatgaggctatcctcgaaacctcagagatccggaagggaaatacctagaggaaggagtagagcccagctgctatagggtgacagctatattcctagactggtgcagctgggtaatgtgtgctacgcttagcaaacaataactagtgcatattatgcaccagacattgtgctaagtgttagagctacaaagatggaagacgacagaggctctcaacatcctaatggggtccaatattgtggaaataatgtaatgttatcaatggtaataggagtatggaaagtactgtggaaaaaaggcaataactgagtttgggaataatcagggaaatcttcactgtgtatgacatccaaattgtgtctttaaggataaagtggttggacaagatatgagaaagggcattctaggaataaagacaatctattttaggatgggggcctcaaaaattaaggtgactgttggaatggcagcctatttacatattttgaaaggtagggtgagagcagattgtaaactgtcttaagaactatgactgagacaaccagattttaattataaaggtaattttgaggataaaagataatcaatgaggaggatgaatgttaaggagatgaaattagggaccaggacacatattaggttattccagaaataatataactgagaaaggttgacggtttcaatgaagatagtagcagtaggggtatagataaggtgcaggatctgaggaatctttaatggttaggaaataagggagtcaactggaagataaggaacgaacaaaacctaataaaagattgaggctacctccttgagagactggaagtgtaagaaaagacaggaagagaggcagtgtttctggaggaggataaaatattcagattcaaaaatcaggcctacagctcagaagaaagctaggga

SEQ ID NO: 73116 - DNA, 1003 bp, Homo sapiens
gttatgcatttatgatttgacagaaaatttgctgcaaatgtgcatgtttctttattcctctgaggaccactgattttggtgcaggatgttggaatataaatatatacccattgtggcttttgcattttcttaagcacctgcaaattattaaaacacatgttttatggaatgtctagacactgtccttataaaatagtatgttgtcaagaaaaacctaagatatcaaacaagtgaaaagtataatttcaaaggtacataaggaaaagaaactaagaaagcaaatgccctacatacaggtttaaaaatataggccaggtgcgctggctcacacctctagtcacagaacctcaggagaccaaggcaggaggattgcttgaggccaggagtttgagaccagctgtgcaacatagcaagaccccatctccacaaaaaaaattaaaaattagctgggtatggtggtccttgcctgtggtcccaggaggctgaggcaagaggatcactttggcccaggaggtcaaggctgcagtaagcactgataatgctactacaytccagcctgagtaacagagtaagaccctgtctctacaaatatcaaaaataaaactacagattaattaaagtcttaatagagacttaatataagtcaccaaggaggtatgacgacataaggatgagtaaaaatttccacttgcttcggttaactttaaagaaaagcaatgaagtgtgtctatagatatcaagagagaaaccatgattagaggaaagaaaatcaacagacatttatcaacttttttgttattttttcatttctaaaataatatttattgtattttttatcacaaatgtaatatatgtttcatattgaatattcagaaaatacaggatatcataaaggagaagataatgtcaccactggatatgaccagtgttaacattgagatttttcaaactgttattatttttcgaacacataataaatatatctcctacattcaataattaa

SEQ ID NO: 73117 - DNA, 2678 bp, Homo sapiens
actccattctttagagatgattaagcataatattatccaaaaacaggaaggtgagcaagaagggcattgtgtttgcttctgatttcattatttcatttattcactgaattaattcatgaaatgtgttcttctcctgcacttccttgttagacaagaaggccctgatgagaccctagtgagatacagagaaaagatacagatcctgttttcaaggtgtttccagggatttcactgagctgaaatgcaaaaagatggagggattcattcagaacaactgaacatcttgagcaaaggccaagctgggcacagaatgcaacayaatcacaaaggattagcacaagaagagccagtgagtaccaaggatttttgttggaactcaactccatactccaatttcaagtaacagcctagaaataatttaggaggtgaaagagtgaagagagtagctttatgaaaaattcctgctctcaaatagagtatcctttcataaatgaaatgatatttgaagcccggtcatttgaaatgatttatattttttgttgttgtttttcagaagccacaatcctcataaatttaaagctacactattttgtctgtggagaaagttctaggaagcttttatttgcaagttagtattttcaccatattagtagaaatcaaataaaatttcaacacattatttttatttttaaaaataaatgataagttctggttttcaggatatgttactgatgtgggcaggagagagagaaaggtaatagcagtctggcttatttcggtgaaaattttctactgatatttcattgccaacattaaattacaatactatgattcttgagtgtatatctgaatgcccttttctactcaacaaacatttagtgagcatctacaatgtgccagtatttgtctggatgttgaggaaggaacaaaacaggaaaaaaattctgctttcatgaagctcacattctaaatgggacagggtatataaaattccaatgtgtaagtaatgcacaatgcatacatatctgattttgattatcagagagactaagtaacttctagagaactgaagcagtttcatgaattccttaatgtgaagcaagaaatctcactgctgaacacatccagcctgtcttagactttcttgaattcattatgtttacccaatttggggggaaatgctatgagctgttgaatacccccataactcagatatagcaatatcactcaacacttactatgctggcaagtaaagagagcttgttgccccaatttgaaaaaaaatgaaatgtttaaaaaattagtgaaatgttgaatattgtaccaaaataagacaataataagttgaaaaatgaataaaacatttttatacaattgaatttaagagctgaaaggaaccttggagaaaatgtagtccaaacttccccttttttatattaaaattccaatacataagcaaaaaaacaacaaaaataactaaccaaagtccacaaggttttaggtcaagtggacattaatataagactaaaaattagggatcatgattgctataaattagtgatcctcatagtgtgattgaggatcccatgggattctgagatctattcatggaacccacaaagtcaaatctattctcttaatagtaatggaacttactatcttttttactttatactctcatggtgaaccatcaagttctccaaaggctatgtgatatatgatactacacagatggagtacagacgccgatatgagtactggctgtcttctagtaaacaggtgatatttgcaaaggtgtaacaggtaatgaatttattattattttaataaatgcataaatatatatgttgacaatttatttgccttaacttctacttttaatagatataacccatataaaaatagctctttgagtcactcataacttttagggatacaaagaaaatctgagacctgaatctaagtagcaattaactcatcttgttaacatctcaatgctgaatttgtatagtgtatagattttaacagttattaaaaatcaaaaacagtagtgtttacaatttattgggtggccaatatatgccagtatacatatagaatttagcaacaattgtacaagccaagtattttttctccatttgatagaggagaaagctgagaataagcaagtttacattgtcagtggtcaaacacctagtgagtgatgcatcccattttcggacctacttctctgaaactaccacttgtcttctcaatagttccaggctagttagaactcagttaagcagagtctaagcccccctattcccctatcatcattcttctctgcctcagattcataaattacacacacacacacacacacaaaaaacaaacaaaaccaacaacaacaacaaaacaataaaagaggctgggaacggtggctcatgcctgtagtcccagcactttgggaggctgaggccagcagattaggaggccacgagtttgagaccagtgtggccaacatggtgaaaacctgtctctactaaaaatacaaaaattagccaggcgtggtgggcaggtacctgtaatcccagctactcagaaggctgaggcaagagaattgcttgaactcaggaggcagaggttggagtgagccgagatcacgccactgcactccaggctgggtgacagagcaa

SEQ ID NO: 73118 - DNA, 1073 bp, Homo sapiens
ttcttccttctaatgtagggagataaactgaaatgtgctcaccttcttgcactgcagcctgggcaatcatggacctgtcttccaccctgcagtaatctttgctcacaaaggtaggagatttccagaggacccatgatgaactgaaaataggaagaaacgactattgaattaaaagtatgggaaaaatggtataacctcctcagccccagtaggagttagggccttagtactactcagggaagactcaattttaacaactataacctgcaaattagtttttcactggcttaggccacagaatccagcacaggtgaagaaaatggagctgcttttggttctgcctctgtcattcactaagccatgcaaaattagttactcatataatttattggattatcacttggctcatcttgagatcccaatatttgttaaagagattaaaaaggaaaaatatttgaaaataactaatttataaattttaagattaatttatttgtacaacaattacttatggagtataaaattgcatatatttgagttctttgtagaaaatttacaagaaaaaaacaaacaaccccataaaaaagtgggcaaagaatatgaacagacacttctcaaaagaagacatttatgcagccaacagacacatgaaaaaatgctcatcatcactggccatcagagaaatgcaaatcaaaaccataatgagataccatctcacacaagttagaatggcaatcattaaaaagtcgggaaacaacaggtgctggagaggatgtggagaaataggaatgcttttacactgttggtgggactgtaaactagttcaaccattgtggaagacagtgtggcgattcctcaaggatctagaactagaaataccatttgacccagccatcccattactgggtatgtacacaaaggattataaatcatgctgttataaagacacatgcacacatatgtttattgcagcactattcgcaatagcaaagacttagawccaacccaaatgtccatcaatgatagactagattaaggaaatgtggcacatgtacaccatggaatactatgca

SEQ ID NO: 73119 - DNA, 1144 bp, Homo sapiens
atgtatyttacaaacacacttacacaaaaatatttgaatatacagattcgtatccatagtgtcgattcaaattcaagatatgccagagtgagagcttgttttgagaattagaagctgtgattatcaaacatagcatacacaacttttaaaagaaacaatcacttgatccttaagcagtaactacttctatttgtccaaatatgataggatggtttttagctctcaaaacatactctttgaaagaaaggaaacaaatttctgtaatgatcttaaggaagcatatttgtgagaacaattgctttgtcttctcaacacactattactgaaaacctaaaaaagcttgattctgtctctcctaatagtccttttagacatatactttaccaaatagcagtagcttcaaatgctgtcttcaggactgtcaaaagaaaaaaagatagcattaagcgtttatgcataaaaatgatggtgtatgtttctttcgttcttaaaaataaatttggctgggcacggtggctcacgcctttaatcccagcactttgagaggccgaagtcagcagatcatgaggtcaagagatcaagatcatcctggccaatatgttgaaaccctgtctctgctaaaaatacaaaaattagctgagcatggtggcgcatgcctatagtcccagctactcgggaggctgaggcaggagaatccctgaacttgggagtcagaggttgcagtgagccaagattgtgccattgcactccagcctagtaacagagcgagactacgtcttaaaaaaaaaaaaaaaagttaaattctttggcagttctgcttgctataccatgcagaaacataactctttggtcccatgtcactggccaaagtaaaccacagtccattcagccaccaacagagtagggaagcacaaatctaccatgtgctgtaatgacaactcgaatccccttttagattaactgtgagtccaataaggggaaaataactgttaggtattatgagcacatacatccctattaagtagaagtggcttaatatttagggaaaaatttgctacctattcttataagaattacaaagttcctcatagatgaataaggctaaaattcagatttataattccaagggaatcgtaaatgaact

SEQ ID NO: 73120 - DNA, 591 bp, Homo sapiens
ttccacttacgtaagatatcaagaacagtcagacttttataagggagggggaaatgaggagtcgtttaatgggtacagagtttcagttttgtaagatgagttttggagattacattggttgtacaataatgtgagtatacttaacacattgttaatggtacacttcatagttaagatggtaacgtttatgttgtgtgtattttatcacgatgaagcaattttaaaartttaacaaatgaagagaaagcttgtttctgtctgctacttgagtgtaactatttgaattgacttgaaggaggaagctctgggccagtgtggagcttgagcataggcacaggagaaagggagactgcagacattgtttcttgatctgaaaaggaaaacacggttctgcagttgtgacaagctaaaggagactggaagcttccctgagagtgagctactgagctcttgcccccctccttctcagagttctccaaggacacacatctcagtgtccctgcctaaccctaccgccccagcaaagccctggtccaaacaatgaaagatgcctgtttgaacttaggacaatcccatggtttgcttattgga

SEQ ID NO: 73121 - DNA, 591 bp, Homo sapiens
ttccacttacgtaagatatcaagaacagtcagacttttataagggagggggaaatgaggagtcgtttaatgggtacagagtttcagttttgtaagatgagttttggagattacattggttgtacaataatgtgagtatacttaacacattgttaatggtacacttcatagttaagatggtaacgtttatgttgtgtgtattttatcacgatgaagcaattttaaaagtttaacaaatgaagagaaagcttgtttctgtctgctacttgagtgtaactatttgaattgacttgaaggaggaagctctgggccagtgtggagcttgagcataggcacaggagaaagggagactgcagacattgtttcttgatctgaaaaggaaaacayggttctgcagttgtgacaagctaaaggagactggaagcttccctgagagtgagctactgagctcttgcccccctccttctcagagttctccaaggacacacatctcagtgtccctgcctaaccctaccgccccagcaaagccctggtccaaacaatgaaagatgcctgtttgaacttaggacaatcccatggtttgcttattgga

SEQ ID NO: 73122 - DNA, 1264 bp, Homo sapiens
aatcctaagagcaaaggcctgcatatctagagagaatgaccaaagaaactgagttctgtgtgctatttcatcatctctttaatagtggctcagagtgtatgtttttatgtgtgaaaagtaactaatttttttattttcttccaataagtgacacatggattgtccctattctttggataaaaaatgkaactacacaacctttagtctggctagatcaaagcagcagtaagtaacaaattttaaaaacatctttatatatatgcatatgtaaaggcagggaataaaatattgaaaagtctagcttttgaaaagccatttcatttcaaactaaaatatcattcttgtagagcatagagttttaaagaaaagtgtcaaatcaaaagccattatatgtgaaaaatatataattacctggtaagagcaatatatattttagaattcctttaattttttgttttgttggtttattgtttagaatcgagtgtgtagtattaataggtattaagatcttttttaaatgtaccatttcaaattattcccatattcctttatagaagtattcccagaaatgcaagtttcagattctgaccatgactgggtgattttgaatttgaatatgactggatattatagagttaattatgataaattaggttggaagaaactaaatcaacaacttgaaaaggatcctaaggtaaggttacttttgatacttttaattaaatataatttataatgccttctctagtgttttagaagttgaacattctggtgggaagagattccaccttcattcccgcccctcacctccaggcatgcaaaagatttttttttcttattcttaacaagtggagattttgattaaatgtgttgtctgtgtggtttttttttgttttttttgttttttttttttgagacggagtcttgctctgtcgcccaggctggagtgcagtgacgcgatctcggctcactgcaagctccgcctcccgggttcacgccattctcctgcctcagcctccggagtagctgggactacaggcgcctgccaccacgcccggctaattttttgtatttttagtagagacggggtttcaccgtgttagccaggatgatctcaatctcctgacctggtgatccacctgcctcggcctctcaaagtgctgggattacaggcgtgagccaccgcgccggccaaatgtgttgtgtttttgaacattcattttgcttttccaaaacaacctttccaggtaagaatcaggatgca

SEQ ID NO: 73123 - DNA, 1264 bp, Homo sapiens
aatcctaagagcaaaggcctgcatatctagagagaatgaccaaagaaactgagttctgtgtgctatttcatcatctctttaatagtggctcagagtgtatgtttttatgtgtgaaaagtaactaatttttttattttcttccaataagtgacacatggattgtccctattctttggataaaaaatggaactacacaacctttagtctggctagatcaaagcagcagtaagtaacaaattttaaaaacatctttatatatatgcatatgtaaaggcagggaataaaatattgaaaagtctagcttttgaaaagccatttcatttcaaactaaaatatcattcttgtagarcatagagttttaaagaaaagtgtcaaatcaaaagccattatatgtgaaaaatatataattacctggtaagagcaatatatattttagaattcctttaattttttgttttgttggtttattgtttagaatcgagtgtgtagtattaataggtattaagatcttttttaaatgtaccatttcaaattattcccatattcctttatagaagtattcccagaaatgcaagtttcagattctgaccatgactgggtgattttgaatttgaatatgactggatattatagagttaattatgataaattaggttggaagaaactaaatcaacaacttgaaaaggatcctaaggtaaggttacttttgatacttttaattaaatataatttataatgccttctctagtgttttagaagttgaacattctggtgggaagagattccaccttcattcccgcccctcacctccaggcatgcaaaagatttttttttcttattcttaacaagtggagattttgattaaatgtgttgtctgtgtggtttttttttgttttttttgttttttttttttgagacggagtcttgctctgtcgcccaggctggagtgcagtgacgcgatctcggctcactgcaagctccgcctcccgggttcacgccattctcctgcctcagcctccggagtagctgggactacaggcgcctgccaccacgcccggctaattttttgtatttttagtagagacggggtttcaccgtgttagccaggatgatctcaatctcctgacctggtgatccacctgcctcggcctctcaaagtgctgggattacaggcgtgagccaccgcgccggccaaatgtgttgtgtttttgaacattcattttgcttttccaaaacaacctttccaggtaagaatcaggatgca

SEQ ID NO: 73124 - DNA, 1441 bp, Homo sapiens
  misc_feature (1)...(1441): n = A,T,C or G
gcggtgtgttctacacagtccctctgaggaccccatgggattgaacccccattgcccacggcggcaacccactcatgagtgaaccctttgttggcttttctcccnnnnnnnnnnnnnnnnnnnnnnnnnnnnnnnnnnnnnnnnnnnnnnnnnnnnnnnnnnnnnnnnnnnnnnnnnnnnnnnnnnnnnnnnnnnnnnnnnnnntaggtgctggggatacaacataaataaaacagatatagtctctgcctttatgcagcttacaaaggtgtttgttcacaccagagagcagaacttgataactaaactgtaataaaagttgaagcaacatcaagcaacataggccagttgaaaaagtaaattacccactgacccgcaggtaattaactagtaattttattgccatccccaaaatgaagcaagcaagagggaatgacaatggcaggaagattgaatctggttacacgtaaggaaacaggagatttgggacagatgcaagtgctctcttgtgtggctttggagcaagtctggctaatacagagccacctgtgcaggctggatgcaccctggtgctctaaacaggaatgtcaagatgaaaggctttaagacatcctgtccccagcctcccatccacaaacattcagcagttatttgaaaggatcccagagtgacaatctctggtagacggaacagaggagacaaaaagcacaccatccctcccacccgccttgcccggctcaccaggatacgccaaagcagcttcactctgtaaacaccagccaaagtcacaaggtccgggagatgttgccctgtttgttcaggagacactgggcatgcgcactccmccttggctcctcccctactcgccaacttcacagtgtgactctggtcacagggatgggaccagatcaatagactttgtcactccaatgccccagcttctttggtggcacctaggtcacctgaggggtttgtttcaggaaagcacattaatttagaaggagaataatgtgggaagaggccgcagttagagagatgtgtctaagcgcctggcctgtgctctctccaaattgccctcattcccaagcaggcccctgagcctgagtttgccctccgaggctcagtcaaaaatattgatgtgcaggcaggttactgagcttttgacagggtttttttcaccaatggcatcatttgaaaaatggcaaatatccaagtaggaatgtgttccattagtgtgtttctgacataagaaaactaacaccagcttgacaagaatttgagaaatttaatttctatcactacaaagcaccagaatcctgtttgagagggtgctgatgggtttatgagtgtcttatcgagttcaagtcagtgtgagaaatagcgcctgagattaagggaaacctgtaataggaactaaaacccagttctccaacaactgaaa

SEQ ID NO: 73125 - DNA, 1441 bp, Homo sapiens
  misc_feature (1)...(1441): n = A,T,C or G
gcggtgtgttctacacagtccctctgaggaccccatgggattgaacccccattgcccacggcggcaacccactcatgagtgaaccctttgttggcttttctcccnnnnnnnnnnnnnnnnnnnnnnnnnnnnnnnnnnnnnnnnnnnnnnnnnnnnnnnnnnnnnnnnnnnnnnnnnnnnnnnnnnnnnnnnnnnnnnnnnnnntaggtgctggggatacaacataaataaaacagatatagtctctgcctttatgcagcttacaaaggtgtttgttcacaccagagagcagaacttgataactaaactgtaataaaagttgaagcaacatcaagcaacataggccagttgaaaaagtaaattacccactgacccgcaggtaattaactagtaattttattgccatccccaaaatgaagcaagcaagagggaatgacaatggcaggaagattgaatctggttacacgtaaggaaacaggagatttgggacagatgcaagtgctctcttgtgtggctttggagcaagtctggctaatacagagccacctgtgcaggctggatgcaccctggtgctctaaacaggaatgtcaagatgaaaggctttaagacatcctgtccccagcctcccatccacaaacattcagcagttatttgaaaggatcccagagtgacaatctctggtagacggaacagaggagacaaaaagcacaccatccctcccacccgccttgcccggctcaccaggatacgccaaagcagcttcactctgtaaacaccagccaaagtcacaaggtccgggagatgttgccctgtttgttcaggagacactgggcatgcgcactcccccttggctcctcccctactcgccaacttcacagtgtgactctggtcacagggatgggaccagatcaatagactttgtcactccaatgccccagcttctttggtggcacctaggtcacctgaggggtttgtttcaggaaagcacattaatttagaaggagaataatgtgggaagaggccgcagttagagagatgtgtctaagcgcctggcctgtgctctctccaaattgccctcattcccaagcaggcccctgagcctgagtttgccctccgaggctcagtcaaaaatattgatgtgcaggcaggttactgagcttttgacagggtttttttcacsaatggcatcatttgaaaaatggcaaatatccaagtaggaatgtgttccattagtgtgtttctgacataagaaaactaacaccagcttgacaagaatttgagaaatttaatttctatcactacaaagcaccagaatcctgtttgagagggtgctgatgggtttatgagtgtcttatcgagttcaagtcagtgtgagaaatagcgcctgagattaagggaaacctgtaataggaactaaaacccagttctccaacaactgaaa

SEQ ID NO: 73126 - DNA, 1951 bp, Homo sapiens
agaccccatactctgacctctaggtcacactgctggctgcctcaacctcgtctgatgaaatagaatatgtatataatgcttgggaaatgcctggcagaggatgtagttcacagtccaaggtagggtagatacgggggtgattgttggtgtaactcaagccaaatttagctatatttggtggacacagatggtcagagctggkggcccctcagagagcctccttcccattatacagtttggaaaatcaagacccagagaaaacgttcaagccaagaatagaatataggctgcttctccctggagctgccacactgccagcagtggggtcaagattccatgcacaggcggggccaccaccttctgggacttccccttccatgactctgccctgatttggttgactaaagaaaccattccagcaactacttcctctctcaaattattagtataacttgcccatagcccagacctcccagagatgcggcccgagcactgacgtgatttataactttgggtaaacctcttgcattgctttcataggaaggaaaaagaaatcagacataaatgattaatccattaaattaaaaacacccttgacctccccacagttcagacaagtagcgattcattcccaaaaacacaataataacctcctgaatctgtttattactcccgcatgctactttcgtgactgtgcctcttaaggatctatttacgctgcctttcacattgggaatggtcggtgtttcccaaagacagcgggcctttgtgttatggatgcaaatattttcacttgaagattttcaaatttaagagaaaatgaggccggtgtgctggctcacgcctataatcacagcactttgggaggttgaggctggatcgcttgagtccaggagttcgaacccagcctggccaacatggtgaaaccctgtctctacaaaaaatgcaaaaattagccatgtgtggtggcacgtgcctgtaatcccagctacttgggaggctgaggcatgagaattgcttgaaccggagaggtgaagtttgcaatgagctgagatagcactgctgcactccaacctgggcgacagagggagactctatctcaaagaaaaaagaaaatgaatgtgtgtgcctaggatatattaatttcacattatttttaatgtgtggattaacacaaaagcaaaagaggatatcagggccaaaggaaagagttgggtctctgccacattgctggcagagagcttggtctccacctttcctggcagggccccaggaacttcacacacccacgtagaccctccctgtccacactgctccatcctcctggtgggaggctggatccagagctctggcacgggtaggagctgcccagagctggctctaactttgagtatggacaacacttcagggtgttttcaaggagaaaaatggggcatagttgagagagaaactgggataaagagaagggtttttttttttttccaaggtaggagaaataaaagcattctgtgggctaacaggaaaaatccagtagaaaaggggaccaggatgcaggagtgagaggcgtgggagctatgtccgagctggggtggtgtctaggtaggaggtgggtgtgacacgagaatgatctagaagtggcaacgtgggcccaggaggacgcctaccccacctcccaccctagtggtaccaagagaaggggccgcccctgaagccactgcaggagaagctgcgtcctcaggaggaagccaggtttccactagagcaagaaggtgaaggagtgctcatagaagagtctgaggatgtgggagatgttgctaatgacagaacatgagttccagaaggcacgacagaaggttctggggaggagggatgccccagaggcctaggcttctagtggagattggcatgatctgggataaggcgcaggaggagaagaggcctagtgatcccc

SEQ ID NO: 73127 - DNA, 1951 bp, Homo sapiens
agaccccatactctgacctctaggtcacactgctggctgcctcaacctcgtctgatgaaatagaatatgtatataatgcttgggaaatgcctggcagaggatgtagttcacagtccaaggtagggtagatacgggggtgattgttggtgtaactcaagccaaatttagctatatttggtggacacagatggtcagagctggtggcccctcagagagcctccttcccattatacagtttggaaaatcaagacccagagaaaacgttcaagccaagaatagaatataggctgcttctccctggagctgccacactgccagcagtggggtcaagattccatgcacaggcggggccaccaccttctgggacttccccttccatgactctgccctgatttggttgactaaagaaaccattccagcaactacttcctctctcaaattattagtataacttgcccatagcccagacctcccagagatgcggcccgagcactgacgtgatttataactttgggtaaacctcttgcattgctttcataggaaggaaaaagaaatcagacataaatgattaatccattaaattaaaaacacccttgacctccccacagttcagacaagtagcgattcattcccaaaaacacaataataacctcctgaatctgtttattactcccgcatgctactttcgtgactgtgcctcttaaggatctatttacgctgcctttcacattgggaatggtcggtgtttcccaaagacagcgggcctttgtgttatggatgcaaatattttcacttgaagattttcaaatttaagagaaaatgaggccggtgtgctggctcacgcctataatcacagcactttgggaggttgaggctggatcgcttgagtccaggagttcgaacccagcctggccaacatggtgaaaccctgtctctacaaaaaatgcaaaaattagccatgtgtggtggcacgtgcctgtaatcccagctacttgggaggctgaggcatgagaattgcttgaaccggagaggtgaaktttgcaatgagctgagatagcactgctgcactccaacctgggcgacagagggagactctatctcaaagaaaaaagaaaatgaatgtgtgtgcctaggatatattaatttcacattatttttaatgtgtggattaacacaaaagcaaaagaggatatcagggccaaaggaaagagttgggtctctgccacattgctggcagagagcttggtctccacctttcctggcagggccccaggaacttcacacacccacgtagaccctccctgtccacactgctccatcctcctggtgggaggctggatccagagctctggcacgggtaggagctgcccagagctggctctaactttgagtatggacaacacttcagggtgttttcaaggagaaaaatggggcatagttgagagagaaactgggataaagagaagggtttttttttttttccaaggtaggagaaataaaagcattctgtgggctaacaggaaaaatccagtagaaaaggggaccaggatgcaggagtgagaggcgtgggagctatgtccgagctggggtggtgtctaggtaggaggtgggtgtgacacgagaatgatctagaagtggcaacgtgggcccaggaggacgcctaccccacctcccaccctagtggtaccaagagaaggggccgcccctgaagccactgcaggagaagctgcgtcctcaggaggaagccaggtttccactagagcaagaaggtgaaggagtgctcatagaagagtctgaggatgtgggagatgttgctaatgacagaacatgagttccagaaggcacgacagaaggttctggggaggagggatgccccagaggcctaggcttctagtggagattggcatgatctgggataaggcgcaggaggagaagaggcctagtgatcccc

SEQ ID NO: 73128 - DNA, 1951 bp, Homo sapiens
agaccccatactctgacctctaggtcacactgctggctgcctcaacctcgtctgatgaaatagaatatgtatataatgcttgggaaatgcctggcagaggatgtagttcacagtccaaggtagggtagatacgggggtgattgttggtgtaactcaagccaaatttagctatatttggtggacacagatggtcagagctggtggcccctcagagagcctccttcccattatacagtttggaaaatcaagacccagagaaaacgttcaagccaagaatagaatataggctgcttctccctggagctgccacactgccagcagtggggtcaagattccatgcacaggcggggccaccaccttctgggacttccccttccatgactctgccctgatttggttgactaaagaaaccattccagcaactacttcctctctcaaattattagtataacttgcccatagcccagacctcccagagatgcggcccgagcactgacgtgatttataactttgggtaaacctcttgcattgctttcataggaaggaaaaagaaatcagacataaatgattaatccattaaattaaaaacacccttgacctccccacagttcagacaagtagcgattcattcccaaaaacacaataataacctcctgaatctgtttattactcccgcatgctactttcgtgactgtgcctcttaaggatctatttacgctgcctttcacattgggaatggtcggtgtttcccaaagacagcgggcctttgtgttatggatgcaaatattttcacttgaagattttcaaatttaagagaaaatgaggccggtgtgctggctcacgcctataatcacagcactttgggaggttgaggctggatcgcttgagtccaggagttcgaacccagcctggccaacatggtgaaaccctgtctctacaaaaaatgcaaaaattagccatgtgtggtggcacgtgcctgtaatcccagctacttgggaggctgaggcatgagaattgcttgaaccggagaggtgaagtttgcaatgagctgagatagcactgctgcactccaacctgggcracagagggagactctatctcaaagaaaaaagaaaatgaatgtgtgtgcctaggatatattaatttcacattatttttaatgtgtggattaacacaaaagcaaaagaggatatcagggccaaaggaaagagttgggtctctgccacattgctggcagagagcttggtctccacctttcctggcagggccccaggaacttcacacacccacgtagaccctccctgtccacactgctccatcctcctggtgggaggctggatccagagctctggcacgggtaggagctgcccagagctggctctaactttgagtatggacaacacttcagggtgttttcaaggagaaaaatggggcatagttgagagagaaactgggataaagagaagggtttttttttttttccaaggtaggagaaataaaagcattctgtgggctaacaggaaaaatccagtagaaaaggggaccaggatgcaggagtgagaggcgtgggagctatgtccgagctggggtggtgtctaggtaggaggtgggtgtgacacgagaatgatctagaagtggcaacgtgggcccaggaggacgcctaccccacctcccaccctagtggtaccaagagaaggggccgcccctgaagccactgcaggagaagctgcgtcctcaggaggaagccaggtttccactagagcaagaaggtgaaggagtgctcatagaagagtctgaggatgtgggagatgttgctaatgacagaacatgagttccagaaggcacgacagaaggttctggggaggagggatgccccagaggcctaggcttctagtggagattggcatgatctgggataaggcgcaggaggagaagaggcctagtgatcccc

SEQ ID NO: 73129 - DNA, 1951 bp, Homo sapiens
agaccccatactctgacctctaggtcacactgctggctgcctcaacctcgtctgatgaaatagaatatgtatataatgcttgggaaatgcctggcagaggatgtagttcacagtccaaggtagggtagatacgggggtgattgttggtgtaactcaagccaaatttagctatatttggtggacacagatggtcagagctggtggcccctcagagagcctccttcccattatacagtttggaaaatcaagacccagagaaaacgttcaagccaagaatagaatataggctgcttctccctggagctgccacactgccagcagtggggtcaagattccatgcacaggcggggccaccaccttctgggacttccccttccatgactctgccctgatttggttgactaaagaaaccattccagcaactacttcctctctcaaattattagtataacttgcccatagcccagacctcccagagatgcggcccgagcactgacgtgatttataactttgggtaaacctcttgcattgctttcataggaaggaaaaagaaatcagacataaatgattaatccattaaattaaaaacacccttgacctccccacagttcagacaagtagcgattcattcccaaaaacacaataataacctcctgaatctgtttattactcccgcatgctactttcgtgactgtgcctcttaaggatctatttacgctgcctttcacattgggaatggtcggtgtttcccaaagacagcgggcctttgtgttatggatgcaaatattttcacttgaagattttcaaatttaagagaaaatgaggccggtgtgctggctcacgcctataatcacagcactttgggaggttgaggctggatcgcttgagtccaggagttcgaacccagcctggccaacatggtgaaaccctgtctctacaaaaaatgcaaaaattagccatgtgtggtggcacgtgcctgtaatcccagctacttgggaggctgaggcatgagaattgcttgaaccggagaggtgaagtttgcaatgagctgagatagcactgctgcactccaacctgggcgacagagggagactctatctcaaagaaaaaagaaaatgaatgtgtgtgcctaggatatattaatttcacattatttttaatgtgtggattaacacaaaagcaaaagaggatatcagggccaaaggaaagagttgggtctctgccacattgctggcagagagcttggtctccacctttcctggcagggccccaggaacttcacacacccacgtagaccctccctgtccacactgctccatcctcctggtgggaggctggatccagagctctggcacgggtaggagctgcccagagctggctctaactttgagtatggacaacacttcagggtgttttcaaggagaaaaatggggcatagttgagagagaaactgggataaagagaagggtttttttttttttccaaggtaggagaaataaaagcattctgtgggctaacaggaaaaatccagtagaaaaggggaccaggatgcaggagtgagaggcgtgggagctatgtccgagctggggtggtgtctaggtaggaggtgggtgtgacaygagaatgatctagaagtggcaacgtgggcccaggaggacgcctaccccacctcccaccctagtggtaccaagagaaggggccgcccctgaagccactgcaggagaagctgcgtcctcaggaggaagccaggtttccactagagcaagaaggtgaaggagtgctcatagaagagtctgaggatgtgggagatgttgctaatgacagaacatgagttccagaaggcacgacagaaggttctggggaggagggatgccccagaggcctaggcttctagtggagattggcatgatctgggataaggcgcaggaggagaagaggcctagtgatcccc

SEQ ID NO: 73130 - DNA, 1951 bp, Homo sapiens
agaccccatactctgacctctaggtcacactgctggctgcctcaacctcgtctgatgaaatagaatatgtatataatgcttgggaaatgcctggcagaggatgtagttcacagtccaaggtagggtagatacgggggtgattgttggtgtaactcaagccaaatttagctatatttggtggacacagatggtcagagctggtggcccctcagagagcctccttcccattatacagtttggaaaatcaagacccagagaaaacgttcaagccaagaatagaatataggctgcttctccctggagctgccacactgccagcagtggggtcaagattccatgcacaggcggggccaccaccttctgggacttccccttccatgactctgccctgatttggttgactaaagaaaccattccagcaactacttcctctctcaaattattagtataacttgcccatagcccagacctcccagagatgcggcccgagcactgacgtgatttataactttgggtaaacctcttgcattgctttcataggaaggaaaaagaaatcagacataaatgattaatccattaaattaaaaacacccttgacctccccacagttcagacaagtagcgattcattcccaaaaacacaataataacctcctgaatctgtttattactcccgcatgctactttcgtgactgtgcctcttaaggatctatttacgctgcctttcacattgggaatggtcggtgtttcccaaagacagcgggcctttgtgttatggatgcaaatattttcacttgaagattttcaaatttaagagaaaatgaggccggtgtgctggctcacgcctataatcacagcactttgggaggttgaggctggatcgcttgagtccaggagttcgaacccagcctggccaacatggtgaaaccctgtctctacaaaaaatgcaaaaattagccatgtgtggtggcacgtgcctgtaatcccagctacttgggaggctgaggcatgagaattgcttgaaccggagaggtgaagtttgcaatgagctgagatagcactgctgcactccaacctgggcgacagagggagactctatctcaaagaaaaaagaaaatgaatgtgtgtgcctaggatatattaatttcacattatttttaatgtgtggattaacacaaaagcaaaagaggatatcagggccaaaggaaagagttgggtctctgccacattgctggcagagagcttggtctccacctttcctggcagggccccaggaacttcacacacccacgtagaccctccctgtccacactgctccatcctcctggtgggaggctggatccagagctctggcacgggtaggagctgcccagagctggctctaactttgagtatggacaacacttcagggtgttttcaaggagaaaaatggggcatagttgagagagaaactgggataaagagaagggtttttttttttttccaaggtaggagaaataaaagcattctgtgggctaacaggaaaaatccagtagaaaaggggaccaggatgcaggagtgagaggcgtgggagctatgtccgagctggggtggtgtctaggtaggaggtgggtgtgacacgagaatgatctagaagtggcaacgwgggcccaggaggacgcctaccccacctcccaccctagtggtaccaagagaaggggccgcccctgaagccactgcaggagaagctgcgtcctcaggaggaagccaggtttccactagagcaagaaggtgaaggagtgctcatagaagagtctgaggatgtgggagatgttgctaatgacagaacatgagttccagaaggcacgacagaaggttctggggaggagggatgccccagaggcctaggcttctagtggagattggcatgatctgggataaggcgcaggaggagaagaggcctagtgatcccc

SEQ ID NO: 73131 - DNA, 755 bp, Homo sapiens
aagtgttaagtggggagggagagcagaggcctagaacctgtctacagaccccaggttaagggcccgtgactcctgtaaagcctggttgccctctttcttggtagagccctccctgtgtgcctggcagacctgtgtcctgctatcgagacatcctagtctgatgtagtatcctccttgtttgcaggaggggccggcctgtgcaggggcagggttacctgggcatccctctaggctctggggttccatttagcctcctctggccaatacacctttttagttttgagaaaactaaacctcaatgtgactgctgtgtgcagacgaacaggaagttagagcagaactcagtgcccaggggctgtgagatcaccattctgggtatcatggggtgccacagtgtggcaggcaggagaggcatccatcagaaggagcaaagggtccttgctgaggtggagagcacagggcctcctggtcagcaggrgcatggctgtcacagtgctgcataccagctcttccacctccgctggttcctgtgtgtggggtagccttggtcagcttggccactctatgggtctctcccaccctactgagtctacacccaaagatgatgggcatacctctgctcaagatatttgcaaaaggagagtatcctaactgcctattactttggtgtcttaagggggaaaagaatgtattaccttatgtaattatacagagctactcagaatttacaaaaattcatacagatctctaaggtt

SEQ ID NO: 73132 - DNA, 575 bp, Homo sapiens
ggctgggggagaggaaaatggagattgacagctaactatagtatttctttggcagatgaaaatgttctggaaaaagattgtggtgattattgcacaactgtgtgaataaactataaccaccattgaattgtatactttaaaatgatagattttatggtatgtgaattatatctcaataaaatatacataaattttttaaacaatggattagaaatacacaccaagaaataattttttaaaaacaaactgttgtagtcatattaatacctgacaatagactttaaggcaaacagcaggaataaagacagttactacctgataaaagtgtccactcatcaggcagataaaacaaattctaaaaacatagcctcaaaatatataaagcaaaaytgatagtgttacgaggaactgacaaatctatcatcacagcagagagagagagagcatcatagctctctcagtaattgtcttgaacaaataaaaactgataaaaatggccagacgcagtggctcatgcctgtaatcccagcagtttgggtggccgaggcaggtggatcacttgaggtcaggagttc

SEQ ID NO: 73133 - DNA, 687 bp, Homo sapiens
ggcagatcatctgagatcgggagttcgagaccagcctgaccaacatggagaaaccccatctctataaaaaatacaacatttgccaggcgtggtggtgcatgcctgtaatcccagccacttgggaggctgaggcaggagaattgcttgaacctggaaggtggaggctgcggtgagccaagattgcaccagtgcactccagcctgggcaacaagagagaaactctgtctcaaaaaaaaagaaaaaaaaaaaaaagatgttctctrgcattgctcagacacctccagcataaccctgcagactcacaaactcacaagctgcaggaatagacaggacagacgttccacggtgtcagatccacaaggtgaccctgtgatccatcacactgaagagcaaatgctaagtctccttaattttgtgctatgtctcctcagcactccagcatggaaacctgaagtccaggaagctacagacaacttgccccagccaatgaaggcctccaccctcttctaatctcagtcaaaagttaaagctccttaggagcaaatgtttttaagaagttcaatgtctccattcaacagaattgaggttgcactgcattacaaatgatactaaccgttctctgtaccctagtctcttattctgcaaagtatggatgatggtaataattaatgtctaccttgcaggatc

SEQ ID NO: 73134 - DNA, 594 bp, Homo sapiens
ttacttaagatattacttataaactagggaacattcagrtgctttttctgttttaaaacataaattttaaggtgagaagatcaatataggttgagcatccataatccaaaacaaatctgaaatctgaaatgcttcaaaattcaaaactttttgagcaccgacatgatgctcaaaggaaatgctcactggaacatttcaaattttcagattagggatgcttaaccggtaagtctaatgcaaatattccaaactccaaaatctgcaccacttccagtcccaagcattttgggtaagggatactcaacatgtaatggagagtatcatattggaatggccactagatgtctattttttttttttatgagatggaatgtgtcttcttgcccaagctggagtacaatggcacaatctcggctcactgcaacctccgcctcccgggttcaagtgattctcctgcctcagcctctcgagtagctgggacacaccaccatgcccggctaatttttggtattttcagtagagatggggtttcactatgttggccaggctggtcttgaactcctgacctcaggtgattcacctacctcggcctcc

SEQ ID NO: 73135 - DNA, 594 bp, Homo sapiens
ttacttaagatattacttataaactagggaacattcaggtgctttttctgttttaaaamataaattttaaggtgagaagatcaatataggttgagcatccataatccaaaacaaatctgaaatctgaaatgcttcaaaattcaaaactttttgagcaccgacatgatgctcaaaggaaatgctcactggaacatttcaaattttcagattagggatgcttaaccggtaagtctaatgcaaatattccaaactccaaaatctgcaccacttccagtcccaagcattttgggtaagggatactcaacatgtaatggagagtatcatattggaatggccactagatgtctattttttttttttatgagatggaatgtgtcttcttgcccaagctggagtacaatggcacaatctcggctcactgcaacctccgcctcccgggttcaagtgattctcctgcctcagcctctcgagtagctgggacacaccaccatgcccggctaatttttggtattttcagtagagatggggtttcactatgttggccaggctggtcttgaactcctgacctcaggtgattcacctacctcggcctcc

SEQ ID NO: 73136 - DNA, 688 bp, Homo sapiens
ttttttaaaaattatagttagaagcacaaacttttccgttttgtctttcagtggtgaaagtggggcaggtaaaaccgaaagcactaaattgatcctcaagtttctgtcagtcatcagtcaacagtctttggaattgtccttaaaggagaagacatcctgtgttgaacgagctattcttgaaagcaggtatttattgattttcttgtttccaactaataggattcactttccttatggtatggcttatttaaagaagagttaaaattagttggtcgcgtttctctttttcttgacttctctttyacaattccttaagaaaaggtcttgccatgcacatagtaatatctcatgaacccagcaacaactccttctgcctcctgccccttcatcgtcaggccaggtctgagatggggactgagtggcgcgcaatggctgtctgcagagcctttgactccagcttcatgtgtttttgaagcacctgcatcagataaggcacttgtattggagtttatggagaagaataaacttgactagttttctggaggccttgttagcagcagaaatgtcagcccccagccactgtgtaaaagggggcttagcgtggagacgagcagggttcaggtcagcatccaccgcttggaggcttaacatgagcagaacgggcctctcgtgtgtggaagatgagtga

SEQ ID NO: 73137 - DNA, 688 bp, Homo sapiens
ttttttaaaaattatagttagaagcacaaacttttccgttttgtctttcagtggtgaaagtggggcaggtaaaaccgaaagcactaaattgatcctcaagtttctgtcagtcatcagtcaacagtctttggaattgtccttaaaggagaagacatcctgtgttgaacgagctattcttgaaagcaggtatttattgattttcttgtttccaactaataggattcactttccttatggtatggcttatttaaagaagagttaaaattagttggtcgcgtttctctttttcttgacttctcttttacaattccttaagaaaaggtcttgccatgcacatagtaatatctcatgaacccagcaacaactccttctgcctcctgccccttcatcgtcaggccaggtctgagatggggactgagtggcgcscaatggctgtctgcagagcctttgactccagcttcatgtgtttttgaagcacctgcatcagataaggcacttgtattggagtttatggagaagaataaacttgactagttttctggaggccttgttagcagcagaaatgtcagcccccagccactgtgtaaaagggggcttagcgtggagacgagcagggttcaggtcagcatccaccgcttggaggcttaacatgagcagaacgggcctctcgtgtgtggaagatgagtga

SEQ ID NO: 73138 - DNA, 685 bp, Homo sapiens
ctgggttcaagcgattttcctgcctcagcctcctgagtaactgggactacaggcacccaccaccacacctggctaatttttttttttttttgtatttttagtagagacggggtttcaccatattggccaggctggtctcaaactcctgaccttgtgatccacctgcctyggcctcccaaagtgctgggattacaggtgtgagcctctgcacccagctgggattaattttatttcttgcttggtagcaggaatgtgtgaaatggcccccagtttctcccaaaaggcctcctctctactgggtagggactccaaagccagggcataaaaagctacataactatgccatttcctaaataaaatcaggtgggctgggattaagttccctactgattgtatctcaggctcatgttcactgcctctataacatcccaaatccctatcctttctttctagtcctttcttctcatagcctgttgggtggcattaggtgggagttgaaagagttgagtcagggagtgcaaaggctcctgattatatcctacctctgccattttgtgagatttttgtttttcttgtagaatctcaggtgagttatttgttctatccttttctgaatctcagtttcctcaaaatgtaaaatggggataacggtagtacttattgtatagggctgttaagtgagaaa

SEQ ID NO: 73139 - DNA, 665 bp, Homo sapiens
ttgaggaagcaggttcagagaggctgaggaaccggaccagcttgcacattgtaagtggaagacaaaagactcatttagttaccacattctgattactggtgatgtctctctttaatactttgtcttattactcgcttgcggagacaggtggtgaagagaatacrggatatttttgttgggtcttgttacctcaacttccagggagctctgggccggactccactttctgggaatagagttaggtggccagtgctctcagactggaatcttccctttgccagccttatgagaggtcctgagtggcttggggactgaggtggagttcttttcactctacttgaataggaaaatgggctcctttaaacgattacctggagttggatttctaaggctgaatagccccagtccaatgcaagcccttctattcagatttctcagctctagggggcaatggtaagagctggtgagatgtatggagggttgactttgaatattaaacgtgcggttcctaacagctaatgttttcgtgtgcctgctatgtgccatgcactgtgccaggtgctgtgcacgtgttttctcatttgatcctaagccacgaaaagttggtacccagagaggtcgtgcacctagaaatgatggagcaggggttggcatttttctccaca

SEQ ID NO: 73140 - DNA, 624 bp, Homo sapiens
ctgtgatgtgccttgcaaagaaaatacatgtgttagataagctttgttcaggcttgagttttagtgctgctggctgagttcagtgttaatgaataaaaatatgtattgagtgagttgtctttaaacagaaacatacataaagcacatcgatgtattgatcagttgacaaaaaatgttgatccgtttggctagaggctttaagaaacctccttctgtatttcccttgggagaaatggtttaatatttgccaatgcagtgtttgcagtcactttatggaacataactactgcgagttataagaattgactgtgtactggtgctcatattcagccctttgatccttaatatgcttgatttggaaaaggggaagtggttcattgcaccctcaagttaacacttctgagaaatgtatcagtcagaagtcaagcagagaagcaacaccagtaggagatacatgttttaataaaygtatgacaaggaattggcttacataattgtggggcttggctaagtaagcctgaaacccacagggcatactatcaggaaggaagaatcacatgggcattgctgaagcttgtccacaggcagccaaatagggaaaatccagtgaaggaaaagcaattg

SEQ ID NO: 73141 - DNA, 685 bp, Homo sapiens
agagacatgttacattcccttctgtgagccagaaccaggcaggagaggagagtcacatcacctagatgatgggtgcagaggtatgtcacagtgttctccataggcgaagcccagataggagagttaaatcatctgggttcaaggcttatgagtagggctcactcaggagaaaagagtcacatcatttagctgttgaacatggtaacatgtcacaatacccactgtgggtgggtcaataaagggaagaagcattacatcacctaggtgatgagcccagtgacatctcacatttcccactgttgggagggcccaaacaggagagagtcacattacctaggtgctgggcccagcgatatgcaactctcccccgctgagcagattccaggcaggagaggaaagtgacatcatctgcttgctgggctcagcaatatgttaccattcatcctgtggatggggtccaggyagtagaggtgaaaaaaatcacctaggttctgggttcagtgatatgtcataatacccccgagggaatgacccagggatgagaggggagtcccttaatctagttaatgttcccagggatatgtcacaatgtccctgtaggaacagggaggaatgtcacaatgtcccatattccagggaggaatgtcctggaggaagaaatctaaatgctgggcttagcaatatg

SEQ ID NO: 73142 - DNA, 942 bp, Homo sapiens
gcatcatgtccagctccatttccacctcttcttyttttttttttttttccttcttgcataccctctccaacagggagctcactccctcgccaagctgtctctcaacccctttgctctagatggctctgtctgggagaaagttctcagccctgagcagcccacagggagggaaacaaaaaggtgaggaggagattccccgctccaagcaaacacaattttcctctctccatcttggccgaaagccctcatggcaaggaaggaggttctattattatccccacttctcagaggaggaaactgaggccccagggaagtgagcagcctggggtcacacagtggagaatcagggccaggcccgggctcccagcccaggactgtcagggcctcggctgagaaccagggaagctcttgacattgtttaccccgaaatgacgtccacctgccgagaaaacaatgtgtacttaagcctggaccttgcctgcttctctcctcacggtcgcaggaagggcttctggcctgctggcttctgcccttgactcgccttcccctgagagaggccgggggcaagtgggctggggctgtctgctctgggttaactgggcaacttggggagagtcactggaattttatttttttaatcattatttttttcgagacagggtcttgctctgtcacccaggctggagtgcagtggcacgatcatagctcactgcagcctcgaactcctgggctcaaacaatcttcctgcctcagcctccccagtggttgagcctacaggtacactccaccatgcctagctaaattgttatttttttgtagagacaggggtcttgctatgttgcccaggctggatttgaactcctggcctcaagtgatcttcctgcctcggcctcccaagtagctgagtcactagaattttagatgcacctaatgaggtgctgg

SEQ ID NO: 73143 - DNA, 942 bp, Homo sapiens
gcatcatgtccagctccatttccacctcttcttcttttttttttttttccttcttgcataccctctccaacagggagctcactccctcgcsaagctgtctctcaacccctttgctctagatggctctgtctgggagaaagttctcagccctgagcagcccacagggagggaaacaaaaaggtgaggaggagattccccgctccaagcaaacacaattttcctctctccatcttggccgaaagccctcatggcaaggaaggaggttctattattatccccacttctcagaggaggaaactgaggccccagggaagtgagcagcctggggtcacacagtggagaatcagggccaggcccgggctcccagcccaggactgtcagggcctcggctgagaaccagggaagctcttgacattgtttaccccgaaatgacgtccacctgccgagaaaacaatgtgtacttaagcctggaccttgcctgcttctctcctcacggtcgcaggaagggcttctggcctgctggcttctgcccttgactcgccttcccctgagagaggccgggggcaagtgggctggggctgtctgctctgggttaactgggcaacttggggagagtcactggaattttatttttttaatcattatttttttcgagacagggtcttgctctgtcacccaggctggagtgcagtggcacgatcatagctcactgcagcctcgaactcctgggctcaaacaatcttcctgcctcagcctccccagtggttgagcctacaggtacactccaccatgcctagctaaattgttatttttttgtagagacaggggtcttgctatgttgcccaggctggatttgaactcctggcctcaagtgatcttcctgcctcggcctcccaagtagctgagtcactagaattttagatgcacctaatgaggtgctgg

SEQ ID NO: 73144 - DNA, 489 bp, Homo sapiens
caggaagggtgcacyagacagaggacacagccagggcaaaggccccaaggtgggaccgtgccttgtgtgtttgagggaagaggccggtgtggctggagtggagtgatggaggggaacgggaggaggaggtgagggcagggaagtgatgggagctgatcaagccctgcctgtggctgctgtgaggacctgagcagacgggggatgtgcatgacccagttcaagcatccacaagttcctctggtcactgttggggaacagactacgggacaaagagctggggaccaggacagagggatgtgcattgacccagttcaagcaaagatggagccttgcaggctggcagcagggacaagagctgggtaaatgctggttgaggatggagtctggggccagggccagggcccagagccaaccaaggaacgtgaggccactcgggccccagggaagagccggggaaggaagggagaggaccagcggaagcgggactta

SEQ ID NO: 73145 - DNA, 631 bp, Homo sapiens
agtgggtctgacacatctctgggtttccatagcctagagaccttgctcaatgtttgtggaatgaagaaactacacaaagccattttctatttcttataacctgtcaaaatccaggttaacagccacctcctccaggaagccttccctgacaacttcccatcccacctaagcaggttaggcgccttccctgggtttaaggacccccctgcctcccttgtttacagctctgaaagcaaccaggagccctctgaggatagcacataggagtggctaagaattaggggcctgggatcgaatctggactctgcctcttcccagctcggamaattcacttaaatctgcctgtgcctcagtttcctcatctgggcaatacagctaacatcagtatacaactgtgtaaggctcttgggatgtgcactgcaggcaacgagcaagcacaagctattctgatctaactcttctctggtttccagcactgcctggcccagacagccccaggatgtgtctgctggctgacatgaacgtcaggcacatcggtcacagggaactgcttcccaaaaggaagcgtggcttgactgggactttcctcactgagaatgttctgttgggagaccctggccaggtaggagaa

SEQ ID NO: 73146 - DNA, 1179 bp, Homo sapiens
aaaatatatatataaaaaaaaaggagctgggtgtggtggcagctactcggaaggctgaggtgggagaatcacttgaacctgggagacggaggttgcagtgagccgagatcatgccactgcactccagcctggcaacagagcgagattttgtctccaaataaaaataaaaataaaaataaaacaaaatgcaaaacccaaggcaaacctctcaggcatacacacagtttccctacctccaaagtacatgtcttagccaggcacagtggctcagacctgtaatcctagctactccggaggctaaggcagttgatcgcttgagcacaggaggctgaggctacagtgaactatcacggcgccactataccccagcctgagtgacagagggagaccctgtctcaaaaaaaatcacccagccaggtatrgtggctcatgcctgtaatcccaacaccttgggagccagaggtggatggatcacctgaggtcaggagttcatgaccagcctgaccaacatggcaaaaccctgtctctactaaaaattatccgggtgtggtggcacatgcctgtaatcccagctacttgggaggctgaggcagaaggatctcttggatccaggtggtggaggttgcagtgagccaagatggcaccattgcgctccagcctgggtgacagagcaaaattccatctcaaaacaaaataaaacagaacaaaacaaaaaaaacaaacacccaaggtacctatctccccaaaggacaaaaagaaatgctctcataagggctctgttactcagtcaacaaacatttactgagcacttactatgtgccaaggtaagtggtgagtgcggtagacgtgagagctccttgtcttgggttccagggtcaggcagacaccccacatcagtcccactagtgtggtgtgcactagtggaggtgcacacagaccagggacatctggcccctgtggcttatctgttaccagccctcacccacccccagtctctgtctattgggactgtatccagggtggaaaaaagaggggccagagggtcccatctctgtgccccccacccacccgtcttcacttctgcctcagaaacaagccaacgacctggtggccacactgatgaggtgcacaccccactacatccgctgcatcaaacccaacgagaccaagaggccccga

SEQ ID NO: 73147 - DNA, 591 bp, Homo sapiens
cttgcatcttttctgttttgtttttacaaaagaaaaaaaagaaggcygggtgcggtggcttacgcctgtaatcccagcactttgggaggccaaggcgggtggatcacgaggtcaggagatcgagaccatcctggctaacacggtgaaaccccgtctctactaaaaatacaaaaaattagccaggtgtggtggcgggctcctgtagtcccacctacttgggaggctgaggcaggagaatggcgtgaacctgggaggcggagcttgcggtgagccaagatcgtgcccactgcactccagcctggcagacagagcgagactccgtctcaaaaaagaaaaaaagaaaaaagatatcactcgatgactgctaccgaaacattctgtggctgggagaggaaaataccagaaagggtgaatgtggtcggttgaatgatgcctctcccttcccccagagatgcccacatcgtaatccctgtcacctgtgaatttggtacctcacttggcacaaggctctttgcagatgtgattaagttgaggatcttgagacggggggatgatcctagattatctggtgcaccaaatgccatcgcaggg

SEQ ID NO: 73148 - DNA, 591 bp, Homo sapiens
cttgcatcttttctgttttgtttttacaaaagaaaaaaaagaaggccgggtgcggtggctyacgcctgtaatcccagcactttgggaggccaaggcgggtggatcacgaggtcaggagatcgagaccatcctggctaacacggtgaaaccccgtctctactaaaaatacaaaaaattagccaggtgtggtggcgggctcctgtagtcccacctacttgggaggctgaggcaggagaatggcgtgaacctgggaggcggagcttgcggtgagccaagatcgtgcccactgcactccagcctggcagacagagcgagactccgtctcaaaaaagaaaaaaagaaaaaagatatcactcgatgactgctaccgaaacattctgtggctgggagaggaaaataccagaaagggtgaatgtggtcggttgaatgatgcctctcccttcccccagagatgcccacatcgtaatccctgtcacctgtgaatttggtacctcacttggcacaaggctctttgcagatgtgattaagttgaggatcttgagacggggggatgatcctagattatctggtgcaccaaatgccatcgcaggg

SEQ ID NO: 73149 - DNA, 591 bp, Homo sapiens
cttgcatcttttctgttttgtttttacaaaagaaaaaaaagaaggccgggtgcggtggcttacgcctgtaatcccagcactttgggaggccaaggcgggtggatcacgaggtcaggagatcgagaccatcctggctaacacggtgaaaccccgtctctactaaaaatacaaaaaattagccaggtgtggtggcgggckcctgtagtcccacctacttgggaggctgaggcaggagaatggcgtgaacctgggaggcggagcttgcggtgagccaagatcgtgcccactgcactccagcctggcagacagagcgagactccgtctcaaaaaagaaaaaaagaaaaaagatatcactcgatgactgctaccgaaacattctgtggctgggagaggaaaataccagaaagggtgaatgtggtcggttgaatgatgcctctcccttcccccagagatgcccacatcgtaatccctgtcacctgtgaatttggtacctcacttggcacaaggctctttgcagatgtgattaagttgaggatcttgagacggggggatgatcctagattatctggtgcaccaaatgccatcgcaggg

SEQ ID NO: 73150 - DNA, 591 bp, Homo sapiens
cttgcatcttttctgttttgtttttacaaaagaaaaaaaagaaggccgggtgcggtggcttacgcctgtaatcccagcactttgggaggccaaggcgggtggatcacgaggtcaggagatcgagaccatcctggctaacacggtgaaaccccgtctctactaaaaatacaaaaaattagccaggtgtggtggcgggctcctgtagtcccacctacttgggaggctgaggcaggagaatggcgtgaacctgggaggcggagcttgcggtgagccaagatcgtgcccactgcactccagcctggcagacagagygagactccgtctcaaaaaagaaaaaaagaaaaaagatatcactcgatgactgctaccgaaacattctgtggctgggagaggaaaataccagaaagggtgaatgtggtcggttgaatgatgcctctcccttcccccagagatgcccacatcgtaatccctgtcacctgtgaatttggtacctcacttggcacaaggctctttgcagatgtgattaagttgaggatcttgagacggggggatgatcctagattatctggtgcaccaaatgccatcgcaggg

SEQ ID NO: 73151 - DNA, 566 bp, Homo sapiens
tccccaagctcctacctcctggctccctgagacacaccccscaacgaatcccggtcccgtcaccttgtgctgtgtctgagggtgaggcaaggtgagggggctctttctgtctctgtcgtcagtcccaggtggccgccagccttgagcccacgttaaaggtagggggctgatggcaggaagctagctgtgagttttggagcagataaacgtccaggaaagaaccttgagcaagagcttcagagatcgctatcagtccgggaaatgtcaccagatgtgggccctaataataggccccaggggctgcaggcttggggcataaggaggaggcgggtgccagggaggtctttccgcaaggccattccaattctcctctgccctctttgtgctaatgaaatttgttaagagatacaaaacacttaaaacttcttgcggccgggctcggtggctcacgcctgtgatcccagcactttgggaggccaaggcgggtggattacctgagacaaggagttcaagaccagcctggccaacatggcgaaaccctgtctctactaaaaatacaaaaatta

SEQ ID NO: 73152 - DNA, 566 bp, Homo sapiens
tccccaagctcctacctcctggctccctgagacacaccccgcaacgaatcccggtcccgtcaccttgtgctgtgtctgagggtgaggcaaggtgagggggctctttctgtctctgtcgtcagtcccaggtggccgccagccttgagcccacgttaaaggtagggggctgatggcaggaagctagctgtgagttttggagcagataaaygtccaggaaagaaccttgagcaagagcttcagagatcgctatcagtccgggaaatgtcaccagatgtgggccctaataataggccccaggggctgcaggcttggggcataaggaggaggcgggtgccagggaggtctttccgcaaggccattccaattctcctctgccctctttgtgctaatgaaatttgttaagagatacaaaacacttaaaacttcttgcggccgggctcggtggctcacgcctgtgatcccagcactttgggaggccaaggcgggtggattacctgagacaaggagttcaagaccagcctggccaacatggcgaaaccctgtctctactaaaaatacaaaaatta

SEQ ID NO: 73153 - DNA, 566 bp, Homo sapiens
tccccaagctcctacctcctggctccctgagacacaccccgcaacgaatcccggtcccgtcaccttgtgctgtgtctgagggtgaggcaaggtgagggggctctttctgtctctgtcgtcagtcccaggtggccgccagccttgagcccacgttaaaggtagggggctgatggcaggaagctagctgtgagttttggagcagataaacgtccaggaaagaaccttgagcaagagcttcagagatcgctatcagtccgggaaatgtcaccagatgtgggccctaataataggccccaggggctgcaggcttggggcataaggaggaggcgggtgmcagggaggtctttccgcaaggccattccaattctcctctgccctctttgtgctaatgaaatttgttaagagatacaaaacacttaaaacttcttgcggccgggctcggtggctcacgcctgtgatcccagcactttgggaggccaaggcgggtggattacctgagacaaggagttcaagaccagcctggccaacatggcgaaaccctgtctctactaaaaatacaaaaatta

SEQ ID NO: 73154 - DNA, 508 bp, Homo sapiens
caacaccggggagagctggtgagatgacggttgttctccccaggctgtgctctgcctggatttggggattacctcctcccatggtgaaattctaaatgtatttctcctgctgcacacaacattcagccttttttgctttgttttggtggccattctggyatttttttctccttttattttagattcagggggtacatggacctggagagagagaaagagagagagagatatataaaatagttatatatatttatagatatagaatattatatataatagttatatatatttaatagatatataatatatatataatgtttatatatatttatagacataaatattatatataatgttatatataatagatatatattatatatttatatataatagttatatatttatagatataaatattatatattatatatatttaatagatatatattatatatttatatataatatttatatatttcatagatatatattatatatttatata

SEQ ID NO: 73155 - DNA, 508 bp, Homo sapiens
caacaccggggagagctggtgagatgacggttgttctccccaggctgtgctctgcctggatttggggattacctcctcccatggtgaaattctaaatgtatttctcctgctgcacacaacattcagccttttttgctttgttttggtggccattctggtatttttttctccttttattttagattcagggggtacatggacctggagagagagaaagagagagagagatatataaaatagttatatatatttatagatatagaatattatatataatagttatatatatttaatagatatataatatatatataatgtttatatatatttatagacataaatattatatataatgttatatataatagatatatattatatatttatatataatagttatatatttatagatataaatattatatattatatatatttaatagatatatattatatatttatatataatatttatatatttmatagatatatattatatatttatata

SEQ ID NO: 73156 - DNA, 703 bp, Homo sapiens
ttctttcctttctttctttcttccttcctttctttctttcattttttttttaagacggactcttactctgtagcccaggctggagtgcagtggcgcgatctctgctcactgcaagctccgcctcccagattcacgccattctcctgcctcagcctcccgagtagctgggagtacaggcgcccgccaccatgcccggctaattttttgtatttttagtagagacggggtttcaccattttagccaggatggtctcggaaggcagctatgctcaccactataccaccaacgctcgggtgccaggatggtctcgatctcctgacctcgtgatccgcccgcctcggcctcccaaagtgctgggattacaggcgtgagccaccgcgcctggcctgtggcttggttttcraaggcaaagataagtgggagttaagggagtttgaagtaagagagacaaatattcacagccacacttacggaaatgaacctttctcatcaaatcttacagaggggtgaacagctgtggggttgctcagttccttttgcagggcaattccacggatctaacagagttcaggaaacaaacttttcccagcacaaaacatgtttccgttaaacatactcattaccgtgatgttatcctgcattcagaacacagacacgcagatgtttcacctgcaccatctgtctccatctgacgtgaaaatg

SEQ ID NO: 73157 - DNA, 703 bp, Homo sapiens
ttctttcctttctttctttcttccttcctttctttctttcattttttttttaagacggactcttactctgtagcccaggctggagtgcagtggcgcgatctctgctcactgcaagctccgcctcccagattcacgccattctcctgcctcagcctcccgagtagctgggagtacaggcgcccgccaccatgcccggctaattttttgtatttttagtagagacggggtttcaccattttagccaggatggtctcggaaggcagctatgctcaccactataccaccaacgctcgggtgccaggatggtctcgatctcctgacctcgtgatccgcccgcctcggcctcccaaagtgctgggattacaggcgtgagccaccgcgcctggcctgtggcttggttttcaaaggcaaagataagtgggagttaagggagtttgaagtaagasagacaaatattcacagccacacttacggaaatgaacctttctcatcaaatcttacagaggggtgaacagctgtggggttgctcagttccttttgcagggcaattccacggatctaacagagttcaggaaacaaacttttcccagcacaaaacatgtttccgttaaacatactcattaccgtgatgttatcctgcattcagaacacagacacgcagatgtttcacctgcaccatctgtctccatctgacgtgaaaatg

SEQ ID NO: 73158 - DNA, 624 bp, Homo sapiens
tgaggctcagtggcttcttcctatgggccccatatgtgcttggtcccacaggtcttggtggtttgagacactcctacaaagcatttctcctcggaaggtgattggggcacctcttaccaagagagctacaaaagtttgaatctcttttttcctttcaaatttttcaggatactcagctcttccttaaggtgattgagattgggatagagagggaaggaagagtcaggggtagagaaggagaaggtttctgaatgccaggaagcaagacatcattggcagtaattttgagcagyttggtggctgctctggtttcaagcaagtgaagttttaatgtttcatattttaatgtttcatatccaccctaagtgccctagcagctttggggaccctgtccttatttcctgccaggtgggggagaataaatgataaccaaacaccattaaggtggcttttttcaatccaaattcccaaagcacaattagtaggtaggacagtagagactctcactccccttctcactcatcacttatgccaaagcatttgttactggtagtcttccacaccctgctcataaaaagcccttgcacttttctgtttcagaaaccatgtgtctatcacaagctg

SEQ ID NO: 73159 - DNA, 678 bp, Homo sapiens
agaatttatttgaatgccatgtaatcaccctttttttactaaagaatgtgattcctttgtgttcgtaaaaattaaagatcatgattgggaagttttataactctgttgtatataaatgttgctttttgtgtaattctgttattcagtatgaaatatttatatactgtctctaattaattggaaacctatggttttcatttcttatagatctgtctcgtaactgtgtaatcaaggaactagcaccacaacaggaaggtaacccaggagaagtattccacacagtgacattggaacaacatgaaaaacatgacattgaagagttttgcttcagggaaatcaagaaaaaaatacacgactttgactgtcagtggagagatgaygaaagaaattgcaacaaagtgactacggccccaaaagaaaatcttacttgtaggagagaccaacgcgatagaagaggtataggaaacaagtctattaaacatcagcttggattaagctttctaccacatccccatgaactgcagcagtttcaagctgaagggaaaatttatgaatgtaaccatgttgagaagtctgtcaaccatggttcctcagtttcaccaccccaaataatttcttctaccatcaaaacccatgtttctaataaatatgggactgatttcatctgttcttcattac

SEQ ID NO: 73160 - DNA, 678 bp, Homo sapiens
agaatttatttgaatgccatgtaatcaccctttttttactaaagaatgtgattcctttgtgttcgtaaaaattaaagatcatgattgggaagttttataactctgttgtatataaatgttgctttttgtgtaattctgttattcagtatgaaatatttatatactgtctctaattaattggaaacctatggttttcatttcttatagatctgtctcgtaactgtgtaatcaaggaactagcaccacaacaggaaggtaacccaggagaagtattccacacagtgacattggaacaacatgaaaaacatgacattgaagagttttgcttcagggaaatcaagaaaaaaatacacgactttgactgtcagtggagagatgatgaaagaaattgcaacaaagtgactacggccccaaaagaaaatcttacttgtaggagagaccaacgcgatagaagaggtataggaaacaagtctattaaacatcagcttggattaagctttctaccacatccccatgaactgcagcagtttcaagctgaagggaaaatttatgaatgtaaccatgttgagaagtctgtcaaccatggttcctcagtttcaccaccccaaatamtttcttctaccatcaaaacccatgtttctaataaatatgggactgatttcatctgttcttcattac

SEQ ID NO: 73161 - DNA, 678 bp, Homo sapiens
agaatttatttgaatgccatgtaatcaccctttttttactaaagaatgtgattcctttgtgttcgtaaaaattaaagatcatgattgggaagttttataactctgttgtatataaatgttgctttttgtgtaattctgttattcagtatgaaatatttatatactgtctctaattaattggaaacctatggttttcatttcttatagatctgtctcgtaactgtgtaatcaaggaactagcaccacaacaggaaggtaacccaggagaagtattccacacagtgacattggaacaacatgaaaaacatgacattgaagagttttgcttcagggaaatcaagaaaaaaatacacgactttgactgtcagtggagagatgatgaaagaaattgcaacaaagtgactacggccccaaaagaaaatcttacttgtaggagagaccaacgcgatagaagaggtataggaaacaagtctattaaacatcagcttggattaagctttctaccacatccccatgaactgcagcagtttcaagctgaagggaaaatttatgaatgtaaccatgttgagaagtctgtcaaccatggttcctcagtttcaccaccccaaataatttcttctaccrtcaaaacccatgtttctaataaatatgggactgatttcatctgttcttcattac

SEQ ID NO: 73162 - DNA, 678 bp, Homo sapiens
agaatttatttgaatgccatgtaatcaccctttttttactaaagaatgtgattcctttgtgttcgtaaaaattaaagatcatgattgggaagttttataactctgttgtatataaatgttgctttttgtgtaattctgttattcagtatgaaatatttatatactgtctctaattaattggaaacctatggttttcatttcttatagatctgtctcgtaactgtgtaatcaaggaactagcaccacaacaggaaggtaacccaggagaagtattccacacagtgacattggaacaacatgaaaaacatgacattgaagagttttgcttcagggaaatcaagaaaaaaatacacgactttgactgtcagtggagagatgatgaaagaaattgcaacaaagtgactacggccccaaaagaaaatcttacttgtaggagagaccaacgcgatagaagaggtataggaaacaagtctattaaacatcagcttggattaagctttctaccacatccccatgaactgcagcagtttcaagctgaagggaaaatttatgaatgtaaccatgttgagaagtctgtcaaccatggttcctcagtttcaccaccccaaataatttcttctaccatcaaaacccatgtttctaataaatrtgggactgatttcatctgttcttcattac

SEQ ID NO: 73163 - DNA, 1709 bp, Homo sapiens
gcgccattgcactccagcctgggcaacaacagcgaaactcaatctcaaaaaaaaaaaaaaaaaaaaagtttagatattatcgatttaagcatagtatgatttaaagaaagtttatctcggccgggctccttggctgatgcctgtcatcccagcactttgggaggccgaggtgggcgcatcacttgaggtcaggagtttgagaccagcttggccaacatagtgaaaccccgtctccactaaaaacaaaaattagccgggcgtggtggcacgcgcctgtaatcccagctagtccagaggctgaggcaggagaatcgcttgagcttgggaggcagaggttgcagtgaaccgagatcgcgccattgtattccaggagcctgggggacagagcgagactccatctcaaaaaaaaaaaaaaaaagtttatctcaaagttatttgaggttttgtcaaccgtggaaccgaataacaagtataaggaagaacaatacaattcatatctatttttttttaaaagttattgcgtgttttaaagcagcagttggtgatctggcttactgcgggttttagccttccacggtccacagcccacggtccaggtgttgtcctataaaagtctcwggaagcacagacttgactcttcccctgagataggtatgggatagaaatggaaaggaggatcctttgggcaatagcattacgtatcacatttgttccgggcagttttgcatttcacagtctagtttgcaaccccttcacagataatttcagggcttttaaagtaagttactccaattaatttgaattgcaggaactttcctggatccaatcactcactgctcctcctggacccccctccccccaccgaattcgcagttcccagaccgctgagctgcaggagactccctagcaggatcgggtccaacctgctggcaaaaatagttttgagataaaccgttttcatcttggtgggaagaaaacattttgctttccaacagaaggggcccacacaactctatgctttttaccttacaactgcacaggccccgcccccgcggtccctctgcagaccccgcctctccccgggctccgccccaggctacccgggctctgcgcgcacgtgcagtttcttggagtcccggaagcggatcgcggtgtgtgaaggtgacaccgccgagcaagagtgtgcctaggtgtagattaagccttcgattcgccgtcccgcttttccacacccgctctgctgaccttaaaatccccgcatcgcgcccttcacccgaggtaaatacggacctcgccatgtgggtaaaactcgctctgagaccagtccctgtcccctgccattcgcgtcttcttcccgcataaaaccctttcctgacccctcctcccgccccgcgctttttaaagtcctcacctgcgaggtggattcccgtcctgagcgcctcccagcctctccgtcgtcggccctggagcgcagcgccgcagaccgcgtcctccgcctggtcctaggctcctgcagaccctaccctgtcctaaggcgccgtcgccccccacctccctcctcctcgtgccgggccctgctgctccccaggcctccccttcgcagtcaccgcttcccctgcgcccgcgttggggaggtgcccggggcctgtcctgtgacacccggtgttcttgcctgcccagctccacccgctggaaaatgtgctcctcca

SEQ ID NO: 73164 - DNA, 3281 bp, Homo sapiens
tatggcagagggggaagaaaagggaaattcattcatgcaagaaataatcacctctcatctgggatagcttaagagaaagaggagaccacaacaggaccaaattaatgggaggaaaaaggtaacctgggtaaaagtgctctctggcattatggaactacatttagtaagctgtagtgaatgatcagcctctgggataccaatagtctaccaacaaggctgaactcattctaattcaatcagcatgtctgcaccattctggtgacccaggtttacagtattcattacagaaataccatgaagaccagtgggtaatgtcctagaattgaacttatttcaaaaagcattcctaattatttgttttcacttttgaaaaaccttaaaaacaatacatttataaataattaacttctaattatagaggattctactatactgtaatataatattaaactgtaaacaccttaacatgaatattgaatgcatgattagttatgtagatggtttgttttagattaacatgacaaaagtaacaattagagaaaacatttgacatgggataaaattaatcaaaaccacatcttttcaatggcttggcataatttccatgcttttggaaatggccagataattagcaagaaacaaagacaagattttggctttgctcaatgatggtttttgaccttttgaaatctaaaatccttgctaaagtattcaaagggagtattttattggtggctgcccagggtttccaaggcaatgaaggaagaattttgataggcaggaaaatgcacactatatacacacattgctcttctctgatttgctttaacactgaaaaattgaagttgtaaatgtagtctcaatttagagtaaattaacaaatgacttgtttttcaaaaaagccaatgtataaaattaatgggtaacagaagccattagctgctaaaaactagtatgactaaattcagtaagtatctagccatgcaaataacagtccaattaaatgaagaccctcataggtgcatatggaaagcattgctgtgcagtgtggtgcctccactcagcattttcttctgcctcttcacagagaaaccagtttcccctgagtgactcagggtgcatactgggaactgagaatgctgtgttcagagtgattactgaaaacatggttaacacacttcttccatatgataataaaatgttataaatcttactctgcctcagaaaagcttttagtaaatgattatagtactcaatttgggtttatggagaatttcaatgttccagataattcagacacttaaatgtcaatgaaatcccataaaacatatttgaataagataaagtcttcttagctaacaaatttgtattactagtacatttataaaaaaatagaaaaccagtactttaagccaaataacagtatttgacacgttagtagcacccaaacaagtgctcttcacgatcattgttaaagcagcaatagcaccacgtgctttcctgggacctgctggcctgttttccactgatataaagtggagaaggcattgaaatagcaaaggagggtgatataaattgaatacttatatgaaatacaattttaaataaaacatagcacttgatgttgtacaactataggcgagactattagtgtgaggtcatatttttacttatattgacaaaataatcattcacaatattcttatttagaataatattcctgttctgctgtatatttgctagcttttgatcaaatatttgggagctcaatagaaatcaacaaaatgaatctttattttaccacaagcattattgatgcatatgcttgtttttattaaaatccattaatgttttatgaaagattatacttttgctgggtgcggtggctcacacttgtaatcccagcactttgtgatgtaaaatcacacccttgtcttttttgtctttgtggctgaagtcgggtatttatggtaatgcaaaagaagtctaggtctctttttagaagaaagatggtgatgatggaagcaaatataatggtgcatggtacttggccacatttcaaatgggtgataatgaacattcacctaagtgccacaggtggcttttatttaccacatcaaatcttctttgtgaggaaggctcagcccactaatgtcaagcatttttggtggttcctagatagatgaacaaaacctcactgggctgttttaatgagaccagaattaaaaacacccaggtgccaggttattaagaacatttttacacttgtggaaaaaaatgtgatgtggcgtgtggcttggtttgaataaatcttcactgaggtaagtagctgattgaatttacctaactgtaggttaagaaatgaaaataacctctgaccaagtttattttacaggcttatttctgtacatataaaatagatggctagataaacatatacacataaaatgagtcacatggatatgtctacgtaatgtttatttgtgcatagatctcacaaacaaaaaggctcagaaataaagcagatcagatgacatctccgtattctacccctgaagccgaggtaaattaaataagcaaattagcagaacccaggtggttgtaatcagccaatktgcacagcccaggtgattccaaccagcaaattagctcagatgaggtggatccaatcatccaattatctaaatagagactgtggctttatcaaggcaggccccaaatggtggatgtgaacagaacatgcacacactgaggagacatgcagggcactgaaatactaacctggacagataagttacatggttttattttcagcttatttctgtagacttgcccttgaagttaaagctttgttgatatttacataaacaacattgtatggctacgttccattctgacatgttacttagcaaaagaaaaaagaagtaattctacatcagcatgtttagtgcatgccagaagattaaaaatgtcttttggggaatgtattttgtatacataagtatttacatataaatatttatataattatgtgtttgtcttcctatgtatatttatatctagatatgtcaatcttcgtattgatatgcattgctacaaatagtaagataaagagtaacttccagccgggtgcggtggctcgtgcctgtaattccagcacactgggaggccaaggtgggtggatcacctcagctcacgagttcgagaccaacctggccaacatggtgaaaccctgtctctattaaaaatacaaaaattagccgggcggggtggtgagtgcc

SEQ ID NO: 73165 - DNA, 708 bp, Homo sapiens
catttttctttgagcgtactcttgagatatcataaatacaatcccattgttaggagaggtcccagagcccaattccaacccacttgtccttgaaccttctctaaaacaacctgaaaaagaatggtcttggagcttatgcctgaaagcttccatgccagagaactcacccccacccactgccaccaccagaaaaccagtccagctgccctgtttgtttggtttgattcagttgtgaagcagctttgtagagagtgaagagcaagatactagaakgtacacaaacttcagtgttatggaaaattgattgtatttctatcctatgactaattatttgtcctcacttttgtttacaaaatagaaggctattataaccttgtgtcttacaagtttggtgataattacaaacaggctaagcattcagtaaaacatcatttttctcctatttgctctaactgaagacaggattactttgaatgaccagaacagtcgtatgcttgcaatagctaatttacaataactctagagttcttgaagtttgccctagggcattaaagatgccaactatggcctatgagaaatatcaaagcatgagacaaggccattcaataagaagaggtcagaaatttctcaactgctgcaaaattttttagcaataaactcatttctggtaagtcttttacatcacccactcctacctttacatacaaa

SEQ ID NO: 73166 - DNA, 673 bp, Homo sapiens
tgcatcataatctcctgcagaagcttaatgtctgtgaattaacctgagttccaggctgtctcaatagaacttgaaacaactgcacgtagtgtttttttcaacagacaagttctgccccacgttaccctgattcagaaaacttcccgttcgcagtactttagagcaccgacctcatatcgctcccagtacctcttcagggcactgaccttatatccgctgccagccgactcatccaggtttccccattsaccttgtgaatttcagttcctctactccagcagaaccttctttgttcacgtcctcaaagtcctatgttcggaggccacttgtccgacatcctcggagtccctcttctgggtcaccagttgccacctgcacagaccttgggggactgaacgaagggggcgaacattggaataaaagacaaaggtgtatatttggaagaaggggtcagggggctccttctagtgaacaagggccctgagctttagagccctttgtattttattgggtaaaggagatggtggcagggggagggggtggttattggtcagcggcttgatttacaacaggtttgcaagactgcattctttgaacaatagactgtagatgtcccagtagataatttcaatgagcatggcaccagggagtgattaccttcagcaaaccttct

SEQ ID NO: 73167 - DNA, 1506 bp, Homo sapiens
acttgaaatcacagaaagagaaygttgattctgcagtaacagtaagtgtttaaccgtgtatactaaaatcttcatgtgagagtcgcagttctctcatgaatataccttgcatttcacagtcagccaagttggctcaagactcagggtaataaactctaaattacggtaagtctttaagttacattgaaaaaaccaccaaaaaaaagaacttaaagtcagaagaatggaaccatttgtctcttatctacctaggacctggaagcccaccccgcccctcccccaccgcgccgtcgagtcctcccagctttgcttcaagttgtcttgcctttctagacctgccccgtctttccagaccgaaccaatgttcatccagcacgtattgatggatgtgttatgtctccctaggaagtgtaaaagccagttgtgttctgaccacctcgggcacaggtcgtcaggaactcctgagagtgtcacagacaggtgtgttcaactttggcaaaataaactttctggattaactgcaacctgtctcagattttcagcatttacagatgtacacatgctcactctagagcctttgctcttgacccctgggtgcccctgcctttcacagacacctgtgtgctttctgtaggcagatctagggaattctctggcaagaaagcatttaggaacctgcccaggcaattcagtggtcagccaatatggggactgggagttaaatactagctctctgcttttacctactagttacaacattaagtcgctacagaacaccctcagttcacctcttagtgtatcctttgaaaaaggatacactaatctctttaaatgcatgactggtaatcaaatcagataatgcgtgtcaaagcctttgagttatgatatgcacatataatccattatcatagttctaacaagtacttatcactggaaaatagtaagaaatcttatttttgcctaaatggggccatcccccaaagtataagagaaccttgttacagaagatttaactacattgaacgagtcagaccaggcctggtggctcatgcctataatcccagcaatttcggaggccaaggcacgaggattgctccagttgaggagtttgagaccatccccgacaagatagcaagaccttgtctctacgaaagtttaaaaattagccaggagtggtggcatgcactagtagtccccagatacttgtggaggatcactcgagcccaggagatcgaggctatgatcttaccactacactccagcctaaagcatagggtgagaccgtgtgtttaaaaaaaaaaaaaaagttggggggtgggggggtaactcagcattggagataccaaatgacttcagaaaatccttttctcccataaagcagaagggccaaagaccagaaaaacattaaaggagaagaaccagaaaactaataatacggaggacaaaaaagaatgacgaaaccaatcctttccctagtaattgaaacaattaacaaggatatagctg

SEQ ID NO: 73168 - DNA, 1506 bp, Homo sapiens
acttgaaatcacagaaagagaacgttgattctgcagtaacagtaagtgtttaaccgtgtatactaaaatcttcatgtgagagtcgcagttctctcatgaatataccttgcatttcacagtcagccaagttggctcaagactcagggtrataaactctaaattacggtaagtctttaagttacattgaaaaaaccaccaaaaaaaagaacttaaagtcagaagaatggaaccatttgtctcttatctacctaggacctggaagcccaccccgcccctcccccaccgcgccgtcgagtcctcccagctttgcttcaagttgtcttgcctttctagacctgccccgtctttccagaccgaaccaatgttcatccagcacgtattgatggatgtgttatgtctccctaggaagtgtaaaagccagttgtgttctgaccacctcgggcacaggtcgtcaggaactcctgagagtgtcacagacaggtgtgttcaactttggcaaaataaactttctggattaactgcaacctgtctcagattttcagcatttacagatgtacacatgctcactctagagcctttgctcttgacccctgggtgcccctgcctttcacagacacctgtgtgctttctgtaggcagatctagggaattctctggcaagaaagcatttaggaacctgcccaggcaattcagtggtcagccaatatggggactgggagttaaatactagctctctgcttttacctactagttacaacattaagtcgctacagaacaccctcagttcacctcttagtgtatcctttgaaaaaggatacactaatctctttaaatgcatgactggtaatcaaatcagataatgcgtgtcaaagcctttgagttatgatatgcacatataatccattatcatagttctaacaagtacttatcactggaaaatagtaagaaatcttatttttgcctaaatggggccatcccccaaagtataagagaaccttgttacagaagatttaactacattgaacgagtcagaccaggcctggtggctcatgcctataatcccagcaatttcggaggccaaggcacgaggattgctccagttgaggagtttgagaccatccccgacaagatagcaagaccttgtctctacgaaagtttaaaaattagccaggagtggtggcatgcactagtagtccccagatacttgtggaggatcactcgagcccaggagatcgaggctatgatcttaccactacactccagcctaaagcatagggtgagaccgtgtgtttaaaaaaaaaaaaaaagttggggggtgggggggtaactcagcattggagataccaaatgacttcagaaaatccttttctcccataaagcagaagggccaaagaccagaaaaacattaaaggagaagaaccagaaaactaataatacggaggacaaaaaagaatgacgaaaccaatcctttccctagtaattgaaacaattaacaaggatatagctg

SEQ ID NO: 73169 - DNA, 1506 bp, Homo sapiens
acttgaaatcacagaaagagaacgttgattctgcagtaacagtaagtgtttaaccgtgtatactaaaatcttcatgtgagagtcgcagttctctcatgaatataccttgcatttcacagtcagccaagttggctcaagactcagggtaataaactctaaattacggtaagtctttaagttacattgaaaaaaccaccaaaaaaaagaacttaaagtcagaagaatggaaccatttgtctcttatctacctaggacctggaagcccaccccgcccctcccccaccgcgccgtcgagtcctcccagctttgcttcaagttgtcttgcctttctagacctgccccgtctttccagaccgaaccaatgytcatccagcacgtattgatggatgtgttatgtctccctaggaagtgtaaaagccagttgtgttctgaccacctcgggcacaggtcgtcaggaactcctgagagtgtcacagacaggtgtgttcaactttggcaaaataaactttctggattaactgcaacctgtctcagattttcagcatttacagatgtacacatgctcactctagagcctttgctcttgacccctgggtgcccctgcctttcacagacacctgtgtgctttctgtaggcagatctagggaattctctggcaagaaagcatttaggaacctgcccaggcaattcagtggtcagccaatatggggactgggagttaaatactagctctctgcttttacctactagttacaacattaagtcgctacagaacaccctcagttcacctcttagtgtatcctttgaaaaaggatacactaatctctttaaatgcatgactggtaatcaaatcagataatgcgtgtcaaagcctttgagttatgatatgcacatataatccattatcatagttctaacaagtacttatcactggaaaatagtaagaaatcttatttttgcctaaatggggccatcccccaaagtataagagaaccttgttacagaagatttaactacattgaacgagtcagaccaggcctggtggctcatgcctataatcccagcaatttcggaggccaaggcacgaggattgctccagttgaggagtttgagaccatccccgacaagatagcaagaccttgtctctacgaaagtttaaaaattagccaggagtggtggcatgcactagtagtccccagatacttgtggaggatcactcgagcccaggagatcgaggctatgatcttaccactacactccagcctaaagcatagggtgagaccgtgtgtttaaaaaaaaaaaaaaagttggggggtgggggggtaactcagcattggagataccaaatgacttcagaaaatccttttctcccataaagcagaagggccaaagaccagaaaaacattaaaggagaagaaccagaaaactaataatacggaggacaaaaaagaatgacgaaaccaatcctttccctagtaattgaaacaattaacaaggatatagctg

SEQ ID NO: 73170 - DNA, 1506 bp, Homo sapiens
acttgaaatcacagaaagagaacgttgattctgcagtaacagtaagtgtttaaccgtgtatactaaaatcttcatgtgagagtcgcagttctctcatgaatataccttgcatttcacagtcagccaagttggctcaagactcagggtaataaactctaaattacggtaagtctttaagttacattgaaaaaaccaccaaaaaaaagaacttaaagtcagaagaatggaaccatttgtctcttatctacctaggacctggaagcccaccccgcccctcccccaccgcgccgtcgagtcctcccagctttgcttcaagttgtcttgcctttctagacctgccccgtctttccagaccgaaccaatgttcatccagcacgtattgatggatgtgtyatgtctccctaggaagtgtaaaagccagttgtgttctgaccacctcgggcacaggtcgtcaggaactcctgagagtgtcacagacaggtgtgttcaactttggcaaaataaactttctggattaactgcaacctgtctcagattttcagcatttacagatgtacacatgctcactctagagcctttgctcttgacccctgggtgcccctgcctttcacagacacctgtgtgctttctgtaggcagatctagggaattctctggcaagaaagcatttaggaacctgcccaggcaattcagtggtcagccaatatggggactgggagttaaatactagctctctgcttttacctactagttacaacattaagtcgctacagaacaccctcagttcacctcttagtgtatcctttgaaaaaggatacactaatctctttaaatgcatgactggtaatcaaatcagataatgcgtgtcaaagcctttgagttatgatatgcacatataatccattatcatagttctaacaagtacttatcactggaaaatagtaagaaatcttatttttgcctaaatggggccatcccccaaagtataagagaaccttgttacagaagatttaactacattgaacgagtcagaccaggcctggtggctcatgcctataatcccagcaatttcggaggccaaggcacgaggattgctccagttgaggagtttgagaccatccccgacaagatagcaagaccttgtctctacgaaagtttaaaaattagccaggagtggtggcatgcactagtagtccccagatacttgtggaggatcactcgagcccaggagatcgaggctatgatcttaccactacactccagcctaaagcatagggtgagaccgtgtgtttaaaaaaaaaaaaaaagttggggggtgggggggtaactcagcattggagataccaaatgacttcagaaaatccttttctcccataaagcagaagggccaaagaccagaaaaacattaaaggagaagaaccagaaaactaataatacggaggacaaaaaagaatgacgaaaccaatcctttccctagtaattgaaacaattaacaaggatatagctg

SEQ ID NO: 73171 - DNA, 1506 bp, Homo sapiens
acttgaaatcacagaaagagaacgttgattctgcagtaacagtaagtgtttaaccgtgtatactaaaatcttcatgtgagagtcgcagttctctcatgaatataccttgcatttcacagtcagccaagttggctcaagactcagggtaataaactctaaattacggtaagtctttaagttacattgaaaaaaccaccaaaaaaaagaacttaaagtcagaagaatggaaccatttgtctcttatctacctaggacctggaagcccaccccgcccctcccccaccgcgccgtcgagtcctcccagctttgcttcaagttgtcttgcctttctagacctgccccgtctttccagaccgaaccaatgttcatccagcacgtattgatggatgtgttatgtctccctaggawgtgtaaaagccagttgtgttctgaccacctcgggcacaggtcgtcaggaactcctgagagtgtcacagacaggtgtgttcaactttggcaaaataaactttctggattaactgcaacctgtctcagattttcagcatttacagatgtacacatgctcactctagagcctttgctcttgacccctgggtgcccctgcctttcacagacacctgtgtgctttctgtaggcagatctagggaattctctggcaagaaagcatttaggaacctgcccaggcaattcagtggtcagccaatatggggactgggagttaaatactagctctctgcttttacctactagttacaacattaagtcgctacagaacaccctcagttcacctcttagtgtatcctttgaaaaaggatacactaatctctttaaatgcatgactggtaatcaaatcagataatgcgtgtcaaagcctttgagttatgatatgcacatataatccattatcatagttctaacaagtacttatcactggaaaatagtaagaaatcttatttttgcctaaatggggccatcccccaaagtataagagaaccttgttacagaagatttaactacattgaacgagtcagaccaggcctggtggctcatgcctataatcccagcaatttcggaggccaaggcacgaggattgctccagttgaggagtttgagaccatccccgacaagatagcaagaccttgtctctacgaaagtttaaaaattagccaggagtggtggcatgcactagtagtccccagatacttgtggaggatcactcgagcccaggagatcgaggctatgatcttaccactacactccagcctaaagcatagggtgagaccgtgtgtttaaaaaaaaaaaaaaagttggggggtgggggggtaactcagcattggagataccaaatgacttcagaaaatccttttctcccataaagcagaagggccaaagaccagaaaaacattaaaggagaagaaccagaaaactaataatacggaggacaaaaaagaatgacgaaaccaatcctttccctagtaattgaaacaattaacaaggatatagctg

SEQ ID NO: 73172 - DNA, 1506 bp, Homo sapiens
acttgaaatcacagaaagagaacgttgattctgcagtaacagtaagtgtttaaccgtgtatactaaaatcttcatgtgagagtcgcagttctctcatgaatataccttgcatttcacagtcagccaagttggctcaagactcagggtaataaactctaaattacggtaagtctttaagttacattgaaaaaaccaccaaaaaaaagaacttaaagtcagaagaatggaaccatttgtctcttatctacctaggacctggaagcccaccccgcccctcccccaccgcgccgtcgagtcctcccagctttgcttcaagttgtcttgcctttctagacctgccccgtctttccagaccgaaccaatgttcatccagcacgtattgatggatgtgttatgtctccctaggaagtgtaaaagccagttgtgttctgaccacctcgggcacaggtcgtcaggaactcctgagagtgtcacagacaggtgtgttcaactttggcaaaataaactttctggattaactgcaacctgtctcagattttcagcatttacagatgtacacatgctcactctagagcctttgctcttgacccctgggtgcccctgcctttcacagacacctgtgtgctttctgtaggcagatctagggaattctctggcaagaaagcatttaggaacctgcccaggcaattcagtggtcagccaatatggggactgggagttaaatactagctctctgcttttacctactagttacaacattaagtcgctacagaacmccctcagttcacctcttagtgtatcctttgaaaaaggatacactaatctctttaaatgcatgactggtaatcaaatcagataatgcgtgtcaaagcctttgagttatgatatgcacatataatccattatcatagttctaacaagtacttatcactggaaaatagtaagaaatcttatttttgcctaaatggggccatcccccaaagtataagagaaccttgttacagaagatttaactacattgaacgagtcagaccaggcctggtggctcatgcctataatcccagcaatttcggaggccaaggcacgaggattgctccagttgaggagtttgagaccatccccgacaagatagcaagaccttgtctctacgaaagtttaaaaattagccaggagtggtggcatgcactagtagtccccagatacttgtggaggatcactcgagcccaggagatcgaggctatgatcttaccactacactccagcctaaagcatagggtgagaccgtgtgtttaaaaaaaaaaaaaaagttggggggtgggggggtaactcagcattggagataccaaatgacttcagaaaatccttttctcccataaagcagaagggccaaagaccagaaaaacattaaaggagaagaaccagaaaactaataatacggaggacaaaaaagaatgacgaaaccaatcctttccctagtaattgaaacaattaacaaggatatagctg

SEQ ID NO: 73173 - DNA, 603 bp, Homo sapiens
tcccacctcggcctttcaaagtgctgggattaccggcktaagctactgtgtccagctgatttttataatgtatcttccggtgctgtttgaaaattttaccatgtggttgtattatctattcaggaggctgaggtgggaggatttttaaaaactttttaagaactaactacaaataaagagatgctactgaaacagtagcttcagcgggaaggcagtgatttggagcatgtgtgggtggagcacaggcccggcgtcgtatttctaggtgatcctaatgggtcttgacaccttcacctaattaaagtgggcgagcacagaggtgtctgctggttctcggagtgcatctgtcaccggtcccgccacagcgggaggctagcatgctgagcatgtggaatgtggagcctcggccctgcagcctgggcagctggagttcagaccgcgggttcccagatcagctcccagctcactaggcttcttgctatgacagatacagggcagcagagtgttcagcctccagcttccaggcagcccacctgccctttctgtgctgtaaatgcctcctcccaggttcatggagtggctaccgtgccttgaagcccacct

SEQ ID NO: 73174 - DNA, 603 bp, Homo sapiens
tcccacctcggcctttcaaagtgctgggattaccggcttaagctactgtgtccagctgatttttataatgtatcttccggtgctgtttgaaaattttaccatgtggttgtattatctattcaggaggctgaggtgggaggatttttaaaaactttttaagaactaactacaaataaagagatgctactgaaacagtagcttcagcgggaaggcagtgatttggagcatgtgtgggtggagcacaggcccggcgtcgtatttctaggtgatcctaatgggtcttgacaccttcacctaattaaagtgggcgagcacagaggtgtctgctggttctcggagtgcatctgtcaccggtcccgccacagcgggaggctagcatgctgagcatgtggaatgtggagcctcggccctgcagcctgggcagctggagttcagaccgckggttcccagatcagctcccagctcactaggcttcttgctatgacagatacagggcagcagagtgttcagcctccagcttccaggcagcccacctgccctttctgtgctgtaaatgcctcctcccaggttcatggagtggctaccgtgccttgaagcccacct

SEQ ID NO: 73175 - DNA, 930 bp, Homo sapiens
tgcatacttgttaaattaaacccaaatgttgtaaaaatacagaatatcaaacaaaagaaagtgggaggagggaaatttcttgaaatccctattcctgttttaggagtttagtgtgtattttccagataatttaaatgtgtatactactatayatgttagatatagatctaaagaaacatatatacatacacaaaatttcacaaaaatggaataggctacatacagatttgcaacttgcttttatatattcgacaatgtatcttttacttattccattcaggatatgctgccctattttagagctactcactaacatcctgaaaactgtatttctgatgttggggctcagaaatggtaccccaaaacatggcactttgacacgctaaactaaagcagcagcctcaaggtctctctgaccttccctccccaagagcagtgacagactgtctctggaatttccttatctgactaaggagatgtctttctaaaagaaatgcaattatcttaagaatccctccctaggaatctcatcaaataaccgagaaagattagccaatggaaaagagaagagactaaaagtcatcaccatgcccagacagacttttcttccattcttctgagagtagctccaagagattacctgggagactttatctacataataagacaacctttgttcacaatgcagttctgcctcttaccttcccataacttactggtcccattcagtttcctaaaaaaatcatttagaaggtaatgtctgcttcctaggcccattcaattcccctaaaaatcatttatgactgctcaaaattgcctgcatttctcccatctccctctcccctatgaatagggtatataagcttcaaccatttgccccgagtcttatatattgtatggctctcaagttcagcacattaataaatctgt

SEQ ID NO: 73176 - DNA, 930 bp, Homo sapiens
tgcatacttgttaaattaaacccaaatgttgtaaaaatacagaatatcaaacaaaagaaagtgggaggagggaaatttcttgaaatccctattcctgttttaggagtttagtgtgtattttccagataatttaaatgtgtatactactatatatgttagatatagatctaaagaaacatatatacatacacaaaatttcacaaaaatggaataggctacatacagatttgcaacttgcttttatatattcgacaatgtatcttttacttattscattcaggatatgctgccctattttagagctactcactaacatcctgaaaactgtatttctgatgttggggctcagaaatggtaccccaaaacatggcactttgacacgctaaactaaagcagcagcctcaaggtctctctgaccttccctccccaagagcagtgacagactgtctctggaatttccttatctgactaaggagatgtctttctaaaagaaatgcaattatcttaagaatccctccctaggaatctcatcaaataaccgagaaagattagccaatggaaaagagaagagactaaaagtcatcaccatgcccagacagacttttcttccattcttctgagagtagctccaagagattacctgggagactttatctacataataagacaacctttgttcacaatgcagttctgcctcttaccttcccataacttactggtcccattcagtttcctaaaaaaatcatttagaaggtaatgtctgcttcctaggcccattcaattcccctaaaaatcatttatgactgctcaaaattgcctgcatttctcccatctccctctcccctatgaatagggtatataagcttcaaccatttgccccgagtcttatatattgtatggctctcaagttcagcacattaataaatctgt

SEQ ID NO: 73177 - DNA, 700 bp, Homo sapiens
tccagccctctaagcttcaaaggcagctcctagtaagtggagtattgaccggctcgccagacccagatcacaggtgaaacaaagtgaaaagttagtctctcctcgcagccattttcactgatgagcagttgaggctgtccgattaatgtcagccgcatgctggtgacaggacacaacgcagtgtaccccaagargcttattaaaaagaacagccactcctggggccctctgagggtgccctcacacacagacccccttttccccaactccccagtgctgtgttaagttgctagcagcagggaggatggagatggagtttctgaaatgaacaccaaagcacatgtcaggaccacgcgtggcctggcagggggctcattaccgcagcttacatccttctccctgcaggggaggggaggcagtgccctggggacttatgggctgtctcctaggtgaccgtggcatcccaggagttccttctccagttgccttccaggtgagcttagagccaggtgcatccctgggggcatgatgtccccagagtgtctaccagcttggtgacaatggaccctgcaacccaggaggcctggcccctcatggatttagggatggaatcatctgtgccgttttccttcccgtgttttctgcccagtagtttgaaccgcatttctaaggccgttcactctcctgtgtgaccccaaaa

SEQ ID NO: 73178 - DNA, 700 bp, Homo sapiens
tccagccctctaagcttcaaaggcagctcctagtaagtggagtattgaccggctcgccagacccagatcacaggtgaaacaaagtgaaaagttagtctctcctcgcagccattttcactgatgagcagttgaggctgtccgattaatgtcagccgcatgctggtgacaggacacaacgcagtgtaccccaagaggcttattaaaaagaacagccactcctggggccctctgagggtgccctcacacacagacccccttttccccaactccccagtgctgtgttaagttgctagcagcagggaggatggagatggagtttctgaaatgaacaccaaagcacatgtcaggaccacgcgtggcctggcagggggctcattaccgcagcttacatccttctccctgcaggggaggggaggcagtgccctggggacttatgggctgtctcctaggtgaccgtggcatcccaggagttccttctccagttgccttccaggtgagcttagagccaggtgcatccctgkgggcatgatgtccccagagtgtctaccagcttggtgacaatggaccctgcaacccaggaggcctggcccctcatggatttagggatggaatcatctgtgccgttttccttcccgtgttttctgcccagtagtttgaaccgcatttctaaggccgttcactctcctgtgtgaccccaaaa

SEQ ID NO: 73179 - DNA, 775 bp, Homo sapiens
gatcctgkggggaggaggcatctgcagcagggactggagggaaccttggtgttaaaaaaaaaaaaaaaaaggctgtcattgtaaatgtgaggcgtttcagcttccgactacagcccatgtctctactgttggacgccagtcctgggatgagcctggcactggcttcattcccctgtagcaaaggggcccagtggggacacatggggtcgtcttctcttctgagtactggccctagtctcttatccacattagcccccacttcctttgccagtttacatactcccagtcctacccaaccccccaccttcagattctgctattcagccagacagcattaccagtattaggctgttctcaatctataaagatggcagttgcaagaggttcagcctcacatacgccagcagccaccagcactctccattcaagtccactgtgctcagcagtctgggttttccatctgtcacgcactcactgaagcccctggtctagccagatttccgcaggtgtcatccactcaacttgtcccaaatgaagcccatcctcccgtggcctcacctgccccctcctcatcctgggttctctcaaaccatcacagcacccctgcctccaagcctgtgtcccgagacatggctctgctccacatggcctcgaggattgaaccatccctgtgtcacagaagcctactgtcacaccctcaaccacagcagcctacactcactgggacttcccaggtgccaggcacagacatgtgacacatatagcctcgtgacag

SEQ ID NO: 73180 - DNA, 643 bp, Homo sapiens
caagctctggtcattgcagggcagggctcatcctggctgtgctgaatgatgatggtggttgcaggctaagtggctgctcagaccccgcatctgaagagcatgacaggagggggttgtgagggcatggctttaaactgacttttacatccaagccttcctgtatctaagaatcagttcccctacactgcaagcaaagacctccttccagcatctttgaaccatcctctaaggagcattcagggataaagaggctcttcgtaagtggggtcccccatcctttgaagagaggatcatgtttgctttgggcctgcagccagacacccacctaaaggaggaaagcacagcrcacgccaggctggttgggctcagagatgattcagagcagctccggctttgttcaaggtcaaatgtttctttttcatccatgcacagaaggcaaagcaacaacttgacttacaggaaaagacaatcattaaaaggggtcttcattttgttagcttatcagggtgtcaaacttgaaacgagggatctcactcgcacagtggccatgtccctggaaaggtgcaacgcaaagtagatcattgtgaagagattcactcctgagatacatgaagatgctaggctgtttcagggaaccctgcag

SEQ ID NO: 73181 - DNA, 751 bp, Homo sapiens
ccagacctcagagtccccaaatctcaggaccccacagacctcagactccaaggcccccrgctcccccagacccacctccaaaactcactatcccagaccccaggcctgcctgtcccccaccacctgcagcctcgggtctggcacttcctcatttctttatttcctttttttctaagaggcctcagaactgggcgtggaggacgtgcagctgcatgaggctcactgctggctgggctcctccatccctctgctccttataaaagaggccccaagagctcccctgctccctctgctgtctactgaggacacagtgagaagacggtcatctgcaaactaggaagtgaatctgctggtgccttgatcttggacttcccagcttccggaactgttgttcataagctaccccagtttacggcatatttgttatagcagcctgaacaaacatttggagacatctgctctctacccagggctgctcccaccacagggcctttgcacatgctgttcccactcctggatgctgttccccacatcccttcctccttactccctaaggggttccttgatcatcccattgaaaagttgcttctgcggccaggctcagtggctcacgcctgtaatcccaacactctgggaggctgaggagggtggatcacctgaggtcaggaattcgggaccagcctggccaacatggtgaaaccccgtctctactaaaaatacaaaaagttaactgggcatggtcccatgcgcc

SEQ ID NO: 73182 - DNA, 719 bp, Homo sapiens
aaaatgctccccatgggccgggcgcggtggctcacgcctgtaatcccagcactttgggaggccgaggcaagtggattacgaggtcaggagatcgagaccatcctggctaacatggtgaaaccccatctctactaaaaatacacacacaaaaaaattagccgggcgtggtggcgggtgcctgtagtcccagctactccagaggctgaggctggagaatggcgtgaacccgggaggcggagcttgcagtgagccaagatagcgccattgcactctagcctgggcaactgagcgagactccatctcaaaaaaaaaaaaaaaatgctccccatgggatacgctgtgacgcagagccatgtcagatgcagcagaaaacagtgactgctatgcctgcagcaagatggagaccagagtgccctgtaggccagcacgcagcacccactcagggcagtgacctggagcttcctcagatccctctaaggcagacgttctgaatccatctttgttagcagtctgggagacgaacttagctttggtcaaccggcaacagcaaggcaggctggttgtagggaaggtgggctcagacgtggccccagaggtacccctcacccagcatccycagccgtggctgactcttccctgggagttgtgatcagaaatggggtggagcccagcgcggtggctcacgcctgtttccagcactttgggaggctgaggtggga

SEQ ID NO: 73183 - DNA, 1225 bp, Homo sapiens
atagaggggaacctgctctccccagggctctgggcacagccacgcctgccagaggagagcttgaccaggcctaaggctggggtgccacttgcaccycagggtcttcagagcagctgctgaaagtggctccgacatctttactgactttagaaaaacaaaaatggcagccacatggggccagcataggactctgaagtgcaggcttgggagtgactgcctcttgcagttcagggacccccagtttaacatcagaagggtttacaaacagcccctgcctcaggttgggcaggatggctctggtttataataccagcactttggaaagctgaggtgggagggtcctttgggcccatgagtttgagaccagtctgggcagcatagtgagaccccatctctacaaataatataaattagccaggcatggtggtgcacacctgtggtcccagctactccagaggctgaggtgggaggatcgcttgagcccagaagtttggggctgcaatgagccatgattgtattacactccagcctgggtgacagagcaggatcctgtctcaaaaaacaaaacaatccttccccccccgccccccgcccaaacacacacacacacacacacacacacacagcccactagagtgatcaggtgatttcatacacgcacacacacattgcccaccagagtgatcaggtgatttctcacacacacatactgcccaccagagtgatcaggtgattacatacacacacacacacacacacacacacacacacacacacacactgcccaccagagtgagagtgatcaggtgattttgctgtccaggatttaggttgcctgtgatgaagtaagtaaggctctaacacagttctgccgcctgcacctcccacttctgaggctgggtgccctgcaggtgcctgccttgggcagcaggtggcgctcttggtcgcccagggtccccaaggagcaagctggcttttgctgtggttggtgtggtgcctcccaccagcactgtctatagtctcaaacctctgggcacctggtcagcagcactggcttaggacacggcagcgccctctctgttccctaaagcttggattcttgttgcaggcaagaaggttcagtttcggaaaccagccccaggtgcaacagacgcggtgccctcccggaagcgggcaacccccatcaacttggcgagtgccatcaggaagagtggtgccagtgccg

SEQ ID NO: 73184 - DNA, 1225 bp, Homo sapiens
atagaggggaacctgctctccccagggctctgggcacagccacgcctgccagaggagagcttgaccaggcctaaggctggggtgccacttgcacctcagggtcttcagagcagctgctgaaagtggctccgacatctttactgactttagaaaaacaaaaatggcagccacatggggccagcataggactctgaagtgcaggcttgggagtgactgcctcttgcagttcagggacccccagtttaacatcagaagggtttacaaacagcccctgcctcaggttgggcaggatggctctggtttataataccagcactttggaaagctgaggtgggagggtcctttgggcccatgagtttgagaccagtctgggcagcatagtgagaccccatctctacaaataatataaattagccaggcatggtggtgcacacctgtggtcccagctactccagaggctgaggtgggaggatcgcttgagcccagaagtttggggctgcaatgagccatgattgtattacactccagcctgggtgacagagcaggatcctgtctcaaaaaacaaaacaatccttccccccccsccccccgcccaaacacacacacacacacacacacacacacagcccactagagtgatcaggtgatttcatacacgcacacacacattgcccaccagagtgatcaggtgatttctcacacacacatactgcccaccagagtgatcaggtgattacatacacacacacacacacacacacacacacacacacacacacactgcccaccagagtgagagtgatcaggtgattttgctgtccaggatttaggttgcctgtgatgaagtaagtaaggctctaacacagttctgccgcctgcacctcccacttctgaggctgggtgccctgcaggtgcctgccttgggcagcaggtggcgctcttggtcgcccagggtccccaaggagcaagctggcttttgctgtggttggtgtggtgcctcccaccagcactgtctatagtctcaaacctctgggcacctggtcagcagcactggcttaggacacggcagcgccctctctgttccctaaagcttggattcttgttgcaggcaagaaggttcagtttcggaaaccagccccaggtgcaacagacgcggtgccctcccggaagcgggcaacccccatcaacttggcgagtgccatcaggaagagtggtgccagtgccg

SEQ ID NO: 73185 - DNA, 1225 bp, Homo sapiens
atagaggggaacctgctctccccagggctctgggcacagccacgcctgccagaggagagcttgaccaggcctaaggctggggtgccacttgcacctcagggtcttcagagcagctgctgaaagtggctccgacatctttactgactttagaaaaacaaaaatggcagccacatggggccagcataggactctgaagtgcaggcttgggagtgactgcctcttgcagttcagggacccccagtttaacatcagaagggtttacaaacagcccctgcctcaggttgggcaggatggctctggtttataataccagcactttggaaagctgaggtgggagggtcctttgggcccatgagtttgagaccagtctgggcagcatagtgagaccccatctctacaaataatataaattagccaggcatggtggtgcacacctgtggtcccagctactccagaggctgaggtgggaggatcgcttgagcccagaagtttggggctgcaatgagccatgattgtattacactccagcctgggtgacagagcaggatcctgtctcaaaaaacaaaacaatccttccccccccgccccccgcccaaacacacacacacacacacacacacacacagcccactagagtgatcaggtgatttcatacacgcacacacacattgcccaccagagtgatcaggtgatttctcacacacacayactgcccaccagagtgatcaggtgattacatacacacacacacacacacacacacacacacacacacacacactgcccaccagagtgagagtgatcaggtgattttgctgtccaggatttaggttgcctgtgatgaagtaagtaaggctctaacacagttctgccgcctgcacctcccacttctgaggctgggtgccctgcaggtgcctgccttgggcagcaggtggcgctcttggtcgcccagggtccccaaggagcaagctggcttttgctgtggttggtgtggtgcctcccaccagcactgtctatagtctcaaacctctgggcacctggtcagcagcactggcttaggacacggcagcgccctctctgttccctaaagcttggattcttgttgcaggcaagaaggttcagtttcggaaaccagccccaggtgcaacagacgcggtgccctcccggaagcgggcaacccccatcaacttggcgagtgccatcaggaagagtggtgccagtgccg

SEQ ID NO: 73186 - DNA, 586 bp, Homo sapiens
tccccaaggtgccctgccggctctccccatccacacttgtcagcttcacagtcaccaaggggctcctcaccccaggcctcatcacaccagtcaggtggcagctctcctccctggcacacacccccagccctgtgacccccaagctctgacacttcagggcccccacttccatctttaagtcacaggtgaaagagaaagagaatgataactttattcatggtcacagaatacccccgggaaggggaaggacctggcagcagggagtaaccacgactggtcagttgaagaaggtgaggatgctggccccgaggtgtacaggaagggggaaaatgtgcgagggcctttacggtgggcagtgccagctatggccccccagcagacaacaaggcacagtggggcttggggactgggggaggccagccctgtccgcctgtccttgacatcaggaggcttgtgagtggagtcctgcaacccccacccaaccmctgtacaacgggggttccatttctgagacccccaaagtatggggcatcttagaggcccgccccacagctgagcatcatctcaaggaccttcccccatgacg

SEQ ID NO: 73187 - DNA, 586 bp, Homo sapiens
tccccaaggtgccctgccggctctccccatccacacttgtcagcttcacagtcaccaaggggctcctcaccccaggcctcatcacaccagtcaggtggcagctctcctccctggcacacacccccagccctgtgacccccaagctctgacacttcagggcccccacttccatctttaagtcacaggtgaaagagaaagagaatgataactttattcatggtcacagaatacccccgggaaggggaaggacctggcagcagggagtaaccacgactggtcagttgaagaaggtgaggatgctggccccgaggtgtacaggaagggggaaaatgtgcgagggcctttacggtgggcagtgccagctatggccccccagcagacaacaaggcacagtggggcttggggactgggggaggccagccctgtccgcctgtccttgacatcaggaggcttgtgagtggagtcctgcaacccccacccaacccctgtacaacgggggttccatttctgagacccccaamgtatggggcatcttagaggcccgccccacagctgagcatcatctcaaggaccttcccccatgacg

SEQ ID NO: 73188 - DNA, 745 bp, Homo sapiens
cacactcggcactccagaaaatatcctttctgtagcaagcttttttttttggtaagacatgcgctgctggtcacgtctcagaccctcttatgacattcatgaccactggggaagttagagaagcatctttatgagaagttatctaygatataggcattgtttcttgaccttgctgtgggaatgcctggatatgcaggaattaatgacgatttcacttcaagatggcatttttcttgccatgcaacaggctgctttcctacaggagcccacttacagagtttgcctgtgaggtgtgatttcttttctttctttttttttttttttttttttgagacggagtcttgctctgtcgcccgggctggagtgcagtggcgcgatctcggctcactgcaaggtcctcctcctgggttcatgccattctcctgcctcagcctcctgagtagctgggactacaggcgcccaccaccacgcctggctaattttttgtatttttagtagagacggggtttcaccgtgttagccaggatggtctcaatctcctgtgaggtgtgatttctgagtaatttcagggtgttacaagttcctttgcaagggatcgtatatcttgttatcagtagtgtagacctggagataaattagttccaggtagaggacttagaatgcatttttagatgggagcccccaaagtggtagggaagacctcaggtcatgatagggccaggggatgccaaggaaagggagagaa

SEQ ID NO: 73189 - DNA, 1499 bp, Homo sapiens
gattgggattttaaaataatttttttaaaattttaggaaagtaatcactacagggcaattttccaagtgtttttgacttgagagtagaatagacccttaagctaaaatgttagttttaatttcaatttctatatcttcaaatagaaagataaagcattattgaaatgaaaatataagctggtaaaaaaaagtagaatatatgtaccaaaattgagatttaattaaaaagacaaatattatattattgaaagaaaacgatcatacttagaaaaaaagccctcttaaaatgctyttcatcttctcacattttctcgggaagccaagctgcgggttcagcgatggagagcagaaatactctatgagcacacccatgttcatggcagcgctgctcacaatagccaggaggtggaagcagcctaaacatccctcagcaaatgaatggataaggaaaatgtggtatatatgtacatacactggaatattattaataattcagccttagaagggaatcctgcagtctgtgagacatggctaaacctggaggacgttctgctaaatgaaataaaccaatcacagcaggacaaatactgcataattcctcttatatgaggtatctaaaatagccaactcttagaagcagagaatggaatggtggttgccaggggatgaggggaagaggaaatagagagttgctcatcaatgagtataaagcttcagttaagcaagataaatacgttctagagatctgctgtgcaatgttgtgtctataaatgacaatactgtgctgtacatttaaaactctgttaagatcacatgtgttcttactacaatcagaaagttaatgtttacataaaagaaaaagaaaataaatattctgagcctcttttcagctcttcaggcacccaaaacacaattccttctgtctacaatacttgcttagtctaaagagtaaagtttaatagcacattatctctaaaaattacatgttgggtaatttaaagaactgatagtcaacttttcaaatccctaaagcgtctataaatctgtcgcatgtatctgattcattcttaaacaacaatcgaatgtgtttatccagatttgaaggttagctaacaggaaatgggaggcagaagatgtgataggattttatcctcaaaatctaaattaattagatttatttattttgaaaaattatttagtttgcaaaaataaatatgtatgagggagagtttgtaaggtatacattttctttttttcttttcttttttctttttttttttttgagatggagtcttgctctgttgcccaggctggagtacagtggcgtgatctcggttcactgcaacctctgcctcccaggttcaagtgattcttctgcctcagcctcccgagtagctgggactacaggtgtgtgtcaccacgcccggctaatttttgcatatttagtagagatggggtttcaccatattggccaggctggtctcaaactcctgacctcg

SEQ ID NO: 73190 - DNA, 1499 bp, Homo sapiens
gattgggattttaaaataatttttttaaaattttaggaaagtaatcactacagggcaattttccaagtgtttttgacttgagagtagaatagacccttaagctaaaatgttagttttaatttcaatttctatatcttcaaatagaaagataaagcattattgaaatgaaaatataagctggtaaaaaaaagtagaatatatgtaccaaaattgagatttaattaaaaagacaaatattatattattgaaagaaaacgatcatacttagaaaaaaagccctcttaaaatgctcttcatcttctcacattttctygggaagccaagctgcgggttcagcgatggagagcagaaatactctatgagcacacccatgttcatggcagcgctgctcacaatagccaggaggtggaagcagcctaaacatccctcagcaaatgaatggataaggaaaatgtggtatatatgtacatacactggaatattattaataattcagccttagaagggaatcctgcagtctgtgagacatggctaaacctggaggacgttctgctaaatgaaataaaccaatcacagcaggacaaatactgcataattcctcttatatgaggtatctaaaatagccaactcttagaagcagagaatggaatggtggttgccaggggatgaggggaagaggaaatagagagttgctcatcaatgagtataaagcttcagttaagcaagataaatacgttctagagatctgctgtgcaatgttgtgtctataaatgacaatactgtgctgtacatttaaaactctgttaagatcacatgtgttcttactacaatcagaaagttaatgtttacataaaagaaaaagaaaataaatattctgagcctcttttcagctcttcaggcacccaaaacacaattccttctgtctacaatacttgcttagtctaaagagtaaagtttaatagcacattatctctaaaaattacatgttgggtaatttaaagaactgatagtcaacttttcaaatccctaaagcgtctataaatctgtcgcatgtatctgattcattcttaaacaacaatcgaatgtgtttatccagatttgaaggttagctaacaggaaatgggaggcagaagatgtgataggattttatcctcaaaatctaaattaattagatttatttattttgaaaaattatttagtttgcaaaaataaatatgtatgagggagagtttgtaaggtatacattttctttttttcttttcttttttctttttttttttttgagatggagtcttgctctgttgcccaggctggagtacagtggcgtgatctcggttcactgcaacctctgcctcccaggttcaagtgattcttctgcctcagcctcccgagtagctgggactacaggtgtgtgtcaccacgcccggctaatttttgcatatttagtagagatggggtttcaccatattggccaggctggtctcaaactcctgacctcg

SEQ ID NO: 73191 - DNA, 990 bp, Homo sapiens
gtttttaggagttgtacaacaacgtaaggcgggttttgctaaagaatgctttctgacaggcttttgaataagaaatggacaggtgaatcactttcacataacagagtagttmaggacagttctcccagtggccttggacttagggagtacgtccccttttctcacttgtagttcttaagaataactgtagattgtgctatgaatacaacatcctgagataaatggaggactggccagaacagcccaggctctgttctgattccccctggatgcaggatgtccttcaatattttagccaagcagtcctgctgcatctgaggattaaaacacagggcaggatactctctgagctccctcagttatggtgcaagtgcggcattcacagttgagattctgtctaccctgtgcagctttcctgagccatggaagataggctcacaatgaatctttaggcttctgctgttccttgctgcctatttgtaagtaataaacccactgcatgtaactcgtatatgcaggtattctgtctcatcagattcagacaagttggtaaccagtacacagtgaacctgctttacaatgaggtgaatagaacatctgttaccacacttacttgaattccacagactgtgagagctgtcttaaaatttatatgtaattttatcttagtctatttgacttttaaatttcactaaatttgaactagatccataaacgaatccctcaactcttgatctctcacactcagggatttgagaggggaatggaggtgaggttggatgtagaaagatggatgtggcaaatgtcagtgttttctagtaatgtcggcacatatgtacacttctttttttggttggctttgtatatttaatttaaataaaggttgtatatttattatgacatgttatttgcaacatgaaaacatgaaaatgtgttgacactttgcttgtacccttcttttgacgcttttcctttataaatattaaaaaa

SEQ ID NO: 73192 - DNA, 1187 bp, Homo sapiens
tgaatgcatactttatgaaatgaattttatgactggcttgaataaaattgttgtaaattattgcctgataaagcagaatggtatctaactttagttacctttagcttctaatttagtgaaaataaaagacttctcgaaatgtcaaaaaaaaaaaatgatgtgggaattacgccatttttagtctataccctgggaaagatttttggacagaatattctcttcttcttaattatttggtagaatttgataagaggaagagatttttcaagtttttcgtttaaatgtttgcatccttcataacattgatttcagaacttgatgaggttatgaaaagagaagaaaattgcagactgatcattcttttttttttttttttcttgagaagtaatgtcactctgtcacccaggctggagtgcagtggcatgatctcttctcattgcaacctctgccacctgggctcaatcgattctcctgcatcagcttcccaagcagctgtgattacaggctcccaccaccatgcccagctaatttttgtatttgtagtagagacgggattttgccatgttggccaggctggtcatgaactccttacctcaggtgatctgcctgccttggcctcccaaagtgctgagatgacaggtgtcagccaccacacctggcctggatcattcttatgtagacaaatgcagatatattgcatcatcataagcttaatccacaaaaaacacatcaaggcagagcgtagtttatttcagaaataaaagattggttttgcagccataawttgctctaattcagcatatgaaccaaattaaataaaatatatacacgcatatacatacatatcactccagatgaatgtttaaatcactgatttttctaacttttcattatttcatataaagtccttgaacagttttccttaaagtacaactatagctatattctgcctattttccagtgtcgtatttccatgctgtttcttaaattcatatactgattacatgctatggtacatcatctcacacacgtgtttagaaatgtacagtataatttggaaatattcagaaatttttaaaactttttgttatttctagataattctaaagtagtctacatacactatacatttagtcctgtgacatttgatgatacataccatgtatctcttttatttacacctatat

SEQ ID NO: 73193 - DNA, 1187 bp, Homo sapiens
tgaatgcatactttatgaaatgaattttatgactggcttgaataaaattgttgtaaattattgcctgataaagcagaatggtatctaactttagttacctttagcttctaatttagtgaaaataaaagacttctcgaaatgtcaaaaaaaaaaaatgatgtgggaattacgccatttttagtctataccctgggaaagatttttggacagaatattctcttcttcttaattatttggtagaatttgataagaggaagagatttttcaagtttttcgtttaaatgtttgcatccttcataacattgatttcagaacttgatgaggttatgaaaagagaagaaaattgcagactgatcattcttttttttttttttttcttgagaagtaatgtcactctgtcacccaggctggagtgcagtggcatgatctcttctcattgcaacctctgccacctgggctcaatcgattctcctgcatcagcttcccaagcagctgtgattacaggctcccaccaccatgcccagctaatttttgtatttgtagtagagacgggattttgccatgttggccaggctggtcatgaactccttacctcaggtgatctgcctgccttggcctcccaaagtgctgagatgacaggtgtcagccaccacacctggcctggatcattcttatgtagacaaatgcagatatattgcatcatcataagcttaatccacaaaaaacacatcaaggcagagcgtagtttatttcagaaataaaagattggttttgcagccataaattgctctaattcagcatatgaaccaaattaaataaaatatatacacgcatatacatacatatcactccagatgaatgtttaaatcactgatttttctaacttttcattatttcatataaagtccttgaacagttttccttaaagtacaactatagctatattctgcctattttccagtgtcgtatttccatgctgtttcttaaattcatatactgattacatgctatggtacatcatctcacacacgtgtttagaaatgtacagtataatttggaaatattcagaaatttttaaaactttttgttatttctagataattctaaagtagtctacatacactatacatttagtcctgtgacatttgatgatacataccrtgtatctcttttatttacacctatat

SEQ ID NO: 73194 - DNA, 1031 bp, Homo sapiens
tttaacaaatgccaaacaacatgatgttgaaatctttctcagtaagaaattacagctggcmtaagtatagactatatatgtcttggtatttgaattttgttcactttatgttatcttctttctattttttaggtttcaattctataaatgcctggtaattccacgtgtgaaatgcacaaaaaatatgtatcttgtgtctgttcatatatcctgtgataacctgaagtctttattctctcttattaaaaatgttagtataaatataattgtaattagaaaccattttactcactaaattatacttctatgcaaaagattgccatatatgtacttttcctaatttctattgacctaaggaattaaataataattgagatatgatttacatttcttgatgtgattttggtaaaggctgtattttagagtcatagtctttccacaaagccaggatttggtcttgcttcctgcatctgtctggtgtcttttcattgtaagcagcagaataccaacataactagctggaggagctgaaagaataatggtattttctgggcctatttagtgtgcgttgttggatgaatagagtcattctcagattgccaataaatattttgaaacaggaataaccaagatagaaatattaaaaagaattgctgcatatgatcattgtgcagtgcacgtcactgttaaactcacccctctttaaattctatttccatttcattcataatattatattttgtcagtattccttctaacttttttgccatcttaattgacctcatttgtcccctttactctgcttttggttcgtttctcctttcaatctaatgtacttgtagagtaatgtaatttgtgtcccacctatatagtgataaccattcataaatgtttagatccttgagagaagaaaatattttctggtatcaaaactgaattatattaattgctcaataacatttgttaagttgaactaagggaatttgaaatataacttgcaaacttttttctcttcttcagactcatacatt

SEQ ID NO: 73195 - DNA, 1031 bp, Homo sapiens
tttaacaaatgccaaacaacatgatgttgaaatctttctcagtaagaaattacagctggcataagtmtagactatatatgtcttggtatttgaattttgttcactttatgttatcttctttctattttttaggtttcaattctataaatgcctggtaattccacgtgtgaaatgcacaaaaaatatgtatcttgtgtctgttcatatatcctgtgataacctgaagtctttattctctcttattaaaaatgttagtataaatataattgtaattagaaaccattttactcactaaattatacttctatgcaaaagattgccatatatgtacttttcctaatttctattgacctaaggaattaaataataattgagatatgatttacatttcttgatgtgattttggtaaaggctgtattttagagtcatagtctttccacaaagccaggatttggtcttgcttcctgcatctgtctggtgtcttttcattgtaagcagcagaataccaacataactagctggaggagctgaaagaataatggtattttctgggcctatttagtgtgcgttgttggatgaatagagtcattctcagattgccaataaatattttgaaacaggaataaccaagatagaaatattaaaaagaattgctgcatatgatcattgtgcagtgcacgtcactgttaaactcacccctctttaaattctatttccatttcattcataatattatattttgtcagtattccttctaacttttttgccatcttaattgacctcatttgtcccctttactctgcttttggttcgtttctcctttcaatctaatgtacttgtagagtaatgtaatttgtgtcccacctatatagtgataaccattcataaatgtttagatccttgagagaagaaaatattttctggtatcaaaactgaattatattaattgctcaataacatttgttaagttgaactaagggaatttgaaatataacttgcaaacttttttctcttcttcagactcatacatt

SEQ ID NO: 73196 - DNA, 418 bp, Homo sapiens
agcccttagctggggccataactcttyctcagcagatggtgtccactggccttaggaatctgggtggaggccctccagactgcaggtggaaatgtcgcaggccatgttgaccttgggcacactctggctcgggacagaagccggttcagagttagcctctcttggggaagctaccagctttgtgaccacatattatttcacctctccagggctttgattcttcttgtataaaaggtagggatcagactaggtatgtttttgtaaactaaaaagaaaatcctaagtgtctcactgactgaacaaaccccttgtggccaaggggactctagaaaagccttaaaactcagttcctggccatgacgaggcagggggtcagacatgcctcattattccccctctcttttatggttttaacaca

SEQ ID NO: 73197 - DNA, 615 bp, Homo sapiens
tccctttttataatggcctttcctggccctctatttcaaatatcccaccctgccctgcttgctaccagagctctctcctgatctccagactggtagttctggatgccacttgaactgccacctagaggcatccaggactaccaatggctgcagcattttgtcctcaattgtccacagctgaacacatcttcttcccccagacctgttcctcctcctcctggggtccccacctcagttaccaacaccatcaccatctggccactcaagcaggcattccggactcacgtcattccttcttctctctcaactccctcccaacctcctccttctcccctgattcaggcagttaccaggaccagctggttcttcccattaaatttcccttggatttgtcccctctgctccartccctctgtccctcagttcagcttctcactgcctcttatttctcagttggacattgaaataatctccctgctttcaggcttacctcccacaattcattgtccacaccgaaaccacaacacgctttctagtcctattctgtggccccctacctgctaagtttcccctccccatcatgtacaggatgaagtccaagtctctttataacct

SEQ ID NO: 73198 - DNA, 620 bp, Homo sapiens
tttccacagacttggataatttaccttgatttttgcttagtattgtaaaacgtccccaaaatttgagaaagcataggaaaaaaacttgtagaagcaagtaaaaccagagaggaaagccatgacacaggaagagaagatattactgcccacaaagcagctgtttgtcaacaatcacattagtggtctgggatcatgaaggaatgttttaagcattttacaccctaatataagttttttagttacatataggcatttttctatgttttcagaaattggctaaggatttggggttgatgcataccattttgtaatttttcccatttcaaataataggaaacagctctggttagcatttttgtgcacaacatctgattttaggaggggatgactaatattaagtgggaggtgtctgtattttaggaactggataggaaattgtattctctttacttgctcaacatccatttarcaagcatttaccgagtactacagtgagccaggcattgtgctgagtgctgagcagacagcagtggaaagtcttcatccttggctaaaaggatctagtctagtaaatgagacagagtgagagttgtgaaagggggcatggcaggcactaatcc

SEQ ID NO: 73199 - DNA, 425 bp, Homo sapiens
tttaataccattataccttaataaaggtgtgggggaaaagaaatcataggaagtcagacagacaatgttgatctctgaaaaataaatagtgagattaataaaaatagacagtaataaaaattattcraggagttgtaaatcattttactagctttagatttcattatgtgagcatttgcaaccatttggagtattttttatacagtaagtaaaatagcctaatatacattttaagaaaatcacttttcttatttgttgagaaatagactgaaagaggaggaattgaaataggagacaaagcatcatggatctaatatatttgtattatcttaaaggcagtgatgtgtggtaaaggttgaactaccagacatgtgaggaaaaccgagaaagagagagagaaaggaagaaaggaggaaaggaaaaaa

SEQ ID NO: 73200 - DNA, 1312 bp, Homo sapiens
tgcattccataggtggagtgataaacataggggtttggttcataagtagcactacagcattactgttgaagtcattggctcaggaacaagatgcctagatttaaatttttatcccacatttcaaaaatggtatgactttaggtaattaacttctctgtgccttagcaactcatccataaaagggagattataatatgacctgcccaagagtagttgtgagaattaagttattggatgagaagtactaggaatacctgatacaaagcaggcatatgtagtattagctattatcttgatgacaataagggggttgatgatgttctaaagcaggaattgtaaatgtaaaggcattcaacttcaaatgcttttaaaacacagtggaggcaaaccaaacacctctgtggacttgtattagtcaatgtttatgacctgactagtttatgacttccattaagcatagacatacacaattaatgtagagccattatagaggatgattgttcaattaaagtaaaataagacaaagcaaacaaatataggagtaatggcacccttaaaatagcatgtctatgaatcaatagatatttattgagtatttaacatgtacctattatttatttgagttaattattcatagagctaatgaaacaaaaatggtcaattcagttgctcatgtgagttacttcattcctttttggggtcccaaactggtcacaaccacatgctacttggagggtttgtccatggttcttaccataagttggggaaatagaagtagaaacaaattcttttcccaacccagaatcctctccataaagatagaagagaaagaagacactttcatgattgaacaagcactaaagcagaatgtgatgcacatcacaggcaaaagattgcaaaggcagaaaaaaaacttcactcttttatatagtcaagtaaatacaacctgttacatatgtgttttaaagataaacaataacttattctaaagtaggaggacttgaaagcatcatttttttatacatagttcatcctcagtttacctggtaattggggtgaccacctgtgttagctaattaattgactttacccaggggaaaaacaaacttcccatctctttatggcagaaggtagttttgcaactggagcaaggaactaacaatagttaagctcttaccctcccacagaaatgggaagataggggtgctatcttttgatgtttacatttcaaagagatatctccaaggtccttgaaaagacattccttggttataraactgacaaatggcctatctagtttttataggatttt

SEQ ID NO: 73201 - DNA, 1574 bp, Homo sapiens
attgttggatagatatataataaagccagtatagattttgctagttggtgcatatacacatagtcactcaaaaattcttttacttttctgtatgcttgaatatttttataataaagtgatgatggaaaaatatgaactaccaacaaaagaaactaccagtttgaaaacataaatgactacaaatctttacccatagtgagtttccggcatgttctgccrtgcactcacgtactggtgggtttgctacgatgtcctgctcttcactccacagttactgtcagctcttctctgccctgctcagtgttctatggggcctgacctcactagctgtatcacctactcctttgccccctggcttctttgggtttagccaatgggaggcacctaaaggagatcaaatgagagcaggggagagaatttgtttcttttccccacttccccccgattcctctctcctttagtacagcttcactggccacagctgtgtctctctacaactacatacagcccctggcccaccatggcttccaactctggctggctccgtgacaccactctccagttgcactcttggccctgggtagtaacaatgtcttattggttctggtctctgggtgcatcagtgtccctagttgttccttaaagctgctcacacctctgtaagtagttttctaattgaaatctttctttgattaggtaaattcctcttcctgctgggatcctaattgatacctttggtactactgctttgtaatacatgcctatttatatgttcctccttaggcataagcataaggttttgatttgtgtttagtttgcattcagaactctctgagaattaggtctgatctagctgaaggatgcctgctgtaaattcatgcagtaactatagtgtaagagaaaccatgatctttgaggatgagctacccctgggcccaaatctgaccacttggataaggggatgttaagactgacatagggatagctgtgtggtgttgagaaatgattgcagtggtttccaggactcaatagaagttctatgaataagttctagagatcccttatacagccttgtgcctagagtcaacaacattgtattttacacttaatctgttaagagggcagatcttcttaggttcttttaccacaaatatttttaaaaacagtcctgttacacatattatgctaagttttgattaaagtatgaactaaataaagagataagctaagcaccatatctagtgttgccagataaaatagaggatgcccagctgaatttgaatttcagataaacaacaaataattttataaaaaaaaatcattggatcaaacaaataatttttaatgtagagctatccaaaatattgcatgggacatatttatacgaaaaaagaaatcattgtttatctgaagttcaaatttaactggacattctgtgtttctgtttgctaaatctgagaactctaatcatataataattatagtaatgtgtcatattatgttttctcagtctcaatgcctcttgtacctgatggtaatagccatatgtcttttgtggaagtggcacggggaaa

SEQ ID NO: 73202 - DNA, 1574 bp, Homo sapiens
attgttggatagatatataataaagccagtatagattttgctagttggtgcatatacacatagtcactcaaaaattcttttacttttctgtatgcttgaatatttttataataaagtgatgatggaaaaatatgaactaccaacaaaagaaactaccagtttgaaaacataaatgactacaaatctttacccatagtgagtttccggcatgttctgccgtgcactcacgtactggtgggtttgctacgatgtcctgctcttcactccacagttactgtcagctcttctctgccctgctcagtgttctatggggcctgacctcactagctgtatcacctactcctttgccccctggcttctttgggtttagccaatgggaggcacctaaaggagatcaaatgagagcaggggagagaatttgtttcttttccccacttccccccgattcctctctcctttagtacagcttcactggccacagctgtgtctctctacaactacatacagcccctggcccaccatggcttccaactctggctggctccgtgacacyactctccagttgcactcttggccctgggtagtaacaatgtcttattggttctggtctctgggtgcatcagtgtccctagttgttccttaaagctgctcacacctctgtaagtagttttctaattgaaatctttctttgattaggtaaattcctcttcctgctgggatcctaattgatacctttggtactactgctttgtaatacatgcctatttatatgttcctccttaggcataagcataaggttttgatttgtgtttagtttgcattcagaactctctgagaattaggtctgatctagctgaaggatgcctgctgtaaattcatgcagtaactatagtgtaagagaaaccatgatctttgaggatgagctacccctgggcccaaatctgaccacttggataaggggatgttaagactgacatagggatagctgtgtggtgttgagaaatgattgcagtggtttccaggactcaatagaagttctatgaataagttctagagatcccttatacagccttgtgcctagagtcaacaacattgtattttacacttaatctgttaagagggcagatcttcttaggttcttttaccacaaatatttttaaaaacagtcctgttacacatattatgctaagttttgattaaagtatgaactaaataaagagataagctaagcaccatatctagtgttgccagataaaatagaggatgcccagctgaatttgaatttcagataaacaacaaataattttataaaaaaaaatcattggatcaaacaaataatttttaatgtagagctatccaaaatattgcatgggacatatttatacgaaaaaagaaatcattgtttatctgaagttcaaatttaactggacattctgtgtttctgtttgctaaatctgagaactctaatcatataataattatagtaatgtgtcatattatgttttctcagtctcaatgcctcttgtacctgatggtaatagccatatgtcttttgtggaagtggcacggggaaa

SEQ ID NO: 73203 - DNA, 797 bp, Homo sapiens
tgaaccgtctctttttttttttttgagacagagtttcactcttgttgcccaggctgtagtgcaatggtgcgatctcagctcaccacgatctccgcctcctgggttcaagtgattctcctgcctcagcctcctgagtagctgggattacaggcatgcgccaccacgcccggctaatttttttgtatttttagtagagacagggtttctccatgttggtcaggctggtctcaaactcctgacctcaggtgatctgcccaacttggcctcccaaagtgctgggattataggcttgagccaccatgcttggccccatctcttatttttttaatggggaaaggaggtgtgggtgtgcaaggccctcgtgaatgtctctggccaatgccatctcgtgttctcgcaaactcctcttcctaggactgggccctcgtacatgttatgtgtgggacagtgtagctgcgaggggcacagaccaagagccagatggccactctgtgtcctgactctgccctcaacaacttgtgggactcgaagcaaattactcagccgctcagtgccccagctttctcatctgtaaagcaggaataataatagtactggccacacagggtggttgtgaagatgaaataaagcaatatctaggcagtgcctgaagagtggtgagtgctaagttctgtcattactatggatatgaatgggagagggaagataaatacaagtgagtacacgaggaaagaargcacacatctagtaacagaacacacattaccatttaaaaaattgcgctggttttctaaaat

SEQ ID NO: 73204 - DNA, 592 bp, Homo sapiens
agggttgcaagatcaggcacactttggggctgacataggggactgtctgacataaacacatttcaagtcctcagctgtgtgtgacttcatttaccagtcccttcttttgctttcttgaagtcacactcagtgtctacaagagcagtggagacagctgcagatctgtgtttagacctgatgagcaagtccatgaaacaaacacaaagcccagacactgaaaccatagcattaacaccaaaaagccggccgggtgcggtagctcacacctgtaatcccagcactttgggaggctgaggcaggtggatcgagaccagcctggccaacatggtgaaaccccatctctactaaaaatacaaaacctagccaggcgtggtgatgcatgcctgtactcccaactccttgggaggctgaggcaggagaatcgctagaacccaggaggcagaggctgcagtgrgccgagatcacgccactgtactccagcctgggtaacagagtgagactctgtctctaaagaaaaaaaaaaaaaaccaccaaaaagccaaaacaaaaataagcctcccctccatggtttttagagcctcctctgataaag

SEQ ID NO: 73205 - DNA, 559 bp, Homo sapiens
tttctgttcaattccacagccatatatgtattcattgagcacaggtcatattscatgctagacaaagagactataaagataaaaactactaggacacaagctctttctttaaagagttcaaatgaagtttaaattcacaaatggacatttatagtgataatacagactaacctaacatttgtatatatgttttcttccatggctttgggttcataactcccatacctcttgttacagtaaacagaatcttcctctctggtcttttcctgctctccttttacctgcccatggcaggactcaaagctggttgtgggttacaagaacctcattctagaaagggtcctgacttgtgccccggaggaaggagtattgcacggaaaggcctaaaagaatctgaacagacaggccttattgtgttaagatcatacccttttgtccaatcacatttcaacatgagtgtccatgcttcaatcgtgcctgtccagtgaagtctccctaaaaagccagagaggacagggttcaggagcttctgggtagcggaacacagagaagttcctgg

SEQ ID NO: 73206 - DNA, 559 bp, Homo sapiens
tttctgttcaattccacagccatatatgtattcattgagcacaggtcatattgcatgctagacaaagagactataaagataaaaactactaggacacaagctcttyctttaaagagttcaaatgaagtttaaattcacaaatggacatttatagtgataatacagactaacctaacatttgtatatatgttttcttccatggctttgggttcataactcccatacctcttgttacagtaaacagaatcttcctctctggtcttttcctgctctccttttacctgcccatggcaggactcaaagctggttgtgggttacaagaacctcattctagaaagggtcctgacttgtgccccggaggaaggagtattgcacggaaaggcctaaaagaatctgaacagacaggccttattgtgttaagatcatacccttttgtccaatcacatttcaacatgagtgtccatgcttcaatcgtgcctgtccagtgaagtctccctaaaaagccagagaggacagggttcaggagcttctgggtagcggaacacagagaagttcctgg

SEQ ID NO: 73207 - DNA, 559 bp, Homo sapiens
tttctgttcaattccacagccatatatgtattcattgagcacaggtcatattgcatgctagacaaagagactataaagataaaaactactaggacacaagctctttctttaaagagttcaaatgaagtttaaattcacaaatggacatttatagtgataatacagactaacctaacatttgtatatatgttttcttccatggctttgggttcataactcccatacctcttgttacagtaaacagaatcttcctctctggtcttttcctgctctccttttacctgcccatggcaggactcaaagctggttgtgggttacaagaacctcattctagaaagggtcctgacytgtgccccggaggaaggagtattgcacggaaaggcctaaaagaatctgaacagacaggccttattgtgttaagatcatacccttttgtccaatcacatttcaacatgagtgtccatgcttcaatcgtgcctgtccagtgaagtctccctaaaaagccagagaggacagggttcaggagcttctgggtagcggaacacagagaagttcctgg

SEQ ID NO: 73208 - DNA, 559 bp, Homo sapiens
tttctgttcaattccacagccatatatgtattcattgagcacaggtcatattgcatgctagacaaagagactataaagataaaaactactaggacacaagctctttctttaaagagttcaaatgaagtttaaattcacaaatggacatttatagtgataatacagactaacctaacatttgtatatatgttttcttccatggctttgggttcataactcccatacctcttgttacagtaaacagaatcttcctctctggtcttttcctgctctccttttacctgcccatggcaggactcaaagctggttgtgggttacaagaacctcattctagaaagggtcctgacttgtgcccyggaggaaggagtattgcacggaaaggcctaaaagaatctgaacagacaggccttattgtgttaagatcatacccttttgtccaatcacatttcaacatgagtgtccatgcttcaatcgtgcctgtccagtgaagtctccctaaaaagccagagaggacagggttcaggagcttctgggtagcggaacacagagaagttcctgg

SEQ ID NO: 73209 - DNA, 1081 bp, Homo sapiens
cttaggtggtgagttgatatttatatgctatgttattttataaataattgctaaaaagtgtctcaggaacattgtgtaatcctttaaatttgtaattgtaggcggcccttaattttaaggtaagtgattttgctatacaataaaataattaaaaatgttcaatttaggcccaactcaggacaatgccaattcttatactgttttctaattaagaaaaaaataaagtgaaattagtaggagcacatttttaatatctcataattaaactaatcaataaaaataaacagatgtttggctgaaagggaacaaagagaaaaaacaaagggagaaaggaaatcataggttctcagaatagcctgcccaatgagcgaaggcagaaggagagtgagttaccggcaatagacagaaaattgcttgcttttttgttttgctttcctcaagcatacacagatccagctccccataccatcttctccatatttatgactgccccttgtccttaatggaaccatctttctcttatgtatcgttccttcactcccttctttgttttgctttttcttcattcctccttgactggtggaggacatttcattacacgtgtgcttggaaactttgatgcccttagtctggctcagtaaatatctctgtatgtaccttgtcatcaatgtgacacttgagcactgggcttgactaacagcagcaagtatctggatacagcattcattctaggaataatacggtatttttctggtggaggaagcatggactagacttttggaaacctgggttctaggcctgactctggctctcttgagcagtttgaccttggataatcaagtccttacttctggtgtcgattccaggtctctgaagtgattgtattgatattttgtattccctccttggctaatttagtccaaccttctcattttaggggtagagaaattaagctatggagagaattayctacaaacatctcatttatcttgtattaatattagtttgcatttatattacttcatttatatagaattgtctttatgtagaattttatgtgtgtataaaatacaactattga

SEQ ID NO: 73210 - DNA, 671 bp, Homo sapiens
gcacatgatccaagtcagacaatgagtctattctgggactttttctggaaccagtgtgaaagaggcacatgctctcagctggggtttccaagctggtacgatagaagctttgccttctggtggccgtctttactcccatgtgcagagtgccaactgggaacgaagccagtacattcagaaaagtcgcgattcctggtgacagtatatgcagatccagctgtgttgagagctatcgccgttcctgtaatgcaggaagatccaaactgttttctcctactatcctctcactcaacacaacacagaacacttctgtaaccagatatggggatttcttcatacacatgaattctccagtgggcaccaactaggtgtcttgcaatttaattcaattctgacactgtctacctggagttaccatcagacctcacaggttaagcgcacagtctcccaaaracttttcccatttcagataccaatatgaagtcccaggttttcgccagtacttctgactgaccagctgtaaaatcagaatttccaaaacccccttcttgggttccataatttgctgcaatggctcacagaactcagggaaatacttatgtttacagtttattgtccagtgaaagataggataaaggatacagatgaacagccagatgaagagatgcata

SEQ ID NO: 73211 - DNA, 525 bp, Homo sapiens
agataaggcctggaacagttgctaatcaacttcctcaggttagacaggaaaagaggcagagggaacaccccagaccccactacccccggctgatcatactgtagggtgttgtggaaaccctctcccagaggctccaggcctggtgagctgaacaagataacacagagctgtggatacccccttgcctttgatcatgtgggcctaagtgactcggaccrtggtggtgggggcatctctgttggaaggtctctcctactgcaccatccacaaggggacaaattccaaagatgaacccacaaaaggtcaggagcaaatccaaagagaggctgaatctctttaagaagacagacttagagactcaagttttcagcttctttcttctgccctcagacacatccccgcagcaccagggaggatgctgaggtcagagttgagtttcaaggacaggaagagctatgcagacaagcccatgagagaggttagcagacaagtggagaggcagggatgtctcagagacgcccatcc

SEQ ID NO: 73212 - DNA, 525 bp, Homo sapiens
agataaggcctggaacagttgctaatcaacttcctcaggttagacaggaaaagaggcagagggaacaccccagaccccactacccccggctgatcatactgtagggtgttgtggaaaccctctcccagaggctccaggcctggtgagctgaacaagataacacagagctgtggatacccccttgcctttgatcatgtgggcctaagtgactcggaccatggtggtgggggcatctctgttggaaggtctctcctactgcaccatccacaaggggacaaattccaaagatgaacccacaaaaggtcaggagcaaatccaaagagaggctgaatctctttaagaagacagacttagagactcaagttttcagcttctttcttctgccctcagacacatccccgcagcaccagggaggatgctgaggtcagagttgagtttcaaggacaggaagagctatgcrgacaagcccatgagagaggttagcagacaagtggagaggcagggatgtctcagagacgcccatcc

SEQ ID NO: 73213 - DNA, 1039 bp, Homo sapiens
aaacctctcaccaaagtcagtgagagcccrgtggaatggagaaggcaggagtttttagcagacttgcctgaagctttctttcagctgtggatgaaaagttttggactactctgagcagttgggtctccctgtttgcaccttgacaaatccttcaagatttctgccttttaatccattggcttgttgcagtgctgcgtctaaatttaatgtccctctcttttgcaaagatccagttaccaggtgcaaggcaggaagaggctggacagtctcctctgtcctccatggtttggaagggcatcatgcactcacactcggtaacacctgcatttgaggaagctaaggcccagaaaaacagagaacttgccccattagacaaccagaactagagtcacaaaacacagttgcttgatctggggaactcttgtctttcaatagcagtggtgttggccaagatgcaggtggctgaggaagaattaaaaatctgcaatcccccttggttttattaatgggtctttgattatagttgaaaagatgaaaaaacagtctcacttattagtgaagcgggaaagaaaaggagcatttgacttactaaacactaagtagatatgtgccaaattaaatgaaattggggaaaatgtgaataatttttttttttttttgagacagggtctcactctgtcacccaggctgcagtggcatgaccacggctcacagcagccttgacctccccggctccagtgatccttccacctcagcctcccaagtagctgggaagctgggactacagacaccaccgcacctggctaatttattattttttaaaaattttttgtagagatggggttttaccatgttgcccaggctggtatcaaactcctgggctcaagcgatccacccacctcagcctcccaaagtgctgggattataggcattgaagaatgttttttaaggaaattaaagtatagaattatctggaaaattttctgaaattattccttattttccaaccggatggtctatgtctagatttggacctatg

SEQ ID NO: 73214 - DNA, 1039 bp, Homo sapiens
aaacctctcaccaaagtcagtgagagcccggtggaatggagaaggcaggagtttttagcagacttgcctgaagctttctttcagctgtggatgaaaagttttggactactctgagcagttgggtctccctgtttgcaccttgacaaatccttcaagatttctgccttttaatccattggcttgttgcagtgctgcgtctaaatttaatgtccctctcttttgcaaagatccagttaccagrtgcaaggcaggaagaggctggacagtctcctctgtcctccatggtttggaagggcatcatgcactcacactcggtaacacctgcatttgaggaagctaaggcccagaaaaacagagaacttgccccattagacaaccagaactagagtcacaaaacacagttgcttgatctggggaactcttgtctttcaatagcagtggtgttggccaagatgcaggtggctgaggaagaattaaaaatctgcaatcccccttggttttattaatgggtctttgattatagttgaaaagatgaaaaaacagtctcacttattagtgaagcgggaaagaaaaggagcatttgacttactaaacactaagtagatatgtgccaaattaaatgaaattggggaaaatgtgaataatttttttttttttttgagacagggtctcactctgtcacccaggctgcagtggcatgaccacggctcacagcagccttgacctccccggctccagtgatccttccacctcagcctcccaagtagctgggaagctgggactacagacaccaccgcacctggctaatttattattttttaaaaattttttgtagagatggggttttaccatgttgcccaggctggtatcaaactcctgggctcaagcgatccacccacctcagcctcccaaagtgctgggattataggcattgaagaatgttttttaaggaaattaaagtatagaattatctggaaaattttctgaaattattccttattttccaaccggatggtctatgtctagatttggacctatg

SEQ ID NO: 73215 - DNA, 921 bp, Homo sapiens
cttaatctagataaggaagtgatgctggtttaggagaatgagttgcttctttgttggctgtggactcgcttctgaatatctgcaaaattgtcaggagaataaacaaatttctgcttgcctgtgtatatgacaagttccaacttcttcaccaattaaagtccgagccacctctaccccaccaccattcatcatttccacagtgggaaaattacacagtttgcacttttatatgtggtagcaattaaacatcttctggaagccaaaattcatagcaatgcagaatgatgatatagaaaacccccgtgcaaatgcctaatgtcattttttctccaaagggctataggtgttgcaaaaatccaggagagaggaaagtcttctagttataaagcagttgcccagtcgagttattcttaaactgcttttgtgccaagatatctcttgatggaaaatgtctccatgcttaatgtggaccatggacaacaacatgggcaagacagagtagagttatgtgtaatgtgtgacatagctgcagcctttctcccctattcctggaagtgaatcagaatacataaggatgaaagccatgttgctctagggaacaacttaaatctgttttcttttttttatttttatttttttagatggagtctcactctgtagcccaggctggagtgtagtggcrcaatcatggctcaccgcaacctctgcctgctaggttcaaatgattttcctgcctcagcctctcaagtagctaagatcacaggaatgcaccaccacgcccagctattgtgtgtgtgtgtgtgtgtgtgtgtgtatgtgtgtgtttttagtagagacggggttttgtcatgttggccaggctggtcttgaactcctgacctcaggtgatctgcccacctcagcctcccagagtgccaggat

SEQ ID NO: 73216 - DNA, 1419 bp, Homo sapiens
tgtgtgtgtgtgtgtgtgcgtgtgtgtgtgtgtgtgacagagtcttactctgctgcccaggctggagtgcagtggcaccatcttggctcactgcaacctctacctcccaagttcaagcagttctcctgcctcagcctcccgagtagctgggattacaggtgcccagcaccatgcctggctaatttttgtatttttagcagagatggggtttcatcatgttggtcagactggtctccaactcctgacctcaggtgatccgcccacctcaggctcccaaagtgctgggattacaggcgtgagccaccgtgcccagcctctgttcttattttaaaggcaaaaaactgaggctcagcaaggaggacagtctgttcagcaccacagagctagtcaacgttgtgatctgtgctagtttcctggggctgccttaataaagctccacaaactgattggcttaaaacaacagaagctcattgccttgcttttctgcatgctaaaagcccaaattcaacacgttaacagagctgtgctcctttcccaacctccaggaggattcctgtccttgcctcttctcacctctagtagctcagctgctctttggcttgtgatagttgtggcagtatcgcgccaaactctgcctccattttctctcagtgcctctgtctgaattgtctttttcttataaaaacaccagttctattggattaaggatccattctattccagaatgacctcatcttagctactcccatctgcaacaaccccagtcccagataatgtcacattctgaggtactggtagttagaattccaacagaccttttttggaaaacaaaattcaatctataacatgatcctarctacaactttggtgtcttttctccaatttcaaggcaaattcatctgctatggggaggaaatcttccactacaccagagtggccatcgagttagaaacagaagctataccaggcagtttcgtccttgtggctggcaggatgacacatgaccatttgcctgggaaagtccaggtttatgcctgtgacccagagtaaatactaatagtgccctttccatctcaaagttgatgaattttggacaattatttgacatcccacttagagtagacattttctggagcatttagtaagtatcaaacactgtgctaagacagtcacaagcattgtcttagacgataaccttataacataattgtccccacctcacaggtggaggaacccaggaactgaacagccacagccctgcagctggcaagaggcagagccagggtcttagctcaggtgggtttgattcccaaccctgtgaacttcatcacggtatcctagtgccccctgggtgcagatggagcgcagattcctattttattattcagaaacttcaacgagctgagctaagcctcttct

SEQ ID NO: 73217 - DNA, 598 bp, Homo sapiens
  misc_feature (1)...(598): n = A,T,C or G
tcaggcctactcaggaagtgcctttacagcccagaacttaaatggaagaaagcccaatcctctcttctctgatggctgggaagaccagaaagacacagacaaaaccaaaaacgtacagtcatgcctgtttgctgacttatagggaggacaggagatctttcagtctctccaggggaagtctttgnccctggaaagctaccttttaatgccaagtggctcccagggcagcaagggggaatcaggatggttggtttctccatcggaacaggctttatgccatgccctgaagatccctctccaatcttcttcccctccactaggaattggtgggtttcttcgttctactttcttgcccaaataaatgttttctgagttttcttggtcaacaattacctcatrctactgcttctgtttcttttgaaagcatttgctgagcatctgctatgaactgagtcttctgaggggtgttgtagagacagagagatggcaggcagtttctgattccaggagggtgtggggctcacaggagtgacagccacggcacagctgaaaccagcaggctaggggacttgaagaggcggttggtgtcctgcctgga

SEQ ID NO: 73218 - DNA, 598 bp, Homo sapiens
  misc_feature (1)...(598): n = A,T,C or G
tcaggcctactcaggaagtgcctttacagcccagaacttaaatggaagaaagcccaatcctctcttctctgatggctgggaagaccagaaagacacagacaaaaccaaaaacgtacagtcatgcctgtttgctgacttatagggaggacaggagatctttcagtctctccaggggaagtctttgnccctggaaagctaccttttaatgccaagtggctcccagggcagcaagggggaatcaggatggttggtttctccatcggaacaggctttatgccatgccctgaagatccctctccaatcttcttcccctccactaggaattggtgggtttcttcgttctactttcttgcccaaataaatgttttctgagttttcttggtcaacaattacctcatgctactgcttcygtttcttttgaaagcatttgctgagcatctgctatgaactgagtcttctgaggggtgttgtagagacagagagatggcaggcagtttctgattccaggagggtgtggggctcacaggagtgacagccacggcacagctgaaaccagcaggctaggggacttgaagaggcggttggtgtcctgcctgga

SEQ ID NO: 73219 - DNA, 518 bp, Homo sapiens
tggcccaatcctgtaatccccagcactttgggaggccaaggctgatggatcacttgagctcaaaagtttgagaccagcctggacgacatggcaagaccccatctctacagaaaaaaaaaaagaaaaatacaaaaactggccaggcagtgtgttgcatgcctgtagtcccagctccttgggaggctgaggcaggaggatctcctgagcccaggaggyggaggctacagtgggttgagatcacaccactgcactccagcctaggcaacagatccagaccttgactcaaaaaaaaaaaaaaaatttaagtttacatattggccattctatgagtgagggtcgaagacatgatttttctcttgtatcatctttgcggtatttgtcttaatagtaaaagaatgcatttttgattagttcagaggtgtgaattatatatatatatttagccttaggatattaccccatcatcagaatactggagggttttttgtggcagtattggtgaaaaaatcttcaatgcc

SEQ ID NO: 73220 - DNA, 518 bp, Homo sapiens
tggcccaatcctgtaatccccagcactttgggaggccaaggctgatggatcacttgagctcaaaagtttgagaccagcctggacgacatggcaagaccccatctctacagaaaaaaaaaaagaaaaatacaaaaactggccaggcagtgtgttgcatgcctgtagtcccagctccttgggaggctgaggcaggaggatctcctgagcccaggaggcggaggctacagtgrgttgagatcacaccactgcactccagcctaggcaacagatccagaccttgactcaaaaaaaaaaaaaaaatttaagtttacatattggccattctatgagtgagggtcgaagacatgatttttctcttgtatcatctttgcggtatttgtcttaatagtaaaagaatgcatttttgattagttcagaggtgtgaattatatatatatatttagccttaggatattaccccatcatcagaatactggagggttttttgtggcagtattggtgaaaaaatcttcaatgcc

SEQ ID NO: 73221 - DNA, 518 bp, Homo sapiens
tggcccaatcctgtaatccccagcactttgggaggccaaggctgatggatcacttgagctcaaaagtttgagaccagcctggacgacatggcaagaccccatctctacagaaaaaaaaaaagaaaaatacaaaaactggccaggcagtgtgttgcatgcctgtagtcccagctccttgggaggctgaggcaggaggatctcctgagcccaggaggcggaggctacagtgggttgagatcacrccactgcactccagcctaggcaacagatccagaccttgactcaaaaaaaaaaaaaaaatttaagtttacatattggccattctatgagtgagggtcgaagacatgatttttctcttgtatcatctttgcggtatttgtcttaatagtaaaagaatgcatttttgattagttcagaggtgtgaattatatatatatatttagccttaggatattaccccatcatcagaatactggagggttttttgtggcagtattggtgaaaaaatcttcaatgcc

SEQ ID NO: 73222 - DNA, 584 bp, Homo sapiens
ttggagcagcttttaaactattagtataggaagtgggctttcatcccagcagctccttatccaacagcctcagggaagacagcagcatgctgtgcctccgtgttctactctgtatgaatgagctgttcaagttctatcattcaaggtgactctggccctttgggaggctgcattcatttttctgcttgagtgaatgtaggtacaatgaaacatgatgtctcaagttaaaaagcttccacttgggatgtcaggcaaaactttgtcaagtgttcccttgatttccaacaccacagttttgctggcacatgaggctggcagcagtgcacatgaatgacacacasagtacatgtctggatgtgcattcacagcaatgcaaaatagtgctaggtattgtgtactgagcacgcagatgcgccagcaccatgcaagcattttagggagttgcctttgctctaaattcatgtgatcccacaggggggttccatcaccatgcccattctacaggtggggaaaccttgctgcggggcagcttagtaactcatccagggtcatgactgatgggactaggatagcaccgaatactc

SEQ ID NO: 73223 - DNA, 406 bp, Homo sapiens
ctgacccttgtgatgccacgtgccttggcctgcgctgaaggtgctgggattacaagcatgagcmaccagcacgcgggaccgtagtcttgtgagtttgagaagtcgctggagctatgcgagcctcggatttcttatcgagcgaatggtggtaacagtgcttgtcgttacttttgtccttctattttttagtcttgcactgtcacccaggctggagtgcactggcatgattccaccatactgcagccttgaactcctaggctcaagtgatcctctgacctcagcctctggagtagctgggactataggtacattctaccatacctggctaatttaagaaaaaaaaatttttttttagacccaaggttttactattttgctcaggctgatctcgaactctggcctcagt

SEQ ID NO: 73224 - DNA, 644 bp, Homo sapiens
ttttgtcttgtttcatcatggtcagcatgacatcttccagtgtgaccatcctatgaaattgcttaagtagggaacaccacagcctagcagtagtaccaggccagctactagctgacaacgatcaagactgggctcccggccgggcacagtggctcacgcctgtaatcccagcactttgggagctccaggtgggcggatcacttgaggtcaggagttcaagaccagcctggccaacatggtgaaaccacatctctactaaaagtgcaaaaattagccgggcatggtggcacaagactgtaatcccagctactcaggaggctgaggcacgagaatcgcttgaacccaggaggtggaggtggtagtgagccaagatcgcgccactgcatgatccaccctgagcaacagagccagactctgtctcaaaaawaaaataaaatgaagactgagctttccttttcttatcctcattttatagatggaaaatctgaggccaaaataagttcagtagttatgttgccaagcctgggcggaactgtagagcttctcagactgtcagggctgcagggccagctttgctttgtcttcttttgtttgccaatccatcgtgggccaatacgttcataaaatacaataaaagcaaatta

SEQ ID NO: 73225 - DNA, 601 bp, Homo sapiens
tgttgcagaraaagaaaaagtgtgggtaatgggtgggcaatggtgaataactacatatgcctaaggggagcagtgggtgatcaaattgggaaccatttgggaccagcttttgaaaggcagactgagaagtttggagagggtggtagacaaaaatgtgtgagtacttatgcaaatcagagtaagaaagtcatatattcatttttcccccactcattgattcatttcttctaggaagtttacactgtgtatgagggaaacatagcaaaatagaaagatgattattgattgttatgcatggtctgaactaaataaactctgtgatgtggcagagattaactgttgggcggagatggctactttaggcacagtagtcagaattttttgttttctagaaattctgttaggccctgtgcagaagtctaggaacacagggatgaataacacacacttcctgtcattgaagagatcacaatctggtgtggaatgaggttaatcaggaatattttcctagtggaggtgaatagagcccaaggaaataatgtattttcccctatgttctttccgatattgctacaacaaggtggctatcaagcatgccccc

SEQ ID NO: 73226 - DNA, 601 bp, Homo sapiens
tgttgcagagaaagaaaaagtgtgggtaatgggtgggcaatggtgaataactacatatgcctaaggggagcagtgggtgatcaaattgggaaccatttgggaccagcttttgaaaggcagactgagaagtttggagagggtggtagacaaaaatgtrtgagtacttatgcaaatcagagtaagaaagtcatatattcatttttcccccactcattgattcatttcttctaggaagtttacactgtgtatgagggaaacatagcaaaatagaaagatgattattgattgttatgcatggtctgaactaaataaactctgtgatgtggcagagattaactgttgggcggagatggctactttaggcacagtagtcagaattttttgttttctagaaattctgttaggccctgtgcagaagtctaggaacacagggatgaataacacacacttcctgtcattgaagagatcacaatctggtgtggaatgaggttaatcaggaatattttcctagtggaggtgaatagagcccaaggaaataatgtattttcccctatgttctttccgatattgctacaacaaggtggctatcaagcatgccccc

SEQ ID NO: 73227 - DNA, 601 bp, Homo sapiens
tgttgcagagaaagaaaaagtgtgggtaatgggtgggcaatggtgaataactacatatgcctaaggggagcagtgggtgatcaaattgggaaccatttgggaccagcttttgaaaggcagactgagaagtttggagagggtggtagacaaaaatgtgtgagtacttatgcaaatcagagtaagaaagtcatatattcatttttcccccactcattgattcatttcttctaggaagtttacactgtgtatgagggaaacatagcaaaatagaaagatgattattgattgttatgcatggtctgaactaaataaactctgtgatgtggcagagattaactgttgggcrgagatggctactttaggcacagtagtcagaattttttgttttctagaaattctgttaggccctgtgcagaagtctaggaacacagggatgaataacacacacttcctgtcattgaagagatcacaatctggtgtggaatgaggttaatcaggaatattttcctagtggaggtgaatagagcccaaggaaataatgtattttcccctatgttctttccgatattgctacaacaaggtggctatcaagcatgccccc

SEQ ID NO: 73228 - DNA, 2106 bp, Homo sapiens
tctcctcccctgaggtcagggatgaggctgaaagctccaaatatctaatcacatgattggttcccatggcagccagcccccatcctgacgctgtctcctagtctgtagccttttcaaaagtcacctcattaggccaggtcagtggctcacacctgtaatcctagcactttaggaggctgaggtgggcagatcacttgaggtcaggagttcaagaccagcctggccaacatggcgaaactatgtctctactaaaaatataaaaattagctgggcatggtggagaaggcctgtaatccmagctatttgagaggctgaggcaagagaatcgcatgaacccgggagacggaggttgcagagagccgagatcatgccactgaactccagcctgggtgacagagtgagactctgtctcaaaaagataaaaaaaagtcacctcacgaacacagactcaggtatggatgaaagggccttgttatgaatgacacctttattaccctgaggctatttcaggccctgaggacaaaaacacaaatattgtcacacatgatgctccttttgctcctatcacttaggaaagcacaagggttttagtggctctgaccaggagctgggagaaagaccaaaatatatatatttcttatcatgtcacaatatccaatccacttacgcttggtcctaataggtaacattttctatgtgctaaaaggacaatacgaatactcatttaatcatggatctgatgtgctagttatttttctagtacgtagtaagatacataactgttaaaatgataaatgttttttcaaagtttgtgaaactttgacctattcttttttttttttttttgagacagcctcactctgtcgcccaggctggggcgcagtggcacaatctcggctcactgcaacctcctccgcctcccaggttccagagggtttcctgccttagcctcctgagcagctgggactacagacatgtgccatcatgctcagctaatttttaattttttgtggagatgggctcttgccatgttgatcaggctggccttgaactcctggcctcaagtgattctccctccttggccatccaaagtgctgggattacaggcatgagctatcgcacctggtccctggatgtttgttaatgggaaagtctctcatttggggctactggccatggggcaggacaattatttgtataattctttgtcctgtgcattgcaagacattccccaacttttattatatacctgtagtgggcctcggccatcatgacaacctacgcccccaagtccattttcagagcccccagttgagaatcacttctagggagtctcctgttcctaacctgcaggattcctgttccctaagtcttaacattttacagatagatcaatgcctcttgcataccatgacataaccttggataatcagcttgaattcccagtggctccgggttccactagggactggtaaaagcacagactcaggatccaggctgcctgattggatcggctctgccaccaccttgggtgacttactcaatgagtttctgcgtttgtttcctcgtctgtaaagtgaggttgaactagcacctgccttgaaaggcagttgggaggatgaatgagagcatcgaaatggtttttggcacacagtcagcaattagggtcaacttaaaacaccccctgcacacttgcattgtctactgcattcagccatgtatattgcatgtcttatttcacccccagaatggtcccatgaggttcatattatgattccatttcacagatgatggaatggagccatagacaaatgatgactacagccttagcacccacagcaagaaaatagcagaaccagggcctgaaccagctatatctgactccgtggcagtgtggttagagggcagaggggagagcactgagccgggagtcagcagaacagggctgctttgcccctgtttgtgcaaagggctgttgctaacccgctgtgggcatcaatgtcctcattggaaaataaaggctttggactgaacgctttctgaggctcctgctgactcctaagacctgtgtcttctgtgagacccagaaaactgagccagagggga

SEQ ID NO: 73229 - DNA, 1207 bp, Homo sapiens
acagagagttggatgccttggcccaggcccttggcagtgagatttagtccctgctgattgcagcccagcccctgggggagaaccgggcctcagaaactgagactgagatccaggtggacagatgggagctggttctatgctgaccagggtagatggaaatgctgactgcccagaggagcttctggagaaagctgtcatggaggtaattccagtgactgaacagaacccaggaagtgcattctctgagctttgggccctgaagcttcctcttccaaatgtcagttgcagcacagagctcagcactcggccattccttcactccctctgggacttggctggtttgttttgggaaggttgcagtccctgtgtctggctcaggtctcaatgtcatccaaagtctttgtggccaatgggaaagggagcagggagacagagccccatggggccccgtgggctgtgtcctggccatcctggccagtgggggagagcctgatcatggtgcccctgaatgtccccaaaggaggtcagagcacaggccttctttacgccacttccacccgacccacagtaaccccaccgtgactccctgcggttgcaacttagctgaaaagcgatacatcattctagcttcacccgtggacctctgggatcccttgaggccccatctgttcagtgcctgaccctgattaacctgtggtccttctggcctagggcctggcatcatggaacrggatgggcggctttgggaaccaagggaaaagtgacagtccattccctccaccccggttacttgtctgcggtccagctagccattctcccatccactggatgaaggtcctacagaaatcaaggtccggggctgccaccaagccttctggcttctccaaggagctcctggggctcatggcttgctgtccacagtccctgcctgcctcccaccagtcctccattctgctgccaaaaccacccaacgaaccctcaaatgcaactgtctcacaaacccgcattatggaccctgcttggctctcctccacagactggaggcccacagatgggtttttgcttgtcctgcattgagatttttaaaaatctggaagttgcccaggttcccttgaaacaccagttggctggagctagtgcaaggcctccttaggcaggtacttagggaacagtcctcaccattccctatcgtctcacatccagcctc

SEQ ID NO: 73230 - DNA, 1045 bp, Homo sapiens
gctcttttatttaatgttttatgtaattttgatatactcctcagagcacaaacactgagctctttaaacacaaaccctttctacacaggtttatacaatattttggacatatgagatgtacactggatctaccattaagagttctgttagaaccaccatcactggaagaaggaatttattgatctactaaacttttcaatggtttcaatctcatattcagttacatatgttactagttgacccattaaaataagatggcaaaaaaaacaactcaacctttggaatagtttttttttctctttaacaagttgtatatattgtcttctgtcataaataaaacaaacaaataaatataattgagtaatgtcttattccatatttgttttaatctgatacttcactctaaattttttttgagctataattcacacaaaataaaatacacatatcttaagtgttttgcttaatgattttataattatatatctccacctaacaaccacccaaataagatatagaacattttcatcaacctaaaaattttcctcatgccccttttccagttagtttaccttctcccaaaggtaagaagtttctgatttctattggcatggaattctttagcatctagcttccttcaaacaaataatatttttgaggtttgtccatattgttgagtcagtgaagactttattcttttttattgttaagtagtattcaattgtacaaatacataacacttttttatcaattttctgattgttagacctttgtattgtctttaaattttgctatcatgaataaagtctcatatacatctttctatggacatatttttttctctcagctgaatacctagaaatggcattcctttgtcataagatagataccaactttcttacgcttagtacttgtgtgatacatcttttcccactcttattttattttaagttctgggatacatgtacaggaygtgcaggtttgttacataagtaaaagtgtgccatgattgtttgctgcacctatcaacccatcacctaggtat

SEQ ID NO: 73231 - DNA, 629 bp, Homo sapiens
tccagaataatttatttcaattagtgactctctcaactaaattgagcagarattccctctttaaattgttctgccctttcataaaatagcaaccctttacaatgtactgcatgtgtttcatatatactagatgctaggtactcgagataatgatgtcacatgtaccaatgaagagttgcaacctaacatgggaaaaaacatgtatacagctaatcataatgcaacaagataaagctcataatagagataagtcaatgagccaagaacaggaaaaaggaaagggaggaaagggtaattaataggaagactattttatatctcagtttcttaatcagcaaaacagtaataataggcacctttcctgggaattaaattagatattttcaagtacttatgacaatgccttccatataaaaagagcttaataaatgtcagctgttattagtctggattcttggtatattaagaagcatcaaaggactgaataattggaaattctttatattctttgcccatccataggacccatgtatgcacgggcagatttggaatccactttaggaaaactttctaaaatttagtattattcaaaatgctaacagtaaaatgattcactccttctcatgcat

SEQ ID NO: 73232 - DNA, 605 bp, Homo sapiens
cttgaggccaggagttcgaggctgcagtgagctgtgatcatgccactgcactccactctgggcaacagggtgagaccctgtctcaaaaatcaatcaataataaaaaatttgtttaaatggccagttttaagttctaatatggtaaatatcaatagctataacccacacaggccgggcgcagtggctcatgcctgtaatcccagcactttgaaaggccgaggcggrtggatgacctgaagtcaggagttggagaccagcctggccgacacggtgaaaccctgtctctaataaaaatacaaaaaaattagccaggcgtgatggcgcacacctgtagtctcagctactcgggaggctgaggtgggaggattgcttgaacctgtggggcagaggttgcagtgagccaagatcacactattgcactccagcctgggcgactagaatgaaactccatctcaaaaaaaaaaaaaagttataacccacacaaataaaagctgtttggggtccttgatactattaagaatgtaaaagagtcctaagaccaaaaagttccagaacagttgcctatagcaacatttcccgagtcactgtgacagtccctaaaggat

SEQ ID NO: 73233 - DNA, 651 bp, Homo sapiens
atattattttgggacacttttcttttttttccccgagatgaagtctcgctcttgtcacccaggctggagtgcaatggtgtgatctcggctcactgcaccctccgcctcccaggttcaagcaattctcctgcctcagcctcccaagtagctgggattacaggtgcctgccaccacgcccagctaatttttgtatttttagtagagatggggtttcaccatgttggccaggctggtctcgaactcctgacctcaggtgatccgcctgccttggcctcccgaagtgctgggattacagccatgagccattgcgcctggccttgggacacttttgtttgacgtttttgtgtgcatttgcatgaacgcccagtagaaactctctctctctctctctctctctctmtatatatatatatatatatatatatataattttatttatttgtttgtttagagatagagttttgctcttgttgagaatggaggctggagtgcagtggcacaatctcgactcactgcaacctccacctcctgggttcaagtgattctcctgcctcagcctcccaactagctgggactacaggcgtgcgccaccacacccagctaattttgtatttttagtataggtggggtttcaccatgttggccagtctg

SEQ ID NO: 73234 - DNA, 651 bp, Homo sapiens
atattattttgggacacttttcttttttttccccgagatgaagtctcgctcttgtcacccaggctggagtgcaatggtgtgatctcggctcactgcaccctccgcctcccaggttcaagcaattctcctgcctcagcctcccaagtagctgggattacaggtgcctgccaccacgcccagctaatttttgtatttttagtagagatggggtttcaccatgttggccaggctggtctcgaactcctgacctcaggtgatccgcctgccttggcctcccgaagtgctgggattacagccatgagccattgcgcctggccttgggacacttttgtttgacgtttttgtgtgcatttgcatgaacgcccagtagaaactctctctctctctctctctctctctatmtatatatatatatatatatatatataattttatttatttgtttgtttagagatagagttttgctcttgttgagaatggaggctggagtgcagtggcacaatctcgactcactgcaacctccacctcctgggttcaagtgattctcctgcctcagcctcccaactagctgggactacaggcgtgcgccaccacacccagctaattttgtatttttagtataggtggggtttcaccatgttggccagtctg

SEQ ID NO: 73235 - DNA, 651 bp, Homo sapiens
atattattttgggacacttttcttttttttccccgagatgaagtctcgctcttgtcacccaggctggagtgcaatggtgtgatctcggctcactgcaccctccgcctcccaggttcaagcaattctcctgcctcagcctcccaagtagctgggattacaggtgcctgccaccacgcccagctaatttttgtatttttagtagagatggggtttcaccatgttggccaggctggtctcgaactcctgacctcaggtgatccgcctgccttggcctcccgaagtgctgggattacagccatgagccattgcgcctggccttgggacacttttgtttgacgtttttgtgtgcatttgcatgaacgcccagtagaaactctctctctctctctctctctctctatatmtatatatatatatatatatatataattttatttatttgtttgtttagagatagagttttgctcttgttgagaatggaggctggagtgcagtggcacaatctcgactcactgcaacctccacctcctgggttcaagtgattctcctgcctcagcctcccaactagctgggactacaggcgtgcgccaccacacccagctaattttgtatttttagtataggtggggtttcaccatgttggccagtctg

SEQ ID NO: 73236 - DNA, 651 bp, Homo sapiens
atattattttgggacacttttcttttttttccccgagatgaagtctcgctcttgtcacccaggctggagtgcaatggtgtgatctcggctcactgcaccctccgcctcccaggttcaagcaattctcctgcctcagcctcccaagtagctgggattacaggtgcctgccaccacgcccagctaatttttgtatttttagtagagatggggtttcaccatgttggccaggctggtctcgaactcctgacctcaggtgatccgcctgccttggcctcccgaagtgctgggattacagccatgagccattgcgcctggccttgggacacttttgtttgacgtttttgtgtgcatttgcatgaacgcccagtagaaactctctctctctctctctctctctctatatatmtatatatatatatatatatataattttatttatttgtttgtttagagatagagttttgctcttgttgagaatggaggctggagtgcagtggcacaatctcgactcactgcaacctccacctcctgggttcaagtgattctcctgcctcagcctcccaactagctgggactacaggcgtgcgccaccacacccagctaattttgtatttttagtataggtggggtttcaccatgttggccagtctg

SEQ ID NO: 73237 - DNA, 782 bp, Homo sapiens
tatcttagtcgactaggccttttttttgaatgtctcttaacttctatttctctgtattttcctaattttctttcaacttcactggcttcctctacttgacactcttaaatgttagtgtcctctggtccagggttttcttttgtcctctattaatttcctccatagtgatcacatccattttaaattctttaagtaccatctaagttatggtgactacaaaaattctgtctctgattttagacatttgtaaaaactacctgtttagtatgtccacttggatatctcacggacatttaaaaagtaacatgccctacacaggaaggggaacatcatgcaccggggcctgtcatcggcggggagggataacattaggagatatacctaatgtaaatgatgagttaatgggtgcagcacaccaacacggcacatgtatacatatgtaacaaatctccatgttgtgcacatgtaccctagaacttaaagtataataataataaaaaaaattaaaaaaaagctatttactccactaaattgaaactatttgaatcagtgaagcagagaattattacagattaagaatttttgcttatttaaaattacaatagtttgttttgtttgttactgagttgtaggagttctttgtatattttggattcaagtcctctgtcagacatatgtttcataaatattacctccagtctatggcttgtctattaattttcttttaatgtgtcttttagtaaayagaagctttaaatttaaaaaaaaaagtaacatgtcct

SEQ ID NO: 73238 - DNA, 1166 bp, Homo sapiens
tctatgcatttgggatttgatgtggctatgagttatctttcagaagtataaatgaagtaacagctgtgctgaatgcaaataaagtaattctagtaagatctgaactgctatataacgcactacatttttgtcaaactcagcttttccagcagtctgcaaaggaggcccagaattctaagttatgtgtatctggtccctgggggagggaaagaagaaacaggggtaagaagacattttcagggcagacaaggtacagtagggtgggtaggatcgtggtttcctgttctcaaattcttggagaggtttttgagctaaaagtcccttgtgagttctatgtcagagtaatcaattcgaaaaagatatttcacatgtgacagccacatgtgaaacactttcacaaaacttccaccagttcacttcctctctctagcctttttttttcttccacagatgtgctgtcgaataaaagatgctgcagtaagaatcactttttgatatttttgcatactaaatttggctaaactccttgtctctcattgcatctttgcttctaagggaatgtcacagaatcccttgcttaagggaaagttctactaacctcagcaaattttgtttttatcagtggtcattaatagagaatagaatttgctatccaccagtaaccattgaacaattttagcacctcaaatgtagaccatcacacattaagttaaaatgtcttccttttactyggcgattcctgcccagagtagcctagaggcaggagggggcttggggtgagaatcactctatcaatccctccttccaaatcctgaaaaccaaggttaaaactttcacaggacacgtccttccaggggaagctgacactcacctatgagtgttttccaagtggcagggacaccgtttgtcacatttgatgccgtagagcccctcaggacacaggcgtgcttcgcagcgctcgccagcaaagcctgcttcacagaggcatgcgccgctcacgtggtaacacttccctccgttgacacactggcaggtctcagcacagagaacgccataggtcccaacaggacactcatcctggcacctaccaagcaagaggcaggagcaagaagaaagattagttagtgccatgtgaaaataaacagttaatttggaatggctttgtt

SEQ ID NO: 73239 - DNA, 752 bp, Homo sapiens
cacacacggttcatgcaaaggaaatgaaagcatgtgtgtacacaaaggattgtacatggatgttcatagtagctttactcaagatagcccccaaactgtatataaaccaggtggtctccaataggggaattaataacacattgtaatatgtctataataaatggaatattaaaaataaattaaaaggaaagagctatggataaatacagtaacatctactaaactaaaaattatgctgaatgaaagaagattacatactgtattttttcactcaaataaaatttagaaattacaaattctgttatagtaagagaaacaaatgagtgttttttgcaggccagtaataatttgaggcatgcctgcaaatgctcataaagaacttttwaaatttcttggaactcttctgtgttgagtgtggcagtggatatacattttttaaataatcaaataatgtagcataaaaatactacttattgcaaaggaattattaccaattaaagttgataaaaataaatataatgcaaaagaagtcactcttacttccagatcttggtttccagacctacatattctagctataaggaaaagagcaacatctattgattctaggctcaaattatatattagttcctataagatatgactctaggatttttctatcctctctatattcttcaagtaaattttcagtaggccattacattgtttcatcaggaaagttgagtacccaaggagaagtccaatactggcct

SEQ ID NO: 73240 - DNA, 619 bp, Homo sapiens
attatcaaagtggagatacaggattcaatgtctcctaaatttgataagaaagcagtgtttccaaaaactatctcagggaagaactatttaaggaaatgcatattgaggaacattgaaaattatgaacatcactatccctttcggtttattttctacttaataagaaattaaaacaatatatatttttcagaatatagtgccttggggaaatggcgatcatggtggatgggaggcaagattagattgcagctccagacagagcagcatgcgggggctagcattgtgaattttagctccagattgactgcaagaactaaccagcaatcccaagaggacccacaaaaattctgaaggaagtggactgctccggcaggacacaggagatcccgccaaaattgtgagtaccccaactgctgatgtgggaaagggaaaccctcctctcccgaacacacatcaccactggagaagctgaaggtctatttgtgggagaagtttccaactttacctggagctgagtcaatttggagagccgagcaaaattcaaaggtagaggaagcagcagaaaggcccagggagctcactgggtcctctagcaggccatttctkcctggcaccacag

SEQ ID NO: 73241 - DNA, 1149 bp, Homo sapiens
atggggatccttagaacagctatggctccctctgttccctcaaagcttgggctttaccatttgcatttgaaaacacaaagacttagaaaaacactgcctccttttcagtacctgtacattctcacaaccgatgatctctgttttttatctttttaaaagcaaaagtcttccttaaaaaataattcctttttctccttattgcccagacctggtcattgaagccatgttggaaatatagatgagaagaaagtatttgaatccctgaaatcctaccagccactctgtttctttaacttataggtatttttttgttttgctgaataatgaattaacagtgggcatgctctttagcccactcttctgctcttccacttgtgtcaccaaaacaccaggggtttggtctaggtcctgctgctcactgcacaaaaagcaaaccactgagatgacaggtgtcaccaaggaagaaggctttaattgagtgatgcagcagagcagaagaaagctcagtctcaaatccatctccctgaccaactaaaaccaagggtttatatagcacacaaaaaaatgtaacaatgtgtaagaaaacaggaacttgggaggggcaaggaagcaatcatagtgaatgaggggtggggcatctggtgtggcaatctggtttcagttctttgatactttttgtgagaggcctgaaggtcatttcctgagaaaggaactcagataaaacagatatgtttcaagcttttacagcagaagggtccatatytatgtttatccaaaagcaactgtctatgaaactcttgggccagtgtcacttgaatattaaaacaaatatatttcaatgtttataagcaaacttctgcaatatgtataatggctgcatggtgtctcattatacctttgagccataccactttatttcctgtggtatgcctttctttcaataaatgtgtttcctttctttcaataaatctgttagagagcctcaggtgcagaccatggaggccatcttactcttctgttcctggcacatcaaccttggcctattctaaggttcatttaattatcccaacagccccttccattctccaccaccaccccataagcaattatgttaatggtttatctttttgcttttgttcctgcaaaatg

SEQ ID NO: 73242 - DNA, 1149 bp, Homo sapiens
atggggatccttagaacagctatggctccctctgttccctcaaagcttgggctttaccatttgcatttgaaaacacaaagacttagaaaaacactgcctccttttcagtacctgtacattctcacaaccgatgatctctgttttttatctttttaaaagcaaaagtcttccttaaaaaataattcctttttctccttattgcccagacctggtcattgaagccatgttggaaatatagatgagaagaaagtatttgaatccctgaaatcctaccagccactctgtttctttaacttataggtatttttttgttttgctgaataatgaattaacagtgggcatgctctttagcccactcttctgctcttccacttgtgtcaccaaaacaccaggggtttggtctaggtcctgctgctcactgcacaaaaagcaaaccactgagatgacaggtgtcaccaaggaagaaggctttaattgagtgatgcagcagagcagaagaaagctcagtctcaaatccatctccctgaccaactaaaaccaagggtttatatagcacacaaaaaaatgtaacaatgtgtaagaaaacaggaacttgggaggggcaaggaagcaatcatagtgaatgaggggtggggcatctggtgtggcaatctggtttcagttctttgatactttttgtgagaggcctgaaggtcatttcctgagaaaggaactcagataaaacagatatgtttcaagcttttacagcagaagggtccatatttatgtttatccaaaagcaactgtctatgaaactcttgggccagtktcacttgaatattaaaacaaatatatttcaatgtttataagcaaacttctgcaatatgtataatggctgcatggtgtctcattatacctttgagccataccactttatttcctgtggtatgcctttctttcaataaatgtgtttcctttctttcaataaatctgttagagagcctcaggtgcagaccatggaggccatcttactcttctgttcctggcacatcaaccttggcctattctaaggttcatttaattatcccaacagccccttccattctccaccaccaccccataagcaattatgttaatggtttatctttttgcttttgttcctgcaaaatg

SEQ ID NO: 73243 - DNA, 680 bp, Homo sapiens
tgcattattaacctaattttctgatcaggacactgacgctcacagaagttaaataactggtctaagataatctagcaaaccagtggcagatccgtggccaagtctttagatccctaagtctctattcttttcactctaccaagccatggttggcaccctctctggtgtaagtgatctttcagttttctttagaaagcatgttccagagctgaaataaaaaagcaatatccccrttcctcttaactttgttatccagtggcataaaccacacagatacacttgcgtttgcaattgtttgggaagtgttcttgggtggttccctgggcaacactccatggagtgtcatcctcggtgtgtgtacagtggcttgttttcagctggaagggcaaggaacaaaaatctttcagtttttatttcccctgtactggtttgaacccccttctaagaaccattatggggatgaaggaaatgcaaacacaggtataattagattctaagcccagcatagatgagtggttctgccttaggccctgtgcctggcagggcttgcgattttgtttattagcctcctgtttatagtcccggcattccccagattacttccccgtcagtctgggaggtggtatgagtggaggatttgtgaaatggtgtgaacggggctcttgtaaacagaaatgatg

SEQ ID NO: 73244 - DNA, 756 bp, Homo sapiens
aggagttcaagatcagcctgagcaacacagccagaccccatctgttaaaaaaaaaaaaaagaaaataataatgtcagttaattatttccatggcaataaatagtttacaaaagtattacttctatctgaatgcttctagatgttgcaagtttaagtcctggaataccatctgaaacatcaaactaaaagaacagacctgagaaacatattccatgtgctcagggaaagaacaaagaatttttaacaaatgtaatattgggatgttttttgttttctgagattcatttcttttttgccctttggaaatattttgtactgtctctcaagttcttctgataacatatattttatatttattggaaaaatgacattcgagtgaataaatcttttcaaggtcataaacccaaggcgggacagtgccaatctgaaactgtgctgaaaagatagattacccaggaaagtttacaaaaaggaacctcaacgcaaaggagttcccataggatgtctgtgccctggaaaggtaccaggatgagggccacagcattttatgcagattagttccaagtgaataatttttctgatttttctctgatgtaaaatatccacaaacaagaaataaatcgtttaaaagaggcatctattggaaaaaagattattaaaatactgcgtgtgtttgaaatgcaccacacaggacaaagagttggtgacgatgttttccactggcgagcggaagtaggcgtttgggaatkcggggag

SEQ ID NO: 73245 - DNA, 1117 bp, Homo sapiens
acagtgaacaccatggacaaagcatcaagactcaaactgtaagtgagatcgctacctgtcagcgtggctaccttccttgtttataatgaccatttgggtctgtccttctatgacctctttgtgggggggtctttcgggtctttgtgaaggcactcccatagtcaaggccaataaccaggctctcaggtatgtcctgttcattgccctcaccctgtacttccattgtcccttaccttcattggccatcccaacacagccacctgcatcctttggaatatcacatttgggctgggtgcagtggctcatgcctgtaatcctggcactttgggagactgaggtaggaggattgcttgagttcaggagtttgagaccagtgtgggcaatgtagtgagactctgtctctacaaaaaataaaaaaaatggctgggtgtagtagctcatgcctgtaatctcagcactttgggaggcaaggtgggtggatcacttgaggccaggagttggtttccaacctggccaacatgctgaaacctcatctctattaaaaatattttttaagttagctgggcatggtgggaggcacacctgtaatctcagctacttgggtggctgaggcatgagaatcacttgaatctgggaggaggaggttgcagtgagctgagatcgcgccactgtactccagcctgggcaacagagtgaaactctrtctcaaaaataaataaataaataaataaataaatacataaataaataaagataaaaaattagctgggcatggtggcatagtcccaggtcctcgggaggctgagacgggaggatggcttcaacctgaggctgcggtgacctgtgatggtgccactgcactctagcctgggcaacagagcgagaccctgtctcaaaaaaacacaaaaaccacaaatttggagtcatgtttacttgtttgcatagtttggacaaaacgatcactgcagttctgaccttcaaggtaaacatgcaagagacggataaggcacgggttagtgtcgggggtacctaattttgtcattgctatcagttccctgatctaagtgactctgtaatcccaacactttgggatgctgaagtgggaggaatttcatgg

SEQ ID NO: 73246 - DNA, 744 bp, Homo sapiens
tgcctatgcgcccctttaaaacgaataaaaagacgtagttctcaaccagggacgtccttggtgatgctctgctggtcctgcagcctgagggctttttccagacgctttgacctgtgcacttctgcccccacgcggccartgcctgaactgcagcaacgtcctgcagacccagtttccttttttggtaccaggcatatgcagggcgtggacagatcctacaatggaaccagccagagactgccctagagaaactcatatgccgggatttggatgtttgtaggataacatcatgagcagcagctttgcaggaccacacatgttccagggagattctcagaggagggatctttgggcagtgtctccaaagaccagtaagaatatttcaggaagacacaacaagaaaaaatattctaggcaaagtgaaaactgacattgataccccgaccccaacccctcttaactgctacttccgacctgggtcgtggagctaccattcaagccctatacccaatactcatcttgaactacttaactacttatttatgtatttatttatttattattattattattattttgagacggagtctcactctgtcacccaggctggagtgcagtagcgcgatctcggctcactgcaaccttcacctcccgggttcatgtgattctcctgcctcagcctccctggcagctgtgattacaggtacctgccaccatgcctggataattttttttttctttttc

SEQ ID NO: 73247 - DNA, 765 bp, Homo sapiens
ctggaggcttctggctgttcatttgcttacttcataaaccttgtgtcttaagtcaggtgctagggacaagacagtgacttctgccctctggcaactcaccagatggccctgctgacctagataatctaggctttggtttccttttttttttttcctttttaagaaagaaaatggtcttgatctgtcatgcaggctgagtgcagtggcacaatctatgttcactgcagcctcaaactcctgggctcaagcaatcctcccacctcagcstgccacgtaactgggaccacaaatgcgtgctaccatgcccagttaattcttgttttttttgagacagagttttgctcttgttgcccaggctggagggcaatggcatgatcttgatctcggctcactgcaacctccgcctcccaggttcaagtgattctcctgcctcagtctcccaagtagctgggattacaggcatgtgccaccatgcccagctaatttttgtatttttacattttgtgtaaaattacaaattttgtgttttcaaacccgtctctacaaaacaacccatgttgcccaggctggtctcaaactcccaggcccaagtgattcaccagcctggccctcccaaagtgctgggattgcaggcttgagccactgcgcctgccctgggctttgttttcttatcagagaatgaactggtaggaattgggaaaggcatgaaagactcggggtccttccccacttgtcagaccctcttttctctccggaacacccagg

SEQ ID NO: 73248 - DNA, 787 bp, Homo sapiens
gcagagccgcagcagacagccaagataaaggcagacagtgttgagagagctgctaatgagagagctgctgaataraactacatttcacctgcctatgctcctccatccgtagtgttctttcagctatcacccatccacccactcccctcggacctcagcatggccccgaacctgaccctgagtgtgacatttggtgtagtcatggccctggacctgttaataatataatgctatattatgttctatgacatagaaataaaatatatgtatatttatcggccgggcgtagtggctcacacctgtaatcccagcactttgggaggtcgaggtgggtggatcacctgaggtcaggagttcaagaccagctggtcgacatggcaaaacctcgtctctattaaaaatagaaaaattagctgggcatggtggcgggcacctgcaatcccagctactcaggaggctgaaacaggagaatcgtttgaacccgggaggcagaggttgcagtgagccgagatcctgccactgcattccagcctgggtggcagagtcaggctctgcctcaaaaaataaaataaaataaaatgaatatttaatatgtatatatatatgtcaataacagcagaaaggagttgaaacaaagttgtattggtcttaggaaattactacagattataaagtaataattataacaatatattttgggtctttaacataaatagatataatatgtataacaataccaccaaaagtggggaaaggggatagagatatataggactaatgtttctat

SEQ ID NO: 73249 - DNA, 981 bp, Homo sapiens
tgcatatattaactcaatccttataacaactcttctttacgagtaaggaaactgaggcacagagagtcacaagcctaaggtcacaaaggtgacctaataacagtacagtgagaattccaacccagatcatctagctgtagagtctacctacaaatgaacaacatgatgagwtctggggacagaggaggggggacaaacatctaattgcagagcttaagatgcagaatgtcttgattttaaggttcacttggtaactttctgacaacttctaacaagatcattactgttattgttttattatttcatagtctttctgtcatgatgaaagtattgggtggtagttattaagggatcatttaggagccaaggaaaaaggtgacaattgagccacgtgactgaggccagaaatgtctcttcaaagctatagagcctaggcaactcagactccaataccatcagcatccttcccccttggctacctttccagcaggaagcctgtctgggcacagtgtaatatgctggtctgatacccatgaactccttcagccccaagagctgcctgtgtttcctggaacctagagtctccctggtgccaggaaatgacacggtgcagccagcatgaatttatcactgctaaaaaatgattcctcattccagacaaacttaaaagaaatgcacaaaattctgagtttgcagccaggcatccttataaaagcaaagaaagagccatgaccatatttaaagatgaagtgtcttattcaggtgcttctatttagagagtcactgcaagtttgggagcaatgagattgtctcaatttcctgataaaagcaatatgagaaatgtcaaattctcaaagcttacacaaggaacccagtaccacccatgaacaagggtctgacttgcatgctcattttactttctgttcattgtcctttgtccattctttctttcctacctggagggaaaaagggaacgcatgc

SEQ ID NO: 73250 - DNA, 501 bp, Homo sapiens
tgccaaaacagaaatgaagtgttaggtaaacattttaaatgttcagtcctgactatgtacctctgcaactgcttggatatgcaatttggaggtaatgttagtgagaggaagcttttggccacagcagagaagagggctgtagtccgttatcacactgctataaagatactacttgagactaggtaatagatgaaggatagagatttaagtgactcacaattccacatggctggagaggcctcaggaaagttacaatcatggcggaaggtgaaggggaagcaaggtatgtcttacatggtggcaagaragagagagcacacaggggaaatgccagacacttaacaaacaaccagatcttgtgagaactccctcactatcacaagaacagcatgggggaaaccgtccctatgattcaatcaccacccaccaggttcctccctcgacatgtgaggattacaattccagatgagatttgggtggggacacagagccaaaccatat

SEQ ID NO: 73251 - DNA, 648 bp, Homo sapiens
gtgcccagagtcacacgaatcccaatcctgggtgggaacagattcatccttgatctgtgagtgacctgcttccttcattgactccgtattttgtttatttatgatagtggaggaagcaccaacaacaaaagcggagtctgacatcatctttatctgttgatggggcccccattccaagtccttgcaccccgctcatgctcttcattctcttgctttccttcaaattttgttccttagatatctatatagatatagwtgtatattcctaaagagtacatacatacgtgcaatacattgaatactttttcattttttttttaacagaaaggacattgtgcgtatgtagtatctggaatctttgaggaatcacctttttcacttagtactaaattgccaaggtctgtccatactgcttgtcgctgtagtctgttggcgtttgcttctgtggctgttccaccccgtaccacacttaattaccccctctgctatagttgggcatggaaatggcttccagttttttgctacccagctgtgctgcttgatcttgacagatctcctgttgtacaggtgcaaccatttctccaggggctattcctagtggtgcaattgctagaatgtccagctctcagagataaggccactgttttt

SEQ ID NO: 73252 - DNA, 617 bp, Homo sapiens
acttctgtgtcctggaggagccccttctgatcactggcaccatgtatgcatttcttttgttaggtgttataggcttaggactccctcaggcagaggccacagctggcagataggccatacccttcccagactgaccctgtagaaggaagcatgatcagctcctccaccaaccaatgaactcgggtgtctcaccccctcagtattataagagtaggggctcctctactgcttgggtaccatccaaggtggcgagtcttgcctgcctaggagcagcagggagcaggggacacatgatctgttattggggtgtttcctgggaaaatacggagctgtgcccacccacagatttcaggcaaggacagagccactgtgctgggagcccaagccggcaagtcttgcctggttaggagcagtggggctgggtggagtctgccatatgggtgtttcctgggagaacacagagctgtgcccrcccagagttcaaacaagggcagggtcactgtgctggaagcagaaactgagctttgtctggtgagaagtggtacagtctgactgctccccagcaccatgactgtggcctccactggggctacagtagctactgctgggctgctcag

SEQ ID NO: 73253 - DNA, 1043 bp, Homo sapiens
ttaatagaactagaatgtagagctcaggtcattaaagttgacagatggcaattayatacccactgaccagctgagtttatcctccaggccttcccattactgaatgcccccacctcaatttctgacagactcagaggctgtattgttaagttttcaaaaccaggaaatgttttctaaatcataaaagctaccgctgagaatgactaagtaacattaataaacaatatccctatattttcccacgtttcacctctctggcactaaatcaattctagtcccagctggtggccagaaatttccattgcctctggggaaaagcaaggaactaggttaaaacctggtttgacagcctaaagccagttcatgtcctcacatacccctaagtagatcctatcttttgcagcccctagtaagtgtctcaaaataataataaagagcaaatagaaacacgagtgaaattggctcctggaaaaagaaacgtgatccctacattcagcgaagaaaaagtgtgatttcagtattagtgaaacaaagttgagcaataatcagataacctcctggttttgcatgcttacagaaatgaggaaatggttgagtggcagccagagtcttccgttggtaaaatatataaaacatttagactgctctgcaatttctcccaggaaggtgattattttattcattatatcctccttagaattggttcccattccttcttccaaattacatctctccggttttttgttttattttggttctatgcttttgttgtttggcttactatttatagagtgcctactatgtgccaggtattgtcaggagttgaagatgcagaatcaatgaaacaaagaggcctgcagcctaccaaagaagaaagccacttggaaagaagagtgtgcacccaagtgatattagaaagttggtccatcagaagcacctccagggccacctgaggtataagggaaggagcaatccaactataaagtgtctctccctatccctaatctctaaagtgagattaatgacttcacttggaaaggggc

SEQ ID NO: 73254 - DNA, 1043 bp, Homo sapiens
ttaatagaactagaatgtagagctcaggtcattaaagttgacagatggcaattacatacccactgaccagctgagtttatcctccaggccttcccattactgaatgcccccacctcaatttctgacagactcagaggctgtattgttaagttttcaaaaccaggaaatgttttctaaatcataaaagctaccgctgagaatgactaagtaacattaataaacaatatccctatattttcccacgtttcacctctctggcactaaatcaattctagtcccagctggtggccagaaatttccattgcctctggggaaaagcaaggaactaggttaaaacctggtttgacagcctaaagccagttcatgtcctcacatacccctaagtagatcctatcttttgcagcccctagtaagtgtctcaaaataataataaagagcaaatagaaacacgagtgaaattggctcctggaaaaagaaacgtgatccctacattcagcgaagaaaaagtgtgatttcagtattagtgaaacaaagttgagcaataatcagataacctcctggttttgcatgcttacagaaatgaggaaatkgttgagtggcagccagagtcttccgttggtaaaatatataaaacatttagactgctctgcaatttctcccaggaaggtgattattttattcattatatcctccttagaattggttcccattccttcttccaaattacatctctccggttttttgttttattttggttctatgcttttgttgtttggcttactatttatagagtgcctactatgtgccaggtattgtcaggagttgaagatgcagaatcaatgaaacaaagaggcctgcagcctaccaaagaagaaagccacttggaaagaagagtgtgcacccaagtgatattagaaagttggtccatcagaagcacctccagggccacctgaggtataagggaaggagcaatccaactataaagtgtctctccctatccctaatctctaaagtgagattaatgacttcacttggaaaggggc

SEQ ID NO: 73255 - DNA, 1043 bp, Homo sapiens
ttaatagaactagaatgtagagctcaggtcattaaagttgacagatggcaattacatacccactgaccagctgagtttatcctccaggccttcccattactgaatgcccccacctcaatttctgacagactcagaggctgtattgttaagttttcaaaaccaggaaatgttttctaaatcataaaagctaccgctgagaatgactaagtaacattaataaacaatatccctatattttcccacgtttcacctctctggcactaaatcaattctagtcccagctggtggccagaaatttccattgcctctggggaaaagcaaggaactaggttaaaacctggtttgacagcctaaagccagttcatgtcctcacatacccctaagtagatcctatcttttgcagcccctagtaagtgtctcaaaataataataaagagcaaatagaaacacgagtgaaattggctcctggaaaaagaaacgtgatccctacattcagcgaagaaaaagtgtgatttcagtattagtgaaacaaagttgagcaataatcagataacctcctggttttgcatgcttacagaaatgaggaaatggttgagtggcagccagagtcttccgttggtaaaatatataaaacatttagactgctctgcaatttctcccaggaaggtgattattttattcattatatcctccttagaattggttcccattccttcttccaaattacatctctccggttttttgttttattttggttcyatgcttttgttgtttggcttactatttatagagtgcctactatgtgccaggtattgtcaggagttgaagatgcagaatcaatgaaacaaagaggcctgcagcctaccaaagaagaaagccacttggaaagaagagtgtgcacccaagtgatattagaaagttggtccatcagaagcacctccagggccacctgaggtataagggaaggagcaatccaactataaagtgtctctccctatccctaatctctaaagtgagattaatgacttcacttggaaaggggc

SEQ ID NO: 73256 - DNA, 2921 bp, Homo sapiens
agaagtaggtgaaatttgaacgatgaaaatacattaacagcttctaatgacttatagcagtgttatgactagcatggtagtgatgaaatttgtaatataaaaaattaaaattaatatgataatatggggatagataatcaggacagtggttgcttttctagagggaagaagattaactggaaaaggcaaggaggagccaggcacggtggctcaggcccgtaatcccagcactttgggatgccgaggcaggtggatcgcttgagctcaggagttcgagacccgcctgtgcgtggtaaaatccagtctgtacaaaaaaaaaaaatacgaaaaattaaccagccatggtggcacgtgtctgtagtcccagctacttggggggatgaggtgggaggatcacttgagcactggaagatcacttgaggccaggaggtcaagggagcagtgagccaagatcacactactgcactccagcctgggtgacagagtgagacgctgtctcagaacaacaacaacaaattggaaaaaaaaaaaaaaaggcaaggagagaactttctagggtgatggaaatgttctgtatcttgactgaggtatggatacattggtatatacatttaaatgtaaatgactcccactagcatgggtatattcctttggaatgttaagtcctatacttgttagtgtgctaatgcactggtggcaaaataaacctgttttctcttgtcaaaaaaaaagaaagaaagaacttagcacaaacatcaaacatgccctgggaagctcaatctcctttattcactgaaagcaaaccccaacagggaaaattctgaaagtctctgccacaaaactcagggctactaaaatacttgctccatggctatagggcagacagttgaccagatattcagaagactggagtgagggggaagctctggtgccacatccctctgctggcacttttggaggagagcagaggagagagtgctaggcccaggcccacagtgaaaatgcaaatcttgggtttccaagtacagccaaagcaatctatagccctggacttcctgctttgcagaacacaacccaccagtctctcatctattcattcattctccaaatattagctttcctgcaactgttttgtactgggacctgaagttacaaaaagaaaaacagcaggtaccctgcccctacttcctctcaacagggcattccccaggaccccatgtccactgtgcaaggccatgtagattgtgaccagcataattccaggagaagctgttcctggagtctctgatgtaagtagcatcccctggaattgtgcagtgaggcagtcctggtgcccagtctaccccggttgagctgacaactctctcttaggtgtcacagaacctgtgtcctatcctgtatgccccttgtgtggcaattatgtgttcctgtattcgttgcccaactagtgtgggagtttgccaggccccagccacaggcatgggagtcagtgctgtagccagactcactccccacagggacagaaccttctctaaagcccccagcctaacattggtagctcttccagcccctcattcctctctgatggcactgccatctcatgcccccataagattatatggccattgaattatctcttttactaagacaaaaactccctgtataagtttcctgttgctactataacaaattgccacaaattgagtggcttacactaacacaaatttattatcttataagttctggaggtcagaatctgaaagcggtcccattgagctaaaatcgaggtgtctgaagggctgccttccttctagaggctctaggggagaatctattttcttcattttccagctgctagaggccacctgctttccttggcgtgtggccccagccagcaatcacacctcttcaacctcagcttcccatctcctcctccaactctcactctcctatttccctcttataagacccttctgatattcagggcccattcagataacccaggatcctctcttcayttcaaaatcctaaatataatcatatctacaaagtcccttttcccatataaagcaatatattcacacattcagagattaggacatgaacatctctgggggcctggttttctgcctaccacactccccaggagcattctatccttcagtcacttgtacttaatgagcatctattatttgtaggttaatggactatgtgctgggaatacagaggtcaataaggcagtagctaagggcctccggagcaaaggccgagagggctttatggtgatttgtatgtcctgtacagccctatttaaaaagaaaaaagttaaaaccaggagattttaaagaaaaacctggactttttggcttctctagaaaagccagatggtcagggcaccctgggactcattagttcccacaacatagcaaccatgtatggggtgtggatgcttcaaccacagggtacccaccactctgcgtcacctcctgccacactaagtggctgcttggctcactatgactcactggctcctgaaaacattagggtttgggcaccacagctttggagaagaaatggtaacgtgggatgccaagttatttactttggaaccaaaagaaaatgttaggacttctggggttgttgtatctaaaaaccagtaagaactgaagatttttttcatttgaaatttacagactgattgacatcctgtctcaactggcatgagacggcctcacctgctgagtgtgagtttcatctgctcagtacacaagtctcctaagggatgggtggggcttctacaatgtagaaagtgactgtgatgccctctctctctccccacattcagtacacaccaccggcaggtttgcctggataactgggtctactaattgcattatctcactgtaactaaacaagtcctg

SEQ ID NO: 73257 - DNA, 609 bp, Homo sapiens
tgcccaggctggtcttgtagtcctgagctcaagtgatccacctgccttggcctcccaaagtgctgggattataggcacgagccactgcacccaaccattgttaagtttataaaattcggttttgcttaagcatgtgatgaagtaacttggttaataaaattacatgatatagtactcctgacccttccarggaggcatgtcctctgtgtggtgtgggatactatagtgtctccagcctcagaggaaagaggcagagtcacagcactgtgggatgacatcccaggacatggagcctccattcaggcggagcagagcaggggctggcataccacccctgtaaagggctgcaagtgaatagttcaggccttgagcaccatggcctctctgccatgactacccaactctgccactgtagactgtaagcagccatagccaatgtgcaaatgaatgagtgtggctctgtgttccaataaaacttgatttgtgaaaaataaacaatttcatataattttcacttgtaataagatacatatatttagtttttaaaacatcagccagaagtggtagctcacacctgtaatcccagctactcgggaggctgaggcagga

SEQ ID NO: 73258 - DNA, 609 bp, Homo sapiens
tgcccaggctggtcttgtagtcctgagctcaagtgatccacctgccttggcctcccaaagtgctgggattataggcacgagccactgcacccaaccattgttaagtttataaaattcggttttgcttaagcatgtgatgaagtaacttggttaataaaattacatgatatagtactcctgacccttccaaggaggcatgtcctctgtgtggtgtgggatactatagtgtctccagcctcagaggaaagaggcagagtcacagcactgtgggatgacatcccaggacatggagcctccattcaggcrgagcagagcaggggctggcataccacccctgtaaagggctgcaagtgaatagttcaggccttgagcaccatggcctctctgccatgactacccaactctgccactgtagactgtaagcagccatagccaatgtgcaaatgaatgagtgtggctctgtgttccaataaaacttgatttgtgaaaaataaacaatttcatataattttcacttgtaataagatacatatatttagtttttaaaacatcagccagaagtggtagctcacacctgtaatcccagctactcgggaggctgaggcagga

SEQ ID NO: 73259 - DNA, 609 bp, Homo sapiens
tgcccaggctggtcttgtagtcctgagctcaagtgatccacctgccttggcctcccaaagtgctgggattataggcacgagccactgcacccaaccattgttaagtttataaaattcggttttgcttaagcatgtgatgaagtaacttggttaataaaattacatgatatagtactcctgacccttccaaggaggcatgtcctctgtgtggtgtgggatactatagtgtctccagcctcagaggaaagaggcagagtcacagcactgtgggatgacatcccaggacatggagcctccattcaggcggagcagagcaggggctggcataccacccctgtaaagggctgcaagtgaatagttcaggccttgagcaccatggcctctctgccatgactacccaactctgccactgtagactgtaagcagccatagccaatgtgcaaatgaatgagtgtggctctgtgttccaataaaacttgatttgtgaaaaataaacaatttcatataattttcacttgtaataagatacatatatttagtttttaaaacatcarccagaagtggtagctcacacctgtaatcccagctactcgggaggctgaggcagga

SEQ ID NO: 73260 - DNA, 2344 bp, Homo sapiens
tcagtttkcagatggcctattgtgggacctcaccttgtgatcgtgtgagtcaatactccttaataaactcccctttatatatacatctatcctattagttctgtccttctagagaaccctgactaatacagacatgaaatcaaaatttactagaagaattggccatcaaacaaattgcacttttttgtattgtttcctctatctttggtgcctcggatacgcttgctggacaaacagttttaaagaagaatgctttgatgctgggtttcaaattaggacccctgggttgggatgcgtacctgccactgatcatgcaggcagctacataatctagaagaagcagagttgcagagctgctggatgaatcccaggctgcattcctctccacaggcctcccctctgccaagtcaccaaggagtggtaacctaaccaccgagcaacgtcttgtcagtaaatcagcacccatttatgcaaacattactccctgggcaaccgccctacaaacagagaatgatttctgttccagaagccatcccgccttgctcaattccattttgttaggatatggggaaaacatgtctttgttcaactctattttctttttaaattgacccttactccataaggctcaaaagaattgaaatttttaagagaaaatcacagttcacactctgtcctcattatttcatttagaaaaacagcagcagcaatactggaacatacagaaatcgcaagccactgtccggggggcaagaacatagaaaggaaagtcacagaggctcccacgcagtgggctcaggaaggaggaaggcctctgtggggttcctccatcctgtgtctggaggtgcacttctgctactcaaatctacattccacttatatagttcgtactgtaaagtattttttaagacattactatccctgaattttacttaatcgaatctaattcttctcatgaggtccaaaagaccaaaggatataaattaatatttatggtaatggcagctgtcatacaccaatggcctcatagtggtggccatcattctagacagttttcatttctgagcctgcacactcagggacagtgaaataaaggaagtgtgacaaggaggagaatgtgcgtttgtgtgtgtgtgtgtgtgtgtgtgtgtgtctgtgcctgcacgtggacttgtgaccaaagtgatggctttgggtttcactccctggggttaagatgagagtaatgccagttaatgaactattttaaaggctcaatgtggctgctgtatagtggatacattaggtaggcaggagtgtgaacaaggacaattcagtgagtgctgaggtccagggagaagaatgctggcttggatgaggatggtaagggggaaggaatagtgtctttgggtttactttgaaggtagaactggggccatctgcagatggcttggatacgaggagtgagaggaaaaagtccagtatggctcctcctagagttctggcctgggaaagtgggtaaatggagtatcatttacctagaagggtaaagagggggaaagttggtttaggaggccatcaagagctctattttggtcatgttttgtttgagatattcattaattcaaatgaagactatactaagcagttggactttgagtctggatttcaggggagagataggagctatggagttattagtgtgtagacggttgtaaagcagtaagaatgggtgagatccctaagggtaaatggcagagaacagactggagacctaagccctggtacactctggccttcagaggggtcaggcaagcaaggcatcctgccaagtcctctccctctgaagcactgcatgctgtggtctgcagcttttattctcccacataaatacaataaacagaagaaaaaatatgtactttcattcttctcttcctctctctagaaatgtacatgctagtaggtagcttagtaagagctgtttagatcctccagactcttagaatttgttaagtttaccatgtttaatgaggaacattgagagctcagctgtgcttgctataaactgatgatgcatccataaataaatgcaatgtccagagagctcaaatgtccaggcttaatcttatggcaaatcagaatgcaagcaaccaaaattgtttttaatatcaatgttccaattcacatcaacacaatatttgtggttctaggagataaagggaagcattttactcagttgttacccaaatgagaagcagagcaggaaaatggcattacttatgcttttcatattttaaaagttttcatattgttagaaaaaagaacaaagaaattcttttagtgaggctatatctctaaaagtgga

SEQ ID NO: 73261 - DNA, 2344 bp, Homo sapiens
tcagtttgcagatggcctattgtgggacctcaccttgtgatcgtgtgagtcaatactccttaataaactcccctttatatatacatctatcctattagttctgtccttctagagaaccctgactaatacagacatgaaatcaaaatttactagaagaattggccatcaaacaaattgcacttttttgtattgtttcctctatctttggtgcctcggatacgcttgctggacaaacagttttaaagaagaatgctttgatgctgggtttcaaattaggacccctgggttgggatgcgtacctgccactgatcatgcaggcagctacataatctagaagaagcagagttgcagagctgctggatgaatcccaggctgcattcctctccacaggcctcccctctgccaagtcaccaaggagtggtaacctaaccaccgagcaacgtcttgtcagtaaatcagcacccatttatgcaaacattactccctgggcaaccgccctacaaacagagaatgatttctgttccagaagccatcccgccttgctcaattccattttgttaggatatggggaaaacatgtctttgttcaactctattttctttttaaattgacccttactccataaggctcaaaagaattgaaatttttaagagaaaatcacagttcacactctgtcctcattatttcatttagaaaaacagcagcagcaatactggaacatacagaaatcgcaagccactgtccggggggcaagaacatagaaaggaaagtcacagaggctcccacgcagtgggctcaggaaggaggaaggcctctgtggggttcctccatcctgtgtctggaggtgcacttctgctactcaaatctacattccacttatatagttcgtactgtaaagtattttttaagacattactatccctgaattttacttaatcgaatctaattcttctcatgaggtccaaaagaccaaaggatataaattaatatttatggtaatggcagctgtcatacaccaatggcctcatagtggtggccatcattctagacagttttcatttctgagcctgcacactcagggacagtgaaataaaggaagtgtgacaaggaggagaatgtgcgtttgtgtgtgtgtgtgtgtgtgtgtgtgtgtctgtgcctgcacgtggacttgtgaccaaagtgatggctttgggtttcactccctggggttaagatgagagtaatgccagttaatgaactattttaaaggctcaatgtggctgctgtatagtggatacattaggtaggcaggagtgtgaacaaggacaattcagtgagtgctgaggtccagggagaagaatgctggcttggatgaggatggtaagggggaaggaatagtgtctttgggtttactttgaaggtagaactggggccatctgcagatggcttggatacgaggagtgagaggaaaaagtccagtatggctcctcctagagttctggcctgggaaagtgggtaaatggagtatcatttacctagaagggtaaagagggggaaagttggtttaggaggccatcaagagctctattttggtcatgttttgtttgagatattcattaattcaaatgaagactatactaagcagttggactttgagtctggatttcaggggagagataggagctatggagttattagtgtgtagacggttgtaaagcagtaagaatgggtgagatccctaagggtaaatggcagagaacagactggagacctaagccctggtacactctggccttcagaggggtcaggcaagcaaggcatcctgccaagtcctctccctctgaagcactgcatgctgtggtctgcagcttttattctcccacataaatacaataaacagaagaaaaaatatgtactttcattcttctcttcctctctctagaaatgtacatgctagtaggtagcttagtaagagctgtttagatcctccagactcttagaatttgttaagtttaccatgtttaatgargaacattgagagctcagctgtgcttgctataaactgatgatgcatccataaataaatgcaatgtccagagagctcaaatgtccaggcttaatcttatggcaaatcagaatgcaagcaaccaaaattgtttttaatatcaatgttccaattcacatcaacacaatatttgtggttctaggagataaagggaagcattttactcagttgttacccaaatgagaagcagagcaggaaaatggcattacttatgcttttcatattttaaaagttttcatattgttagaaaaaagaacaaagaaattcttttagtgaggctatatctctaaaagtgga

SEQ ID NO: 73262 - DNA, 579 bp, Homo sapiens
gcaaaacccagagataaaatgcggggaaaccttatccacgccctgggctccacgcccagcaaagtggtgacgcaggtgrgaccggccgagggccgtcctgggtgggccgaggcccctggggagaacctggctctgcacccagctctgtgtctctggctctggccaaggtgggagaggaccctggggcaggcgtgtaagttgggtttgcaaatgcaggctggggtggggggcccatgagggtcccggggtctcttggggccttctcggagctgggctttttaatgaaaatccagctgggagggaagacaacctcttgggagactcttgcttctccagggacgggagccgcagggctgcggggcacacggggctgtcactctattcccgattaagtctcacttcccaaattcccccgagaatatcttgccgtctggtgtgcgacacccacaggactttcctctttccaaaacccctaagggaacatgagaggctgacgggtttcaaacctttcaaaccacaggcactttcagaggggagaggaagctgaccccacccttccctccggctgcgtctgcaggg

SEQ ID NO: 73263 - DNA, 620 bp, Homo sapiens
ggcaggtgcgggagccagggcggcagtggcctcggggctgggtggggcgcctggcctctggtctctggagcagtcaggggctctgcagacgctgagaggcctgctcatagtggactgggagatgctggagcagcctcagagccatggccggcccacagcgggagacggccctgctgctgcccctctgcctgtgcgtgtgcacctgtgggcacctgcgtgtgctggggcaggcagggctgtattgggaccaggtcccgtaacagcctgcctgcttaccgtctgctcccatccctggggaaagcaagggagctcggggtcctaggacctgacctcagcgctcacccccaccagcaccacagtcaccaggactctgtgactcagtttaccccacgagagcccctgggattcccagggcatcagaaggcccatcagcctcccgtgaactgctggggtgggcctggccttgggacgcgggtgcaggggcctctcctcactgccccatggcacccacagccagtgccmgagcctgctgcagccccgacccggcagagcaagcggctctgctacctcagccacgtagctgatggcatccttcaggttcagctcgtggaagacattca

SEQ ID NO: 73264 - DNA, 756 bp, Homo sapiens
tccatttggatgactttctttggcaagtcttcaaattcatgtatcctttctttgttgtgtccaatctgcattaatcccattcactaagcattttaattacagatcttgtattttttagtttggaratttccattttctttttctttttttttttagacggagtctcactctgtcacccaggctggagtgcagtggcacgatctcggctcactgcaagctccacctcccgggttcacgccattctcctgcctcagcctcccgagtagctgggactacaggcacccgccaccatgactggctaatttttttgtatttttagtagagatggagtttcaccgtgttagccaggatggtctcgatctcctgacctcgtgatccgcctgcctcagcctcccaaagtgctgggattacaggcgtgagccaccacacctggcccattttcttcttttaaaatactttcgaaatctgaaactctccacctcttcatctacttcatctgccatattacttataggttatttaatatatttattatagtttttaagaagtctctgtctgataattccaacacctgggtggtctgtttctattgagaattttgctgttatttatgaactgataaaatctggtacctttgcaaatcaccaattcttaaattttatctcagagattttgtctaatgcaggcatgtttcctttcaagaggaaatgttctttcttctgttaggcagttaggtgaggggcttatcagtgtaat

SEQ ID NO: 73265 - DNA, 796 bp, Homo sapiens
gtcttgggtgaaagaaaaaccagagtctttagtctgctctaccacttatgggtgagtcactgtgagtgaatattaaagaaaaataatattatctacctcaatagggtgatatgagctttaaataaagtgtttcttgttaagtgattttcctcatgcctagaacagataagtgatgaatgaactatatctgttgtttttgcaagtcataagatctaacactgtgctagaaacagactagttatttcataaatgcctattgaatggaaaaaaataacatcctacagttacattctacgtatctaattaggcagtggttcaaaatcactgatgagtgaagcaaagaaatttaatgccgtgttaaattgatagctatgccaatatggcagttgtactaaacaattaaacccttaagcaataacagtctccataattcattggaaactgagtgatcacattgacttcctgtccyatacagccaaaattcataatggttatattttctttctcatttaagacattatttaagtgaaagaaacataattaaaaggattcatatcacaagatgttagaaatgtgagaatagacaaaagatgacatcaaatttctagaagataagttgagagtggaaggatgctgaccactggagcaaagtgagtgtattcaagcccagaataaatgacactgagaaggggaaactcatttgtcaaatagaagcccaggaaaactttgaacataatgtaagtagtaaggggaagaaataaaagggagactagaaatagggtggttgcttaatgca

SEQ ID NO: 73266 - DNA, 796 bp, Homo sapiens
gtcttgggtgaaagaaaaaccagagtctttagtctgctctaccacttatgggtgagtcactgtgagtgaatattaaagaaaaataatattatctacctcaatagggtgatatgagctttaaataaagtgtttcttgttaagtgattttcctcatgcctagaacagataagtgatgaatgaactatatctgttgtttttgcaagtcataagatctaacactgtgctagaaacagactagttatttcataaatgcctattgaatggaaaaaaataacatcctacagttacattctacgtatctaattaggcagtggttcaaaatcactgatgagtgaagcaaagaaatttaatgccgtgttaaattgatagctatgccaatatggcagttgtactaaacaattaaacccttaagcaataacagtctccataattcattggaaactgagtgatcacattgacttcctgtcccatacagccaaaattcataatggttatattttctttctcatttaagacattatttaagtgaaagaaacataattaaaaggattcatatcacaagatgttagaaatgtgagaatagacaaaagatgacatcaaatttctagaagataagttgagagtggaaggatgctgaccactggagcaaagtgagtgtattcaagcccagaataaatgacactgagaaggggaaactcatttgtcaaatagaagcccaggaaaactttgaacataatgtaagtagtaargggaagaaataaaagggagactagaaatagggtggttgcttaatgca

SEQ ID NO: 73267 - DNA, 693 bp, Homo sapiens
gctccgcgcgctacaccaaccagccaagctacaataaccaataaaaactgtaataaccaaccaaaactacaccatgtagccaacgctgcaccaaccagccaacgctgtatcaaccagccaatactacaccaaccagcccatgactgagttcctaacacagaggaaaaccacattgaaaaaatatccccttattccctagaattctcagcgctcgaacgcacagtgttttttctaagacccaggtcaacagctacctctgagatgcagggaggatcaaacgggaaaaaatgagcatctacagtcaaagccactccatctctgtggctggtgatttcatcagatcygtcctggttgcataaaactgccctttaatctacgctgcctcggttaactagaaggccaagagctttaattgcaacttataaaacctgcccccgggccgctggccagatgtgcagcccctccccactgggaagaccttctgagaggccaagtccgcacacaggatcccagcaggcctggcccaatgtgccccggcacccaccaaagcctcagcttcccagggcgggcgcccctccctgagatgcagcccccacctggcctcgccctcctgaggacccaccctaccctcactccctcctgagggcccaaccctccccctcaatccctctggccctgtccccagcgagaccc

SEQ ID NO: 73268 - DNA, 631 bp, Homo sapiens
caaaatgggaaaggctgatgcacaagataaaaaaatacatatggacaataaaaatatttcttcaagttcaacttatggtcaaatcaaaggactttaaatgctgggctcatttttaacacatcatataagcaattgttttacaataatactcattattagtgaggttataagacagtggatatttatatgtcactagtgagaatgttacctgttacatcctttttaataggtaatttatcaatattcatcaaaattcttaaaaattttctataatgtttgacttactaactctaattctatgaatttactgtgaggaaacagtcaaagatataaacaattatttattaataaagatgttaaacacagggtcagttataaagaagagaaacaacttayatgtatgacagcctaaatcttaaacataagtggtatgtaatatccagaacaagaaatattggtcattcactaaaatctatattttaaaatgatatttgatgacatggataaatattcacatttttaaaaatgacttaaaagttataacagtatggtctataaacctgtttctatttatttgtgaatgtgtgtaggagtatgtgtatcccttgaagcagtgacacatacacagtgg

SEQ ID NO: 73269 - DNA, 680 bp, Homo sapiens
ggaatatacctcttagggtgtttgaagggatacctggaattaattgggtaaatcctgagactagtgcctgacccacataagcattataggagggccataatcaccctcatagcaaagatgactctcatgatggccctcatgatggtgakaatcggattatgtagaaacctttaagaagaagaaaaattagaggtgcattaatgactgttctagcccagctaacacaaagtgataaagttgtttgtttgtttgttttatttttgagaccgagtctcactctgttgcccaggctggagtgcagtggtgcaatctctgctcactgcaaccttcgcctcctgggttcaagcaattctcctgcctcagcctcccgagtagctgggattacactaccgagtagctgggcgcccactaccacacccagctaatttttgcgttgttagtagagatgggctttcaccatgttggccaggctggtctcgaactcctgacctcatgtgacccccccacctctgcctcccaaagggctgggattacaggtatgagccaccgtgcccagccccatgagcctttttctactcaggggattaaatatctaaagtagaattgtttttgtcttgcttatctcttccatgccacctctgtttctttagggtaagcatccattcttcggagacttcctc

SEQ ID NO: 73270 - DNA, 971 bp, Homo sapiens
tccatctcaaaaaaaaaaaaaaaagtaaaaagaaactggtaaaatccctttagtagcatattaaatatatgtaaaatattgacatttcaacatgtaatcaacagaaaacaaattaggagtgagtttcttgtttttgttctaaattttagcaatctggcatatatcttaaacttatgggccatctcaaattggagtagctgcatgttcctagtggctgcagtactggacagtgcaattcaccaaattttttaggtcagagtacatctaggaaatgaccatacttgtatggtgtcccagggtaaatagtcgagcctgttaggggccagaggcaacaggccagatgccccaagttcccatcgccccactttcttcactgttccaaaagaaaccccccttaagggctggacattcagaggctttatgcatattaggaaaaggcatcctgtctggggatttcagtcccactgctcttgaagctgaagctggatgccctcgttttgtgcacagcgtgtacaactaccttcaggcgtctgctgagggatgagggatccatttctgggygcacatgtatctagccatggtagcacaggccgggaagctctgtgctggaaattctgagtttgtgtgtgtgtgtgtgtgtgtgtgtgtgagtgtgtgtgttacctttcttccttctctttactctccttttctgccttctgtcgagcacagcctgcctgtgacctcacagcaataagttaggccagtggttttcaaagtgcagttcccagaatagtaacagcagcatcacctggttcctgttagaaatgcaaattctcaggccccaccctagacctactgaatcagaaactctgggggtggggcccagagctctgtgtttgacgagccctccctggtgatcctgatgctgtctacacagaatagaaatactgtgataataacaccacaacactggctttcactgagtgctt

SEQ ID NO: 73271 - DNA, 971 bp, Homo sapiens
tccatctcaaaaaaaaaaaaaaaagtaaaaagaaactggtaaaatccctttagtagcatattaaatatatgtaaaatattgacatttcaacatgtaatcaacagaaaacaaattaggagtgagtttcttgtttttgttctaaattttagcaatctggcatatatcttaaacttatgggccatctcaaattggagtagctgcatgttcctagtggctgcagtactggacagtgcaattcaccaaattttttaggtcagagtacatctaggaaatgaccatacttgtatggtgtcccagggtaaatagtcgagcctgttaggggccagaggcaacaggccagatgccccaagttcccatcgccccactttcttcactgttccaaaagaaaccccccttaagggctggacattcagaggctttatgcatattaggaaaaggcatcctgtctggggatttcagtcccactgctcttgaagctgaagctggatgccctcgttttgtgcacagcgtgtacaactaccttcaggcgtctgctgagggatgagggatccatttctgggtgcacatgtatctagccatggtagcacaggccgggaagctctgtgctggaaattctgagtttgtgtgtgtgtgtgtgtgtgtgtgtgtgwgtgtgtgtgttacctttcttccttctctttactctccttttctgccttctgtcgagcacagcctgcctgtgacctcacagcaataagttaggccagtggttttcaaagtgcagttcccagaatagtaacagcagcatcacctggttcctgttagaaatgcaaattctcaggccccaccctagacctactgaatcagaaactctgggggtggggcccagagctctgtgtttgacgagccctccctggtgatcctgatgctgtctacacagaatagaaatactgtgataataacaccacaacactggctttcactgagtgctt

SEQ ID NO: 73272 - DNA, 552 bp, Homo sapiens
ttctcaactgtgaaatggagatctaatccctgccttttctacctcaaatgtctactgtgaggatgaaataaacataacatttaaaagtgctttgtaagctatacagccttaaacagctgcaaaattgtttggataagcaagatagccatggtggaggtgccattctatgtgcgatttcctagtttgaattctcaattaaacttaaaggacctgcagatattgtatttattgtcatacagtgcaagagtgaaccaactagtcagtawgtattgattcttactatgtgttcagtgctattttatggtaaatacaaaaagatgcttcaattcctgccttcaagggcttacagtttagctgaaggaaaaactagattacacacgaaacaattggagtgcaatttacagctgatcatagactagaagattcccttacgaagtgtattctgggggtaatgaaatcctcttgggtacaaactgtttttagaaaagtctgaaggaaataacaaagaggaagagagctagatgaagtttcagaaactagagagacaagaca

SEQ ID NO: 73273 - DNA, 714 bp, Homo sapiens
ggagctggaaaccattattctaagtgaactaacacaaaaactgaaaaccacacatcacatgttctcagttacaagtaagagctaaacatgagtacacatggacaaaaaagaagggcacagtggacaccagggcctgcaacaggctggaaactggaaggagggtaaggattgaaaaactgctttttgtgtactatgcttattatctgggtaatgaaataatatacacatcaaatcctcgtgacacataatttatcyatagaaccaacctgtacatgtaccccagaaactaaaagttgaaaataaataaataaataaaatgctatttttgcaatgaagctttccctaaccattctatttccagcctatcagtcctctagtcaattattaaaagtaacagcaaaaaccgcaattactttggcaccaacctaataacattctatctaatgattttaatacggtactcatatttttttcataaactgttcttgcataaggcataaaattaaggttcaataataagtgctgctttgacatcctgtgaaaccaggagggttttgaatggcctcatttcaagttccttctcccattctgcttccatggataaggccttgtcaccaaattttttgttgttgttgttgttgagacggagtctcgtcctgttgcccaggctggagtgcaatgacatgatctcagctcactgcaacctccgcctcc

SEQ ID NO: 73274 - DNA, 651 bp, Homo sapiens
tccaaggattctctaagcatctacaagtactctgttaatgtcttttttacacaatggggcacatggtccacactattctgaatcttaaccttcttaaaaaatcttaaaaacccatcttagcacttgtttcaaatcagaacatgtcactttgtctctcattctttttaacagctgtatagtatcccactggaggttcctcatgtgatttatttgatcagtgaccaactggtgggtgtttttactgtatagtcttttttgctgtgtccagaattctgggctgggtgtggtggcccacacytgtaatcccagcactttgtgaggctgaggtgggtggatcacctgaggtcaggagttgaagaccagcctgactaatatggtaaaaccccgtctctactaaaaatacaaaaattagctgcgagtggtgatgtacacctgtaatcccagctactcaggaggctgagacaggagagtcgttcgaacctgggaggctgaggttgcagtgagccgagatcatgccactgcactccagcctgggggacagagcaagactctgtctcaaaaaaaaaaaaaaaaagaattctgcaatacattttatgttcatatgtctgtgtatatgtatgagtatatgtaatggatacattcgtagaagtg

SEQ ID NO: 73275 - DNA, 651 bp, Homo sapiens
tccaaggattctctaagcatctacaagtactctgttaatgtcttttttacacaatggggcacatggtccacactattctgaatcttaaccttcttaaaaaatcttaaaaacccatcttagcacttgtttcaaatcagaacatgtcactttgtctctcattctttttaacagctgtatagtatcccactggaggttcctcatgtgatttatttgatcagtgaccaactggtgggtgtttttactgtatagtcttttttgctgtgtccagaattctgggctgggtgtggtggcccacacttgtaatcccagcactttgtgaggctgaggtgggtggatcacctgaggtcaggagttgaagaccagcctgactaatatggtaaaaccccgtctctactaaaaatacaaaaattagctgcragtggtgatgtacacctgtaatcccagctactcaggaggctgagacaggagagtcgttcgaacctgggaggctgaggttgcagtgagccgagatcatgccactgcactccagcctgggggacagagcaagactctgtctcaaaaaaaaaaaaaaaaagaattctgcaatacattttatgttcatatgtctgtgtatatgtatgagtatatgtaatggatacattcgtagaagtg

SEQ ID NO: 73276 - DNA, 752 bp, Homo sapiens
acctctcgggtgaggactttaaaaagcgcggggtgggaggagtcaacaaacggttgtgaacgggaaaactacgcgatacaaactgtatacattgccctatagcaaaaagaccgaggacagggcagcctcagggcgactttaaacccaaaaggaagtgacttccggactcctaggggaatgtctccatttgctcttgttgaaggaagaagggcgagaatttccaggtctgtggagaccccacatcccaggtacagaattgccggggacctggaggcacagcctcaatacaacacagagyaaaactcaccgccgcagtgtgacttccagtccacgcgatccgcttcctggtccgggcgaatctacaagcacaggacagaagccaggcctccgtggagccaacgaggtgggcggggcctgggcgaggtaggggcggggcctgggcgaggtaggggcggggcgccaggcggagagacctgccctgtagaaccggcagacgcggggcgggggcggatctgtgcttctctcagccgcgtacctagccgctgtttttcgggttttggtgagggaagagacagaccctctcatattgttttatattgttttatactcagtacctgttttaagaaaaaaaacaacaaggaagtaaaaccgaagacaggcagccctgcgccacgcccaaaaccaggcctgggcctgcctggcctaaacccaatagttaaaaatcaactcataacttagaaaccaatgttttt

SEQ ID NO: 73277 - DNA, 525 bp, Homo sapiens
tcccttcttgacaaaggatcttcttcactctggaggtgccacccatgagaacaaagagctctggagagatgtggattcctgaagagctgcaggggaactgggagagggttttctgacagaacaatcttacctcaagaagtcagttaggcatggctgtaatatttcttttcactcccaggtaataccaaattgtaagtgcactaggacataaagaatacttttgtccatggaaaaatgaggtgggaattctaaacaaagcaagttttaaaactgtgtttcayttcaagtgtacaagtcccatcgcgtgtaatcataggactcggcagcttttgaaggtacagaggccacacaagaaccagcttagctgagcatcatttaaggccctcatttggaattgtccctgtgggtaataagttacattcactcttcactaatttacagtcagggcccatttgctattacaaatacggaacctctgacacttagaatattagatgggggccccactgggtggggatgaaggtg

SEQ ID NO: 73278 - DNA, 525 bp, Homo sapiens
tcccttcttgacaaaggatcttcttcactctggaggtgccacccatgagaacaaagagctctggagagatgtggattcctgaagagctgcaggggaactgggagagggttttctgacagaacaatcttacctcaagaagtcagttaggcatggctgtaatatttcttttcactcccaggtaataccaaattgtaagtgcactaggacataaagaatacttttgtccatggaaaaatgaggtgggaattctaaacaaagcaagttttaaaactgtgtttcacttcaagtgtacaagtcccatcgcgtgyaatcataggactcggcagcttttgaaggtacagaggccacacaagaaccagcttagctgagcatcatttaaggccctcatttggaattgtccctgtgggtaataagttacattcactcttcactaatttacagtcagggcccatttgctattacaaatacggaacctctgacacttagaatattagatgggggccccactgggtggggatgaaggtg

SEQ ID NO: 73279 - DNA, 546 bp, Homo sapiens
aaaccccgtctctaccaaaaatacaaaaattagccaggcatggtggcacacgcctgtaatcccagctactcaggaggctgaggcaggacaatcccttgaacccgggaggcggaggttgcagtgagccgagatcgtaccattgcactccagcctgggtgacagaatggaatgagactctgtctcaaaaaaaaaaaaaaaaaaaaagaagaagccctagatttcggttgtgttggttgtaaaaggagagacccagtaagtgggggtcgtgccgcagattgctacccacaatggacgggtcactgagcaggtccggcyaactgggcgttccctcgctggagggccagcacaccagactgcaggtggcgcgggtcagcaaggtaccaggggatgtgtcacacacacagcccacccccgtccagtcacgcacggacaccctgggcttccgagcaaacctgctcccaggtggtgtgaccacatggagccacagacacccagcaaggacacgcagcccgcacacccccggcactccagacacagtgacctgca

SEQ ID NO: 73280 - DNA, 605 bp, Homo sapiens
aagtttccagacttgagcatcttttagatctggctgacatgctactactgttacagaaaagttcctcacgatagtctcaaaagttaagtatatgcrgtttccttttgcaggggcctgggatgtgagctaatctttaagtaaaagagagaagggacagtgattaacattctccaaactcaccgagggacagctgttccaaacccttccttcctgctcaaagtagttttcaagaggaacctaagaaaaaaaaattttttttaaaagaagaatatggagttcttccaagattgctcaattttctttctctaaagtaaaatagttcaaaccacgtgccaatccaaatgcactttctgtattcggccccactggaaatgtggaccataagataagatgcacagcttctggaatattgtttttcagatctggccaggaaaaaaaaagccacaatttcagctgctttgatttcccctcatgctttttaaagacaaatgcaaaggatatttcagggaacatgagcttctgtgagcccctgtcatctcactgccccattgaatagctttctttggcaggattacagatctgaggtggtgattattgttttggtg

SEQ ID NO: 73281 - DNA, 605 bp, Homo sapiens
aagtttccagacttgagcatcttttagatctggctgacatgctactactgttacagaaaagttcctcacgatagtctcaaaagttaagtatatgcggtttccttttgcaggggcctgggatgtgagctaatctttaagtaaaagagagaagggacagtgattaacattctccaaactcaccgagggacagctgttccaaacccttccttcctgctcaaagtagttttcaagaggaacctaagaaaaaaaaattttttttwaaagaagaatatggagttcttccaagattgctcaattttctttctctaaagtaaaatagttcaaaccacgtgccaatccaaatgcactttctgtattcggccccactggaaatgtggaccataagataagatgcacagcttctggaatattgtttttcagatctggccaggaaaaaaaaagccacaatttcagctgctttgatttcccctcatgctttttaaagacaaatgcaaaggatatttcagggaacatgagcttctgtgagcccctgtcatctcactgccccattgaatagctttctttggcaggattacagatctgaggtggtgattattgttttggtg

SEQ ID NO: 73282 - DNA, 603 bp, Homo sapiens
ctcgctatgttgctgaggctggtctcaaactcctggcctcaagcaatcctcccaccttaacctcccaaagcactgggattacaggcatgaaccactgtgcccggcaagaaaagagatatttataccaaatctaatggaaaacttcgggccctacttaggtctcatgcctattgttgtccagaggaccctgtactctgcttcagttggcctggaccaagtgaccaggtggacagggatgtgtgagcaccatgagctgtgatcccacaagggctgcagagaggggaggagttagttctctaagaacagctgctgggagacaaaaacaaaaaacatggccacgatgagatcacattggaacactcaggcagagatgtgcaatgggaagwttagatggttctggaattcaacccctcttaacacagaatgacattcagagctgatgagcagggaatgaggcctccgtcacttcctgaaggtatccaggggctcatttttatctccagcttctaaaaggaaccaggcctttcaccttcttcccttgaacacccacccacccagccctggatggcagagacaagcatataataatggtcttctcttcag

SEQ ID NO: 73283 - DNA, 860 bp, Homo sapiens
ggatccagtttcagctttctacatatggctagccaattttcccagcaccatttattaaatagggaatcctttccccatttcttgtttttgtcaggtttgtcaaagatcagatagttgtagatatgcggcgttatttctgagggctctgttctgttccattgatctatatctctgttttggtaccagtaccatgctgttttggttactgtagccttgtagtatagtttgaagtcaggtagtgtgatgcctgcagctttgttcttttggcttaggattgacttggcaatgygggctcttttttggtgccatatgaactttaaagtagttttttccaattctgtgaagaaagtcattggtagcttgatggggatggcattgaatctgtaaattaccttgggcagtatggccattttcacgatattgattcttcctacccatgagcatggaatattcttccatttgtttgtatcctcttttatttccttgggcagtggtttatagttctccttgaagaggtccttcacatcccttgtaagctggattcctaagtatttattctctttgaagcaattgtgaatgggagttcactcatgatttggctctctaacatcaaatttgtagattaatctgaggaaaaataacacttttaaactactgagtctttctgttcaaaactaaactagtttttcaagtcttttatgttctgcagtagttttatactctttttcttatagaaactatgcatttcttgttaaactctcctggaatgttttgtagttcttgtttcaattattgatatattttactactatgtgctataagaaaatacaaagctatttttgtatattgaatttgggtcc

SEQ ID NO: 73284 - DNA, 1087 bp, Homo sapiens
tgcatgcaattcctaaatttgtgtgataatacactgtgtgatagtaagcttctactctgccattggtaaaccaacatccagggagaatttcagtaatgggtgtggctgggagaatcacgactgtggttcgtgtcctccaccagtggcagtgccattggctggcttcgactcacactcgctgcaacaattgcaagggaataggccccgaaggacgggcttggcaagcctgtgccgtgagccccgggagaccaggcaggaggaggcacgaagctcctgagtgtcaggggagacaagaaaggtggatgtcagggcaggaggtcaaggcgaawcctctcagctcagggggaagagcacgagctcagggctggcagcaggatgggggatgatgggagcggtgaaggagaggcgccttcctgcagacaaacagcaggggaaaggacaggaagggagggggtggagagaaggtgagtagcgtagtgaataatacaaccggcatgggttggagtcaccagcaaggccccagagcctgcctgcacacagcagccctgctaacacccctatggccagagaaagcaggaccacctttgttataaagagggatgaagaggaaggagcaaaggcgagagggcctggtataagtgctttccagcggcgtcattcacggcagaagaccctcccaccacagagctctgggcgcctgtctttctccacttgtgaaggatggattttcctccaagtcaaaagacactgctggtagttgactttttaaatgcctgtgctatgaatgtgccaggagtaagtcatgcagttacactgttttatgagcctctacatttgtgaaaacttgatgctgcctgaaacgtcttgctctccccgctacccgagacacaagtgtcacatgtccctttcatgtccactccctgccctcccttcatgtattcagacccctcctgtgcataagaatagactttctcctcgtgcttgcgggaatgggcttcgtgagttaccaaattggatattttgcttgaacggaaaaggtgtttgtcactttttctgcaaatagtgcatgaaaatctttcataaatga

SEQ ID NO: 73285 - DNA, 665 bp, Homo sapiens
tgacacactcaggttacaagtctattctatttcaaaagtaaaaattgttaatttttgattttgtttagagaacacccatctctgggtttcctagttttatttctttcctctatttgtgttacatttggagagagatccaaattttgtggggcccaacgcttacacagcttgagggtctgcttgatgaaaaacatagaaaataacaatacgacattaggtatagaattgaatctttataaactwtgaggctggaaaggggcgggtgcaagtacgggccttgaagcttgagccttatcagcctcctggtatgtctgtgtctaaccacatttgattccatttctctcccctttgtgtaggagggtgatagccaggagccagagccttgctctgaggggagagggaggaacccttctcctgggctctccagtttgttctctactgtgcagttggggcagagtgtcctgcggatggagcaggcagctctgctcttcagcatcaccttggggagggtgactggggaaggcttggccaggctgcttggcagagtcatcctcttgaccatgagatgagtgagatactcatgcagaggccttggcacatgtcaaatgtttccctcagccctttgattgacccctcagtggagtgtattggtaaaaactacaggg

SEQ ID NO: 73286 - DNA, 624 bp, Homo sapiens
catcatatatgatggtttgcctgagaggtggctccacttccatgtctgtcccttctacttgttcagagtggatgggtcagagcacttcctgtagtgcctgacttaaaagactggtggacaagacatctctttttagtagacaggtgcgccatttctgcaaggtgtgttttgtgccacaccagaagtgggcttggctaggaggtcttttattcatccttttatagtacaagcaatctttastgtgatgatctgcctcatatgatggcctctgctcattgcaatggcttatacatggccaacagctgttgctctaagactgtacaatgagattctaccccttccataattgaggccaaaaccatataggtaccattcctattggttatttttgccacaaacaacaactgatgcctatggcatctctagagacttttaatacaaaagggtgttatagcagtgtggcccctagattgtgtgggtgattttagaatgtgcccctggcaagcagtattgttcgcattcattacctgcctgggccacagcaagtgtacaggcacccattggcccatccctttttttgttctttgattacattatggcctcagtccttccttttatccagct

SEQ ID NO: 73287 - DNA, 1073 bp, Homo sapiens
tctatcagagaagctctaggrgacctcaaaaccaggaaatgatttcctaggaaatgctttaggagggatagcttccgaggtgggtttagaagtatggaaaatattttgcacaccacatgccctgggtgggtagtgtttaactggagatgtcaaaaccttgaaagtctgtgagacaagtttggacaagagtcaggagctgttctgtctggtcagaaagcagagacgggatagtggaagagcaagagatactcagggagagacaggctgagacctattctggaaaggcataagaagtaggctcagtttctgggctttcttcttaaaactaccaatgtttctcactaagaatgaagtgatcagagcagggctgagcctttgggcagccatttaagtgagtctggagagtgagaggtaggaaggcctatgaactagtggttccccaaacccaggtgaagatacacttagtataactgagctagactgggttgaaaagagggatgagggtttcaaatgccagacttagtgcatagaagctgtttgttgcccaaagaaggattgttaagggtttttggatctgccttactatagagtgcatgacccaaaatggcactgaagtgtcaacacttgtcaaggtaagatgctcagagagcactagctgtattccagtttggggtaaacaccttttaagcctccactgaatgtcacaagggtattaaagaatgtatcacagaccctggccttgacaacaaatgccaattttagcattttcactgtatcttctttagtcatgactagttatgtaccaaagagatgtggattgcaggtacatgtttctagtctaaaacaattggttgtgcagcactggtagaaggaataactagtagcgtttcctttgaagacttttttttcccattgtgagtctgaaagagaatatgatgaaaccaaataggatgcaaagatgggctttccattcatctgtaaactgttgcagtcaatattaattgccatcatttactataattaatcaattaaatcattaatttaatctcttgattcattggcaacaaaatgca

SEQ ID NO: 73288 - DNA, 782 bp, Homo sapiens
atgcacaagacaggagtaagctgtcaagaagcaatgagctgaagatcaaaaagacactaattatgacagggaacaggtgactgcacttcgaagaaaactcaaggcctcagattttctcattagccatttcttgtcaaagcattcaaggaagacatacccaacaagtgacgtactgacaagagagaagacatagcccatttgctttgtcattccattccaagatggcttaataaagtcaatccagattggggaaagatggctactagttttcattaatagaaataaaatgtgtatatccatatacacatttatatatgtacacatatttgtggataatatatattacaaataaatatacaatatatattacaaatacgtwtgttatatatattgcatatatatatagataataagacagctttaaagagggatataatctttgtaatgtgtttcacttgaagcctattttgggactagtgatggtagaagacatgctgttctttattgtatttataaccatgctgagcttgcaaagagaaaacagactaaactcattagatgaatgtagccaggcagttaaatgtaaacataagggaaatgatttatatggaagtcttcagcatttattctctctcctggagtttatttgaaaacaaaataaaacaaagcaaaaacccagcactacagatttagaaaccatttccttttacctcaagttgaagtaaaagtaagtgccaaattattttggtaaggccacgggtgacagttacagtcataagttt

SEQ ID NO: 73289 - DNA, 782 bp, Homo sapiens
atgcacaagacaggagtaagctgtcaagaagcaatgagctgaagatcaaaaagacactaattatgacagggaacaggtgactgcacttcgaagaaaactcaaggcctcagattttctcattagccatttcttgtcaaagcattcaaggaagacatacccaacaagtgacgtactgacaagagagaagacatagcccatttgctttgtcattccattccaagatggcttaataaagtcaatccagattggggaaagatggctactagttttcattaatagaaataaaatgtgtatatccatatacacatttatatatgtacacatatttgtggataatatatattacaaataaatatacaatatatattacaaatacgtttgttatatatattgcatatatatatagataataagacagctttaargagggatataatctttgtaatgtgtttcacttgaagcctattttgggactagtgatggtagaagacatgctgttctttattgtatttataaccatgctgagcttgcaaagagaaaacagactaaactcattagatgaatgtagccaggcagttaaatgtaaacataagggaaatgatttatatggaagtcttcagcatttattctctctcctggagtttatttgaaaacaaaataaaacaaagcaaaaacccagcactacagatttagaaaccatttccttttacctcaagttgaagtaaaagtaagtgccaaattattttggtaaggccacgggtgacagttacagtcataagttt

SEQ ID NO: 73290 - DNA, 757 bp, Homo sapiens
ttgccaaacagggacactcacataagcttcaaagtttagagtttttattgaggcttcactacatagatatgattgattgattrcccacacagtaaaactcagtatctaagttaactgagaatgtgtgacctcaagcccccagcctaaatcacatggctggtcttcctggcctggagagtccccacccaagcaaagacacttctaaccaagtatgacataaggtacctcccagaagctgagaggaaaggccagccgtctctcatggcaagaacaaatttcttactataccagtagcaaacattttagtttataatgtgaaaaacttgaaatacctgtacattattattgaattttattattataaagtagaatgcacaattataatgccttttaagaataaaatacaaggtattaaagacatttcgaggtaggttccgggggcatctctgcttggagtactgtggaacattttgtgaaacacaatcttggtctaaagcagaggttggcaaacaatgcctgtggaccaaattcagcctttgtctgcttttgtaaataaagttgtatttattatgaagtacagtcacactcattttttaatgtatcatccatagctgtttttgatacagtggcagagttcggtaattctggcaagaccgtatgtccccaagaagtccaaaatattcactattgggtcattttctgtaaagacagaaaatattcgccagcccctggtataatagattgtacaatgtagaaa

SEQ ID NO: 73291 - DNA, 757 bp, Homo sapiens
ttgccaaacagggacactcacataagcttcaaagtttagagtttttattgaggcttcactacatagatatgattgattgattgcccacacagtaaaactcagtatctaagttaactgagaatgtgtgacctcaagcccccagcctaaatcacatggctggtcttcctggcctggagagtccccacccaagcaaagacacttctaaccaagtatgacataaggtacctcccagaagctgagaggaaaggccagccgtctctcatggcaagaacaaatttcttactataccagtagcaaacattttagtttataatgtgaaaaacttgaaatayctgtacattattattgaattttattattataaagtagaatgcacaattataatgccttttaagaataaaatacaaggtattaaagacatttcgaggtaggttccgggggcatctctgcttggagtactgtggaacattttgtgaaacacaatcttggtctaaagcagaggttggcaaacaatgcctgtggaccaaattcagcctttgtctgcttttgtaaataaagttgtatttattatgaagtacagtcacactcattttttaatgtatcatccatagctgtttttgatacagtggcagagttcggtaattctggcaagaccgtatgtccccaagaagtccaaaatattcactattgggtcattttctgtaaagacagaaaatattcgccagcccctggtataatagattgtacaatgtagaaa

SEQ ID NO: 73292 - DNA, 1137 bp, Homo sapiens
aaattccttttcaaacaaaaatattacatttacaaaagagtctgaggcaggagaatggtgtgaacccgggagtggagcttgcactccagcttgggggacagagtgagactctgtctcaaaaaaaccaaaaagttgaccacttgaccatatggtgagtcaaagcaaatatcaacaaatttcaaaatactgaaagaattagaaatatgtaattttattttggtggaaataacctagatatcagtacaaaaaaataaactagaaaatcccaaactgcttgaaatttaagccacrtactaataaataaacaagaactcaaaaaagaaatggtggaaagtaggagatattttaaggtaagtaataacgaaggtgcaacattttacaacaaattataattccatgaaagaatgctgataaatctcacaagcattatgatgaaagaaggcagacacatacaaaagtacaccttgttattccatttatataaagataaaacttcataaacaggctcaactaacctctgacgttagaattcagaatgattctttcctggaaagagggtagtgggggtgactggaagaagttatgtggtggctactggtgtactagtaacattatctctcttgatttaggtgcaggatgtgcttcttttgtaaaaatttcgtctatacatttataatttgtgcatcttaaaaacgtgtgttttacttcaattaaaagtttgctttaaaaaaagcacaatcaacatcaaggctgttaatgtagtgtcattgtatgcattcttatatttaaatatcatcaatgtttttggttaggtttgaaggaaaggagctaaaaatgccacagccagtagacgttagtcctcagattaaagaaataattgtttcaattgcttccctaaatagaggcatataattctggatcctccctcaaaagcagttattcgggttttttttcttctttttttgtacggataacctctgaaatataccttcattgtcaaatagaacagatgcaagtgtatatactgaattagcatgattttcactgagacacaaatgtgaaaaactctttttgtttctatcacaaaacatttaaaaatgtatttccttaaacttatacaaaggagatctaaacaac

SEQ ID NO: 73293 - DNA, 1137 bp, Homo sapiens
aaattccttttcaaacaaaaatattacatttacaaaagagtctgaggcaggagaatggtgtgaacccgggagtggagcttgcactccagcttgggggacagagtgagactctgtctcaaaaaaaccaaaaagttgaccacttgaccatatggtgagtcaaagcaaatatcaacaaatttcaaaatactgaaagaattagaaatatgtaattttattttggtggaaataacctagatatcagtacaaaaaaataaactagaaaatcccaaactgcttgaaatttaagccacatactaataaataaacaagaactcaaaaaagaaatggtggaaagtaggagatattttaaggtaagtaataacgaaggtgcaacattttacaacaaattataattccatgaaagaatgctgataaatctcacaagcattatgatgaaagaaggcagacacatacaaaagtacaccttgttattccatttatataaagataaaacttcataaacaggctcaactaacctctgacgttagaattcagaatgattctttcctggaaagagggtagtgggggtgactggaagaarttatgtggtggctactggtgtactagtaacattatctctcttgatttaggtgcaggatgtgcttcttttgtaaaaatttcgtctatacatttataatttgtgcatcttaaaaacgtgtgttttacttcaattaaaagtttgctttaaaaaaagcacaatcaacatcaaggctgttaatgtagtgtcattgtatgcattcttatatttaaatatcatcaatgtttttggttaggtttgaaggaaaggagctaaaaatgccacagccagtagacgttagtcctcagattaaagaaataattgtttcaattgcttccctaaatagaggcatataattctggatcctccctcaaaagcagttattcgggttttttttcttctttttttgtacggataacctctgaaatataccttcattgtcaaatagaacagatgcaagtgtatatactgaattagcatgattttcactgagacacaaatgtgaaaaactctttttgtttctatcacaaaacatttaaaaatgtatttccttaaacttatacaaaggagatctaaacaac

SEQ ID NO: 73294 - DNA, 1137 bp, Homo sapiens
aaattccttttcaaacaaaaatattacatttacaaaagagtctgaggcaggagaatggtgtgaacccgggagtggagcttgcactccagcttgggggacagagtgagactctgtctcaaaaaaaccaaaaagttgaccacttgaccatatggtgagtcaaagcaaatatcaacaaatttcaaaatactgaaagaattagaaatatgtaattttattttggtggaaataacctagatatcagtacaaaaaaataaactagaaaatcccaaactgcttgaaatttaagccacatactaataaataaacaagaactcaaaaaagaaatggtggaaagtaggagatattttaaggtaagtaataacgaaggtgcaacattttacaacaaattataattccatgaaagaatgctgataaatctcacaagcattatgatgaaagaaggcagacacatacaaaagtacaccttgttattccatttatataaagataaaacttcataaacaggctcaactaacctctgacgttagaattcagaatgattctttcctggaaagagggtagtgggggtgactggaagaagttatgtggtggctactggtgtactagtaacattatctctcttgatttaggtgcaggatgtgcttcttttgtaaaaatttcgtctatacatttakaatttgtgcatcttaaaaacgtgtgttttacttcaattaaaagtttgctttaaaaaaagcacaatcaacatcaaggctgttaatgtagtgtcattgtatgcattcttatatttaaatatcatcaatgtttttggttaggtttgaaggaaaggagctaaaaatgccacagccagtagacgttagtcctcagattaaagaaataattgtttcaattgcttccctaaatagaggcatataattctggatcctccctcaaaagcagttattcgggttttttttcttctttttttgtacggataacctctgaaatataccttcattgtcaaatagaacagatgcaagtgtatatactgaattagcatgattttcactgagacacaaatgtgaaaaactctttttgtttctatcacaaaacatttaaaaatgtatttccttaaacttatacaaaggagatctaaacaac

SEQ ID NO: 73295 - DNA, 1313 bp, Homo sapiens
gcatgtgtggttgtgtctgccactttgcacacaagtgtggttgtgtgtgcatgtgccacaaggtrcgtcggcatgtgcatgactctgggggtttgtggctgtgagtgtgtggttgtgtgaggctgtgtgtgcagcagtgttaattgaacacacaagtacaggatggagtgagaaagtgtgactgtgtgtgtgtggctgtgtatgattgtgtgtggctgagtgcatggcttttgtgagcaggcagtgtgtgtgtgatcctgtctgctgtctgcctgaaaagatgagactgtctcctatatctgtggcatgagactgcacagatatgaaggacagcccgtgcagtcccaagctaagtgaattacatctctctctctctatatatatatccatctatctgtctgtctgtctgtctctgtctatccatccatccatccatccacccacccacccacctatccatccacccacccacctatctatctatctatctatctatctatctatctatctatctatctatctatctatttttttgagatggagttttgctttgtcacccaggctggagtacagtggcacgatcttggctcactgcaacctccaccccacaggttcaagcgattctcctgcctcagcctccctgtagctgggattacaggtgcccgccaccacgcccagctaattttcatatttttagtagagacagggtttcacatactggccaggctgttctcaaactcctgacctcaggtgatctgcccgcctcagcctcccaaattgctgggattacaggcttgagtcactgcatctagccatgccatctatattttcttgtatagatgtgagtgtgtgtgcccgagcaagtgaatgacatctatattttcctgtacagctgtgagtgtcactgggtaaccgcgtgggatccttgtgggctggctgtgtgtctctgtgtgtgagaccccatagaaccctcgtggctggtcccacatgtctcatcagagaaaggagggcaggatacctaggtacttactgtaagccctgcaatctctgctttcctcctctgcccccatatcaagcagaagaggcagccttgggctcaaggagagagacagggagatctagagggagatcagctgcacacacactgtcccgcccagttgcacacacagtccccaccatgggtaccccagcacttcaccctcacgccgacacaagtcacacacgatcacccactcataccaacacccagcctcccctctgccctgatcatccgccctgtggaccccctgaagccatcactcagacataccaag

SEQ ID NO: 73296 - DNA, 1313 bp, Homo sapiens
gcatgtgtggttgtgtctgccactttgcacacaagtgtggttgtgtgtgcatgtgccacaaggtgcgtcggcatgtgcatgactctgggggtttgtggctgtgagtgtgtggttgtgtgaggctgtgtgtgcagcagtgttaattgaacacacaagtacaggatggagtgagaaagtgtgactgtgtgtgtgtggctgtgtatgattgtgtgtggctgagtgcatggcttttgtgagcaggcagtgtgtgtgtgatcctgtctgctgtctgcctgaaaagatgagactgtcycctatatctgtggcatgagactgcacagatatgaaggacagcccgtgcagtcccaagctaagtgaattacatctctctctctctatatatatatccatctatctgtctgtctgtctgtctctgtctatccatccatccatccatccacccacccacccacctatccatccacccacccacctatctatctatctatctatctatctatctatctatctatctatctatctatctatttttttgagatggagttttgctttgtcacccaggctggagtacagtggcacgatcttggctcactgcaacctccaccccacaggttcaagcgattctcctgcctcagcctccctgtagctgggattacaggtgcccgccaccacgcccagctaattttcatatttttagtagagacagggtttcacatactggccaggctgttctcaaactcctgacctcaggtgatctgcccgcctcagcctcccaaattgctgggattacaggcttgagtcactgcatctagccatgccatctatattttcttgtatagatgtgagtgtgtgtgcccgagcaagtgaatgacatctatattttcctgtacagctgtgagtgtcactgggtaaccgcgtgggatccttgtgggctggctgtgtgtctctgtgtgtgagaccccatagaaccctcgtggctggtcccacatgtctcatcagagaaaggagggcaggatacctaggtacttactgtaagccctgcaatctctgctttcctcctctgcccccatatcaagcagaagaggcagccttgggctcaaggagagagacagggagatctagagggagatcagctgcacacacactgtcccgcccagttgcacacacagtccccaccatgggtaccccagcacttcaccctcacgccgacacaagtcacacacgatcacccactcataccaacacccagcctcccctctgccctgatcatccgccctgtggaccccctgaagccatcactcagacataccaag

SEQ ID NO: 73297 - DNA, 1313 bp, Homo sapiens
gcatgtgtggttgtgtctgccactttgcacacaagtgtggttgtgtgtgcatgtgccacaaggtgcgtcggcatgtgcatgactctgggggtttgtggctgtgagtgtgtggttgtgtgaggctgtgtgtgcagcagtgttaattgaacacacaagtacaggatggagtgagaaagtgtgactgtgtgtgtgtggctgtgtatgattgtgtgtggctgagtgcatggcttttgtgagcaggcagtgtgtgtgtgatcctgtctgctgtctgcctgaaaagatgagactgtctcctatatctgtggcatgagactgcacagatatgaaggacagcccgtgcagtcccaagctaagtgaattacatctctctctctctatatatatatccatctatctgtctrtctgtctgtctctgtctatccatccatccatccatccacccacccacccacctatccatccacccacccacctatctatctatctatctatctatctatctatctatctatctatctatctatctatttttttgagatggagttttgctttgtcacccaggctggagtacagtggcacgatcttggctcactgcaacctccaccccacaggttcaagcgattctcctgcctcagcctccctgtagctgggattacaggtgcccgccaccacgcccagctaattttcatatttttagtagagacagggtttcacatactggccaggctgttctcaaactcctgacctcaggtgatctgcccgcctcagcctcccaaattgctgggattacaggcttgagtcactgcatctagccatgccatctatattttcttgtatagatgtgagtgtgtgtgcccgagcaagtgaatgacatctatattttcctgtacagctgtgagtgtcactgggtaaccgcgtgggatccttgtgggctggctgtgtgtctctgtgtgtgagaccccatagaaccctcgtggctggtcccacatgtctcatcagagaaaggagggcaggatacctaggtacttactgtaagccctgcaatctctgctttcctcctctgcccccatatcaagcagaagaggcagccttgggctcaaggagagagacagggagatctagagggagatcagctgcacacacactgtcccgcccagttgcacacacagtccccaccatgggtaccccagcacttcaccctcacgccgacacaagtcacacacgatcacccactcataccaacacccagcctcccctctgccctgatcatccgccctgtggaccccctgaagccatcactcagacataccaag

SEQ ID NO: 73298 - DNA, 547 bp, Homo sapiens
acttgaatccgggaggcagaggttgcagtgagccgagatcgtgccactgcactccagcctgggtgaaagagtgagactccatctcaaaaacaaaaacaaaaacaaagcaaacaaacaaacaaacaaatgcagagacagacagagacacaataaacagttacacagagaccacagccattgatacaaacagaataacagagaaatagacccagatagatggaaacacagcacagacatagctcaagtaataaccagatatagttatagccaagacccggccacatgcagagagagacacagctggactcacatgacagccagatactcatgacagcccgacacactcmagccgtgctgcagactatgaaagacacaggggctggaggcagtggctcagtaatcccagcaccttgggaggctgaggtaggattgtttgaggccaggagttaaagatcagcctgagcaatataacaagaccccatctttacaaaaattaaaactttagccaggtgcagtagtcccagctattctgtaggctgaggcggga

SEQ ID NO: 73299 - DNA, 3475 bp, Homo sapiens
ttttattgtgagtgtttcccataggtttttggttttgctatctagtttgtctgttttttattagtggcatattcaaaatgatgcccctaacactgttgccatcttctcaaagacatcccaggaagaacttcaatattgacaatttaacatccttaaggaatgcgttgtaacaaccaaactggaggagaaaaagtatgtaaacagtagtttgcatagagtgtcttgtgctgattatgacactgtagcaggtcttgttgatggcttcccatatctgctcagcccacccgagctcaacctcaggaggcagttgtaatctcaagcacctacatctctcttcttctttaccagggactttccctggtaccatcaaagcttgccagcctgccttgtacttcctgagatcactcccaaacaagctgcctgaacccatgtgcttgtctcttgcctccttttgggggaacaagccaaggtagacaccaagttgtgttccaatagcctggcctgattcaagcatctctcatgtagtgtaatgatatggtttggctctgtgttcccacccaaatctcatgtcgaattgtaatccccactgtcggaggatgggcctggtaggaggtgactggatcatgggggtggtttctaatggtttagtaccatccccctagtgctgttttgtgatagagttttcatgagatccggttgtttaaaagtgtgtaacacctccctcttctctctcttcctcctgctcccaccaagtaagatgtgcctgcttcttcttccaccgtaattgtcagtttcctgaggcctccccagaagcagaagcctgtacaccctgcagacctgtgagctgttaaacctcttttctttatgaattacccattctcaggtagttctttatagcaatgtgagaacagactaatacatgccatctggttatgattttcaaaaatggaataatgttagctttatatatatatataaatgtgtgtgagtgtgtgtatgcatatatgtgtgtgtatatgtgtacatataaaatatatattatatatgtgcatatatatatatagagagagagagagagaaagagagagagagagatagggtctcactctgtcatccaggatggagagcagtgatgcaatcatagctcactgcagcctcaaaatcttgggctctagcaatcctcccacctcaccctcctgagtagctggaactactacaccacaccygactaatttttgtactttttgtagagacagggtctcactatgttgcccaagctgatctcaaactcctggcctcaagtgattgtcccatcttggcctcccaaaattctgggattacaggtacaagccactgtacctggcagcttaatatttttgatgacctttggtgagaaatctgtttagtctacataaattaaatgcttatctttccttgtctacaccctatttaattccctccagaggccctgattgattagtggcctgccccagacattgtctttcctaaatgctaggtttgttttccagaattcagcaatcttaccttctaattgcaggttctattttttttttttcttttctgagcacggaagtgagattgctttatctgtaggtgtcagggtatcctctgtgtttaacaaaatacgtgttgaatcattgtctccttggtttttatgactgagagtcttattataagtgaggccatgccaggtgagactaggtcagggcaaatgcgacctttgatgcctgattcccagcgcagacaactcagccaccttgttcatggctccatcccagtctgccttgcactctagttaaagtctgtctgtccctgtctgtctatctgtctgtctatctgtcttccagccttcctccttgagggtgagctgcattacccctttgcactgcccaccgcctgccccccacaacctgtcccttgcagttcctcagcaagaccttggctggacagtctgtgcctgaaggcagatggcccagacaccagtaaagggagctgggctttgcctccgagcctgcctccagctagggcttgggcttgggcaccatcttagcacatctgtaactggggctgagctggcccatgctgtgtccccctgaatcttgggacaaggcaccaatgcaggaacaggcgtgaagggtgcactcatcagagcccaagacatcactgcaacaagaatgcatacaggaagctctctctgaggacagggacgggggacggagtgtgacaggttccacactgcgatattcatggctgcctccgtgccatagggccccttgcatgatgtcaaaagaggagacttgcatcgtcttgttgttttcaagctaactttaaacacaactgacagcaagatgtctctggcacgaaagccaacagggaggcgactgtctctctgtttccatagctacagacaggacgccactgggcagtgctttcaactccagggcatcccaggctctgcctgagggatgaagtttcctgggtgctgggagaacccagccacaaaatggcagttgctggtctcagtttctgccccaaccaccttctatttttggtgagagagtatcatttttccagatgtccaagggtgtccattcagaacacacttctgcagccaggaatctgggaaagccggagatgtctccataaaccttctgcaggccatgccatctgctgaccttgacaccttctctgcactggaggacggcttagcaaagctggaaagggggtgtcccctgggagcctggctggctggctgtcacttgctgagccagggacagaaggagttgacagtacattttagtattacctgcttccaatttggaaaaaattttgtgcatctcggtttttccagtttctccttcacctctgtggacctgtaaaataaggatttgagcacatccctccaaagctaacttgtaaatttcctgttgcactgatatggttgggctgcttccccactcaaaatctcattttgaattgtaatctccataatccacacgtgtcaatggcaggaccaggtggaggtaattggctcatgggggcagtttccccccatgctgttctcgtgatagtgagcgagtctcacgagatctgacagttttataagcctctgatatttcccctgcttgcactcactccatcctgccgccctgtgaagaggtgccttccaccatgattgtaagtttcctgaagcctaccccgctatgcggaactgggaattaattaaacctttttcctttataaattaccccatcttgggtatttcttcatagcagggtgagaacggactaatacatgcgtcttcccgcaggagagtggatggcagaggcttaccttcaggggcccaggtcgggtgctggacatggggctggcattccaggtctgctgctctcggatgtccctctgaggggcatcctgcctgatgggtgggctccccctgatcttgtctccttgg

SEQ ID NO: 73300 - DNA, 2354 bp, Homo sapiens
ctgggaccacaggtgtgcaccaccaccactcccagctttttgttttgttttgttttgttttggtattttttgtagagacagggtttccccatgttgtccaggctggtctcgaactcctgggcttaagcgatcctcccgccttggcctcccaaagtcctgggattacaggcatgagccaccactcccgactccattgctggactgttttctaaaggggtcgtactgatgtttccacctcctcaccagtatatgcatgagtgttccgtacgtaactytcccactccacgtcctgtccaatacttggcattgtgagtttttcccattttagccattctatgagtatgccgaggtatcacaccgtggttttaattttatttctcagatgacgaatgcagttcatttttttaccaaggatattttggacctggaaacattattcaacaaatttgaaaatttcctttcgtccccaaattgtagaactcacttccatccccacattgtggaaacgtctggcagtgcttctgatttcttctgggcgggtttgaatctcccaggctggaagccaagggatggagtagacaagagtttctctggatgagtctggggaactggccacctgccccagaatcacgtgggttgctggtcagagatgcaggtgctgagccctggcccagccccggactcatcagacagcccttgacccattggtccttctagggctgttttttttttttcttgtcacgaaaccaaaaaaaaaaaaaaaaaaaaaaaagcatggatgctgccctttctgtcatgtccacggctgtgtcacaatgcccagaatagtcctgcacagggcagacctgctgggttgaagggtttcccattgttgtctccatcctctcccaccccagctgacttggcggggactcgttagtcaactgggctgccgtggtgagggctctggaagttggtttctcgctcgctggggggtgtcccatgtctgaatgacctcctccttctccaaagccaacttccaacagagctgcagccgtgcccccagcagccttgctcacccccagtcctctaggcactggccatttgagagcctccttgggcgacctcctccctgatgatgcatgtgttattgggtccctctggagaagcttaggagccccctgatcccccgaaaagaacagcaatccatccctgcaccatgcggccccctgagcttttccaacaccgtcttttcatagatgatgtgcccttggtcaaactaaggcagaagggccattcctgtcatcagctgctccactcctgcccctcagcgttttcatgaagaccgtggtgaagcctcctttctttgggtgtggcttgcccctccctcctcaagtttagcagaactactgggaaagcaggatggcctgggggaggagagctctgggtcagaccctttgggtggttttgagacccagtcactgccacaagaggagggaggcagtttcgtatacacaaccctgacttagctagcagggagggagggcaagggatcctagctgggattcctcctgtaatgccagctctttgggaggcccaggcaggaggatctcttgagcccagaagttggaggctgcagtgagttatgatggcacctcctccacagaggagggaggcccaggctaggcctcaaagatgggtgggggggtgacaacacctcatggaccactcagcatgagctccgtccctgagggccagcagtggaaaaaatgcgggcttagttccccggagatactgcggtccagttgacccaccacacaagggcataaggcgatggtcagggttcactggagagctatggaaggcttcttggaggaggcgagctggggattgcttacctcaaaggccaggggtgagaactttatcttggtacagtggaaattctctccaagctttgggactacagtgcatggacagtgtgagccaactaccgtttgctttaaaatagggcaaaaatgaatccatggcgcacacattgtttatgcgatgtggaggcgggcgcgcaaagacggaagagctaaaagcagtttgggaaaaacaacacttttttttttttggtgggaagacagattagagaggtttatgcttttctgtgataactaatatgaaaggtttatcaaagttaaaaaaaaaaaaaaaacctcttgacgctttctccaaaattgatctgaagacttggcagatttgaggaatcattcagtaacgttttacgagtcgatgctaatttgatgcggcagacctgtgcatcgcgccaatttactgccaaaccaacattaagcacggacctctcgcgcaaggtttataggcagacagct

SEQ ID NO: 73301 - DNA, 966 bp, Homo sapiens
cagaataagtatcagagcagcaggcctctgaagataccagggtgtcctgggtcccatggtggccttcatgactgygaggtccctgcagaaaggaaaccagggaggaggctgggaggagccatgcaccttctcagcacatatggtgtggccatttcatgtgagccagctcactctgagagagctcccttgttctgaaagagaccaccaaaagaactgcctttcacccttagagggcctgcccacctcctttaccacctgcttttttctttcctttttgagaccgagtctcattctgtcgcccacactggagtgcagtggcatgatctcggctcaccgcaaccactgccttgtgggttcaagtgattctcctgcctcagcctcctgagtagctgggactacgggtgtgtgccaccacacccggctaatttttgtatttttagtagagacagggttttgtccttttggccaggctggtctcaaactcctggccacaagcgatccacccgcctgggcctcccgaagtgctaggattacaggcgtgagccactgtgcctggccatttaccacctgcttctatttgagaatcaatttcaggcaatgaatgaaagtttggctaatttttccactgttccttggagctgggatgaagttactttctttggcttggggaaggaagaattcctgtgtcctgagcctcagaaggtctacctggcctggggctgtggcccaaaccatagatggagtcagagagctgaacttttctgctgaggttggcttccgttccccagctcgctggccgggttcctgccctgttcttcccttctgtagtgggattgacattcaaggacatttcgttaagctgaggctcacactgaggagaaaaataaatgtgtgggtggccccagaccttccctttccatattttcctttccaaactccatgaattagtgaggcctgacttcagca

SEQ ID NO: 73302 - DNA, 573 bp, Homo sapiens
ttccacatccaagagacactgtgtactgtggctgctgctattctgtggaacagtccttccttccttccttttttcctcccttccttccttcctttcgacagagtcttgctctctcgcccaggctggagtgcagtggtgggatctcggctcactgcaacctctgcctcccaggttcaagcgattctcctgcctcarcctcccgagtagctgggattacaggcgtatgccaccacgtccggctaatttttgtgctttcagtagagagggtttcgctatgttggccaggctggtctccaactcccggcctcaagtaatccacccacctcagcctcccaaagtgttgggatataggcatgagccaccatgcctggccaaaggccagtgtttcttaagcctgttagtccaaggtccttagtgagagatgagctttacatggcatgattcaggctgcagtgacagaggtacacacagaactgaaacaaaaatttcacaaaacctcgtcgcccttgctaagtgagatctgctctgataatttctgttcaatcatattctactccgttctacacaagtcta

SEQ ID NO: 73303 - DNA, 573 bp, Homo sapiens
ttccacatccaagagacactgtgtactgtggctgctgctattctgtggaacagtccttccttccttccttttttcctcccttccttccttcctttcgacagagtcttgctctctcgcccaggctggagtgcagtggtgggatctcggctcactgcaacctctgcctcccaggttcaagcgattctcctgcctcagcctcccgagtagctgggattacaggcgtatgccaccacgtccggctaatttttgtgytttcagtagagagggtttcgctatgttggccaggctggtctccaactcccggcctcaagtaatccacccacctcagcctcccaaagtgttgggatataggcatgagccaccatgcctggccaaaggccagtgtttcttaagcctgttagtccaaggtccttagtgagagatgagctttacatggcatgattcaggctgcagtgacagaggtacacacagaactgaaacaaaaatttcacaaaacctcgtcgcccttgctaagtgagatctgctctgataatttctgttcaatcatattctactccgttctacacaagtcta

SEQ ID NO: 73304 - DNA, 573 bp, Homo sapiens
ttccacatccaagagacactgtgtactgtggctgctgctattctgtggaacagtccttccttccttccttttttcctcccttccttccttcctttcgacagagtcttgctctctcgcccaggctggagtgcagtggtgggatctcggctcactgcaacctctgcctcccaggttcaagcgattctcctgcctcagcctcccgagtagctgggattacaggcgtatgccaccacgtccggctaatttttgtgctttcagtagagagggtttcgctatgttggccaggctggtctccaactcccrgcctcaagtaatccacccacctcagcctcccaaagtgttgggatataggcatgagccaccatgcctggccaaaggccagtgtttcttaagcctgttagtccaaggtccttagtgagagatgagctttacatggcatgattcaggctgcagtgacagaggtacacacagaactgaaacaaaaatttcacaaaacctcgtcgcccttgctaagtgagatctgctctgataatttctgttcaatcatattctactccgttctacacaagtcta

SEQ ID NO: 73305 - DNA, 573 bp, Homo sapiens
ttccacatccaagagacactgtgtactgtggctgctgctattctgtggaacagtccttccttccttccttttttcctcccttccttccttcctttcgacagagtcttgctctctcgcccaggctggagtgcagtggtgggatctcggctcactgcaacctctgcctcccaggttcaagcgattctcctgcctcagcctcccgagtagctgggattacaggcgtatgccaccacgtccggctaatttttgtgctttcagtagagagggtttcgctatgttggccaggctggtctccaactcccggcctcaagtaatccacccacctcagcctcccaaagtgttgggwtataggcatgagccaccatgcctggccaaaggccagtgtttcttaagcctgttagtccaaggtccttagtgagagatgagctttacatggcatgattcaggctgcagtgacagaggtacacacagaactgaaacaaaaatttcacaaaacctcgtcgcccttgctaagtgagatctgctctgataatttctgttcaatcatattctactccgttctacacaagtcta

SEQ ID NO: 73306 - DNA, 689 bp, Homo sapiens
ctgagtgtcctctcacctgtcatcaccagcaccagggggtcactgagctcagaccaccgagcgcggctgtaatactgacagccatatcgccctgtgtgttcccaggtgatggatgggatgtggaactggccgttcttcacaagctctggtcgtatccgtgtaatccaagatgctgattttttctccctatatagacggtactcctgggcttcaaggctcccctgacaactgagggtgacgggactcccctgggtgatcacagagtctggctcagcccacagggtgggcttgggratggtccctggaaggaaatcaaaggtcagattcgaagtcatttcccacccaacagatctcagctctcagcccaggaccctccagatgcccccatcagtcagtccagaacttctaatccccatccccagctgcacggaggtggccccttgtccccagtgaggaggagggacctgggagagctggggacagactcacctgtctgcacgtgggtcctggggcccagactcagccctggaagagagttccctgtgagggatttgccccctgaagcctgagcaggtcctcccctccctgggatctttgtgagcccctggggtctccttagggaccagagtttggctgtggggtgaggtccctcctaggttagaagctcccctctctcttcaaatctcacc

SEQ ID NO: 73307 - DNA, 2310 bp, Homo sapiens
ggactcatggggaattcagcctggtacttatgagattggcgctttgattttagacgcagcggggaatcagctgcyccctccttggtcaaaaggaaagtgtgcatccctccctgtgactgacacagcagggtcacgttctctcctgaggccactgtggggcccggccgcacggagaggaagggtctggcacggatctgtcctggagagaagaaggatgggtgaggggctgccccaccttgctctgagctgagacctccccaggcctctccctggggaccctcagtctctctgtctctgttttctctgagtctcccctccccgcccacccctgtcactgtctgtctctccctcccttaggacccccacccctcatcccggccatcaccacctgggctcccccagcagggcctttgcggagcctgggtccctgactgaacccgctgggctcctcacctgtgatcaggatgtccagggggtcgctgggggccgaccactcggaggagaggttgtatgcaccggagcatgtgtactggcccccgtaggagcggctcacagggcccagggtgaagttggcctgggagagcccagcctggggctgccggccagggcgctggaggaagtcacgtccccactccttgtacagaacaaatctgtcgtagccggcatcagagccacactggaaggtcagcttctccccaggggccacgacaggacccggctgcactgagagtgatggcttcttagaaacacctgggaaaaggtgctcatggtttccaggagccgaccctcaggcttccccacaaactttccctctcccccggggcctcaccactgctgatcttcctgtgtctctggccccaggagccctgagccctctcgccccaacatcatcccacctggagctgccctgagacgcggctcctccccacctgcctggagactcagggagactcagggaaccccaggcaatgctgtgaatttctcacctgggaccaggagccccaggagatcactgggtagagaccacacatagggagcgcgcgagtcataaccatagcacctgtacgaccacctgcgacttgggctcacggggcccacggagaagatggcccgggatgacccacgggcatgggaatgggagttcaggcattgtgggtgttcatcttctccttccttacacagaatgaagccatcaaatgccacctgtgagtcacactggatggtcacattccctcctgaggtcaccacagggctgggcagagctgagagggtgggtttgctgtaggctcctaggagagaaggaggcaccgtgttaaatggggctcagacctcccgcgtcatccccagggctgggctgtgagagggagaagcccctgagagctgacccccttcctgagggcggagcctggggctgggatccctgagtgtcagctcacctgtcaccaccagctccagggggtcactgctctctgagaggcctgcagtgtggctgccatagatacagcaataccgccctgcatgttcccaggtgatggataggatggggaactggcccttcttcacaagctcctgtgggatccgtgtaatccagagtgctgttttcttttctctatatagatggtactcctgcgtctccaggctcccctgacacctgagggtcacaggactcccttgggtgatcacagagcctggctcagcccagagggtgggcttggggaggggccctggaaggaaatcagagttcagattctaagtcatttcccacccaacagatctcagctctcagctgcaggaccctccagacacccccatcagtcagcccagaactgctattccccatccccagctgcacaggggtggccccttgtccccggtgaggaggagggacttgggacagctagggacagactcacctgcctgcacgtgggtcctggggtccaggctcagccctggaagagagttccctatgaggaatttgcccctgaagcctgagcaggtcctcccctccctgggatctttgtgagcccctggggtctccttagggacaagagtttggctgtggggtgaggtccctcctaggttagaagctccctccctcttcaaatctcaccgagacagatcaggaccgtgaggatgggggtcatggcgtctcctcccactgcactgctctgtggatggatgagccctcggtgctggcaggacagaggacacacagggtgtggacacttggaggctcggtccttcttctcatggggttttgtcatctgcagccacacaggaagtggaactgccctcccaggagcctggctg

SEQ ID NO: 73308 - DNA, 1203 bp, Homo sapiens
atgccacaatttttttttctttctttacacaggtgctgatgaactcaggtgtaattaaccctaaggggtaaattattcactaagtgcagtaatagggtccaatttttatgaccaggttttcagttctttgatattgtcctacattcagaaatcacaaatgaaaaatactggaatgtgtgacgtgaacaatgtcttggaggttaacatccaggtttttacatattagatgtaacaacatgaaagctggtaccatctgggaaccaaaggaactgtccctgagaacacagaattttagggacatcaattattaagagtttacatggaagcagaagtgctcctagatgtttccattatctagatagaaaaattcaacagatgagccccagtgagtcaaggaacatctctgacagctgtgggtgatgggctttctatccaaagcagagatgtgaaacctgacgggtttcaattgaccccgaagtgctccatatctcaaaagtcaatcccacaaagctggaacgctatctgttcctgagggatcaggtcccacctgtgtctctaagacactgccttgagatgaggccgatgatttcaaacgtaaattgcctaaattatcatcagcttcatgttgtgttttggagcttgtccacttaagtgggttgataaaaaatggctcacaagacacatgcctgggaaatggggttttcttctttgctcttggcagatcctgggcaaccctataattaaccttcttgatttctcaattttcacattcgcgaaaaaggtgccagtgcgcgtgacatttccctgaagccacagcccttgtcaccccctgcaaagctctgaagttgtgcacaggtaggccaggtggcagatttctctcaaaagcggctgagctcgcgctctggctagggaaggcagaggcctgcggcacaaagtacattgtcttagacatcaggacagtgtctatagcagtttaggaaagaaggcggctccctgggctggagacgacgcaatgctctgggaagacccctgggtgcgggtgagagaggaatccgagctgcacaaggccaatgaggggaggacgacccgcccgatttagataaaggtaaggcatacttcctagcttaataycctcctcaatgcccagcccagacctgcctttcacgtccctagctgtattcactctccctggcgacggggcgg

SEQ ID NO: 73309 - DNA, 843 bp, Homo sapiens
tgggggactagtgggaagggatgattgtattctgcaatgtgagaaagacatgaaatttggggggccagggtagaatgatatggtttcgatgtttgtcctctccaaatctcatgtagacatgtaatacccaatgctggaggtggggcctggtggcaggtgttaagatcatggggatagatccttcatgaatgtcttggggcagtcctcacagtaatgaacgagttcttgctctatgttcctgcgagatctggttgtttaaaagagtawagcacctccccccaacttgttcccgttgttgccatgtgacatgctggctcctagtcaacatccactatgactgtaagcttctccaggcctttgccggcaccatgcttcctgtaaagcctgtagaattgtgagccaattaaacctcttttctttataaaccttcttttctttaccctgtctcaggtatttctttatagtaatataaaaaaggctaatacactgcccctgccagtcctttattggcagtaaatgcccttttgcctttctctgggttgctgcaccactatatttgggggagcagcctctactaccaaaataaagggtcaggcagggagggaaggctctgacctactcacctgcctctgaaatcagctatcccaatcatgctgggcaggaacaaggaaaggaaacaacccagcatatggccctgataacgtggcccacatggcttagggaaaaaggtagagaagggaaaggagcaaagcaaaaggaacagcacttcaaagagggagtttcatagttcgaagggaacttgtcttctgctttgttttaagcagcatttgagacagagttgga

SEQ ID NO: 73310 - DNA, 692 bp, Homo sapiens
aacagaagggggcaggcagtggctaaaagtcactggaattgggaggtttgccagtaaattaggggaggtttgccagtaaaaaagtcactggaattgggaggtggtccagtaaattaggaaaactgtcttatggatgttcacagtgatcgccaccagctaattaaaagctcaatcctgtgttaaaatgtgttgcttaaccctgcactttccaaacttaagttactacagactgtgtcactcagcagaatcttacaggactattactctatagaatgctcttagggaagaggtagcataaaggggaaaatatgggttttagattaagcataaagtcctggttctatataagtaaagccagagtaggctcatttccccctagactagtggttctcaactgggaatgattttgctcccagggagacacttggcaatgtctggagatatttttggtagtcacaactgggcttggggtgctactggcatctactgggtagagccagggatgctgccaaacatcctacaatgcagacagctcccccsacccctgcccaacaaagaattatcaggtccaaaatgtcaatagtgccactgttgagaaatcctactcaagaagagtggaactccgaacaatgactaagaaacagatcaaacaggcacattttgactctgccttccttctgcctggctctaga

SEQ ID NO: 73311 - DNA, 914 bp, Homo sapiens
taatacctagtgctggtaagggtgtggggaaacaggcactctcatgtaccatacaggagcaaaaattattctacccaagtatgttaataacatggttgaaaaatttaaaaatgcacagaatgcctatagaacccctagggatttatattaaataaataatgccatgtgttatggcacacacctgtaattccagcaccttgggaggctaagataagcagatcacttaagctcaggagtttgagaacagcctgggcaacatggcaaaaccccatctcaaccaaaaaaaaaaaaaaaaatttagctgggcatggtggtatgcccctgtggttccagctactagggaggctgagatgggargatcacttgaacccgggaggtcgaggctgcagtgagctgagattgcaccactgcactccagcctggatgacagagtgagacactatctcaaaaaaacctgtcaattcacccatccagccatccacccattcgtccatcaatccttggataaatatatagagataggcagttttttattatctcataatcttttcaaattctgaaaatgttgaaaaagaaactttaggttaataatggtacattcctatgatgtaatattattcaggctttacaatgacaatgatgttctatctgtatttattaatagatctttggaatttagtagcaggtaaataagtggttgttttccatttaccaccttttctcaataaaatgttctttttctttttattttattagtcatgcttttatttatgttatataaataagacatatttatttcaaattctaaaacatattgaaaagcatttaaaaaatcattcgtgattcaacatcattcggaatggagtgtactgtatatttctgttgcacatcttttcacaattttcttatgcagt

SEQ ID NO: 73312 - DNA, 1305 bp, Homo sapiens
ttagttttaaatgtatgaactgtgtctcttagcttcacaacaatcaccatgattcagataaatatcttggtaaattaaagccattgactggcaaaacaaatgccaacaaaatctgcaatgatccttgcacacatcagtggcaaaatctagagtccttagaataacatttgcatttttccctgtgatattatttctccatttggaaatcagcttcgtctcccatcctctctcctccaaacagtgcccagttcagccacacaaactgcaggctatccatttcttagcatgtcttgttatccaaatgatttccagcatttggttgttctagtcaacttggtgaatgtacactcaatattgaagacccagctcaagtgagaagcatttctgtttcatcagctttgacctcttttcctcatgttccagtgtttttctcaccataaaacttgtcaacttagagtgtcattattagtgaccccatttctggggatccccatccaatcagacaatgagttcttaaaaaaaataccttttattatttatcatgtattcccagagactaatatggcrcctgggacattgctgcttagtaatgttcaatgagaagaaaagctgaggagtacagagtagagagaatttggtctccttctatttcaacagtggttgaagtattttcttattttagttgccccctttcaggttgagcctccttatccttccatagccaagagcccacatcttattaaatacaccataaatgagttgacatctctctatttacttatatgtaatttcaggcatgatttcacactgatgaaatcatgtgatctctctttctctctcttatgaattcagcactaagagtgaaaggagagaagtgaagaactgagaaaaattaatcagaattgcttgtagaatcttaaaaaggggctttgagtgaaagtagtttcctcaaaattataagctggtaaatcaaccctgttggaagtagagatctttgaatctttggcagaagcctgagatagaagccttctggtgaggccatcggtgtgttaccgatggctacggtgggggagtggtcagccgtcttcctgctgaacttaccaaagcatctggggtagctaaggagacaccccctcctcaagcacaggtcacaagacaaggacatgatgcaaactttctagaaagtaacttctgagtgtatagaaaattttgttaataaagatgtagagatgttcattctagaattattgaaattgggaaactaatgaagaaactaaatatgtaataatagagataaacaaataa

SEQ ID NO: 73313 - DNA, 1090 bp, Homo sapiens
ggtggtgtagttagaggctaacgctgtcagtgctgagactttaaggaggaatgggtgatcaggtgtctttatcaagctcgtaaagccactagtgcctcccagggcctctgctgaagagtcaccctgggagcacagcaaacaacaaaaaaggccttctcctctattctactctgttatctctggatcctccaccacctttgacctctctggccacactaggaagtcccactgcaataacgagtgatgaaggttattgtccatccccccttcccgtctttgccctctgttacccctcctgcatttttactaaaatattgtatgtcacagaatttttcttaagtaataaatttatggcagcaaaattggaatagcctttgaagcacatttcttgagatgaacattaggttgatgtattataacatttaaagcaggaatcctgcacacaaagaactcattgggacctgaaatgattagatacatagggaaagggacactaatgggaaaggcaggattctctccgacctttgcttcccacagtcaatactaatcttgttcactttcagtgacaactacagctcctgcctaatgaaaatgttctcatcattagctgggcatggtggtgtgtgcctgtagtcccagctactcgggaggctgaggcaggagaatcgcttgaacccaggaggcggaggttgcagtgagccaagatcgcgccactgcactccagcctggcgagtctccatctcaaaaaaataaaggaaaaaaaaaaraaaagaaagaaaaaagaaagaaagaaaatgttttcaccatgagcttctgtcagaagagtgcaccagaataacgcacatgcccacatctggacgcatactggggtgtatcggcaaagctgaaagaagaacaaactttcataatgacaagtgcttcctttctacaaagggatgttagctgttcccatttttgcatttatctcaagggtggaataaatcaccggctagttgttatgaaaaatatgattctatttgtccctgatgtaattgtgtgggggcagcttcagaggcatgtttttaaattggcctcttaatttattttaatg

SEQ ID NO: 73314 - DNA, 680 bp, Homo sapiens
cccactgagctcttttgacccccatgctcactgycaagtttgttgtttaatacacccatcctggccagtcataggtttctttcttgatgccaactccaactcctcctgtatccaattaatctacctctggccactcatttctagaggccattttcaccctcccatcctgaggcatctgtattagtctgttctcatgctgctaataaagacatacccgaaactgggtaatttataaaggaaagaggtttaatggactcacagttccacatggctggggagacctcacaatcatggaagaaggtgaatgaggagcaaaggtacaccttacatggcagcaggcaaggaagcatgtgcaggggaactgccctttataaaaccatcagatctcgtgagactactgactatcatgagaacagcatgggaaaaactcgcccccatgattcaattacctcccattgggtccctcccatgacatgtggggattatgggagctacaattcaaatgagatttgggtggggacacagccaaaccataccagcatctatagccagagacggaaggtccacttgtctggtcctattttctaaatgattccttctcttctaaagcccacttgcgtattttatgtttgttttccctctatttctacaaatgtcctcatctaaaagctctttagggg

SEQ ID NO: 73315 - DNA, 680 bp, Homo sapiens
cccactgagctcttttgacccccatgctcactgccaagtttgttgtttaatrcacccatcctggccagtcataggtttctttcttgatgccaactccaactcctcctgtatccaattaatctacctctggccactcatttctagaggccattttcaccctcccatcctgaggcatctgtattagtctgttctcatgctgctaataaagacatacccgaaactgggtaatttataaaggaaagaggtttaatggactcacagttccacatggctggggagacctcacaatcatggaagaaggtgaatgaggagcaaaggtacaccttacatggcagcaggcaaggaagcatgtgcaggggaactgccctttataaaaccatcagatctcgtgagactactgactatcatgagaacagcatgggaaaaactcgcccccatgattcaattacctcccattgggtccctcccatgacatgtggggattatgggagctacaattcaaatgagatttgggtggggacacagccaaaccataccagcatctatagccagagacggaaggtccacttgtctggtcctattttctaaatgattccttctcttctaaagcccacttgcgtattttatgtttgttttccctctatttctacaaatgtcctcatctaaaagctctttagggg

SEQ ID NO: 73316 - DNA, 680 bp, Homo sapiens
cccactgagctcttttgacccccatgctcactgccaagtttgttgtttaatacacccatcctggccagtcataggtttctttcttgatgccaactccaactcctcctgtatccaattaatctacctctggccactcatttctagaggcmattttcaccctcccatcctgaggcatctgtattagtctgttctcatgctgctaataaagacatacccgaaactgggtaatttataaaggaaagaggtttaatggactcacagttccacatggctggggagacctcacaatcatggaagaaggtgaatgaggagcaaaggtacaccttacatggcagcaggcaaggaagcatgtgcaggggaactgccctttataaaaccatcagatctcgtgagactactgactatcatgagaacagcatgggaaaaactcgcccccatgattcaattacctcccattgggtccctcccatgacatgtggggattatgggagctacaattcaaatgagatttgggtggggacacagccaaaccataccagcatctatagccagagacggaaggtccacttgtctggtcctattttctaaatgattccttctcttctaaagcccacttgcgtattttatgtttgttttccctctatttctacaaatgtcctcatctaaaagctctttagggg

SEQ ID NO: 73317 - DNA, 683 bp, Homo sapiens
gggaatgatcaggccgagacggaggaagagccttcatgaccaagtgggtcttttccagctccagctcccatgactgcaaggtccttctggttcttcccaactcactctggccagcacggctgtagcatgactgtcacgatccttggctctgagtgttttaaggcctggatgtgkcgatgcagaggcctcccagctacggtacataagctacagtctgcacttccacgtaaagagctccacccggccttggggcatggagaaggtagtggatgttgtatccaaggagctggtgctggcccaggcccagtcccaagcacttgcctgtccagcctccgtggggagcgcccaccagcagccctctcacatttctgcatctcaccaaaggcctgctgaaaacaggccccctgtgacatctgctaatcagatttgcccctggagccagtaataattaaacttggtctatgaaaggaacactggaaaggtctcccatcccacagctggtcagcaaacagagcagaagggccgtatctacagccatgtctgtgtaaatcttattcagctgtcagaatgagccctaagtgacactggtcaccctcacaggtagctgtcagcccttggaaagctgttgctgggggcagctatgagggctagaacttctccctcagctcccctcacctttccta

SEQ ID NO: 73318 - DNA, 1277 bp, Homo sapiens
  misc_feature (1)...(1277): n = A,T,C or G
ttcatcttgtcgcaccctctccctgtgtattcctgtctagcacgctgattcctcacatattccatgcattctcctgactttgcactggttgtcacctctgcttaaaatggtcttccccccaggtagataatctgcaagacttactttctcacctccttgaagtctttgttcaaatattgacttccccaatcacctttataaacttattctgtcagcctgtactcatgacctcttcactctggtctttttgttgttgtcccgtaaaatgattgccttttaagatgctctagaatgtatttgttcaatatgtgtattgtttatcttctgttgctggaatgtagctttatgggagtaggggtgtttgcctattttgttcattaatgtatcccaattcctgtatatgtttgtggcccattgtagttgaccaatgaatgttgatgaatgtatgaatgcactggatatggtcacattagtacttttatgttccttaatctatttgaaannnnnnnnnnnnnnnnnnnnnnnnnnnnnnnnnnnnnnnnnnnnnnnnnnnnnnnnnnnnnnnnnnnnnnnnnnnnnnnnnnnnnnnnnnnnnnnnnnnntatttgaaaactcccatactggtatatttcttctttcctattacacacgtccttccccagacaattatcctaatcttcaaaaaccttattttaaagtgattaggtctaataaagttatgtctgtttgtcctgattctgagattagtatgtgtaaactttcagcactcttaataacaagggaatctgtgttaagcatagccacagtcatttctttgctgaatcaacggctgttaaagtgagtgaaagctgcagaaagtttcaggatccttttggcagtttaagtgaragaaataaaacagtgttttatagaagctgtaaactttgttgccttagaggggagttctcaaattttaacgtgtctaagaatcaccatggggagtttgttaaaaatggtagtttgttaaaagtacaaattctctcttctaatccctaaggttctgaatcaataggttcatagaagggcccagagtttgcattttcagtaagtacctggggtttctgatacgggatgtctgtgaatataaattaagtaacattcttttagaccctacatacactttggctgttttttggtttagagatggaagagaaagagctggagaaagcaagaagaaatttctggaataggtgtttagaatatggaagaaaacctggaaggagaaaatatatttgctt

SEQ ID NO: 73319 - DNA, 1277 bp, Homo sapiens
  misc_feature (1)...(1277): n = A,T,C or G
ttcatcttgtcgcaccctctccctgtgtattcctgtctagcacgctgattcctcacatattccatgcattctcctgactttgcactggttgtcacctctgcttaaaatggtcttccccccaggtagataatctgcaagacttactttctcacctccttgaagtctttgttcaaatattgacttccccaatcacctttataaacttattctgtcagcctgtactcatgacctcttcactctggtctttttgttgttgtcccgtaaaatgattgccttttaagatgctctagaatgtatttgttcaatatgtgtattgtttatcttctgttgctggaatgtagctttatgggagtaggggtgtttgcctattttgttcattaatgtatcccaattcctgtatatgtttgtggcccattgtagttgaccaatgaatgttgatgaatgtatgaatgcactggatatggtcacattagtacttttatgttccttaatctatttgaaannnnnnnnnnnnnnnnnnnnnnnnnnnnnnnnnnnnnnnnnnnnnnnnnnnnnnnnnnnnnnnnnnnnnnnnnnnnnnnnnnnnnnnnnnnnnnnnnnnntatttgaaaactcccatactggtatatttcttctttcctattacacacgtccttccccagacaattatcctaatcttcaaaaaccttattttaaagtgattaggtctaataaagttatgtctgtttgtcctgattctgagattagtatgtgtaaactttcagcactcttaataacaagggaatctgtgttaagcatagccacagtcatttctttgctgaatcaacggctgttaaagtgagtgaaagctgcagaaagtttcaggatccttttggcagtttaagtgagagaaataaaacagtgttttatagaagctgtaaactttgttgccttagaggggagttctcaaattttaasgtgtctaagaatcaccatggggagtttgttaaaaatggtagtttgttaaaagtacaaattctctcttctaatccctaaggttctgaatcaataggttcatagaagggcccagagtttgcattttcagtaagtacctggggtttctgatacgggatgtctgtgaatataaattaagtaacattcttttagaccctacatacactttggctgttttttggtttagagatggaagagaaagagctggagaaagcaagaagaaatttctggaataggtgtttagaatatggaagaaaacctggaaggagaaaatatatttgctt

SEQ ID NO: 73320 - DNA, 2567 bp, Homo sapiens
ttgaattctctaggctattctgcatttatggaattttccactaggtaatatgcattcaggtcacatacacagtgagattttctaaagtgacagtacagataaaaaggctgtgcaacttggtgataattgtgctccatttaagcaaccatcaactggtgcatttttttaaagataaattagattttatcaaaattgaaatattttttctttttgatactttatgttctgggatacatgtgcagaacatgcaggtttgttatgggtatacatgtgccatggtggtttgctgcacccatcaacccattatctacattaggtatttctcctaacgctatgcctccccttgccccccacccccaagttgtgtaattttttaaaaaaaattatagtacttggtgtcaaaaccttgtccctgatatcagcagtatgaattatyaatagataccatctgaaaccctggagggaagtaataagcttttaaagatgttcatcctgatgattagcctgtcatctttcatggggccctgaaatcaagaatccaccctttttcacatggatataatggatttaatacagtatttagcattatgcactgtatatatatgtggtcttttccctctaggtggctctctgggtctatatagatacaaactattgagaaatgtggctattcctacctttattttgcttctgtgttctgtgggactgtgaattacattttagtaaactgtgaagcccatgaacacatagtatcagctgctcaatttagtgcaagtttgaaaaaggaaataataaagcaaataagaattaacatttatttattacatgctcacaaacttgggggaagaggggaagagacagacaagtgaatccaattgcattgctctggtttggtctagtaagtaaagaaggttgataagatttctataatacacttcattttctaggatccagtcatttgtactcactttgagataagtgtctggaacataggagtagtgatttatctatatctttaattttccatagaaaacttggttttaaaagggaataaaaataattacttttatacttaatgatagtgctaaggtactaggggaaaggaatctttggatttaccagtatatgtatttgtcagtgctctttttcttcctgaccatttgacactttgatctgtagtaatatggcgtttgcttttaccactgtatcagaagcactcagggctgtgtgggttatttttgtcttgtaccgtgatagattttcatgcattaacttgctttcttgatagtttttctgacagcttttcatgtgttaacatgctttcttctcttggcatcagtgagaagtatctgtatctggttcttccctttcctctcccagtcattctttcttcttgtggatgcctcttaaatagtgtctttttaaaacaatttcaagttttattttagattcaggggatacatgtgcaggtttgttacaagggtatattatgtgatactgaggtttgggggacagttgagcctgtcatccaggtagtgagcatagtacccaattggtagtttttcaactcttctccccctcccaccttcccctatcttttaagtccccaatatctatcgttgcatctttatgtccatgtatacccaatgtttagctcccacttaaaagtgagaacatgtgatatttggttttctgtttctgcattaattaggttatatacttgattttattctctttctactctgggttctccatagacagtttcataaatgccaaggtttcagctatcatttatatgttgttttagtccctttgggctgctataacaaaaataccatagattgggtagcttaaacaacagataatgatttctcatagttctagaggctgagaagtccaagataagaaagacactgacaaattcagtatctcaggggggccaacttcctggttcatagacagtttctgtgtccttttgtgatggaaggttgtcagagagatctctggagtctctttaaaaaaaaaaaaaagttctttttggagacgtatattgcccaggttggagtggaaggctgggaccataggtgtgtgccaccacactgggccttgggggtctcttttataagggcatttattccattaatgcaagcttcaccttcatggcaaaatcacccccgaaaaggcctgcctgctaataccatcatattggtggttgggattttaacataagaattttggggggaacacaaacattcagtccataacatatgccgttggtttccaagtccatgtctttagcccattcctctcccaagctttgaaccaaacctttacctgcctgctgtggcaggcctagagtaggttgtcagtagagttggaatgaatgaacaaatgtttagaacttatcatctgccttctccccaaaccagcctatcctctcttttctctgtcttcttgaaactactttcccaaatgcaagcttgctttgagaatctttgactcattctttttcttacctcacagttaccagttcctatccaggtttggaaaaaatactgacttggatg

SEQ ID NO: 73321 - DNA, 2567 bp, Homo sapiens
ttgaattctctaggctattctgcatttatggaattttccactaggtaatatgcattcaggtcacatacacagtgagattttctaaagtgacagtacagataaaaaggctgtgcaacttggtgataattgtgctccatttaagcaaccatcaactggtgcatttttttaaagataaattagattttatcaaaattgaaatattttttctttttgatactttatgttctgggatacatgtgcagaacatgcaggtttgttatgggtatacatgtgccatggtggtttgctgcacccatcaacccattatctacattaggtatttctcctaacgctatgcctccccttgccccccacccccaagttgtgtaattttttaaaaaaaattatagtacttggtgtcaaaaccttgtccctgatatcagcagtatgaattattaatagataccatctgaaaccctggagggaagtaataagcttttaaagatgttcatcctgatgattagcctgtcatctttcatggggccctgaaatcaagaatccaccctttttcacatggatataatggatttaatacagtatttagcattatgcactgtatatatatgtggtcttttccctctaggtggctctctgggtctatatagatacaaactattgagaaatgtggctattcctacctttattttgcttctgtgttctgtgggactgtgaattacattttagtaarctgtgaagcccatgaacacatagtatcagctgctcaatttagtgcaagtttgaaaaaggaaataataaagcaaataagaattaacatttatttattacatgctcacaaacttgggggaagaggggaagagacagacaagtgaatccaattgcattgctctggtttggtctagtaagtaaagaaggttgataagatttctataatacacttcattttctaggatccagtcatttgtactcactttgagataagtgtctggaacataggagtagtgatttatctatatctttaattttccatagaaaacttggttttaaaagggaataaaaataattacttttatacttaatgatagtgctaaggtactaggggaaaggaatctttggatttaccagtatatgtatttgtcagtgctctttttcttcctgaccatttgacactttgatctgtagtaatatggcgtttgcttttaccactgtatcagaagcactcagggctgtgtgggttatttttgtcttgtaccgtgatagattttcatgcattaacttgctttcttgatagtttttctgacagcttttcatgtgttaacatgctttcttctcttggcatcagtgagaagtatctgtatctggttcttccctttcctctcccagtcattctttcttcttgtggatgcctcttaaatagtgtctttttaaaacaatttcaagttttattttagattcaggggatacatgtgcaggtttgttacaagggtatattatgtgatactgaggtttgggggacagttgagcctgtcatccaggtagtgagcatagtacccaattggtagtttttcaactcttctccccctcccaccttcccctatcttttaagtccccaatatctatcgttgcatctttatgtccatgtatacccaatgtttagctcccacttaaaagtgagaacatgtgatatttggttttctgtttctgcattaattaggttatatacttgattttattctctttctactctgggttctccatagacagtttcataaatgccaaggtttcagctatcatttatatgttgttttagtccctttgggctgctataacaaaaataccatagattgggtagcttaaacaacagataatgatttctcatagttctagaggctgagaagtccaagataagaaagacactgacaaattcagtatctcaggggggccaacttcctggttcatagacagtttctgtgtccttttgtgatggaaggttgtcagagagatctctggagtctctttaaaaaaaaaaaaaagttctttttggagacgtatattgcccaggttggagtggaaggctgggaccataggtgtgtgccaccacactgggccttgggggtctcttttataagggcatttattccattaatgcaagcttcaccttcatggcaaaatcacccccgaaaaggcctgcctgctaataccatcatattggtggttgggattttaacataagaattttggggggaacacaaacattcagtccataacatatgccgttggtttccaagtccatgtctttagcccattcctctcccaagctttgaaccaaacctttacctgcctgctgtggcaggcctagagtaggttgtcagtagagttggaatgaatgaacaaatgtttagaacttatcatctgccttctccccaaaccagcctatcctctcttttctctgtcttcttgaaactactttcccaaatgcaagcttgctttgagaatctttgactcattctttttcttacctcacagttaccagttcctatccaggtttggaaaaaatactgacttggatg

SEQ ID NO: 73322 - DNA, 2567 bp, Homo sapiens
ttgaattctctaggctattctgcatttatggaattttccactaggtaatatgcattcaggtcacatacacagtgagattttctaaagtgacagtacagataaaaaggctgtgcaacttggtgataattgtgctccatttaagcaaccatcaactggtgcatttttttaaagataaattagattttatcaaaattgaaatattttttctttttgatactttatgttctgggatacatgtgcagaacatgcaggtttgttatgggtatacatgtgccatggtggtttgctgcacccatcaacccattatctacattaggtatttctcctaacgctatgcctccccttgccccccacccccaagttgtgtaattttttaaaaaaaattatagtacttggtgtcaaaaccttgtccctgatatcagcagtatgaattattaatagataccatctgaaaccctggagggaagtaataagcttttaaagatgttcatcctgatgattagcctgtcatctttcatggggccctgaaatcaagaatccaccctttttcacatggatataatggatttaatacagtatttagcattatgcactgtatatatatgtggtcttttccctctaggtggctctctgggtctatatagatacaaactattgagaaatgtggctattcctacctttattttgcttctgtgttctgtgggactgtgaattacattttagtaaactgtgaagcccatgaacacatagtatcagctgctcaatttagtgcaagtttgaaaaaggaaataataaagcaaataagaattaacatttatttattacatgctcacaaacttgggggaagaggggaagagacagacaagtgaatccaattgcattgctctggtttggtctagtaagtaaagaaggttgataagatttctataatacacttcattttctaggatccartcatttgtactcactttgagataagtgtctggaacataggagtagtgatttatctatatctttaattttccatagaaaacttggttttaaaagggaataaaaataattacttttatacttaatgatagtgctaaggtactaggggaaaggaatctttggatttaccagtatatgtatttgtcagtgctctttttcttcctgaccatttgacactttgatctgtagtaatatggcgtttgcttttaccactgtatcagaagcactcagggctgtgtgggttatttttgtcttgtaccgtgatagattttcatgcattaacttgctttcttgatagtttttctgacagcttttcatgtgttaacatgctttcttctcttggcatcagtgagaagtatctgtatctggttcttccctttcctctcccagtcattctttcttcttgtggatgcctcttaaatagtgtctttttaaaacaatttcaagttttattttagattcaggggatacatgtgcaggtttgttacaagggtatattatgtgatactgaggtttgggggacagttgagcctgtcatccaggtagtgagcatagtacccaattggtagtttttcaactcttctccccctcccaccttcccctatcttttaagtccccaatatctatcgttgcatctttatgtccatgtatacccaatgtttagctcccacttaaaagtgagaacatgtgatatttggttttctgtttctgcattaattaggttatatacttgattttattctctttctactctgggttctccatagacagtttcataaatgccaaggtttcagctatcatttatatgttgttttagtccctttgggctgctataacaaaaataccatagattgggtagcttaaacaacagataatgatttctcatagttctagaggctgagaagtccaagataagaaagacactgacaaattcagtatctcaggggggccaacttcctggttcatagacagtttctgtgtccttttgtgatggaaggttgtcagagagatctctggagtctctttaaaaaaaaaaaaaagttctttttggagacgtatattgcccaggttggagtggaaggctgggaccataggtgtgtgccaccacactgggccttgggggtctcttttataagggcatttattccattaatgcaagcttcaccttcatggcaaaatcacccccgaaaaggcctgcctgctaataccatcatattggtggttgggattttaacataagaattttggggggaacacaaacattcagtccataacatatgccgttggtttccaagtccatgtctttagcccattcctctcccaagctttgaaccaaacctttacctgcctgctgtggcaggcctagagtaggttgtcagtagagttggaatgaatgaacaaatgtttagaacttatcatctgccttctccccaaaccagcctatcctctcttttctctgtcttcttgaaactactttcccaaatgcaagcttgctttgagaatctttgactcattctttttcttacctcacagttaccagttcctatccaggtttggaaaaaatactgacttggatg

SEQ ID NO: 73323 - DNA, 759 bp, Homo sapiens
ggcgttgcatctgaattcctggcaggaatcatcaggaaggagaaaaggaagatttcttcttttatgtgaaggcaagtcttcactagaattctgcctatagcttgttggagagaactgaccacaagatcacaagcccattcttagcttcaatgcaagatgcttttcagatctgaagacaaagcaagcaggaggaaagggagttgtaataggtaccaaagaggttaatatacagactatgtcacatgcacaacatggaaggctctgatttagaggagtctgtggatatgcacccatagttctattgatgctttaggctaaaatctcaagctgtgctttgctgtgtaacttctcttttttctctggagaaatttgggttttgtagccactttaaaaaatttttttaatttttttaagccacaggccctcgtactttcctttytcagcaaaatacattcagagaaactcagaacaggaatgttatttagttgacagtcatttagctcccccttgtcatttaatagtgggaaaggtaaaagatttttttgggggggatgacaccaatccatggaggacacttgatatttttcattccagccattatatgtctgttctgatgtcttcggttcctgaaatctaactccatatccccattttctgtcaggtaaacgtatattcgttaccaaagtctagcgtagtcaccccacgtaagggtcaaaagtcgttccagtcgttccaaggtgacagttaataaatgcggca

SEQ ID NO: 73324 - DNA, 701 bp, Homo sapiens
acatgtggtatttgtacacaacatattattcaggtataaaaaagaataaaatcctgtcatgtgcagcaacaggaatgacactggagaccattatgttaggtgaaataagccaagcacagaaggacaaatattgcatgttatcactcacacgtgggagttaaaaaagtgaatgacatgaagatagacagtagattggtggttactagaggccaggaaggggaggcagaaaggagggatgacaagggaaaaataatataaatgtatttgttatcactgaactgtatgctttaaaatggtaaagctggtaaattatatatgtatattttacctcaataaattaatgtataaggctgtgatattttagatatgctcatttttatttataataattgcacaatgttaattaaagcatgtgtgcttcattgacacatttctaaagagaaatggcaagyaatgttttttataacagaatattttttgtttttttacaaacagaatattaatagacaagtgtcttagtcttattcacctccacggacacatcataggtaaaagaaagttatctaactactaaatccacaacataaattagtcctaatagcagaaggaatttttcaaatatagagaattaaaaatatttacttcctaatttgcaggtatgggataacacagtgaaccattattttcccaatgactaatga

SEQ ID NO: 73325 - DNA, 722 bp, Homo sapiens
atttcaaatactagtggctactctgggcattcaaaaatgaataatatgaatgtattctcttattgtaatgaattgaataatctcacagtctagtaagagagattaatacataaacagtgagttagagtgcaatgtgatatgtgccaagaaaggacaaggaagggagtgtataaatattttaggcttcagaaaactcaggtttataaaatctctgatagccctattacttgcttgattgaggtatgaagttactattactcaaaaccctgctcttttgaaagccactgatgtttcagcattatttctttattatgccataatttaatttttttcttagtaaagacatggaatattaatattgagacaatagaaaaaaattcaagattatgtattacatcttcctaacttacccataagtcccatgtaaaataatatgaatcaagtcatctgycctatttttgagcaaatttaaggatggaaagcccaatatactttaggatagccaactccattgttgtagcaacccagttattccaaattttcttcaaaagtaactcttaattttgctttcagtcatttttcatttattatagacctgcctttgtttcttccaacctttaaatagagggcattaataaaagcatgaatgtaatttaaaattttaattactttgcaggtacacatggcagaatcaatttataaacatcaatgaaaacatactt

SEQ ID NO: 73326 - DNA, 722 bp, Homo sapiens
atttcaaatactagtggctactctgggcattcaaaaatgaataatatgaatgtattctcttattgtaatgaattgaataatctcacagtctagtaagagagattaatacataaacagtgagttagagtgcaatgtgatatgtgccaagaaaggacaaggaagggagtgtataaatattttaggcttcagaaaactcaggtttataaaatctctgatagccctattacttgcttgattgaggtatgaagttactattactcaaaaccctgctcttttgaaagccactgatgtttcagcattatttctttattatgccataatttaatttttttcttagtaaagacatggaatattaatattgagacaatagaaaaaaattcaagattatgtattacatcttcctaacttacccataagtcccatgtaaaataatatgaatcaagtcatctgccctatttttgagcaaatttaaggatggaaagcccaatatactttaggatagccaactccattgttgtagcaacccagttattccaaattttcttcaaaagtaactcttaattttgctttcagtcatttttcatttaytatagacctgcctttgtttcttccaacctttaaatagagggcattaataaaagcatgaatgtaatttaaaattttaattactttgcaggtacacatggcagaatcaatttataaacatcaatgaaaacatactt

SEQ ID NO: 73327 - DNA, 456 bp, Homo sapiens
tgtctcagaggggcacccggctgtatgaggtgtcattcggcccctaatgggaggtgtctcccagttaggctacttggaggtcagggacccacttgaggaggcagtctgtccattctcagagctcaaacactgtgctgggagaaccactacttcttcgagcttttcaagtgtttaaacaaaaggaaaaaagaaaacacaaaggaaatcatcargagaataaattcaaaaattaaaaactctttttgtcaagtaccataaataaaaagataaatcgtagtaattttaaaaagtcgaattatattttgaaaagttataattcatggagagtttttataagtttaaaaggtaaattattctaattttagtgatttattttgagtaataatcagaacgtaaagcaattaaaaagtatatatagttgtcagtttttaaactgcatattcacagctatagcca

SEQ ID NO: 73328 - DNA, 1392 bp, Homo sapiens
tagcatgtaattttaatttcctcagaagaaagttattgcaatgcatccttgtccataagtaaagaacagtaactcaggccatttttctttctctcaatttcagccactgttacctaggaagaaataaatggttcttgaatctaattttcaacttttctaagcatttttcttgttcttcctggagagctttaggaacattttttagtgaatagcttactaaatggcaaatttacatgaccagttttaattacatattgaaatgaaatgtaaagatacatgattaagttgataaaaaaattaaatttaaccaccattttctcagcttttttcagtttccaaattgtgtatctcatcactggttgatttttctaatcttcttatatactaatgcttttcaaaaatatactctacatttctacttttgatttttctgaaggattatattcaattattttcatttccttgttatttttgtgctttcctttttatttatttataattttccttttatatcactgataaatatatttttaaaaactctctgaattatcatttggatttgaatatattaagtaatgattataaagtacaaatagccgactgatatatttaatattttccatttttagaactaaagtgtatttttagtcacttttacaggctttctcattgttcctttcattctgctttgagaattttcttaattctaattcttctttaattttcagtggaaggacacaggagctgatagattctccacatgtagagatagttgatttgaggagttttttttttctttaaattgtgctttccttgtatacattctaatagatttgcaaaattccaacctgccatttattgcctatgatactattctaaatggggctcaaatattcttcaagataattcaagaatattagcttattgctattttatacatatgcctaagattataatatcacactttagccattatttttactatcattggaaaatagattttggagctatttccaagttttttttacctcttcagtgaaaggtttattatatcaataatgaaataacctcgtagagcaggagttcagaacatcaagtttaaattctgctttatgatatacatttttaccatttcctagtaatatttgctaaagaaatcttttttctgacctttattgatttcactgtatctactactattgaaatcctactawcaaagaattcacataaaaggttaactcctatatatatatatatatattaatattgaaaagtttctttttccttgacagatcgtataaggccttcatgtgtttgaaataaatttaataccactgaattaagtgaagtagctatggaaacatagggaaacataaagtgaattccatgatt

SEQ ID NO: 73329 - DNA, 653 bp, Homo sapiens
tgccacagtagggtcttaagctctgattcctgaattccgttcttatgagagaccctgaagcagaggaccccgttgagctgtgctcagacagaaagtgaaccacagaaaatgtgaaataactaatgtatgtttttttaagctgctaaatttgtgataatttgttatacaacaatagataaccaatatacaggaactattaacaacacagtaatgacacaagtattaatttcagaaatggtagaaaaagatgacattagaaatacggaaaatgtcataatttttcaacttgttttctttcgctttgtttaatgcaagttaaagtataaatttaaaagaatataatgcattctttttaggtatacagatccatgagttttgattagtgtttgcaacatgatagagatatagaatattttcatcactccaagtttcctttgtgtgattactttcttctcctaaacactgttactttcaatacttacctgatttctgaccctattgtttatcctttttcagaataccctatgcattaaatcatacaggatatagccttttgcttctggcttcttttaattcatataatttagtagtagtagtagtagtagtagtagtagtagtagtagtagtagyagcagtggtagtagtattttaga

SEQ ID NO: 73330 - DNA, 1411 bp, Homo sapiens
tcagttctctgcttgtttatcttcctcactgactgaaactccttgaaggcaggaatcatattttctcaatgtctatagccctgggttttggcacacacctatcaaatacaactatttcttgaattattttgttgggtgaggtagggcagcttttatcattgccatctttcagataagtgagtgaaaattcaaaaaggatgaaaagtcctaccaatagatatatacctaaaagcaagtaacagttgtagaacagaaaaatcaacaagggccatactactacaactactaatgatgataatgattatgataaattttactttttaagaaccatgagagttcttaaaagccatacatattaactcattaaatcctcagatcaactctttaatgtgaatgttcatactatcccctttaccattgaaggatttaagcttcagagaggttcattaacttatccaaagccatacagcttgatgggagagtccctaattccagtacttgtccttcatctgctctccttgctgtttcttagagattttgattaaatgttcaggctctcttccactgtgctacatcaagtagcagccaattattaaaagaataagatagcaaatcaattggttgtttgcctgcaagttgttaaacattggtctgactaggtgaatttcaatgaattgatatatcaagtccaaattaatcctgttcagactactattgattctatagactctataatctttctcacctcaagtaacctagctaaatttaaatttgcaggcacagaacctaaggaccttagaatgtatgggggaaagtcccaaatcttcactcttgccctgaggaatatataagggttgtttcttcctgataccccttcttacatgtcacaatcagatgcaaaattgtttatctcggtggtctggcaattcatgtagttgtaatgggtttrtattttgctgagttataaacagaatcggttggaattgacaggcctactctcttcctcctttgtgctgcccatccctgagcacccactgctcacgaaaccctaatgaaatggtgctctagtaagttaagaatgtgtagtctctgcccttttcccaccagattagaagccccttacagggaaggagcacatctaattcatcactacttccaaagctgggacatttgcttgagctcagtatatgtgtgttgaataaatgagctgctttggcattgataggacgaatcagcctgaaagcccttcctctttctatagcattttccattttcatttcaattgtgtggggtagtcgtgtttatatgtattctttctccagcctaaagcatcatgcctcttttagttggtagcattatttatggtatcttagatggtgatccaagactataactactgtgaaacattaat

SEQ ID NO: 73331 - DNA, 1411 bp, Homo sapiens
tcagttctctgcttgtttatcttcctcactgactgaaactccttgaaggcaggaatcatattttctcaatgtctatagccctgggttttggcacacacctatcaaatacaactatttcttgaattattttgttgggtgaggtagggcagcttttatcattgccatctttcagataagtgagtgaaaattcaaaaaggatgaaaagtcctaccaatagatatatacctaaaagcaagtaacagttgtagaacagaaaaatcaacaagggccatactactacaactactaatgatgataatgattatgataaattttactttttaagaaccatgagagttcttaaaagccatacatattaactcattaaatcctcagatcaactctttaatgtgaatgttcatactatcccctttaccattgaaggatttaagcttcagagaggttcattaacttatccaaagccatacagcttgatgggagagtccctaattccagtacttgtccttcatctgctctccttgctgtttcttagagattttgattaaatgttcaggctctcttccactgtgctacatcaagtagcagccaattattaaaagaataagatagcaaatcaattggttgtttgcctgcaagttgttaaacattggtctgactaggtgaatttcaatgaattgatatatcaagtccaaattaatcctgttcagactactattgattctatagactctataatctttctcacctcaagtaacctagctaaatttaaatttgcaggcacagaacctaaggaccttagaatgtatgggggaaagtcccaaatcttcactcttgccctgaggaatatataagggttgtttcttcctgataccccttcttacatgtcacaatcagatgcaaaattgtttatctcggtggtctggcaattcatgtagttgtaatgggtttgtattttgctgagttrtaaacagaatcggttggaattgacaggcctactctcttcctcctttgtgctgcccatccctgagcacccactgctcacgaaaccctaatgaaatggtgctctagtaagttaagaatgtgtagtctctgcccttttcccaccagattagaagccccttacagggaaggagcacatctaattcatcactacttccaaagctgggacatttgcttgagctcagtatatgtgtgttgaataaatgagctgctttggcattgataggacgaatcagcctgaaagcccttcctctttctatagcattttccattttcatttcaattgtgtggggtagtcgtgtttatatgtattctttctccagcctaaagcatcatgcctcttttagttggtagcattatttatggtatcttagatggtgatccaagactataactactgtgaaacattaat

SEQ ID NO: 73332 - DNA, 1411 bp, Homo sapiens
tcagttctctgcttgtttatcttcctcactgactgaaactccttgaaggcaggaatcatattttctcaatgtctatagccctgggttttggcacacacctatcaaatacaactatttcttgaattattttgttgggtgaggtagggcagcttttatcattgccatctttcagataagtgagtgaaaattcaaaaaggatgaaaagtcctaccaatagatatatacctaaaagcaagtaacagttgtagaacagaaaaatcaacaagggccatactactacaactactaatgatgataatgattatgataaattttactttttaagaaccatgagagttcttaaaagccatacatattaactcattaaatcctcagatcaactctttaatgtgaatgttcatactatcccctttaccattgaaggatttaagcttcagagaggttcattaacttatccaaagccatacagcttgatgggagagtccctaattccagtacttgtccttcatctgctctccttgctgtttcttagagattttgattaaatgttcaggctctcttccactgtgctacatcaagtagcagccaattattaaaagaataagatagcaaatcaattggttgtttgcctgcaagttgttaaacattggtctgactaggtgaatttcaatgaattgatatatcaagtccaaattaatcctgttcagactactattgattctatagactctataatctttctcacctcaagtaacctagctaaatttaaatttgcaggcacagaacctaaggaccttagaatgtatgggggaaagtcccaaatcttcactcttgccctgaggaatatataagggttgtttcttcctgataccccttcttacatgtcacaatcagatgcaaaattgtttatctcggtggtctggcaattcatgtagttgtaatgggtttgtattttgctgagttataaacagaatcggttggaattgacaggcctactctcttcctcctttgtgctgcccatccctgagcacccactgctcacgaaaccctaatgaaatggtgctctagtaagttaagaatgtgtagtctctgcccttttcccaccagattagaagccccttacagggaaggagcacatctaattcatcactacttccaaagctgggacatttrcttgagctcagtatatgtgtgttgaataaatgagctgctttggcattgataggacgaatcagcctgaaagcccttcctctttctatagcattttccattttcatttcaattgtgtggggtagtcgtgtttatatgtattctttctccagcctaaagcatcatgcctcttttagttggtagcattatttatggtatcttagatggtgatccaagactataactactgtgaaacattaat

SEQ ID NO: 73333 - DNA, 886 bp, Homo sapiens
ccttttgcagatttctggggctctctctctgtgcaaccatctcttatccagctctgctctgcaaattcsagccaccttgacctcccaaattttcatcactgtttcttcaactgaggtagtacactgggctctgtttgggttcccgtatcctgcactgtgaccttgaaacttttcgaggtagtcagccagagtagtaatcataggacccacttaatttgtttttcttccttcagggatcactgtcctgtactgcctgttgtccaaacgtttgaataccattgtttcatatattttatcaagttttatagttgtctaaggcaggagggtaaatctagtctctatatggagttcctgcacattcaagcttgagaaacaatcttagaagacttcattagcctcattgtgtccaccaagttctatccaaacttgctcagagatggagtcatcccctaagattttatgagacccaatacaatttttttttcgtaatttcttctcagatgccaccctttttctgaaaagaggtttctgatgccttctacgctagagttgatgtactcttggtaaaccaagatttatgagatcactgataagttcagtatccgtctctggagaacccaaataccttaataatatatatcactgacattgttttctattgaaaagatctgggagataataaaagtgatattctaaagcaattagttgaggcaacagaaaaaacaaaaacataaaaaaagccattaggcaaatgttgaccatttgaagccattctgctttgaaattaggtcagataataggaaaagggtggaactctggaaattttctgcccatcaccaatttgaatattagaccaattcattattcatagaaatcccagaagata

SEQ ID NO: 73334 - DNA, 716 bp, Homo sapiens
  misc_feature (1)...(716): n = A,T,C or G
ggactaagacaagatacatccatgtaaccaacagccaatcaagatacagatgttggaaatattttcaaactatttttagaaatgttttcagtatttactttgtgccgcttacaacttattatggagtcaaagaaccaaactagtttgctttatcttcagagaaaaagtgaattttgtttgaaattatgctttcaagatacatatggacagaattcaaacttgaagaacnttggtttttggttgcacttaattttgttttctttgtggagtcagcagacctctctgcatgtaccctttgcttagcagctttattagaatataattcatgcaccacaaagctcaccatttcaaagagtacgattcagtggtgatgagtatattcacagagttgcgcaaccatcaccgtatctaattccagaatgctttcatcatctcacagagaaactccattctcactaacaatcattcccmattcctcgctttctctagcccctgggaaccagtaatgtacaatactttctgcctctgaggatttgcctaagtaggctatttcaaataaatggaaccacataatatgtgatcttttgtgtctggcctcttacactgtagctataagtgttcacaagggtgtctacgctacattatatcatgtatcagcacttcattttttaatggccaattattattccattatacagacatcccacatagtgctc

SEQ ID NO: 73335 - DNA, 1213 bp, Homo sapiens
ttaatcctttaccttgtstatgatgcaaagacctttgttcacgtgtttgtccgctgaccctctccccactattgtcttgtgaccctgacacatccccctctcggagaaacacccacgaatgatcaataaatactaagggaactcagaggctggcgggatcctccatatgctgaacgctggttccccgggtccccttatttctttctctatactttgtctctgtgtctttttcttttccaagtctctcgttccaccttacgagaaacacccacaggtttggaggggcaacccaccccttcagagttgagttcaaggggtaggatatcttgataatgatcgcctgctaatggcaacatttatgctaagagtttcatcttaaattctaatgtacattttttttttttaaatccagagtttcagggctgcaacaattccatcttcatgatgagtggtatgagattgtgacatcctaagtcacagccctgttccctgggatgagtattgtcattgattatcctttcccagtaaatatgagtagacagtgtcaggtgttaattaggctgcctttagaggtgaagctagaacatatgttctacttatcaagatggggttgttgtttgtgtttggcactgcagaccatgaccatctgagcaaagaaacccattgagattaacttgtaactgtttaatagcatatgtatttttaaagccagcctgcaagaatgattccttgctcattgaggacaagtatgtggccactactgctacatctgtgcacttactggccttggtcagttgtttcctcacactcatcaagtgatgtggaaagtggagtaaacccagtggtgaaaaccaatgatattattaggcagaaagtttaagaaaacgtcacactgcaggaaagcacactgccctctataacatgggaaatcttgatcagccaatcaggtgtcaattgcagagtcaaatgctatagatatgtacctggtgtactggtgtatgcagtcataagattacattttctaataaacatttctgttgttaccattaagtgtatttagcgtgagaaactttcttgagatatattacaataggaaagaagatattgagtgctccaatgacttttagaaaccaatttttaatgcttcttctacaagaactgttgcacttttgttttcctgaagtcttggctcgagtcaaaggttcagaatttt

SEQ ID NO: 73336 - DNA, 1213 bp, Homo sapiens
ttaatcctttaccttgtgtatgatgcaaagacctttgttcacgtgtttgtccgctgaccctctccccactattgtcttgtgaccctgacacatccccctctcggagaaacacccacgaatgatcaataaatactaagggaactcagaggctggcgggatcctccatatgctgaacgctggttccccggstccccttatttctttctctatactttgtctctgtgtctttttcttttccaagtctctcgttccaccttacgagaaacacccacaggtttggaggggcaacccaccccttcagagttgagttcaaggggtaggatatcttgataatgatcgcctgctaatggcaacatttatgctaagagtttcatcttaaattctaatgtacattttttttttttaaatccagagtttcagggctgcaacaattccatcttcatgatgagtggtatgagattgtgacatcctaagtcacagccctgttccctgggatgagtattgtcattgattatcctttcccagtaaatatgagtagacagtgtcaggtgttaattaggctgcctttagaggtgaagctagaacatatgttctacttatcaagatggggttgttgtttgtgtttggcactgcagaccatgaccatctgagcaaagaaacccattgagattaacttgtaactgtttaatagcatatgtatttttaaagccagcctgcaagaatgattccttgctcattgaggacaagtatgtggccactactgctacatctgtgcacttactggccttggtcagttgtttcctcacactcatcaagtgatgtggaaagtggagtaaacccagtggtgaaaaccaatgatattattaggcagaaagtttaagaaaacgtcacactgcaggaaagcacactgccctctataacatgggaaatcttgatcagccaatcaggtgtcaattgcagagtcaaatgctatagatatgtacctggtgtactggtgtatgcagtcataagattacattttctaataaacatttctgttgttaccattaagtgtatttagcgtgagaaactttcttgagatatattacaataggaaagaagatattgagtgctccaatgacttttagaaaccaatttttaatgcttcttctacaagaactgttgcacttttgttttcctgaagtcttggctcgagtcaaaggttcagaatttt

SEQ ID NO: 73337 - DNA, 724 bp, Homo sapiens
ctcattagggtagttgaagaatgaggtaaggtactggctcctgacttcccttgatgattcaaattttacccttacagtttacagcacttactaaggtagcagagtgcagtgattaagagcatggttctgaggccaaaatgcttagattcaaatcccaccacttaactagctgtgtgaccttgtttgagtggcttaactcctctgttctgtaacttcctcctctgtaaattgggcaaaataatagtacttagcacataggaatgctgcaaaaatccartgtcttactgtatctaaaactcttagaacagcatctagcatatcctaaaaatcattgtgttagccattattattattaatatttcttttttagcctagcatttagagtcacataaaaagatttacacttttaaaatcagagtagaagccaatgtatcttgatggtgtttcttacttattgattttctgagaattctttaatacaggagtcatgaattcattcgtcttgcagggatgaagtacaaaaaagggttgcccaagtattggatgttcctgtaagaatcagaattggtccaggatcagtgtgagttactttgaaaaggctaaaataatttatctggtttactcctttaaaataaaggtttgtctcaaattccaagttattgaattaatatacaggtttattttctatttttaaaaacaatttataatccaaacatcagaagaa

SEQ ID NO: 73338 - DNA, 840 bp, Homo sapiens
cataaagatttaaaagccaaaggaagcacattctatcacatgtcactatgggaactgctcccaggcatgctcaacaaagtgcttcctttccactgaaaaataatttcccattgaatctctggtttgaaagaactctactcattgagaatgccaaatcactccactactgaattcatatttgtaacaagaattcctaaacaacagctcagagtcatttattgaaatgttaaaggtaatttcctcttctaggcaatttcttcttcatcctctatactttagttctatcaatatggcatatacacatttggtaccttctccatgcccagaactgttctttcaactgtaacagtgtaagccataagcctctgctcaaggaattaggccacacaggcagagctgttggatgcgtagtgtcctgggtttgttttttttttctttttttctggggccacagagataatccagggccttccatggatcsgaaaaggcagataaagtcaacatcataccccctgtttttccctgctagctgtgaccttataattcttaattcagacagtgaaacagctgattgccaactcttttctttgcaggataatcggagtgatatacacccgtggggtgctgttgttcaccctgtgtcacatggattcacttcttcatttgtccagatgcagctactccagggttccagtgggcctcacttcctgaagagaaacttagaaaagggaggtttccaaaaaaaactgtatttcccatccctgaggttatctctaggccataagtggtattcactatctccttccttcactatccattctaatttccccttgccctcat

SEQ ID NO: 73339 - DNA, 952 bp, Homo sapiens
tgcattagcgatttgtcccartgcactcccttcccttgccctccaccctcccgactggccctggtgtgtgttgttcccctccctgtgttcataaattcttgttggaagaacacacggtgtttggttttctgtttctgtgttagtttgctgaggatgatggcttccagcttcatccatgtgcctgcaaaggacataatcgcattcctttttatggctgcatagtattccatggtatacatgtaccacattctctttacccagtctatcattgatgggcatttgggttggttccatatctttgctattgtaaatatgcactgattatttacctgtggtcctaagggcaccattcctcttggaggagtcattctctgcattggcccacccatatttggatgtcctaaaaaaagtatgaagacattagcaaagtaatgagcatgagtactaaaccagaggctagcagcttcctccctcctgggtgttactgtctcatttaccaagagtctgagtactgacaccatcttaccttggcttccagaccacttttccacctcttaccactacctacccacaccctctattaatgtcttgactgaaattttctccctattctgtggtgaattaattctctaacagcatttgctcctcttcccatggaacagtacaatagagcattacatatctgtggttcctaagtatctctggagggatttggttattgagattgttaaactaatcaggccccttgctgcttagcaccttctttccctctgctcatctttcagatgggctaaggcctctatctgaaaaaggcaaaagaaataataagtgatattatcacttagcttcctacttgttagatgttatataaaaggttttagaattattaattaaaatatggatttttggatcctcatgtattctttttcttatgttatcactaccctcacta

SEQ ID NO: 73340 - DNA, 659 bp, Homo sapiens
cctcccaagtagctgggattataggtgcacatcaccacacctggctaatttttgtatttttagtagagacggagtttcaccatgttggccaggctggtctcgaactcctgacctcaggtgatgtgctcgccttggcctcccaaagtgctgggattacaggcgtgagccaccgtgcccagctccatgtcccattctttaatctcagctgtcttctaggagtgcatcctactgcaccatggatttcattctgcctgatcactaactggaaattaccatcagattccaggaccttctgcatcatgattctcccaggtgcctaaagggaacctgtctctgtcagtttaaatcaaacmtgctggaggtcagaacaatagatgtccctctgtagagcaaggcaggagaccttcatgctgttgtgattgcttggtgttctgacttcctgttctgaaagaacagagagaattgacattgaggcagccagtggaaggaccatttgcttgtttctggaatatctcacagtgaaattttcctcttccacaaagatcatggatagacgaatgggattatggtgagagacattgatcgtggtgaatatgtattaattacctgctatcattattggttattaccatagtattatgagattgctggggagaaga

SEQ ID NO: 73341 - DNA, 1257 bp, Homo sapiens
gctggaggacagtggtgcaatctcagctcactgcaacgctgtctccgggttcaagcaattctcctgcctcagcctcccaagtagctgggattacrggcgtgtaccaccattcccagctaattttgtatttttagtttcatcatgttggccagactcgtctcaaactcctgacctcaggtgatccgcccgcctcagcctcccaaagtgctgagattacaggtgtgagccaccacacccagccttattattatcattatgatgattatttttgtatttttagtagagacgggttttcgccatgttgcccaggctggtctcgaactactgttctcaagcgatctgcccgcctcggcctcccaaagtgctgggattgcaggcatgagccacggtgcctggcctgtttcttacagttctatgtgttggttgggtggttcttccgggaacagcctcactcctgtgctgaggcctctgctgggagagccaggattgcttgtcttctaggaggttcactcaggcttgttcatatggtggtggttgcagggatacccagtcggaaggaacaaaaagcccccaaatgtaaatattttccaaacttctgctcgtgtggtatttgctactgtcccattgcccaaagtaagtcccatggccaaacccagagtcagctttggagaggactgtccaaggatgcagataaaaggtgatgtgaaccaactagagtccaatcctgcaataatcttccactcctttaccctcctatcattattattatatttttttaataatataaaagtgggccgggcgcggtggctcatgcctgtaatcctagcactttaggaggctgaggcgggccgatcacaaggtcaggagatcgagaccttggccaggagatcacctggccaacatggtgaaaccccgtctctactaaaaacacaaaaattagctgggcgtggtggcgggcgcctgtagtcccagctactcgggaggctgaggcaggagaatcgcttgaacctgggaggcagaggttgcagtgatctgagatcatgccactgtactccagcctgggcaacagagtgagactctgtctcaaaaataaaaaaaaaaatactactactactactactaataataatataaaggtaaagttctcactttaccatcctattattattattattccttgtttttgagatgggagaaatagcagtatggatgatgacagggataatccagtcatcagagggaaaagagatgaaggca

SEQ ID NO: 73342 - DNA, 1257 bp, Homo sapiens
gctggaggacagtggtgcaatctcagctcactgcaacgctgtctccgggttcaagcaattctcctgcctcagcctcccaagtagctgggattacgggcrtgtaccaccattcccagctaattttgtatttttagtttcatcatgttggccagactcgtctcaaactcctgacctcaggtgatccgcccgcctcagcctcccaaagtgctgagattacaggtgtgagccaccacacccagccttattattatcattatgatgattatttttgtatttttagtagagacgggttttcgccatgttgcccaggctggtctcgaactactgttctcaagcgatctgcccgcctcggcctcccaaagtgctgggattgcaggcatgagccacggtgcctggcctgtttcttacagttctatgtgttggttgggtggttcttccgggaacagcctcactcctgtgctgaggcctctgctgggagagccaggattgcttgtcttctaggaggttcactcaggcttgttcatatggtggtggttgcagggatacccagtcggaaggaacaaaaagcccccaaatgtaaatattttccaaacttctgctcgtgtggtatttgctactgtcccattgcccaaagtaagtcccatggccaaacccagagtcagctttggagaggactgtccaaggatgcagataaaaggtgatgtgaaccaactagagtccaatcctgcaataatcttccactcctttaccctcctatcattattattatatttttttaataatataaaagtgggccgggcgcggtggctcatgcctgtaatcctagcactttaggaggctgaggcgggccgatcacaaggtcaggagatcgagaccttggccaggagatcacctggccaacatggtgaaaccccgtctctactaaaaacacaaaaattagctgggcgtggtggcgggcgcctgtagtcccagctactcgggaggctgaggcaggagaatcgcttgaacctgggaggcagaggttgcagtgatctgagatcatgccactgtactccagcctgggcaacagagtgagactctgtctcaaaaataaaaaaaaaaatactactactactactactaataataatataaaggtaaagttctcactttaccatcctattattattattattccttgtttttgagatgggagaaatagcagtatggatgatgacagggataatccagtcatcagagggaaaagagatgaaggca

SEQ ID NO: 73343 - DNA, 1257 bp, Homo sapiens
gctggaggacagtggtgcaatctcagctcactgcaacgctgtctccgggttcaagcaattctcctgcctcagcctcccaagtagctgggattacgggcgtgtaccaccattcccagctaattttgtatttttagtttcatcatgttggccagactcgtctcaaactcctgacctcaggtgatccgcccgcctcagcctcccaaagtgctgagattacaggtgtgagccaccacacccagccttattattatcattatgatgattatttttgtatttttagtagagacgsgttttcgccatgttgcccaggctggtctcgaactactgttctcaagcgatctgcccgcctcggcctcccaaagtgctgggattgcaggcatgagccacggtgcctggcctgtttcttacagttctatgtgttggttgggtggttcttccgggaacagcctcactcctgtgctgaggcctctgctgggagagccaggattgcttgtcttctaggaggttcactcaggcttgttcatatggtggtggttgcagggatacccagtcggaaggaacaaaaagcccccaaatgtaaatattttccaaacttctgctcgtgtggtatttgctactgtcccattgcccaaagtaagtcccatggccaaacccagagtcagctttggagaggactgtccaaggatgcagataaaaggtgatgtgaaccaactagagtccaatcctgcaataatcttccactcctttaccctcctatcattattattatatttttttaataatataaaagtgggccgggcgcggtggctcatgcctgtaatcctagcactttaggaggctgaggcgggccgatcacaaggtcaggagatcgagaccttggccaggagatcacctggccaacatggtgaaaccccgtctctactaaaaacacaaaaattagctgggcgtggtggcgggcgcctgtagtcccagctactcgggaggctgaggcaggagaatcgcttgaacctgggaggcagaggttgcagtgatctgagatcatgccactgtactccagcctgggcaacagagtgagactctgtctcaaaaataaaaaaaaaaatactactactactactactaataataatataaaggtaaagttctcactttaccatcctattattattattattccttgtttttgagatgggagaaatagcagtatggatgatgacagggataatccagtcatcagagggaaaagagatgaaggca

SEQ ID NO: 73344 - DNA, 424 bp, Homo sapiens
gtttataaggacaccagtcatgttggattagagcccagtctaattacatcattttaacttgactatttctgtaaaggcactattttcaaataaggtcacattctgaggtaccggggttaggacttcaatatattaatacctttctgtggggacacagttcaacccatagcaaagtactttgcccaggcttgggtacagagtgaacrctcagtaaatatttttcttaccaaagagcctcgtctatcaaagcagagctcagtcctgaggaacaagactgacagctttggctcagcaaggctcacattactcaattatacattcagctctggaggaaggtggcctctgtgttctcagagaacatcatcaatattgtgacactccaacatgtgtcagccactgggtttcccagggctccttctctggg

SEQ ID NO: 73345 - DNA, 720 bp, Homo sapiens
ccacacacggccatctactttcttcttcagcagggactgacaccagggcaaccgtattttcctaaataccttaggaaagtagttcaaaacctagatatatcttggtcagaacaaaacctggcaaacactcatgataaacggtatatataattccttaaacgaaatatagaggtttgtaatataaaataatccatctttgtctgtggaattcctactaatgaaatacgttcttggagacccaaagactgaagttataccacttcttcttaatcttttaaatattatttgcaggccaggcatggtgacacgctcctatagtcccagctcctcaggaggctaaggcaggagcatcgttggagcccaggagctccaggctgtagcgtgctgacagcacttgtgaataacctctgcactcagcctgggcaacatagtgggaccccatcactaataaaaaagygagatcaacattatttattctgttactcgggcataaaataaatattaagcacttactacatgccagagtctattatgtctgctgcagatattggctgtcatagagttataactaacaggaaaccaaataattacgtagtataattttaagtggtgataagcacgattgtttcccccaagccatgcccttaatttctaactcttcagatagtgtttctttaaaaaatttcttgctaatttaaaataacttttgttttgaggcag

SEQ ID NO: 73346 - DNA, 774 bp, Homo sapiens
agtccctctttctcaccagagaaccaggaaaaggagccccatgtaaccacatggagaaaagtctcccttttggctgggtgtggtggctcatgcctgtaatcccagcgctttgggaggccgaggcaggcagatcacctgaggtcaggagtttgagaccagcctgaccaacatggagaaaccccatctctactaaaaatacaaaattagctgggcgtggtggcacatgcctgtaatccctgctacttgggaggctgaggcaggagaattgcttgaacccaggagrcagaggttgcagtgagccgagatcacgccatttcactccagcctggacaacaagagcaaaactcgatctcaaaaaaaaaaaagaaaagaaaagaaaaaaagaagtctcccttttttccccttatgttttctgttctctcctggccctcttctgttctctccatgcacctgttagtcccagatatttgggaggctgaggtgggaggatcccttgactagccccattgcaggcaaagctgttctgctgcatcagtggcagcaggtaagctgttatctaaaagtctgagagaaaaacacatctcttgggccagaggaatcaggaaatgagcctcttgtgatcctattttctccctcttttactactgtatatggagggtggtcccagtaatacagaactgcatcacagggggcgctaaaactaagatacactggccagaggaagtgcagaaaaggggtgtgattcatagtatccttttattaacactttaattc

SEQ ID NO: 73347 - DNA, 732 bp, Homo sapiens
  misc_feature (1)...(732): n = A,T,C or G
tttttaaagacagggtctggctctgtcacccagactggagtgtagtggcacgatctcagctcactgcagcctccacctcctgggctcaagtggtcctcccacctcagcctcccgagtagctgggactacaggtgcgcaccacgacacctggctaatttttgtattttcagtagagacagggttttgccatgttggccaggctggtctcgaactcttggcctcaagtaatctgcccgccttgggctctcaaagtgctgggattacaggtgtgagccactgtkcccagacttccatgtgattctaggtaagggtttagaagaacttttgttccagtagaagaaatggcttaaaactatttttagatattcactgcantgggacatctactttaatatacctggtaaaagtctctgttgtctggagaaatcccagaggatgatgatgataagtcaaaatctggatgtggttctaagggtttaaacagctgatgatgcaaattaggaaaaatgtgttccaattctggaaagtcaaggtcaactgttagaatttttgagggaaaaaaatcataaatttatttttaaggtaaacactagaaaaggagtattaagaacatattcataaacgcttattttcaggtaactccagtgtaacaaaaacttcagtttttcccccatgatcagcagatgctttaaagttaagtcctatcatgattatttcaaaggtccaaaatat

SEQ ID NO: 73348 - DNA, 732 bp, Homo sapiens
  misc_feature (1)...(732): n = A,T,C or G
tttttaaagacagggtctggctctgtcacccagactggagtgtagtggcacgatctcagctcactgcagcctccacctcctgggctcaagtggtcctcccacctcagcctcccgagtagctgggactacaggtgcgcaccacgacacctggctaatttttgtattttcagtagagacagggttttgccatgttggccaggctggtctcgaactcttggcctcaagtaatctgcccgccttgggctctcaaagtgctgggattacaggtgtgagccactgtgsccagacttccatgtgattctaggtaagggtttagaagaacttttgttccagtagaagaaatggcttaaaactatttttagatattcactgcantgggacatctactttaatatacctggtaaaagtctctgttgtctggagaaatcccagaggatgatgatgataagtcaaaatctggatgtggttctaagggtttaaacagctgatgatgcaaattaggaaaaatgtgttccaattctggaaagtcaaggtcaactgttagaatttttgagggaaaaaaatcataaatttatttttaaggtaaacactagaaaaggagtattaagaacatattcataaacgcttattttcaggtaactccagtgtaacaaaaacttcagtttttcccccatgatcagcagatgctttaaagttaagtcctatcatgattatttcaaaggtccaaaatat

SEQ ID NO: 73349 - DNA, 680 bp, Homo sapiens
atgtctggatctgaagagggctccatctcctgagggactgtttccccagaaggtgatctctgtttcaaaataagtcaatgacaggtctagaacaagataacatctgatgtaggtggctaaaacccaagactccaaaccaggcctgtatctaaacaaatgcttaatattagcaaatgttaatacatggggaagactttcctttacaagctcccattaaacttctttctttttgtccttagttttcatgtctcggcactactatcattaactgttgcccataaagcaaacctctttttgcaatgggcttaggactatgctaatagattatttaaaaaaatgctgattgaacatgtggtctcatgcccctttccagtagttctggctttcctggtgggtatcttctctccaaggaaagaaatatattgctccaaggagagaagatattgcatagaatatcagaaatatatttgtgtttcttaaaaacagtcatggtgcttgacagtagtatgatgaaggataaagtacatcactagcctattaataatactttaaaggctgggcrcagtagttcacacctgtaatccttgcactttgggaagccaaggcgggcagatcgactgagctcaggagtttgagaccagcctggccagcaaagtgagaccctgtctcgactaaaaaca

SEQ ID NO: 73350 - DNA, 638 bp, Homo sapiens
tacccacacagtcccacacaccacaggagaaaacagataactacggcctgaccattagggccaaggccaatagcaaaataagttttgcctttaatctgttttctccatatctaaacatttgaggtcaagagtgtggacagatctgaagacacagagttttattatcctgtggccccaacattctttsttcactgtctgatctctggaagaaaatgggcaacaggtggctatcagtggtctccttgtggttattttgttcttgctgccctctgctctttctatggccactatctgttccaccctcagaactgaagggagatgttggtagggagaggcttttccttcacctctggcagaaaaggtttgctggggcccttcacctcccgacatcagagctgcacttcaatgtggaagctttggtcatgtgtggctcctgagtgcctggaatgttcctggtctgaactgcgatgtgctagaaaggtaaaatacagagttagtttcaaagatttagtttcaaatatttatatactttattaataatcacatatttctcacacattaaaatgaaaattttttgatatattgggttaattaaattgttacaatcaattcaacctgttactttttttttttaagtt

SEQ ID NO: 73351 - DNA, 665 bp, Homo sapiens
aggttataaatgaccctgtctcctttgtttggtatactctcatggcaaaactgccggtgagtgtcccctttctgcaggaagtaaaaatggccttgctgaataaattaaatttatgttcaaatgctatttctttatggcaccagggaacaagcatttcaaacatatctttacaggaaatgaacaaaccgtgtgggtgccctcaggaacaaggttccaactggagtcatgctgacattaaccctcataacataggaacagttcaagaaaaccacacaagaagctgataaactgctggagtgccagggtcaggcaaaaactcctgactccatatttgtggccaagctggctgtaattttctgtacatytgtaagatcagctggaccaccagctggcagttgagggctgtacagtctgaattgccttttttcaactaaaaacaggacgagatgttacaggccaaaaaagtgagggagggttgtgatcaactcagagtaccactggacgctatatgagtaaacagcaagctgttctcatgaatgcagaatgttggcaaactgacaaactacatttgccacccagaggttatgctgagggcggtcacatcccaggcacaagtgtttcatgtgattaggcatacctgaagtctaatagcaacaatatgaacc

SEQ ID NO: 73352 - DNA, 730 bp, Homo sapiens
aggaggcagagattgcagtgagcagtgcagtgagatcataccattgcactccaagccttggtgacagagcaagaccatctcaaaaaaacttcactgaaaaacaaaaaaatagactaacaaaatataagattcagtgttaaaaggtaaatattttatagagattttgagcagaatcatgaataaatgagagaaactagcatttgtaataataatattttgtgggtttttggatgtcctgtttaactcagtatccattactttataagtgtattgcttatttttttgtagctgtaaaagagactatgctgagctcagattaaaaawttttttttttttcagaactcaactgcttctattaagatatgaagctcagctagtaaactcattaagtaaagaccctaggcagttctccagtgctgagcctgaaagcgcggtagtgcagacgtctttgcatcaccgtcatgaatgaccttgaagaaagccagcactttataaagcaaaatcctgtctgtggcacttcgttctgatttgattgatgctttagaaaaagctgtaagattttcttttctttataatgtggggtatatattctttatacttcatagattttgcacttgtctggagtattttgttggcaggttcttataggttctgatctttcactgactgtagtacaagtaagggatgaaatcactctcgtttgatcaattattattagggagtaaggtct

SEQ ID NO: 73353 - DNA, 558 bp, Homo sapiens
tgcaattcctgctgccctaamcctctcctctctccagaaggccacagaatggcctcatatggtccctgtaaaattcccacctttggtcagttttatagattaggccagcctctttgatcatttcagatccttttgaattcaggctaaacctctgttcatgtgcccattttcctcttttcctcatgaatcttcaggctcagtgatatttgtttaaagtaactcaatatttactttatttctttcagcctgaaagagactgaaacatattccaaatgaggatatactaattgcctttcatctttttgttattgtcagacagtatattgggaaattttccatttttctttaatataattggtctgtcatgaacatggtcaatgaggtctatttcaaaggagattcctagatgtgaaataaatagaaagcccttgctatacagtaaaattgatttctaaaaatctaatgtaacaatgtttactcacacaaaaacaacctatcagaaaatctcagtgtttcctcaaagataacgaatattacctttttaaatacgccattgta

SEQ ID NO: 73354 - DNA, 558 bp, Homo sapiens
tgcaattcctgctgccctaaacctctcctctctccagaaggccacagaatggcctcatatggtccctgtaaaattcccacctttggtcagttttatagattaggycagcctctttgatcatttcagatccttttgaattcaggctaaacctctgttcatgtgcccattttcctcttttcctcatgaatcttcaggctcagtgatatttgtttaaagtaactcaatatttactttatttctttcagcctgaaagagactgaaacatattccaaatgaggatatactaattgcctttcatctttttgttattgtcagacagtatattgggaaattttccatttttctttaatataattggtctgtcatgaacatggtcaatgaggtctatttcaaaggagattcctagatgtgaaataaatagaaagcccttgctatacagtaaaattgatttctaaaaatctaatgtaacaatgtttactcacacaaaaacaacctatcagaaaatctcagtgtttcctcaaagataacgaatattacctttttaaatacgccattgta

SEQ ID NO: 73355 - DNA, 628 bp, Homo sapiens
tgcagcccttggcgtccggaagagtgacagccacattcaagtctccctggcacgtgaggtccatggtgcccctgactcatgtcctggctccagccaatagcccagacccccatggaaggttccagcaygtgcaaaaatgcacattggccaggtggctgccccccggagacatgtgtcagagaggcacgggtcaggtgacccaagtgtccaaaactctcatggagggtcccagcccattggccaccccaagccaaccacagcagggtctgagcctcagacgcgcagtggcctagtggcttctgctctgacagctcacgtccaggttataagggagacgggcagcgttaatagaaaactttgtacatacacatataaaaaaccatttggtcttccattaaggctgttacagtttaaagttacgtaaaccacgtacaaagaaacagttaaacgtacaaaaaggggagtggggagatgtgaggccgcaggtggagatgtggtgctccccacaggtgcgtccatgatttgggggctgcgtgcgagggggcctggctccagccggcctctccctgccttgactctgcacttggggccggtgcccacctcacgtcactcttgagcttttgattct

SEQ ID NO: 73356 - DNA, 810 bp, Homo sapiens
ccgaggttagtttccagtactggttataagtaagttaaatttctgaaatgttttgggcactgttcagtaccctttggagtagcctgcagtttctttactgctttcaagtgctgatgtggaggaatcattagtgttgggcagggaaacaggagctgtcagactgagagggccagggatgttcattgtggagattaaatgttctgagtaagtgagtttgtagacattttcttgtaagaaaatgttccatgctttactctgttttggacattttcttttgaaaaattttgagatagaaaccttaatatcatttcatatatttagagcatatagttaatttgagtagagtcaaattaatcttactttagaatttgattactaagtattagcatggataataatgcttcttttgcttaaatgtaaaaattaggccgttttactaggtgtactttgtcttaatcatattcctatttttttatacagctgtgcaaccatattgcttctgggaaaaaatgtcaatatgtkggaaactgttcctttgctcatagtcctgaggaaagagaagtttggacttacatgaaggagaatgggagtaagttaatcttttagctgtgtccttgagctagcttgcctgaaagttcttttcctctctataaatatgccagcttcctgtgaacacagaaagcagtttgcattctaaacggttgccccgtttcatcagtagctctgttggcgatgatgcctggaaaatgtgggcacagcctcagtggggtagaatgtggcgtctgatctgtgtttggttaggtcagattt

SEQ ID NO: 73357 - DNA, 658 bp, Homo sapiens
tcctgcctcagcctcccaagtagctgggattacaggtgcctgcgaccatgcccggctacaactgggtgaagaatttgaataaacatttctccaaaggaggcttacaaatagccaatatgcagataaaaagatgttcaacatcattagtcattagggaaatacaaatgaaatccacaatgagatactacttaacaaccaccaggctggctaaaatttaaaaaagtaaagacaataacaagtgttgacaggatgtggggaaactggaacctttatatattgctggtagaattacagaatgatgcagccactctggaaaacagtttggcaattcctcaaaatattaaacacagagataccacataacccagcagttctactcctagttgtagatccaagagaactgaaaacatatatctacacaaaaacatgtacacaaatgttcatatcagccttattcataatagctagggtggaaactacccaaatgtccatcagttgatgaatgggtaaacaaaatgtggtatatccatacaacagaatattacttgaacatgaatgaaattctgatacaagctacaacatagatgaaacttgagaacgytgtgcaagttggaagaaactaaggcaggagaatagcagagcaagctgggggcgaagc

SEQ ID NO: 73358 - DNA, 619 bp, Homo sapiens
ggatccaggaaactcatcagcacaaatttycaggtcactaattttctgagttacattctcctccacaggaggtgtctgtgttttatgttcaaggctcttcgaagaacacttgtgctgttcttccattattaaaccaggtccatcctcatggtttctacattcacatacttcactctgtgttctccaagaaccaatccttcaaatgatttggattttggctaggtgccagctcagggaattcggtaaaaagccaatgtctatccttgaaaaacccattttcgtggatttgtagaagtcattccagtatttgtgggcattgatctcataatcaactgtaaatatttaagaaaaaattttaagaaccagctctcaaatattttatttatatctaacgtcaattatcctgctttaccaaatgtcactttaatactaaaattatcctcaggtagagccacagtcccagaactgaaggcatttctgaggtcatttagtcctgccatctggcattatacccaaatgccccatccgtcattataggagtctaaattctgtttgaacaatcaaccagagaacttactatctatcaagtgtcctcctacatcttgggatgacttttttt

SEQ ID NO: 73359 - DNA, 619 bp, Homo sapiens
ggatccaggaaactcatcagcacaaatttccaggtcactaattttctgagttacattctcctccacaggaggtgtctgtgttttatgttcaaggctcttcgaagaacacttgtgctgttcttccattattaaaccaggtccatcctcatkgtttctacattcacatacttcactctgtgttctccaagaaccaatccttcaaatgatttggattttggctaggtgccagctcagggaattcggtaaaaagccaatgtctatccttgaaaaacccattttcgtggatttgtagaagtcattccagtatttgtgggcattgatctcataatcaactgtaaatatttaagaaaaaattttaagaaccagctctcaaatattttatttatatctaacgtcaattatcctgctttaccaaatgtcactttaatactaaaattatcctcaggtagagccacagtcccagaactgaaggcatttctgaggtcatttagtcctgccatctggcattatacccaaatgccccatccgtcattataggagtctaaattctgtttgaacaatcaaccagagaacttactatctatcaagtgtcctcctacatcttgggatgacttttttt

SEQ ID NO: 73360 - DNA, 619 bp, Homo sapiens
ggatccaggaaactcatcagcacaaatttccaggtcactaattttctgagttacattctcctccacaggaggtgtctgtgttttatgttcaaggctcttcgaagaacacttgtgctgttcttccattattaaaccaggtccatcctcatggtttctacattcacatacttcactctgtgttctccaagaaccaatccttcaaatgatttggattttggctaggtgccagctcagggaattcggtaaaaagccaatgtctatccttgaaaaacccattttcgtggatttgtagaagtcattccagtatttgtgggcattgatctcataatcaactgtaaatatttaagaaaaaattttaagaaccagctctcaaatattttatttatatctaacgtcaattatcctgctttaccaaatgtcactttaatactaaaattatcctcaggtagagccacagtcccagaactgaaggcatttctgaggtcatttagtcctgccatctggcattatacccaaatgccccatccgtcattataggagtctaaattctgtttgaacaatcaaccagagaacttactatctatcaagtgtcctcctacatcttkggatgacttttttt

SEQ ID NO: 73361 - DNA, 246 bp, Homo sapiens
tggggttcctttagtcttgaatgtcttatgmtcaattatttggtgttgagcctctcttccacaagagctcctccatgtttggatagcagttgaagaggttgtgtgggtgggctgttgggagtgaggatggagtgttcagtgcccatttctcattttacattttaaagtcgttcctccaacatagtgtgtattggtctgaagggggtggtgggatgccaaagcctgctcaagttatggacattgtgg

SEQ ID NO: 73362 - DNA, 537 bp, Homo sapiens
ggccaacatggtgaaaccctgtctctattaaaaatacaaaaattagccaggcgtggtaccacatgtctgtaatcccagctactaaggaggctgcagcaggggaatcacttgaacccaggaggcggagaggttgcagtgagcagagatcatgccactgcactccagcatgggcaacagagtgagactcttgtctccaaaaaaaaaaaaaaaaaaaaaaaagaaaaaaagaaaaaaaaagtttgtcttcaaagaacttccttctgtgtggtcagattccaatttctcctacaaagattaaaactatacgcgacaattactgagttcctgtaggataatgataaccaacaaagaactccaaaaaccatgtagttctccaaaaagcataatcaaaactactaatgccagtacagtaactgggataaaaagaatcctacagaatataaatgtaaatggaagtgaggaaattaacatttataacttcagtaatccatgcaagaacaggaaggtggagactgtacagggaaaaaggggtaygag

SEQ ID NO: 73363 - DNA, 1754 bp, Homo sapiens
ccctgaagtcaggagttcgagaccagcctggccaacagggtgaaaccccatctctactaaaaatacaaaaactagtcaggtgtggtggcaggcacctataatcccagctactctggctggggcaggagaatcccttgaacctaggaggtagaggttgcagtgagccaagatcatatcactgcacttcagcctgggtgacacagcaagactcaatctcaaaaaaaaaaaaaaaaaaaactaataggcaatggaatagaaagcaaagtttgcaaaatgttttaatatatataagatcaaatatatattttgaacaatccggcagcttcatgctgcacttccacatccccagaggtatgcattcactctcttctttcagtatgagaagcactgataaaagagtacttaaatcagaagaacagctttgaagtcagttctgcatttgaatactggcccaattacaagttgcatgattccaggcaaattacttcaactcttgaagttcacctatacaataaaatcatgctaagcttgtgatgatgcttaaatgaaataatacatgtaaaatagttagcaaatattaaataaatggtagttatcattagttcaactacattgaaatgtaacaacaaaatataaatcgtagcatccgcttaattaaatccaaacaatcacatgtttttaaagtcatttccaatttcttcttccaagctcttttgattcacacagggaaaaaaatgacataggcctctatctgaatttatgtagcttcatatgctataaatacagttgcaacttatttcaaaccaaagaatacaatctttcaaccaatttccagcaagcaacattagaaaacttagtcaacattcaattagatgtgtttcagtaagagtgtgtgtgtgtgtgtgtgtgtgtgtgtgtgtgtgtgtaaaatacattataaaacaaggttgctttaacactggaaaaagatgtggagtgttttgtgaaataaattactctgcacagatgacatataacatgcaaaatcagaacttccctacaatgagaaagtagtcaagaatttataatgcgatggacaagctataaccaagagtagtaataatgtgggaatcttttataaacctgaaggttttatttgagcaaaattttccatcaatatatataggatccaaaattatttataatggatacaaataaacctatttatttttaaagaaaatgaattgcctcttaagcgatgaagtgactgaagyagtatgacaaaattttaaatgctgaatttaaaaattagagaaataagcagcactaaagccaccaaagcaacatgttaaacctttggtccgcactaaatggattacaaatcatacacaagagtgtgacacggtatttgaatacaaacagacaaggaagaaaaattttcaactgagattcctaaaaattatgctaatcaacaaaaatgcatcaaacactatgtatccattttcaaaccgtctaccctacctctaactcacgtaacgagatgtccccgttagcccagggaaagtcccagtttactcctgtcatctcagcaaaattattaattgcactttatttctctcccacatgtcctggtttgaatcataaattatttactcacgctccttctaaatacctggctccttctggccataagctattatctttgcccagatccagatgtcaggataattacacatatattccaaggcaagttaaataaactttgtgtgtgtata

SEQ ID NO: 73364 - DNA, 626 bp, Homo sapiens
cttaagtatgtgaaaatgtttgctactattttaaatgttaaataagtaagtacctactctgggcaagtttccatggatgatttgaagatatataatgcaaaggaycttatgctaatatttgatgagaaaacgttttaaactactgtgctagaaccaagacagtgattaatgtttggtggctaagtaaagaaacagtaagttaggaagaactttttgttaattgaaaaaatactaacttcagtgttcttctgaaaataatgcttccacttccccactgccccgaaatgtttttcagttccttcattaaaaggaatgataaaatgtcagagttcaaagaatcttggatctggctcaagtctaattcttaactgccgaaagtactgtgacccagaaagatatggtggcttaaccaagatcactaagttaaaagagccatgactagaatttgttgcacattcccaatttgccattatcttagccaagagcacatagtataaaagcccctcctggtggttatcactaagtgaagaccaaaatatgactcatgttacaacctgtaagaatatgtgttggccgggcaaacctacaatcccaatggtttgggaggccgaagccgcaggataact

SEQ ID NO: 73365 - DNA, 1260 bp, Homo sapiens
gcatttctcacaggcagagtgtatttcttaactttatatcgccagtatctaacatatatcagtcacatagaagatacacaagaaacagttgtcagaaaagaaatagctgaatgagaaattcagaaatagctgaatttccaaaccatttgcaaattattctgagctattaattctgatcaagtcttaccatatttctagatgtattcaacatgtatttatctagcacttgtgccaagtacagagggacagtacatgcagtgaaaagttgaaggaagatagcacagttttgattgacagaaaactcaaactaaattatccaagttctaaaaagttacttctcattcagacttaagttctattatagttatatctggctcattttgttaatattatacaacttatattattacacaaagaacaggaaataaaaaaagcacaatgtattaacataccagagacaccatggcccaaccagtcttgttatagatgaactccaagttgttccttctcaaataaagcaaacctccaacaagcgacactaacagggccaaagcaatggtaccagagtagttgggtggtctgaaaacccgaatctgcaaaaatgcaatagaaatttcaaaaatgaaagaaaaataaaatttttcttttgatcatattctagtcctcataattttcaacgcaaagaactcagaaacatgccacccaacttttcatacgtgacactagcactactttcattctgccataagatatatgccttaagacataatggctatgtaaaacgactttgcacttccctgatgactaacaatgctgagcatcttttcatgtgcttatcagctatttttatattttccatgaagaaatgcccattcagatcctttgcccattttgaattgggttttctctttttaagttgtaagactcatgtatatatatatatatagacaaactagctgtaagtatcttatagaaaaattatttgcaaatattttcccccattctgtgtgctacttttttgacggyatcctttaaaacacgaagactgtagtatagtatagcttttactacttactatatccacatagacagcttattaattacaaaggaggaccaaaaatcagtaattataccatgaaaaaatgggaaacatcttgatcagatatttgaaattcgtatcaccagtgaaggacagatggacattacgtgcctatagaggtgattaaaacaaaacaggacctatgtaatattatactcaag

SEQ ID NO: 73366 - DNA, 1260 bp, Homo sapiens
gcatttctcacaggcagagtgtatttcttaactttatatcgccagtatctaacatatatcagtcacatagaagatacacaagaaacagttgtcagaaaagaaatagctgaatgagaaattcagaaatagctgaatttccaaaccatttgcaaattattctgagctattaattctgatcaagtcttaccatatttctagatgtattcaacatgtatttatctagcacttgtgccaagtacagagggacagtacatgcagtgaaaagttgaaggaagatagcacagttttgattgacagaaaactcaaactaaattatccaagttctaaaaagttacttctcattcagacttaagttctattatagttatatctggctcattttgttaatattatacaacttatattattacacaaagaacaggaaataaaaaaagcacaatgtattaacataccagagacaccatggcccaaccagtcttgttatagatgaactccaagttgttccttctcaaataaagcaaacctccaacaagcgacactaacagggccaaagcaatggtaccagagtagttgggtggtctgaaaacccgaatctgcaaaaatgcaatagaaatttcaaaaatgaaagaaaaataaaatttttcttttgatcatattctagtcctcataattttcaacgcaaagaactcagaaacatgccacccaacttttcatacgtgacactagcactactttcattctgccataagatatatgccttaagacataatggctatgtaaaacgactttgcacttccctgatgactaacaatgctgagcatcttttcatgtgcttatcagctatttttatattttccatgaagaaatgcccattcagatcctttgcccattttgaattgggttttctctttttaagttgtaagactcatgtatatatatatatatagacaaactagctgtaagtatcttatagaaaaattatttgcaaatattttcccccattctgtgtgctacttttttgacggtatcctttaaaacacgaagactgtastatagtatagcttttactacttactatatccacatagacagcttattaattacaaaggaggaccaaaaatcagtaattataccatgaaaaaatgggaaacatcttgatcagatatttgaaattcgtatcaccagtgaaggacagatggacattacgtgcctatagaggtgattaaaacaaaacaggacctatgtaatattatactcaag

SEQ ID NO: 73367 - DNA, 1030 bp, Homo sapiens
tgtaaactgcgactgcatgctgaaaaaacacatttcctctatgttgcaaaagttaaaatgaatttatcataatggcaaaaacctgtacaatgataaaaataagtttagccataattatgttaatcacatcacaaaatgtattataactacttattgtatttactaacctattgaatgaattgtatttgtgtgtgtgtgtgtgtgtgtgtgtgtgtgtgtgtgtgtaaaagtcttgctctgtcctccacctggaatgcagtggcacaatctcggctcactgcaacctcygcctcccaggttcagacgatgaatgaattgtatttttatgtgacaaacaaaaatgtatcgaccacaaacaactatgttaaatatatgaatacgatataactctttacctgctgaaaaacgtctgtcccctcatcatagtccaccatactgaagaagagcttgttacaaaaagcagatgaatagcgccaggagttcgccagtatttgatattcttcattagcttgcctgataagaataatgggccatagtagaaacacatcagtactgaagcatctacaaagcagttattaaaacagacaaccctaggacaagcactggccagtttttgtacagactgtaagaaaagcatagtttttaaaatatttttttttaaaaaaaggattctctgacatgaaaattacataaaattcaaattctgatgttcataactacagttttattgcgacacagccacatttattcatttacatattgcttatgtgctataagggcaaagttgtaacaacaagacagcaactacatgtatcacaaagcctagccctttaaataaaaattttgccaactcttactctagggaataaaaacattttgcagcattccctatacacataaattaaatattccaataatgtttagtaaaatgcaaagaccaatttttaagaatatttgcaacttagtttaacagaaaaacaaaattaatagttttaaaattttaaatacttatactccaccttattcattc

SEQ ID NO: 73368 - DNA, 582 bp, Homo sapiens
cctttgataaactaggcttactcttgatataggatttctgtgaaattccttccttcttctcaatgcaacttttcttttttttttttttttttgagacggagtctctctctctgtcgccaggccggagtgcagtggcacaatcttggctcactgcaacctccacctccctggttcaagtgattctcctgcctcagcctcccgagtaggtgggactacaggcgagtgccaccgcgcccagctaattttctctatttctggtagagacaggggtttcaccatgttggccaggatggtctcgatctcttgacctaatgatcygcccacctcggcctcccaaagtgctgggattacaggtgtgagccaccgcgcccggcctcaacctagcttttctatagctacagagcacacatggcacacaatacatataacacactcagtatacatggcaaagaggtatgtctagtacatgggagcagataaacatgcctcatgaattcctagtcttcgtgtataacttaacactgcaatttatcactcccttaaataaacctttttgaacacacagattaacaggaaaaacca

SEQ ID NO: 73369 - DNA, 576 bp, Homo sapiens
tgcctttaattaattaacttacttatttatttatttgagacagagtctggctctgttgcccaggctggagtacagtgatgcaatcatagttcactgcaacctccaccccacggctcaagcaatcctcccacctcagccgccccagtagctgggaccacagtgccaccacgcatgcctaattttttgtatttttaatagagacagggtttcaccatgtttcccgggctggtctcaaatttctgagctcaagtgatccgcccacctcagcttctcaaagtgctgggataacaggcatgagccaacacatctgaccgatttgcctttaacaggcatacttttatcatactgtaataaagccttttcttcctattgaattgcaggactaagtttttcaaatagatatcttgtaaggagatgaaacaatttttaaatgtrttttttcactataaatcaccaattaaccgattctgtctcacagttaaaagtaagaaaaccctgaagttaccaggttcactaaactgtctccaccagtcggtctcattcagtagctgtgagcccaatatatggtttccgtgt

SEQ ID NO: 73370 - DNA, 555 bp, Homo sapiens
ttgtataaggaagggctttattcagctgggagcattggcaagctactgccttaaaatccgagctccccgagtgcacaatttctgtcccctttaagggctcacaacactaaagattttacatgaaagggtcgtgattgatttgagcaagcaaggggtacgtgacaggggctgcatgcaccagtggtcatagagaaacagaactgggcagggagtttcacaatgttcttctatacaatacctggaatctatgaataacatcggtttctaagccatgagttgatttttaactactaggtttaggccaggcaggcccaggtcygattttgggcctggcgccgggctgcctgtctttgatttcacttccttgtttttttcttaaaacaggtactgagtataaaacaatatgagagggtctctctcttccctcactttcaagacctgatgtttggagcattacattttaagtcttatatgtaataactaaaccttttcttgttagcattaatttgttttgagttctagagacatgtgagacatagtcttgaggcgaattta

SEQ ID NO: 73371 - DNA, 877 bp, Homo sapiens
tctccgtaagttgctttctctgaatacaaaactattgtttgactgtctttaagaatattactttttcatcataacttcttctttgaaaagatcccccagggccacccaaggacctgcaccatgtagatgttgacaagactgaagtctccctagtctggaataagccggatcgtgatggtggttctccaatcactggatatttggtagaatatcaagaagaaggcacccaggactggattaaatttaagactgtgacaaacttagagtgtgtggttactggactacaacaaggaaagacctatagattccgtgtaaaagctgaaaacattgtgggtcttggtctccctgacasaactatcccgatagaatgtcaagaaaaactaggtaatttttggactagcagtattaccttatttctttttaaaattattcatataggtgaaaatcaaaatctaattttttcatgtttacttttcagtgcctccatccgtggagctagatgtgaaattaattgaaggtcttgtggtaaaggctggaaccacagtcagattccctgctattataagaggtgtgcctgttcctactgcaaagtggacaaccgatgggagtgagattaaaaccgatgagcactacacagttgaaacagacaacttctcatcagtacttaccattaagaactgcttaaggagagacactggggaatatcaaatcacagtttccaatgcagccggtagcaaaacagtagccgtacatcttactgttcttgatgttcctgggccaccaacaggtcctattaatattctggatgttactcctgaacacatgactatctcatggcagccacctaaggatgatggaggaagccctgtgataaatt

SEQ ID NO: 73372 - DNA, 1553 bp, Homo sapiens
ctagataatggtggctcagaaataacaaacttcatagtagaatatcgcaaaccaaaccagaaaggctggtcaattgttgcatcagatgtcactaaacgattaatcaaggccaaccttttagccaacaatgaatactatttccgagtttgtgcagagaataaagtaggtgttgggccaaccatcgaaacaaaaactcccattctggctattaaccctattgacagaccaggtgagcctgaaaaccttcacattgcagataaaggaaagacatttgtctayctaaagtggcggaggcctgactatgatggtggcagtccaaatctgtcatatcatgttgagagaaggcttaagggctccgatgactgggaaagagtgcataaaggaagcattaaagaaactcactacatggttgacagatgtgttgaaaaccagatttatgagttcagagtgcaaacaaagaatgaaggtggggaaagtgactgggtgaagacagaggaagttgttgtgaaagaagacttacaaaaaccagtacttgatctgaaattaagtggggtcctaactgtcaaagcaggggacaccattaggcttgaggcaggggttagaggcaaaccattcccagaagttgcatggaccaaggacaaagacgctacagacttaacaagatcaccaagggtcaagattgatacccgtgctgattcatctaaattttctcttactaaagcaaagcgaagtgatgggggtaaatatgtagttacggcaactaacacggctggcagttttgtggcctatgccactgtcaatgttttagataagcctggtcctgtgagaaatctgaaaattgttgatgtgtccagtgataggtgtactgtttgctgggatccaccagaagatgatggtggctgtgaaatccaaaattatattctagaaaaatgtgagacaaagcgaatggtttggtctacctattctgctactgtcttgacacctggtactacagtaacacgtctcatagaaggaaatgaatatattttcagagtccgtgcagaaaataaaataggcacagggcctccaacagaaagtaaaccagtcatagccaaaaccaagtatgataaacctggtcgccctgatcccccagaagtcactaaagtaagcaaagaagagatgactgtggtttggaatccacctgaatatgatggtggaaagtctataactggatactttttggagaaaaaggaaaagcattcaacacgatgggtccctgtcaacaagagtgcaatccctgagagacgtatgaaagtacagaatctcctcccagaccatgaatatcagttccgtgtcaaggcagaaaatgaaattggaattggagaaccaagcttgccttcaagaccggtggtggcaaaagaccccataggtaggatgtccttgttttttctgatattacagcaactcttaatctcaagcacagaagtattcgataaataagttaatgtaacatctaaatctgtaacatccaaactgtatttagcaaatatttttccaaatagaccttttaccaa

SEQ ID NO: 73373 - DNA, 1147 bp, Homo sapiens
gcataggaaggactaagtgtgcaggaagagagaggaaggaggtcaaggctggaaacagcaaacagagaagatccttacactactccaaaagtaaggcaaagggggtttttgtcatgttagctccagcaaaaattgaagagagagccaaatgtgagttccattttctacatggctacaatatatagttgctgttgatcttagaactttgaaataatcaaatctgatgctgctatgaactattagatttaacaacttcatacaagctaaaggagactatctcccaaacacagaaataagtgaaggcctgtcctctagagttacataaggagaatcataaccaatttctactatcaggctctctgcaggaacataaataaacaggcaacttactaacactatcaaataacaacatttaagactcaggatgaatagatttgatattgaataatgagaaatgatgctaatattatcagatcaaaaggccacgttaattttacagagagatgacagtttcatatttggacaaaaggaaatagctaaataagaaatagtaaaggttaataaactaaggacttttttgttatgtttttcattattgtttttaataaaaggttagatatgatccactrttttgtttttgtttgagatggggctttgttctgtcatacagaccataagcgcagtggtgtgatcagagctcactgcagcctcaaacccctgggctcaagcaatcctcttgaatagctggaactatgggcgcatgccaccatggctggctcatataggatccactattgtatcaaaaatctacatctacttctgcagcactattaaatgagatacaacataaaaccatttttctaaataagtatattaagattatataatatgatacagtatgattttaagaagtcatctaaaacaagttcagtgactacttaattccacattgagtagagcagttttctgataactagtgtcattgttgtctctttacatttctaacaaaatattctatgatctcacataatttccagcattattttttgtcaaatatttaatatttatttcattatgaagattaacggtacttatgaagaaaggataatttgttcagaaaaccacatgtggagtattggataatctg

SEQ ID NO: 73374 - DNA, 657 bp, Homo sapiens
ggatccactaagaaggtccatctacaagtttaggctccctctagatcctggggcagtcatgcctggatcatgacagagacctagaacctgaccatcaggtagaaacaaatgaagttcatcaagcggcaaagtggaagaaggtatatatacaatggttagaattggacttggaacctagaccttctaggattaaatattggccgcaccacttactagttttgtgaccttggtgaccttacctcacctctctgtgactcaatgtagcacctgcttcggatggttattttgaagattatattagctaatacatgtcaagttcttagtatgacttctgatacacagtgagctatrctatattttactatatataggtatactttactgtactctagctttatgatgtcatatttaaagaagcagccagtactaaactttagccaatgctggaatgctgccacatatttaggtttttcagtaaaatctagaaattgagaatttatgtgaaatgtcaagacttttaaatgtgaaatgtcatgactaaattaaatgaactaactcaggtctggtttatttttaaagaactatgtgtggtctgaacaaaacatgtctgcaggatgaatgcaccctgaaggttgaagtttatgattgtggcaatca

SEQ ID NO: 73375 - DNA, 652 bp, Homo sapiens
tttgcaccctctatggcctggctcatctacagcttcgtactgagagcctgtcatacccaaaaccacggcaggcccatggagagcccaagtgagatatatctgtgaagtgaataaggtaagaaggtaggctttgattcccacatctagagcatgtccatgagaagccctggctataaccatcctaactgctgtttcttcccctgtacccttatttcaccgggttcacacctctggggccattccacccaacaggccttttccatggatctctggctccaactcatttccaaatacaactatagcagtaaattgggctctaaaacataggtaaggtagtgatagcactgatgttcacatatggatcttttragacccctttcctaggactgaatttccttctgacacagacctatgggaactctgctagactccactggtctgaacactgacacttggaagccttataactgcatctgtccagcttcagacagagtgcctgatcagatgtgagttccctacatctccggaagctggtgattcagactgccagacattctctgggcaggccagcatttgttatctttaaatctctttcttgctctctctcctgactctcttccaacattaagagttctcagcatgttatacagtt

SEQ ID NO: 73376 - DNA, 882 bp, Homo sapiens
caacagggataaaagatgcaaagtcttataatcaaaaaggagagtcatgtactctctgtccagagtaacgaaaggactagggtatgagggaaaaacaagtattcaagcaaggaaatgtgggttgttttttccactactgataacgcactggacacctgaataaacttggcagactgcatttcaagccgtaattgtgtacgtctccttctttccacattgtatgcttcattaaatcttccatgtatcctgtaccttgatcttcctcaagccctttccacatcaaaactcaccaaaatggtctagctccttatttccagttggaatttcctctctggttggggtacacttctgtgaccacatcttttaagctgcatcttatgattcttcaataaaaatagactcaattcccttcaaggaaactggtaccagaaacatttctgcctcacagaatctatcacctacaggtaggaatgttctgctctcttaagagctttgtaaactagaacatggtatacaagtgtaagccgtgactcagctgctgttattagtcactttacccttcagagttgcttatatctaaaatagtctgtctcactctyaacgtcgtgtgtagagagcaagtggaatgcgagtttaacatattttatgcagcacctggtacaccacatgcaaaaaggcttgttgctgatgacgctaatgctccctgaaattaaagtctatcttctcatgatcacataataactggcaatcaccttgaaatgggagtgtattaagctctataaaacacagctagtacttctggcccaagttctgctctcagtgaaactagagagcagcagctcagtgctcccctcagaatacacgtgtttcaaagcatttaac

SEQ ID NO: 73377 - DNA, 2992 bp, Homo sapiens
tttatttttagatatctctcacatgtgagagaataacctgatattggccaataaccaaattaattatttgtttctccatgaagactcctttctgaattagaaggagaaagaggtgaattgaagagcagattgaaaatggagatataaaatcaatgactcttttttaaggatgagtcatcatggcttttctagatgattgattgtgaagtggaagaaatagaacgaattaaactataagcatttgagcccagtagttctctggggcactcttctccactatttgaactatctttatttcataagctaagactaaaaacattgccaaagtgaaytggttctccagagtttctagagtgcattattatcattctctaaaatgaaaatacatctgatacttcaaaagacacattgttatgttttttaatgttttgcttatatttcatctcattttgaaaatgattgaagtagcttataataaatacacataaacaataagcaagtaaataattgcaattggaaactaattctaagtgaaagacaattatatctaagctaatatcaagaatggacaatgacattacatttaactctgagctttctagatgccaaaataagggccagtgatgaattatgcattgtttatctgaacaaaagaattatttatttaagagttacacatcttctaagacatatttatgcatttattgcatggatccttttacaaatgcatttagacaacataatagacaaccacaaacaactcctgtccaaatgtttataggttcactaatgcatacctacatattagtaaataatttatttatgcacaagtatgctatgtgtgcatacatgtatatttctgagttacagcatgtaatctatatacacacatgtacataaccatacatacagatatacatatatgaagtattatgttggtacaaaagtaattacagttttgccatagaacgtaatgcaaaaactgcaattacttttgcactaatctaataactcagagaaagtgtttctctaaaggggtaatgaagttgtgtagattgctggcaatgatggccccaattcttttcatccctgcgtgctaacacttggtaatgtgattttgtcactcccttgtcaagtggtagagtatagttctcttccccttgcatctgagctgtctctgtggccagctttggccaatagaaatgactttgtatggcttcctagcctgggcttcaagaggccttgcagcttctgctctcacactctagtccaggctagccctcttatggataaaagcacatgctagccctcttgaggataacaaccaccctcagagagaagcccagctgatggtcagcaccacctgccagacagttgaagaaagcttctttaggccatctcactccagtcgagataccagataactacagctgcatgagtgatcccaggagaagccagcagaagaactgcccagctgcaaacaactcaaactggtaaccaccagaatcataagctaaataaattattgttttaagccattgagctttagggtggtttttatatagcaactgttgatataagattcaaggtataaaatttccttatttaataacagaaaaaaagtggagtaatctagggaactatggttgctcacatcacatttccctaagttctttaaggagttctgagaaaagggagatgaagaatttacttagctacatgtttttaccccttgggtagaataagtgtaaacttacttttttttacaatacttgctcttctgacttttaaaaagatagattttagttaaaggaaagaattcctagcaacagcccacatattttctatttcctattgcagtcaatatgttcctaactttttggcctgaattttccaggatagtcctgagttgtcatcatcaatctatgcattattaggcctaatcttctgatttggagttggaacaatatagaagctatggtttggctgtgtccccactcaaatctcatcttgaattcccacgtgttgtggaagggacccagtaggaggtcattgaatcatgggggcaggtctttcctgtgctgttctcaagacagtgaataagtctcacagatctgatggttttataagggggattttctctgcacaagttctctgtctttgcctgctgccattcatgcatgatgtgacttgttcctccttgccttccaccatgactgtgaggcatccccagccatgtggaactgtaagtccattaaaccctttctcctatataaattacccagtctctggtatgtatcagcagcataaaaactaactaatacagatgctatatctatatattttgaataccaaaagtataattggcaagttaggcattttcttaaggcattttcaaagcctgatctgtattctcgccagatggacaacaccccccaacttttcacaaaagcatgttattcttttaatgcatgcagatcaacaaagcatgcacattgaaggacgtgctgtcactggtattgaagataagactcacgtggactgtggcaaaaatagaaatgggagaccaaaaaatatgtctaatctattagtccaacctagtgatgatggtgacttgaactagagtgttggcaatggaactggggagaagggatgacttcaaggttttctttgaaataaaaatgacaggcctcacagagaaaagaaacgagtaaccactaattctgctctgaacaattaagtgggtggtaaaggcacaaggtgtgtgtgtgtgtgtgtgtgtgtgtgtgtgtgtgtgtgtgtgtgtgtaggcaggttaagtttgagatgcttgtgagacatccaagtatacatgtcaagtatatagttagatagatgggcctggaatgcagatgaaaaattaaaatgggaatattaagtgtagtgggcaaaggggctagcagaggatagtgaagttaaagaaatcaagtgtcaaatcagttagagctttata

SEQ ID NO: 73378 - DNA, 2992 bp, Homo sapiens
tttatttttagatatctctcacatgtgagagaataacctgatattggccaataaccaaattaattatttgtttctccatgaagactcctttctgaattagaaggagaaagaggtgaattgaagagcagattgaaaatggagatataaaatcaatgactcttttttaaggatgagtcatcatggcttttctagatgattgattgtgaagtggaagaaatagaacgaattaaactataagcatttgagcccagtagttctctggggcactcttctccactatttgaactatctttatttcataagctaagactaaaaacattgccaaagtgaactggttctccagagtttctagagtgcattattatcattctctaaaatgaaaatacatctgatacttcaaaagacacattgttatgttttttaatgttttgcttatatttcatctcattttgaaaatgattgaagtagcttataataaatacacataaacaataagcaagtaaataattgcaattggaaactaattctaagtgaaagacaattatatctaagctaatatcaagaatggacaatgacattacatttaactctgagctttctagatgccaaaataagggccagtgatgaattatgcattgtttatctgaacaaaagaattatttatttaagagttacacatcttctaagacatatttatgcatttattgcatggatccttttacaaatgcatttagacaacataatagacaaccacaaacaactcctgtccaaatgtttataggttcactaatgcatacctacatattagtaaataatttatttatgcacaagtatgctatgtgtgcatacatgtatatttctgagttacagcatgtaatctatatacacacatgtacataaccatacatacagatatacatatatgaagtattatgttggtacaaaagtaattacagttttgccatagaacgtaatgcaaaaactgcaattacttttgcactaatctaataactcagagaaagtgtttctctaaaggggtaatgaagttgtgtagattgctggcaatgatggccccaattcttttcatccctgcgtgctaacacttggtaatgtgattttgtcactcccttgtcaagtggtagagtatagttctcttccccttgcatctgagctgtctctgtggccagctttggccaatagaaatgactttgtatggcttcctagcctgggcttcaagaggccttgcagcttctgctctcacactctagtccaggctagccctcttatggataaaagcacatgctagccctcttgaggataacaaccaccctcagagagaagcccagctgatggtcagcaccacctgccagacagttgaagaaagcttctttaggccatctcactccagtcgagataccagataactacagctgcatgagtgatcccaggagaagccagcagaagaactgcccagctgcaaacaactcaaactggtaaccaccagaatcataagctaaataaattattgttttaagccattgagctttagggtggtttttatatagcaactgttgatataagattcaaggtataaaatttccttatttaataacagaaaaaaagtggagtaatctagggaactatggttgctcacatcacatttccctaagttctttaaggagttctgagaaaagggagatgaagaatttacttagctacatgtttttaccccttgggtagaataagtgtaaacttacttttttttacaatacttgctcttctgacttttaaaaagatagattttagttaaaggaaagaattcctagcaacagcccacatattttctatttcctattgcagtcaatatgttcctaactttttggcctgaattttccaggatagtcctgagttgtcatcatcaatctatgcattattaggcctaatcttctgatttggagttggaacaatatagaagctatggtttggctgtgtccccactcaaatctcatcttgaattcccacgtgttgtggaagggacccagtaggaggtcattgaatcatgggggcaggtctttcctgtgctgttctcaagacagtgaataagtctcacagatctgatggttttataagggggattttctctgcacaagttctctgtctttgcctgctgccattcatgcatgatgtgacttgttcctccttgccttccaccatgactgtgaggcatccccagccatgtggaactgtaagtccattaaaccctttctcctatayaaattacccagtctctggtatgtatcagcagcataaaaactaactaatacagatgctatatctatatattttgaataccaaaagtataattggcaagttaggcattttcttaaggcattttcaaagcctgatctgtattctcgccagatggacaacaccccccaacttttcacaaaagcatgttattcttttaatgcatgcagatcaacaaagcatgcacattgaaggacgtgctgtcactggtattgaagataagactcacgtggactgtggcaaaaatagaaatgggagaccaaaaaatatgtctaatctattagtccaacctagtgatgatggtgacttgaactagagtgttggcaatggaactggggagaagggatgacttcaaggttttctttgaaataaaaatgacaggcctcacagagaaaagaaacgagtaaccactaattctgctctgaacaattaagtgggtggtaaaggcacaaggtgtgtgtgtgtgtgtgtgtgtgtgtgtgtgtgtgtgtgtgtgtgtgtaggcaggttaagtttgagatgcttgtgagacatccaagtatacatgtcaagtatatagttagatagatgggcctggaatgcagatgaaaaattaaaatgggaatattaagtgtagtgggcaaaggggctagcagaggatagtgaagttaaagaaatcaagtgtcaaatcagttagagctttata

SEQ ID NO: 73379 - DNA, 2992 bp, Homo sapiens
tttatttttagatatctctcacatgtgagagaataacctgatattggccaataaccaaattaattatttgtttctccatgaagactcctttctgaattagaaggagaaagaggtgaattgaagagcagattgaaaatggagatataaaatcaatgactcttttttaaggatgagtcatcatggcttttctagatgattgattgtgaagtggaagaaatagaacgaattaaactataagcatttgagcccagtagttctctggggcactcttctccactatttgaactatctttatttcataagctaagactaaaaacattgccaaagtgaactggttctccagagtttctagagtgcattattatcattctctaaaatgaaaatacatctgatacttcaaaagacacattgttatgttttttaatgttttgcttatatttcatctcattttgaaaatgattgaagtagcttataataaatacacataaacaataagcaagtaaataattgcaattggaaactaattctaagtgaaagacaattatatctaagctaatatcaagaatggacaatgacattacatttaactctgagctttctagatgccaaaataagggccagtgatgaattatgcattgtttatctgaacaaaagaattatttatttaagagttacacatcttctaagacatatttatgcatttattgcatggatccttttacaaatgcatttagacaacataatagacaaccacaaacaactcctgtccaaatgtttataggttcactaatgcatacctacatattagtaaataatttatttatgcacaagtatgctatgtgtgcatacatgtatatttctgagttacagcatgtaatctatatacacacatgtacataaccatacatacagatatacatatatgaagtattatgttggtacaaaagtaattacagttttgccatagaacgtaatgcaaaaactgcaattacttttgcactaatctaataactcagagaaagtgtttctctaaaggggtaatgaagttgtgtagattgctggcaatgatggccccaattcttttcatccctgcgtgctaacacttggtaatgtgattttgtcactcccttgtcaagtggtagagtatagttctcttccccttgcatctgagctgtctctgtggccagctttggccaatagaaatgactttgtatggcttcctagcctgggcttcaagaggccttgcagcttctgctctcacactctagtccaggctagccctcttatggataaaagcacatgctagccctcttgaggataacaaccaccctcagagagaagcccagctgatggtcagcaccacctgccagacagttgaagaaagcttctttaggccatctcactccagtcgagataccagataactacagctgcatgagtgatcccaggagaagccagcagaagaactgcccagctgcaaacaactcaaactggtaaccaccagaatcataagctaaataaattattgttttaagccattgagctttagggtggtttttatatagcaactgttgatataagattcaaggtataaaatttccttatttaataacagaaaaaaagtggagtaatctagggaactatggttgctcacatcacatttccctaagttctttaaggagttctgagaaaagggagatgaagaatttacttagctacatgtttttaccccttgggtagaataagtgtaaacttacttttttttacaatacttgctcttctgacttttaaaaagatagattttagttaaaggaaagaattcctagcaacagcccacatattttctatttcctattgcagtcaatatgttcctaactttttggcctgaattttccaggatagtcctgagttgtcatcatcaatctatgcattattaggcctaatcttctgatttggagttggaacaatatagaagctatggtttggctgtgtccccactcaaatctcatcttgaattcccacgtgttgtggaagggacccagtaggaggtcattgaatcatgggggcaggtctttcctgtgctgttctcaagacagtgaataagtctcacagatctgatggttttataagggggattttctctgcacaagttctctgtctttgcctgctgccattcatgcatgatgtgacttgttcctccttgccttccaccatgactgtgaggcatccccagccatgtggaactgtaagtccattaaaccctttctcctatataaattacccagtctctggtatgtatcagcagcataaaaactaactaatacagatgctatatctatatattttgaataccaaaagtataattggcaagttaggcattttcttaaggcattttcaaagcctgatctgtattctcgccagatggacaacaccccccaacttttcacaaaagcatgttattcttttaatgcatgcagatcaacaaagcatgcacattgaaggacgtgctgtcactggtattgaagataagactcacgtggrctgtggcaaaaatagaaatgggagaccaaaaaatatgtctaatctattagtccaacctagtgatgatggtgacttgaactagagtgttggcaatggaactggggagaagggatgacttcaaggttttctttgaaataaaaatgacaggcctcacagagaaaagaaacgagtaaccactaattctgctctgaacaattaagtgggtggtaaaggcacaaggtgtgtgtgtgtgtgtgtgtgtgtgtgtgtgtgtgtgtgtgtgtgtgtaggcaggttaagtttgagatgcttgtgagacatccaagtatacatgtcaagtatatagttagatagatgggcctggaatgcagatgaaaaattaaaatgggaatattaagtgtagtgggcaaaggggctagcagaggatagtgaagttaaagaaatcaagtgtcaaatcagttagagctttata

SEQ ID NO: 73380 - DNA, 1413 bp, Homo sapiens
ggatccctgggccaggcagaagagaccagacagagagctccacacacagcccctgacatggagtctgagagatrctttgctcctagtgagacggtttgagccagagaagccaataagggtgcaaaaccggaagggctagaggccaccagaggccagagagctcttgaaaactcagaggtggatcaaattgagactagtctgggccagtttgagatgaattagtcactagttcttacctctgtgtgggctattatgtgttttcttaagaaaaaaaaaaaaagcttagaatagggcagaaaaaaagggagaaacctctgagaaccttctaccttatctgtgatgatatcctgtttcttcagtggttgggaatttattttccaattgcaaatgtcttatcttgttccaaaaagtagtagaaagagcttacagaggattcacacaatataatatacacacaataatatcaaagtagaattaggaaattaggtcaagggaaaatataaacagaagtagaatgtcaagttcaggcaaaagaagaggacagatacacagtcatgtgtagcttaacaacacagatatgttttgagaaatgcactgttaggagatttcacccttgtgcaaacatcacagagtgtacttaaaccaaggtgatatcgcctgccacacccctaggccgtatggtgtagcctattgctcctaagctacacacctgtacagcatgttactgtactgaatattgtagacaactataatacaatggtaagtatttgtgtatataaacataactaaacagagaaaaggtacagtaaaaatacagtctaagaatcttacaggaccaccgttgtatatgcagtccatcattgaccaaaacgtcattttggggtgcatgactgtttatgcttaaagcgagtcagggtaagtgtccttcttggtttttaggcttttctttttgataaatctggaattctttattgttatatgtggtatatttgttactaattcagtccttctttgtaccgattgacagttgttcctgaaatatttagtttgtccctgcaatgtccctgccattctctattgttatggtgtttctgatctgtcaacttccattatcttaaaatggtttgtaaatacttctgaaagctcattgtaattgcattttctctttttaatcccataacatcattttttataatccactttgtttttagaacagttttagatttacagaaaaattagggagatatatagagacatactctgaaaattgtttcctctgctattaaactattacattagtatggcacatttgccacattaatgaatcactgttgattcactatgattaaccaaagtccatactttcttcagatctcctttgttttcccctaactgcttcttcctgttctggat

SEQ ID NO: 73381 - DNA, 633 bp, Homo sapiens
aagatggattttagaaagaaatgatgaaaattgctgaaaatcctgctttaaaaacagtactaaagaacaaacagaaaaacaacttacagagactacaggaattctgggagattcaaggggttacttagggtctaaggaaaggtgcataatggtagaatatatatcatgtttatattatgtgagaacaggagtaattacacccacatgaggaagccttgggagtattgctaccacagtcaaataaagtaggaagaaaaggaatcctgtaggtaattcagtacagaaataaggaaagataagacagagatggtgaaaagcagcaccgtggataattcaatacagaaataagraaagataagacatagatggtgaaaagcagcaccgtagataaaatgagcatgaatttggagttagactcacttggatgtgaatcccttttttgccactcactagttctgtaataggagacaagttataaaacttccagcctcagtttccagaattacgaggaaagtgaaaaggaacaatgtgaaaaatacctaacagtgtattccataaggaagattattgatgcatttatagagcactgaaggcagggtgggagagagaggaaggaagggaagagaaggaaaa

SEQ ID NO: 73382 - DNA, 633 bp, Homo sapiens
aagatggattttagaaagaaatgatgaaaattgctgaaaatcctgctttaaaaacagtactaaagaacaaacagaaaaacaacttacagagactacaggaattctgggagattcaaggggttacttagggtctaaggaaaggtgcataatggtagaatatatatcatgtttatattatgtgagaacaggagtaattacacccacatgaggaagccttgggagtattgctaccacagtcaaataaagtaggaagaaaaggaatcctgtaggtaattcagtacagaaataaggaaagataagacagagatggtgaaaagcagcaccgtggataattcaatacagaaataaggaaagataagacakagatggtgaaaagcagcaccgtagataaaatgagcatgaatttggagttagactcacttggatgtgaatcccttttttgccactcactagttctgtaataggagacaagttataaaacttccagcctcagtttccagaattacgaggaaagtgaaaaggaacaatgtgaaaaatacctaacagtgtattccataaggaagattattgatgcatttatagagcactgaaggcagggtgggagagagaggaaggaagggaagagaaggaaaa

SEQ ID NO: 73383 - DNA, 633 bp, Homo sapiens
aagatggattttagaaagaaatgatgaaaattgctgaaaatcctgctttaaaaacagtactaaagaacaaacagaaaaacaacttacagagactacaggaattctgggagattcaaggggttacttagggtctaaggaaaggtgcataatggtagaatatatatcatgtttatattatgtgagaacaggagtaattacacccacatgaggaagccttgggagtattgctaccacagtcaaataaagtaggaagaaaaggaatcctgtaggtaattcagtacagaaataaggaaagataagacagagatggtgaaaagcagcaccgtggataattcaatacagaaataaggaaagataagacatagatggtgaaaagcagcaccgtrgataaaatgagcatgaatttggagttagactcacttggatgtgaatcccttttttgccactcactagttctgtaataggagacaagttataaaacttccagcctcagtttccagaattacgaggaaagtgaaaaggaacaatgtgaaaaatacctaacagtgtattccataaggaagattattgatgcatttatagagcactgaaggcagggtgggagagagaggaaggaagggaagagaaggaaaa

SEQ ID NO: 73384 - DNA, 643 bp, Homo sapiens
ggagggaaagaggaagagagacaagccttgagtaactactgggtactaagctcagtacctgggtgatgggatcatttgtaccctaaacctcattatcacgcaatatagtcaggtaatagacctgcacatgtactcttgaatctaaactacaagttgaagaagtacagataataaaatacataaataaaatctgtgcattccagcaggtgcagtgattgggagagggagtgggaagrggcaggcagttgagaaatataatggaaatcttgggcaggattccatggggctgacattagaaatgcaatgtgaggacccacaaggctattcaggaagggacctgagtatggggaactgggttcttgaaaagcaatgcaagatctgacgagagatgtcacatttttctgagacaagagaaaagacaatattctccacaagatgatcaagctcagcatagaagagcacaggatttggagtctgacagccttcatgaggagaaagaacagcttatataatacacctaaataaaaattaaatattaacactaaagtatgcagtgatgactataagggcaaaaagtattccagaagacaatagtctaccactgggtgctagaaaggtggaagaaggcttcctggaggttatg

SEQ ID NO: 73385 - DNA, 2014 bp, Homo sapiens
tttttttttttttttttgagagggagtcttactctgttgcccaggctggagtgtagtggggtgatctcagctcatgcaacctacacctcccgggttcaagcgattctctgccttggcctcctgagtagctgggattgcaggctcccrcccccacacccagctaattttttttgtattttttagtaaagacggggttttgccatcttggccaggctggtcttgaactcctgacctcgtcatccacccgcctcagcctcccaaagtactgggattacagacgtgagccaccgcgcccggccgttgctcattttttaggaacacatttctgtgattttcagtttattataccgttgtaggtaacctaaaaatagctgtgcattttcgatatattagatatttttatgttgttattgaaggaaaaaaacctagctttctacttgaaagagatgatacttgttcattaatatttatgtgttttaaaagtgagggagaatattttttcaaaaattaaatattgcctcttttggcatattggcacataagcaagccagcacttaataatacaaataatttctttaacatattttacttttcttgacttcatttcagttgaaattacattgcaatttctgcaattagtgatcttagctttactgttttccctgtcagttcaatgaagtagtgattggacaaaatgtggaggattgggctacaaaacatttaatctatgcataactgaaagcctaaaagatctctagcagatttcctgggttgttatcccataaggctcataatttctaaaatacaccaaagtttatgtttaggaatacacattttttacaaaataaatacactgatattctcttagtctttcatcaaagtactaaatgatctttgcctttctaacttccatgggccactggtccttggtgatggagccatgacctggagctaaaaaacaaaatgaacatatccagaaatataatgtcttggctgctgtaacttacaaggaaatgttcactgtatgaaaaacagcttcacagaaatactaagttgtcaatttatcagtcaaaattatgtgtaaccgccagtgtacgatcatatacaaatcctaatataaaattttaatttgcctttaaatagcttgaatttcattgacaaacatcctaccacaggcataactttcttgaagtttaaaatagcagcattaatgtattaattataatcttgcatttttagatgattgatagagttaaaaagagatattccaactcatttataatcttgcgaggctgaaatactaagtaaactattagttcaacttgtcactttaatataagtacactgttgaaattcctaaggatatagtctagctgcttggcaatggattgcagtgaaattcattgagagttcattgaacatggaaaggatgtaatttatttaaatccttcacttattaaatcaggatttgaatttttttaatattttatttttttccaactaatgaaatggacttgaaaagaattagcaaaatctttgtagagttgtgacaaagtaattctgatgactatgttgtctactaaagtttttactgataagcgctgaaggctgaattgagatgaatacattcactgttgtttagaggatttgtttttattttgatttgttttacagaaagatattcagttttaaataccttatagaatagtcttgcccatatctccctttccatataaataataagatcgtattcttgcatatttaatgagcatatagattaacaaaaagtttacaaaggaactcctgtgtttcttaataaataatcatataagtaacagaaggtaaaatttttccacagctttattaaattgattagtaagtacagacttttgaagcataaagttttaaatatgtaaaaatttagcttctgattttgtgtctttgtctctacctccctcatactttttgatttcatggggttttttgttgttgttctttgcatttaagttatgca

SEQ ID NO: 73386 - DNA, 2014 bp, Homo sapiens
tttttttttttttttttgagagggagtcttactctgttgcccaggctggagtgtagtggggtgatctcagctcatgcaacctacacctcccgggttcaagcgattctctgccttggcctcctgagtagctgggattgcaggctcccgcccccacacccagctaattttttttgtattttttagtaaagacggggttttgccatcttggccaggctggtcttgaactcctgacctcgtcatccacccgcctcagcctcccaaagtactgggattacagacgtgagccaccgcgcccggccgttgmtcattttttaggaacacatttctgtgattttcagtttattataccgttgtaggtaacctaaaaatagctgtgcattttcgatatattagatatttttatgttgttattgaaggaaaaaaacctagctttctacttgaaagagatgatacttgttcattaatatttatgtgttttaaaagtgagggagaatattttttcaaaaattaaatattgcctcttttggcatattggcacataagcaagccagcacttaataatacaaataatttctttaacatattttacttttcttgacttcatttcagttgaaattacattgcaatttctgcaattagtgatcttagctttactgttttccctgtcagttcaatgaagtagtgattggacaaaatgtggaggattgggctacaaaacatttaatctatgcataactgaaagcctaaaagatctctagcagatttcctgggttgttatcccataaggctcataatttctaaaatacaccaaagtttatgtttaggaatacacattttttacaaaataaatacactgatattctcttagtctttcatcaaagtactaaatgatctttgcctttctaacttccatgggccactggtccttggtgatggagccatgacctggagctaaaaaacaaaatgaacatatccagaaatataatgtcttggctgctgtaacttacaaggaaatgttcactgtatgaaaaacagcttcacagaaatactaagttgtcaatttatcagtcaaaattatgtgtaaccgccagtgtacgatcatatacaaatcctaatataaaattttaatttgcctttaaatagcttgaatttcattgacaaacatcctaccacaggcataactttcttgaagtttaaaatagcagcattaatgtattaattataatcttgcatttttagatgattgatagagttaaaaagagatattccaactcatttataatcttgcgaggctgaaatactaagtaaactattagttcaacttgtcactttaatataagtacactgttgaaattcctaaggatatagtctagctgcttggcaatggattgcagtgaaattcattgagagttcattgaacatggaaaggatgtaatttatttaaatccttcacttattaaatcaggatttgaatttttttaatattttatttttttccaactaatgaaatggacttgaaaagaattagcaaaatctttgtagagttgtgacaaagtaattctgatgactatgttgtctactaaagtttttactgataagcgctgaaggctgaattgagatgaatacattcactgttgtttagaggatttgtttttattttgatttgttttacagaaagatattcagttttaaataccttatagaatagtcttgcccatatctccctttccatataaataataagatcgtattcttgcatatttaatgagcatatagattaacaaaaagtttacaaaggaactcctgtgtttcttaataaataatcatataagtaacagaaggtaaaatttttccacagctttattaaattgattagtaagtacagacttttgaagcataaagttttaaatatgtaaaaatttagcttctgattttgtgtctttgtctctacctccctcatactttttgatttcatggggttttttgttgttgttctttgcatttaagttatgca

SEQ ID NO: 73387 - DNA, 2014 bp, Homo sapiens
tttttttttttttttttgagagggagtcttactctgttgcccaggctggagtgtagtggggtgatctcagctcatgcaacctacacctcccgggttcaagcgattctctgccttggcctcctgagtagctgggattgcaggctcccgcccccacacccagctaattttttttgtattttttagtaaagacggggttttgccatcttggccaggctggtcttgaactcctgacctcgtcatccacccgcctcagcctcccaaagtactgggattacagacgtgagccaccgcgcccggccgttgctcattttttargaacacatttctgtgattttcagtttattataccgttgtaggtaacctaaaaatagctgtgcattttcgatatattagatatttttatgttgttattgaaggaaaaaaacctagctttctacttgaaagagatgatacttgttcattaatatttatgtgttttaaaagtgagggagaatattttttcaaaaattaaatattgcctcttttggcatattggcacataagcaagccagcacttaataatacaaataatttctttaacatattttacttttcttgacttcatttcagttgaaattacattgcaatttctgcaattagtgatcttagctttactgttttccctgtcagttcaatgaagtagtgattggacaaaatgtggaggattgggctacaaaacatttaatctatgcataactgaaagcctaaaagatctctagcagatttcctgggttgttatcccataaggctcataatttctaaaatacaccaaagtttatgtttaggaatacacattttttacaaaataaatacactgatattctcttagtctttcatcaaagtactaaatgatctttgcctttctaacttccatgggccactggtccttggtgatggagccatgacctggagctaaaaaacaaaatgaacatatccagaaatataatgtcttggctgctgtaacttacaaggaaatgttcactgtatgaaaaacagcttcacagaaatactaagttgtcaatttatcagtcaaaattatgtgtaaccgccagtgtacgatcatatacaaatcctaatataaaattttaatttgcctttaaatagcttgaatttcattgacaaacatcctaccacaggcataactttcttgaagtttaaaatagcagcattaatgtattaattataatcttgcatttttagatgattgatagagttaaaaagagatattccaactcatttataatcttgcgaggctgaaatactaagtaaactattagttcaacttgtcactttaatataagtacactgttgaaattcctaaggatatagtctagctgcttggcaatggattgcagtgaaattcattgagagttcattgaacatggaaaggatgtaatttatttaaatccttcacttattaaatcaggatttgaatttttttaatattttatttttttccaactaatgaaatggacttgaaaagaattagcaaaatctttgtagagttgtgacaaagtaattctgatgactatgttgtctactaaagtttttactgataagcgctgaaggctgaattgagatgaatacattcactgttgtttagaggatttgtttttattttgatttgttttacagaaagatattcagttttaaataccttatagaatagtcttgcccatatctccctttccatataaataataagatcgtattcttgcatatttaatgagcatatagattaacaaaaagtttacaaaggaactcctgtgtttcttaataaataatcatataagtaacagaaggtaaaatttttccacagctttattaaattgattagtaagtacagacttttgaagcataaagttttaaatatgtaaaaatttagcttctgattttgtgtctttgtctctacctccctcatactttttgatttcatggggttttttgttgttgttctttgcatttaagttatgca

SEQ ID NO: 73388 - DNA, 2014 bp, Homo sapiens
tttttttttttttttttgagagggagtcttactctgttgcccaggctggagtgtagtggggtgatctcagctcatgcaacctacacctcccgggttcaagcgattctctgccttggcctcctgagtagctgggattgcaggctcccgcccccacacccagctaattttttttgtattttttagtaaagacggggttttgccatcttggccaggctggtcttgaactcctgacctcgtcatccacccgcctcagcctcccaaagtactgggattacagacgtgagccaccgcgcccggccgttgctcattttttaggaacacatttctgtgattttcagtttattataccrttgtaggtaacctaaaaatagctgtgcattttcgatatattagatatttttatgttgttattgaaggaaaaaaacctagctttctacttgaaagagatgatacttgttcattaatatttatgtgttttaaaagtgagggagaatattttttcaaaaattaaatattgcctcttttggcatattggcacataagcaagccagcacttaataatacaaataatttctttaacatattttacttttcttgacttcatttcagttgaaattacattgcaatttctgcaattagtgatcttagctttactgttttccctgtcagttcaatgaagtagtgattggacaaaatgtggaggattgggctacaaaacatttaatctatgcataactgaaagcctaaaagatctctagcagatttcctgggttgttatcccataaggctcataatttctaaaatacaccaaagtttatgtttaggaatacacattttttacaaaataaatacactgatattctcttagtctttcatcaaagtactaaatgatctttgcctttctaacttccatgggccactggtccttggtgatggagccatgacctggagctaaaaaacaaaatgaacatatccagaaatataatgtcttggctgctgtaacttacaaggaaatgttcactgtatgaaaaacagcttcacagaaatactaagttgtcaatttatcagtcaaaattatgtgtaaccgccagtgtacgatcatatacaaatcctaatataaaattttaatttgcctttaaatagcttgaatttcattgacaaacatcctaccacaggcataactttcttgaagtttaaaatagcagcattaatgtattaattataatcttgcatttttagatgattgatagagttaaaaagagatattccaactcatttataatcttgcgaggctgaaatactaagtaaactattagttcaacttgtcactttaatataagtacactgttgaaattcctaaggatatagtctagctgcttggcaatggattgcagtgaaattcattgagagttcattgaacatggaaaggatgtaatttatttaaatccttcacttattaaatcaggatttgaatttttttaatattttatttttttccaactaatgaaatggacttgaaaagaattagcaaaatctttgtagagttgtgacaaagtaattctgatgactatgttgtctactaaagtttttactgataagcgctgaaggctgaattgagatgaatacattcactgttgtttagaggatttgtttttattttgatttgttttacagaaagatattcagttttaaataccttatagaatagtcttgcccatatctccctttccatataaataataagatcgtattcttgcatatttaatgagcatatagattaacaaaaagtttacaaaggaactcctgtgtttcttaataaataatcatataagtaacagaaggtaaaatttttccacagctttattaaattgattagtaagtacagacttttgaagcataaagttttaaatatgtaaaaatttagcttctgattttgtgtctttgtctctacctccctcatactttttgatttcatggggttttttgttgttgttctttgcatttaagttatgca

SEQ ID NO: 73389 - DNA, 2014 bp, Homo sapiens
tttttttttttttttttgagagggagtcttactctgttgcccaggctggagtgtagtggggtgatctcagctcatgcaacctacacctcccgggttcaagcgattctctgccttggcctcctgagtagctgggattgcaggctcccgcccccacacccagctaattttttttgtattttttagtaaagacggggttttgccatcttggccaggctggtcttgaactcctgacctcgtcatccacccgcctcagcctcccaaagtactgggattacagacgtgagccaccgcgcccggccgttgctcattttttaggaacacatttctgtgattttcagtttattataccgttgtaggtaacctaaaaatagctgtgcattttcgatatattagatatttttatgttgttattgaaggaaaaaaacctagctttctacttgaaagagatgatacttgttcattaatatttatgtgttttaaaagtgagggagaatattttttcaaaaattaaatattgcctcttttggcatattggcacataagcaagccagcacttaataatacaaataatttctttaacatattttacttttcttgacttcatttcagttgaaattacattgyaatttctgcaattagtgatcttagctttactgttttccctgtcagttcaatgaagtagtgattggacaaaatgtggaggattgggctacaaaacatttaatctatgcataactgaaagcctaaaagatctctagcagatttcctgggttgttatcccataaggctcataatttctaaaatacaccaaagtttatgtttaggaatacacattttttacaaaataaatacactgatattctcttagtctttcatcaaagtactaaatgatctttgcctttctaacttccatgggccactggtccttggtgatggagccatgacctggagctaaaaaacaaaatgaacatatccagaaatataatgtcttggctgctgtaacttacaaggaaatgttcactgtatgaaaaacagcttcacagaaatactaagttgtcaatttatcagtcaaaattatgtgtaaccgccagtgtacgatcatatacaaatcctaatataaaattttaatttgcctttaaatagcttgaatttcattgacaaacatcctaccacaggcataactttcttgaagtttaaaatagcagcattaatgtattaattataatcttgcatttttagatgattgatagagttaaaaagagatattccaactcatttataatcttgcgaggctgaaatactaagtaaactattagttcaacttgtcactttaatataagtacactgttgaaattcctaaggatatagtctagctgcttggcaatggattgcagtgaaattcattgagagttcattgaacatggaaaggatgtaatttatttaaatccttcacttattaaatcaggatttgaatttttttaatattttatttttttccaactaatgaaatggacttgaaaagaattagcaaaatctttgtagagttgtgacaaagtaattctgatgactatgttgtctactaaagtttttactgataagcgctgaaggctgaattgagatgaatacattcactgttgtttagaggatttgtttttattttgatttgttttacagaaagatattcagttttaaataccttatagaatagtcttgcccatatctccctttccatataaataataagatcgtattcttgcatatttaatgagcatatagattaacaaaaagtttacaaaggaactcctgtgtttcttaataaataatcatataagtaacagaaggtaaaatttttccacagctttattaaattgattagtaagtacagacttttgaagcataaagttttaaatatgtaaaaatttagcttctgattttgtgtctttgtctctacctccctcatactttttgatttcatggggttttttgttgttgttctttgcatttaagttatgca

SEQ ID NO: 73390 - DNA, 1434 bp, Homo sapiens
ggtgacaacagaaacatcaggcatttatgcttgaggatataagagcaagattgggagaataattagtacacagtagtcttaattaggcaattattgacattccttttataaaaaccatggtggagaaattgaagaataatgatcacaacgagttatttttaccatttcacaatctcttttagacttacctaaatcttctaagatgcacttccatctgtttcttacttcccttcgaacctgccgcagggtatggatatcatagttgagcttctgccactcctgcaggaaaataaaagtttagttttatttataccccttggcttaaacctctatctcattcccaaacttcatgttgcctaaacacctggctcttctcttttattaatcttcaaagcaagcctaaaagaagagaaggagatggatgagataaagttgataggaatactatcagctaccactgctggagaatctgctctgcaccaggtgatatggcaccttgcataaattatcttactgaaactcttcatattacatattctctcaatttagtgatctcacctgtaaagtggagttaacaatgataaatattccatttaagaatgttataaagattgatggcatacagaaagtacaatatctgcacacagtgagcatctaataaaatctatatattattaaagccattttatagatacagtaactgaggcccaaagagcttccttggctaatccaatgtcatcagctaataggtatcagaatagatattggaagccaagtctggctcaaaagttcataagaaacagacacacacaaaaaaatctatgtctccctttgtagtcagaataaagtagacctgaaaatcccaagtttcttgattcctgggcaatgtctccttcaccaccatatctcagcaacattcttttttattcattttcctttgataggatgaatctgtcacaaattcaactttatcaactgattaaagttctttatcagtcctatgtaaaggaggccatcatgttgttccaatacagaacttgaatcttttaggagcattggggtctttattgagataagtgtgcctttaaaatgtcatagaaatttgtctttaaggaggcttgtcactatagagcagtcattttatagagtataccttttactgtttcttagcaaagacattaaccacacagctatcctaatgcacagcccaaaagaacatcattctaaatgctcaatttaggactcaagttatatgatattttgactcctctaactgaaaatgtttcaatgatgccattatttctctactaagttctgtacaaggcttgccttgttgattggcaatcaactcatgactgtttaagaaaaaccaatttagctgccattcgcaaatgtttatagataccacttggraaaagaaaagctagcaaaaca

SEQ ID NO: 73391 - DNA, 1108 bp, Homo sapiens
atcgtcttcgttgggtaataaaattgaatgagaaatagacaacttttttgctgagtggcacagaaatccacagtcgcccgtttcactgtaatataccgatcaaatacccagtcacagttgtattttatcagacccctatggaaacttytgatcaacttctctcccttacttccctgcccaggtaggacacccgaattcttggcactttgcacagacatccagctgggtctcaggtgtctccgaagatttgtgcttttcggcaaaaatcttactcaaggaacaaacccaaaacatcccataaggaaccaaggggctgagatggcgcctccgcgtgcccttccagcaagcccacctccccaactcacacaagcacacaggtgtccacactctcggcgcccggctacggcccaggtaagcccagatcccggcccggcggcgcacccacctgacgaggggctccttctcaggcagggcgcgctcctccaagcactcgcacccgcagcagcagcacacggttctcagccagtccctcagccccatggagagcgagggcccccaccggcgccggaagcctggggccgagtcgccgcggcgagcgatcgaggctggggcgcggccaccgcgccagcgtccaggtgcggggacagcggcagcccgggcgtcgcgggctggtccgcgcgcatcacgccgcggccggggacgcgggcgagggctgcaggccgcgcgccctcctctccttgcgttttgtttggggcgtgagttttcttcgggctttttttcccctcttttaattccccgagcgcaatttggggcgcatgcgtccacgagacgccccgctaccgccctctaagggtgaagcagggactccagccagtcctcaaaatcccagggcaccggaggctggcagccgggctgggggagggcggggaggggaaagccctggagccacagagcacgaggttgggctgaatctattcgtaccttttattggcttcactgcgcgaggaaattaaagatcctcccccacccctacaggccttcaaagcagagttttgggcatgtttttgatgtcagctccacacagagtaaaagttaccaaaagagcatg

SEQ ID NO: 73392 - DNA, 1006 bp, Homo sapiens
gcactgccatggggaaaaatattgtatagtcttccactgtgaatgtcttttgactttttactgagtccagtctttctgaaaaaaaaaaaaaaaaaacatagaaatgaaattagacatttgttgaatgtgggagaaaattttcacagaaggaaactatgtgaattagacacaaacagatggtaagactctgtggctgcctccctgcctgctctgtcaatgggaggggaatcgtggcaaggttaacagggcccggagaatatgaatatcctcatcaactttcttccagggcttgagaaaccaacagattgatctgactctgtcttcatcagtttaaaggaaagggccagtgggataaatatgattttttttttggtaatgatyttgaaacaagaaagaaaaaaaaaagcaatctatttattcttctctatattaaggtatggtcaattggtaccaaaagaaagccacttccctttgactttatatctagaaaacaaattcttaaatgaaggagagcaattttatcccccagagacattaggttatgcttgaagacaattttggttgtcgtcacttggggaggagtgctaggttactggcatctgggtaggtaaaggccagggatgtttgtcaacatcttataacacacaggacattccctctctctctgaatagaacgaataattagccaagccaaagataatctcatctgaacaagaaagaattgtggcagaatatttcaaggtcacaaattcaaatgcctacaggttttaggcaggtgacaaattaatgcaatgggctaggtgtaagtcagtaaggagtagtagatcctttagcaaatattgcaaggctgagaaatccttatctagaaaaaagttgcattcgctatggaaccatagtattctagagacagtggataagatttcagagtttcttgttttttccaccgcaatttcttttttgactattcatgagtgtatgttttatgtgtacatgaaaaaaagaaatt

SEQ ID NO: 73393 - DNA, 645 bp, Homo sapiens
taaaaagagagcasttatcctaaataatttggtttgccccatggaatcacatgaacccttaaaagaagacagctttgtcaggctggtggcagaaaaaaagaaaaccagaaagatttaaagttgtaatgagattcagcacacgatttccagtttgaggaaggaggtggccacatgagaagaaatgtgagcaatcttaagaagctaagagagctccctggctggctgccagcaagaaaaaagggcgtccgtcatatgaccacaagacactgaattttgccaacaactagaatgaatttggaagtggttttcccccagagcctccatataagagcccttatgtaattttactttgatttccaccccttgaaatgtacaccttaatttcaaccatgtaatactttcagcacagaagtaagctgtgctgtactagacttaggacctagagaactgtgagctaataaatatgtattgtttttagctactaaatttgtagtaatttgttacacaggaaatgaaaacaaatatatttttcaaagcgtagttgccttgcaccaaaatcaatatatattctagaagaaaatcaaaacaaatatttgtggaggaaacactgtgtactagatgctctcaagtagagatttcaaattt

SEQ ID NO: 73394 - DNA, 645 bp, Homo sapiens
taaaaagagagcacttatcctaaataatttggtttgccccatgsaatcacatgaacccttaaaagaagacagctttgtcaggctggtggcagaaaaaaagaaaaccagaaagatttaaagttgtaatgagattcagcacacgatttccagtttgaggaaggaggtggccacatgagaagaaatgtgagcaatcttaagaagctaagagagctccctggctggctgccagcaagaaaaaagggcgtccgtcatatgaccacaagacactgaattttgccaacaactagaatgaatttggaagtggttttcccccagagcctccatataagagcccttatgtaattttactttgatttccaccccttgaaatgtacaccttaatttcaaccatgtaatactttcagcacagaagtaagctgtgctgtactagacttaggacctagagaactgtgagctaataaatatgtattgtttttagctactaaatttgtagtaatttgttacacaggaaatgaaaacaaatatatttttcaaagcgtagttgccttgcaccaaaatcaatatatattctagaagaaaatcaaaacaaatatttgtggaggaaacactgtgtactagatgctctcaagtagagatttcaaattt

SEQ ID NO: 73395 - DNA, 645 bp, Homo sapiens
taaaaagagagcacttatcctaaataatttggtttgccccatggaatcacatgaacccttaaaagaagacagctttgtcaggctggtggcagaaaaaaagaaaaccagaaagatttaaagttgtaatgagattcagcacacsatttccagtttgaggaaggaggtggccacatgagaagaaatgtgagcaatcttaagaagctaagagagctccctggctggctgccagcaagaaaaaagggcgtccgtcatatgaccacaagacactgaattttgccaacaactagaatgaatttggaagtggttttcccccagagcctccatataagagcccttatgtaattttactttgatttccaccccttgaaatgtacaccttaatttcaaccatgtaatactttcagcacagaagtaagctgtgctgtactagacttaggacctagagaactgtgagctaataaatatgtattgtttttagctactaaatttgtagtaatttgttacacaggaaatgaaaacaaatatatttttcaaagcgtagttgccttgcaccaaaatcaatatatattctagaagaaaatcaaaacaaatatttgtggaggaaacactgtgtactagatgctctcaagtagagatttcaaattt

SEQ ID NO: 73396 - DNA, 645 bp, Homo sapiens
taaaaagagagcacttatcctaaataatttggtttgccccatggaatcacatgaacccttaaaagaagacagctttgtcaggctggtggcagaaaaaaagaaaaccagaaagatttaaagttgtaatgagattcagcacacgatttccrgtttgaggaaggaggtggccacatgagaagaaatgtgagcaatcttaagaagctaagagagctccctggctggctgccagcaagaaaaaagggcgtccgtcatatgaccacaagacactgaattttgccaacaactagaatgaatttggaagtggttttcccccagagcctccatataagagcccttatgtaattttactttgatttccaccccttgaaatgtacaccttaatttcaaccatgtaatactttcagcacagaagtaagctgtgctgtactagacttaggacctagagaactgtgagctaataaatatgtattgtttttagctactaaatttgtagtaatttgttacacaggaaatgaaaacaaatatatttttcaaagcgtagttgccttgcaccaaaatcaatatatattctagaagaaaatcaaaacaaatatttgtggaggaaacactgtgtactagatgctctcaagtagagatttcaaattt

SEQ ID NO: 73397 - DNA, 645 bp, Homo sapiens
taaaaagagagcacttatcctaaataatttggtttgccccatggaatcacatgaacccttaaaagaagacagctttgtcaggctggtggcagaaaaaaagaaaaccagaaagatttaaagttgtaatgagattcagcacacgatttccagtttgargaaggaggtggccacatgagaagaaatgtgagcaatcttaagaagctaagagagctccctggctggctgccagcaagaaaaaagggcgtccgtcatatgaccacaagacactgaattttgccaacaactagaatgaatttggaagtggttttcccccagagcctccatataagagcccttatgtaattttactttgatttccaccccttgaaatgtacaccttaatttcaaccatgtaatactttcagcacagaagtaagctgtgctgtactagacttaggacctagagaactgtgagctaataaatatgtattgtttttagctactaaatttgtagtaatttgttacacaggaaatgaaaacaaatatatttttcaaagcgtagttgccttgcaccaaaatcaatatatattctagaagaaaatcaaaacaaatatttgtggaggaaacactgtgtactagatgctctcaagtagagatttcaaattt

SEQ ID NO: 73398 - DNA, 645 bp, Homo sapiens
taaaaagagagcacttatcctaaataatttggtttgccccatggaatcacatgaacccttaaaagaagacagctttgtcaggctggtggcagaaaaaaagaaaaccagaaagatttaaagttgtaatgagattcagcacacgatttccagtttgaggaaggaggtggccacatgagaagaaatgtgagcaatcttaagaagctaagagagctccctggctggctgccagcaagaaaaaaggrcgtccgtcatatgaccacaagacactgaattttgccaacaactagaatgaatttggaagtggttttcccccagagcctccatataagagcccttatgtaattttactttgatttccaccccttgaaatgtacaccttaatttcaaccatgtaatactttcagcacagaagtaagctgtgctgtactagacttaggacctagagaactgtgagctaataaatatgtattgtttttagctactaaatttgtagtaatttgttacacaggaaatgaaaacaaatatatttttcaaagcgtagttgccttgcaccaaaatcaatatatattctagaagaaaatcaaaacaaatatttgtggaggaaacactgtgtactagatgctctcaagtagagatttcaaattt

SEQ ID NO: 73399 - DNA, 1006 bp, Homo sapiens
aaagtcaagaaatgatctttacattttactccttaagtcaacctttcaagatcttttggtggtgcttatttttcacactgggatatcacttaatagaagtatttctatttaactttgtaaaataaaaatcaactggaaaataaggctggttattcaagctaccctcactctaacatttaagtttacaataatataccttggctgattcaaagatcaaatttataatttataatcatatattccaaagtgttttggttataaaacctttaaaggataacatagtgaattttttcctctgatcattatattaactctagtgtgctttccaaaatacagatgtgtatgtgtgtgtatatgtgtgtgtgtctgtgtttgcttgtttgttttatttttaaagaagcatcacattgaccgcttaaacatttaaatatttttgtatacttttggaacatatctttatatgtataaatgttatagctagaaataatgacaygatgggtccactggcaatgagcagacctaaaagaagcctcatatatgttctggctttgaatacgtcttggtctattctgtcctgggaaagtactgcttgtaatatagctggtcattactcctcctgcccccagttcaactattttgtatattattttatacattagttctagtctccatgtatatttctaccagaattggaaaattttaatttattagatactttgccccaaatgtaacatttaattatagatattcctgaagaatttgattctcaagtaaagtcattttaaattggtctggtacatcatctaagctgtttgccttacttgctatacaaattggcttctttgcagctgtggtgaaggatacaagaaatctgcttctaatctgctttaaatttggcaatagcattttctaaaaatgtagtgtgtgtccaggatgttttagtttagtgacatggagcatcctgttaccttcatttaaggctgaaagcaaaatttggtaaaaaaaa

SEQ ID NO: 73400 - DNA, 1006 bp, Homo sapiens
aaagtcaagaaatgatctttacattttactccttaagtcaacctttcaagatcttttggtggtgcttatttttcacactgggatatcacttaatagaagtatttctatttaactttgtaaaataaaaatcaactggaaaataaggctggttattcaagctaccctcactctaacatttaagtttacaataatataccttggctgattcaaagatcaaatttataatttataatcatatattccaaagtgttttggttataaaacctttaaaggataacatagtgaattttttcctctgatcattatattaactctagtgtgctttccaaaatacagatgtgtatgtgtgtgtatatgtgtgtgtgtctgtgtttgcttgtttgttttatttttaaagaagcatcacattgaccgcttaaacatttaaatatttttgtatacttttggaacatatctttatatgtataaatgttatagctagaaataatgacacgatgggtccactggcaatgagcagacctaaaagaagcctcatatatgttctggctttgaatacgtcttggtctattctgtcctgggaaagtactgcttgtaatatagctggtcattactcctcctgcccccagttcaactattttgtatattattttatacattagttctagtctccatgtatatttctaccagaattggaaaattttaatttattagatactttrccccaaatgtaacatttaattatagatattcctgaagaatttgattctcaagtaaagtcattttaaattggtctggtacatcatctaagctgtttgccttacttgctatacaaattggcttctttgcagctgtggtgaaggatacaagaaatctgcttctaatctgctttaaatttggcaatagcattttctaaaaatgtagtgtgtgtccaggatgttttagtttagtgacatggagcatcctgttaccttcatttaaggctgaaagcaaaatttggtaaaaaaaa

SEQ ID NO: 73401 - DNA, 649 bp, Homo sapiens
gggatccaaacagyggaagaaacttgagtacttgtcttgataacagaaataaagggacagtggaaaggggatctgagcaatgacagttcttcattttaaaaatagaatgtttagatatattaagtgtggaatgtccacgtagacgattctaccaggcctataccctaaatgagctcaccatatgtgctccgtgaaacaagaataagccatttttgaaattctttttttgaaattcttacatattccaatcagtataaaaattgcttatctgtgggagataaatctgtagtgaacgttgggaacatgattagctcatggagagagaaaattcctttgcacgtgtcactgtagacagaaataagattcaggaaaaagctgggatctgggatgcaacctgggcagaaacaagcacagcccctgagctgctgcgtaccttgacacaggttgggtggataatcataagaattttgtcttcaagagtgtgaagttaggagaggtggcgcaagctgctgccattgccataaacagattttctgcccattgagctgctggttgaggagattgaggctgaggtggagcatgtgatcagctctttattgggagaagactcttctgaaaccccacatgcagggtggcgatgtgagaacca

SEQ ID NO: 73402 - DNA, 847 bp, Homo sapiens
atgtatctgcacaaactctagcccatatctcattatccacatggtcatttattgggatttctacagagtaagctgtagaagagatggcagagtctaaacaaatgattaggcacagaaatractgggacaagagctgtcgggggggaagccaaatgtgttgtttaaccaggttttgccagtccaggagctgcctgacaggtcctacttccatcccatatccacgctgcacggccaacttcctgcctgcatttaggatctcaacagaggcgaactctcctcagacccaggaatttttaaaagccttagaacctaacggtccctggtgtcctgctggggctggcagtcaaagcgtgctatcagaccaagagcgctgactacaaagatttaggagcctagcctgacttcctaaggagaatttgaattgtgctctttaattctgacagcctatctgctcagtacttgtctgctggtctatctttcatatatgggatttcagaagtgtttcgactaaagtttaaccttccaaaataggagcatctctgtcaaaaattcaattttggaaaaaaaattctgttactttttccccttgagcccagtagtctcctttttaatgtctgtttaaaagatcgctagccatttattaagacccattccagacattccaaacgttacaaaactaaatgttataaaagccagtgtatcccatgctcagatcaggaaataatacattaccgatcaagttgaaggctatggtttaaccatacctaattctgtttctctcccttactgcctgccatgggtcaccattattctgaatttgttgtttacatttgacatgtattttatt

SEQ ID NO: 73403 - DNA, 847 bp, Homo sapiens
atgtatctgcacaaactctagcccatatctcattatccacatggtcatttattgggatttctacagagtaagctgtagaagagatggcagagtctaaacaaatgattaggcacagaaatgactgggacaagagctgtcrggggggaagccaaatgtgttgtttaaccaggttttgccagtccaggagctgcctgacaggtcctacttccatcccatatccacgctgcacggccaacttcctgcctgcatttaggatctcaacagaggcgaactctcctcagacccaggaatttttaaaagccttagaacctaacggtccctggtgtcctgctggggctggcagtcaaagcgtgctatcagaccaagagcgctgactacaaagatttaggagcctagcctgacttcctaaggagaatttgaattgtgctctttaattctgacagcctatctgctcagtacttgtctgctggtctatctttcatatatgggatttcagaagtgtttcgactaaagtttaaccttccaaaataggagcatctctgtcaaaaattcaattttggaaaaaaaattctgttactttttccccttgagcccagtagtctcctttttaatgtctgtttaaaagatcgctagccatttattaagacccattccagacattccaaacgttacaaaactaaatgttataaaagccagtgtatcccatgctcagatcaggaaataatacattaccgatcaagttgaaggctatggtttaaccatacctaattctgtttctctcccttactgcctgccatgggtcaccattattctgaatttgttgtttacatttgacatgtattttatt

SEQ ID NO: 73404 - DNA, 847 bp, Homo sapiens
atgtatctgcacaaactctagcccatatctcattatccacatggtcatttattgggatttctacagagtaagctgtagaagagatggcagagtctaaacaaatgattaggcacagaaatgactgggacaagagctgtcgggggggaagccaaatgtgttgtttaaccaggytttgccagtccaggagctgcctgacaggtcctacttccatcccatatccacgctgcacggccaacttcctgcctgcatttaggatctcaacagaggcgaactctcctcagacccaggaatttttaaaagccttagaacctaacggtccctggtgtcctgctggggctggcagtcaaagcgtgctatcagaccaagagcgctgactacaaagatttaggagcctagcctgacttcctaaggagaatttgaattgtgctctttaattctgacagcctatctgctcagtacttgtctgctggtctatctttcatatatgggatttcagaagtgtttcgactaaagtttaaccttccaaaataggagcatctctgtcaaaaattcaattttggaaaaaaaattctgttactttttccccttgagcccagtagtctcctttttaatgtctgtttaaaagatcgctagccatttattaagacccattccagacattccaaacgttacaaaactaaatgttataaaagccagtgtatcccatgctcagatcaggaaataatacattaccgatcaagttgaaggctatggtttaaccatacctaattctgtttctctcccttactgcctgccatgggtcaccattattctgaatttgttgtttacatttgacatgtattttatt

SEQ ID NO: 73405 - DNA, 847 bp, Homo sapiens
atgtatctgcacaaactctagcccatatctcattatccacatggtcatttattgggatttctacagagtaagctgtagaagagatggcagagtctaaacaaatgattaggcacagaaatgactgggacaagagctgtcgggggggaagccaaatgtgttgtttaaccaggttttgccagtccaggagctgcctgacrggtcctacttccatcccatatccacgctgcacggccaacttcctgcctgcatttaggatctcaacagaggcgaactctcctcagacccaggaatttttaaaagccttagaacctaacggtccctggtgtcctgctggggctggcagtcaaagcgtgctatcagaccaagagcgctgactacaaagatttaggagcctagcctgacttcctaaggagaatttgaattgtgctctttaattctgacagcctatctgctcagtacttgtctgctggtctatctttcatatatgggatttcagaagtgtttcgactaaagtttaaccttccaaaataggagcatctctgtcaaaaattcaattttggaaaaaaaattctgttactttttccccttgagcccagtagtctcctttttaatgtctgtttaaaagatcgctagccatttattaagacccattccagacattccaaacgttacaaaactaaatgttataaaagccagtgtatcccatgctcagatcaggaaataatacattaccgatcaagttgaaggctatggtttaaccatacctaattctgtttctctcccttactgcctgccatgggtcaccattattctgaatttgttgtttacatttgacatgtattttatt

SEQ ID NO: 73406 - DNA, 847 bp, Homo sapiens
atgtatctgcacaaactctagcccatatctcattatccacatggtcatttattgggatttctacagagtaagctgtagaagagatggcagagtctaaacaaatgattaggcacagaaatgactgggacaagagctgtcgggggggaagccaaatgtgttgtttaaccaggttttgccagtccaggagctgcctgacaggtcctacttccatcccatatccacgctgcacggccaacttcctgcctgcatttaggatctcaacagaggcgaactctcctcagacccaggaatttttaaaagccttagaacctaacggtccctggtgtcctgctggggctggcagtcaaagcgtgctatcagaccaagagcgctgactacaaagatttaggagcctagcctgacttcctaaggagaatttgaattgtgctctttaattctgacagcctatctgctcagtacttgtctgctggtctatctttcatatatgggatttcagaagtgtttcgactaaagtttaaccttccaaaataggagcatctctgtcaaaaattcaattttggaaaaaaaattctgttactttttccccttgagcccagtagtctcctttttaatgtctgtttaaaagatcgctagccatttattaagacccattccagacattccaaacgttacaaaactaaatgttataaaagccagtgtatcccatgctcagatcaggaartaatacattaccgatcaagttgaaggctatggtttaaccatacctaattctgtttctctcccttactgcctgccatgggtcaccattattctgaatttgttgtttacatttgacatgtattttatt

SEQ ID NO: 73407 - DNA, 686 bp, Homo sapiens
agaggacaaaacagaacttgagtaccttcatttctgtcattcagtgagagcactgagagttcctatttgtgtctaaaatttcaaagagtaagatggggtccaaactggaaagtgtcatatttctgtttggtaaatgcrgattattgtttataacacaaaatcattcactaaatttgtgtatgtttaaaattaaaattgattcttctatttaaatcattgttttaaaataagaatgactaaaaaaatgattattactgacttttacatgatagatactgaaaacagcgttgtaatattgagtggagggtgttaaatggcccttcctgggtgttgagtaggctgggttacccatgccaagtttaccgcttcctgctcggggggaggaaagagtcacagcggctttcttcctaacaatctggaaattatagattaatccgtgaagtgtctgtagatatggacttactagagaatcttcttgcaagattcaataagttttctccactgcccagtttgctttggactaaacgcttgtgctttttccttgacctggttgaaagctcttctttcccctcctgattctgccattcttcaagaggcagaacagcgaagaagaaaaaatggtgaaggagaaagagaaggatgtttgaatctgtgtagaactgggttttatttccagctgagtgcca

SEQ ID NO: 73408 - DNA, 561 bp, Homo sapiens
ggcaacaggaacatttttgtggtttttaaagttctgatgctacttaaaagattttggtttctaagtttcaggcttggatattaacatcatccttttgtcttttcagtggcttcctgtttactgataaaaatytaaaaatgcatttactcaaattttaaagtaatagaaaggttactaaagaaaattgttaaaaatgcactatgaataaacagtaaattaatctcactacccatgaagaaccaatgttaacaatttgtgtcctgttttcttatacgtttgttttctctcatcacatgtagatgtaaagtcactctttgcatgttgctactactgctttcgggatctcacacaccactacggcttctccttgcttcttgacttctggtgtagtctctgagtgaacatcgggaaaaaaaaggatgttattgatggcatgcatgggtgttcttggctctgtgtttggacactttaaaaacagtgtaaatattcaattgagaaatggctgaaaaatgttttccctgatttaagtgtctgacctggaaagcaaaatctggaggatat

SEQ ID NO: 73409 - DNA, 561 bp, Homo sapiens
ggcaacaggaacatttttgtggtttttaaagttctgatgctacttaaaagattttggtttctaagtttcaggcttggatattaacatcatccttttgtcttttcagtggcttcctgtttactgataaaaatctaaaaatgcatttactcaaattttaaagtaatagaaaggttactaaagaaaattgttaaaaatgcactatgaataaacagtaaattaatctcactacccatgaagaaccaatgttaacaatttgtgtcctgttttcttatacgtttgttttctctcatcacatgtagatgtaaartcactctttgcatgttgctactactgctttcgggatctcacacaccactacggcttctccttgcttcttgacttctggtgtagtctctgagtgaacatcgggaaaaaaaaggatgttattgatggcatgcatgggtgttcttggctctgtgtttggacactttaaaaacagtgtaaatattcaattgagaaatggctgaaaaatgttttccctgatttaagtgtctgacctggaaagcaaaatctggaggatat

SEQ ID NO: 73410 - DNA, 561 bp, Homo sapiens
ggcaacaggaacatttttgtggtttttaaagttctgatgctacttaaaagattttggtttctaagtttcaggcttggatattaacatcatccttttgtcttttcagtggcttcctgtttactgataaaaatctaaaaatgcatttactcaaattttaaagtaatagaaaggttactaaagaaaattgttaaaaatgcactatgaataaacagtaaattaatctcactacccatgaagaaccaatgttaacaatttgtgtcctgttttcttatacgtttgttttctctcatcacatgtagatgtaaagtcactctttgcatgttgctactactgctttcrggatctcacacaccactacggcttctccttgcttcttgacttctggtgtagtctctgagtgaacatcgggaaaaaaaaggatgttattgatggcatgcatgggtgttcttggctctgtgtttggacactttaaaaacagtgtaaatattcaattgagaaatggctgaaaaatgttttccctgatttaagtgtctgacctggaaagcaaaatctggaggatat

SEQ ID NO: 73411 - DNA, 614 bp, Homo sapiens
gagccccttgtatctgccacgagtggcctgcctcactgcaagctgtggcacagatacgtagttagacatggttaataaaaatcattgtgatttaataaacagtgtggtgtttctgtacaggcccctccctgtctgtcccacagccagcgggaacgctggatggatgtgggcctgggtccctggagcccacgaggttcctgcagctttcctaagaggaaaaactgatccggtgatggaaggctgcggcctcctaaaagtctcccctgacgaggagacacggcaggggccacagtcacaaccagatcgagatgattagggaaggtgccgcggagtgcggtccactacacatcttcagggtgcatctggactctcttggggctgcaacagtatttttcacatagtttgaggagctctgacaaaatgaagacggatgaggccaatccagttaaaaacagcaaatctgccaarggagaaaacagaaaagattcaggacgggctgcagctctgttgtgccggcaggaagcgccttccctgccagtcctcctgataaagtgagaggtgcggaggaccagcccttttcattcccctgaaggcagggagatcttcctaaccca

SEQ ID NO: 73412 - DNA, 614 bp, Homo sapiens
gagccccttgtatctgccacgagtggcctgcctcactgcaagctgtggcacagatacgtagttagacatggttaataaaaatcattgtgatttaataaacagtgtggtgtttctgtacaggcccctccctgtctgtcccacagccagcgggaacgctggatggatgtgggcctgggtccctggagcccacgaggttcctgcagctttcctaagaggaaaaactgatccggtgatggaaggctgcggcctcctaaaagtctcccctgacgaggagacacggcaggggccacagtcacaaccagatcgagatgattagggaaggtgccgcggagtgcggtccactacacatcttcagggtgcatctggactctcttggggctgcaacagtatttttcacatagtttgaggagctctgacaaaatgaagacggatgaggccaatccagttaaaaacagcaaatctgccaagggagaaaacagaaaagattcaggacrggctgcagctctgttgtgccggcaggaagcgccttccctgccagtcctcctgataaagtgagaggtgcggaggaccagcccttttcattcccctgaaggcagggagatcttcctaaccca

SEQ ID NO: 73413 - DNA, 614 bp, Homo sapiens
gagccccttgtatctgccacgagtggcctgcctcactgcaagctgtggcacagatacgtagttagacatggttaataaaaatcattgtgatttaataaacagtgtggtgtttctgtacaggcccctccctgtctgtcccacagccagcgggaacgctggatggatgtgggcctgggtccctggagcccacgaggttcctgcagctttcctaagaggaaaaactgatccggtgatggaaggctgcggcctcctaaaagtctcccctgacgaggagacacggcaggggccacagtcacaaccagatcgagatgattagggaaggtgccgcggagtgcggtccactacacatcttcagggtgcatctggactctcttggggctgcaacagtatttttcacatagtttgaggagctctgacaaaatgaagacggatgaggccaatccagttaaaaacagcaaatctgccaagggagaaaacagaaaagattcaggacgggctgcagctctgttgygccggcaggaagcgccttccctgccagtcctcctgataaagtgagaggtgcggaggaccagcccttttcattcccctgaaggcagggagatcttcctaaccca

SEQ ID NO: 73414 - DNA, 580 bp, Homo sapiens
tgcctcagcctcctgagtagctgggaccacaggcatgcaccaccatgcccagctaatttttatattttttgtagagatgggktttcgctatgttgcccaggctggtctcaaactcttggcctcaaatgatcctcccgccttagcctcttaaagtgctgggatttgagccactgcactcagcctgtaatgactttccaatgttcttacactggggaaaagcacctgatctaccaacacgggggcttatgagagggcgaccacctctcccccgcccagcaccagctttgggaaggcagtggtgtgggaggttggagtcttgcactggagggagggacaggtaagctgataacagaaggcagtgaagtgagccctggtgctcagtgatgggacaggtaagctgaaaatacaaggcagtgaagtgagcccgggatgaggagaggtgtctgctggggtggaaactggagtgaacttgaagagaaagtcggcactcgccagtgagaacaggcaggagtggtcaaagtccaggaggaagcaggaagggagggtgagtgcaggggccaggctcggcggcagcgagggg

SEQ ID NO: 73415 - DNA, 655 bp, Homo sapiens
  misc_feature (1)...(655): n = A,T,C or G
caggctggagggcactggtgcaatctcagctcactgcaacctccaccgcctgtgctcaagcaatcctaccacctcagccaccgaagtagccgggactacaggtacacaccaccatgcccgactaatttttttttttttggtagataatggggttttaccatgttgcccaggctggtctcaaactcctgagatgaagtgatccactgacctcggcctcccaaagtgctagaattacaggtgtgagccactttgcctggccgggaattttcaatttgctactagccacattgaaaaatgtaagaaagaaaccagtgccatttattttaatagtattttatctaatccaatatatgcaaaatattgtcatttccacaatgtaatcaatgctaaaaggtactgacgaggtcctttacattcatttcttttgaacccagccttagaaacgctgtgtgccctccgggtatacggcacacactgatatggctgggtgcgctttcaggcgctcanngtgancacgtggccggcaacagcgcaggtctagacagaacaygaaagcgtctgaaagaataatgtgatcaggcaaacagtatcgtgaatcgcagagcattagagcccatctgacggggtggacatctgcgcccatgtccagatctgg

SEQ ID NO: 73416 - DNA, 531 bp, Homo sapiens
caggctggagtgcaatggtgcaatcttggctcactgcaatctcctcctcccgggttcaggcgattctcctgcctcagcttcccgagtagctgggactacaggcatgcaccaccatgcccagctaattttgtatttttagtagagacagggctttgccatgtcggccaggctggtctccaacttctgctcctgacctcaggtgatctgcccgccttggcctcccaaagtgctgggattacaggcgtgagccaccgcgcccagcctttaaatttttttttacagtgatggggtctcattatgttgcccaggcttgtctcaaactcccgggctcaagtgatcctcttgcctcagcctccaaaagtgcagggattgcagtcgtgagccactgcacccagcccatatttttttaagtcaacctactgtgkgatttttttttctgcctttctcagcataactctaagcaataatgtccacgaagtcagggtttcagtgagctatagagttcagcagtcaacaacacagacagtggat

SEQ ID NO: 73417 - DNA, 1333 bp, Homo sapiens
ttgccaatatattcagaagctccgaccttttttgtccctccatgtggatttcacaagtcattaaaatagtctgttgcctcttaagaaactccacggacttatkcttttccaatcctctcactataatcagatatgtgtcttagctgaatagtatataaatggttccttttattttgatgggttggtaatttagtatattggaacatttcacagttttaaggttttgttttgttttaaagaaagccatttcctcaattatttcctcatgttacaaagttactggaaattgtattcaaggaaaatagcttcttgtgaatcatgcttgaagccagtttcacactaaagatcctgtaactttttttcatactagtatttttttgcatgtaaaataatagatcctgcctctaccacatttataattatgtaactgatttattccttcgttaccttattagtccatagctatgcagcagactttgagagctgtctttaaaatgttattgaaacatgttcagaaagtgtaatcatattgaattttaacttaaaattacattttaacgttagtatgatataataattgcatactaatttcaaactaatatgacatagttacaaaaatttattgtaaagctttttaagaagataggttagtaagtatcatctatttgcttctatttttgtcttatactttggaaatggtagtacctctcccattcttaattcacaaaaagggagaagatggattggacaagtataaggtactgtcatgtatgataaaaggaacactttccattttaatagtattcttgcagcaggctctgctataatctatttgttgaaataaatttggttggataaatgttatttgtgcttattcagtgagccagtgatctttgaataatagagctttgaaaaagatgtatttatgttgaaaaggctttttgaccctttttctgtattttccattgataatggcagtagagttgaatacatgggtcagactatgattctagttgcagttttcttaaagcagagtagagattttgtggttttattactctaccaggaatgttttattgagtaagctgagttggattgcattcattgtattcctttttaccatcccaagttttataaatattgcatattacatatgtatccttgcactccacttttattgttgaccaaagaatactttaatgcatgttctctgatcctccctgacatatttaggtcatattgctgaacaatatcacttaatcttgagaagttttctcacgtttgttgaaatgatcaaagagacgtttttttttttgaatatatgtaatgtggc

SEQ ID NO: 73418 - DNA, 1333 bp, Homo sapiens
ttgccaatatattcagaagctccgaccttttttgtccctccatgtggatttcacaagtcattaaaatagtctgttgcctcttaagaaactccacggacttatgcttttccaatcctctcactataatcagatatgtgtcttagctgaatagtatataaatggttccttttattttgatgggttggtaatttagtatattggaacatttcacagttttaaggttttgttttgttttaaagaaagccatttcctcaattatttcctcatgttacaaagttactggaaattgtattcaaggaaaatagcttcttgtgaatcatgcttgaagccagtttcacactaaagatcctgtaactttttttcatactagtatttttttgcatgtaaaataatagatcctgcctctaccacatttataattatgtaactgatttattccttcgttaccttattagtccatagctatgcagcagactttgagagctgtctttaaaatgttattgaaacatgttcagaaagtgtaatcatattgaattttaacttaaaattacattttaacgttagtatgatataataattgcatactaatttcaaactaatatgacatagttacaaaaatttattgtaaagctttttaagaagataggttagtaagtatcatctatttgcttctatttttgtcttatactttggaaatggtagtacctctcccattcttaattcacaaaaagggagaagatggattggacaagtataaggtactgtcatgtatgataaaaggaacactttccattttaatagtattcttgcagcaggctctgctataatctatttgttgaaataaatttggttggataaatgttatttgtgcttattcagtgagccagtgatctttgaataatagagctttgaaaaagatgtatttatgttgaaaaggctttttgaccctttttctgtattttccattgataatggcagtagagttgaatacatgggtcagactatgattctagttgcagttttcttaaagcagagtagagattttgtggttttattactctaccaggaatgttttattgagtaagctgagttggattgcattcattgtattcctttttaccatcccaagttttataaatattgcatattacatatgtatccttgcactccacttttattgttgaccaaagaatactttaatgcatgttctctgatcctccctgacatatttaggtcatattgctgaacratatcacttaatcttgagaagttttctcacgtttgttgaaatgatcaaagagacgtttttttttttgaatatatgtaatgtggc

SEQ ID NO: 73419 - DNA, 695 bp, Homo sapiens
caatagcaagagaaaagtcaaagataactgggattttaatcctgagcaacgggtaggctagtgagacatctaatcactctccccgtctccttccctgaaagttaattactcacagaaaaagcattagccagaagtcagcatgtttacatcagttccttaaccctgcaagtccacattggtgatgcaggtggccaagacaggtgctgcacacactggattacagcatggaagaggagcccagggtcatggaggcacccagcaagtggcaaaatatgggcaccttgacctactgggttgcctatgtgaccagctacagaagctgctcagtatcaggagctggagctgcctgcaatctggccactcagcaagaattttcagagactgtttctattccatagyggatgctccatccaacaccattcttttaaagtgcgcacatctgatcactttccaagtataaatggcctgaatttattttcctttctttaccaaaatccaacctaagtaatttttttctttccatactccttattcatgaactctaattgttggtaactttgagagcattggtcatcttaatttcttaccactaatgacatgacaagttaatttctgcaataagaacagctaaaattatttttatatcttctaacataatattttgtcatgaatgctttcctagaatcttccttctg

SEQ ID NO: 73420 - DNA, 550 bp, Homo sapiens
acaaattcatgctttctcacttatttgtgggagctgaaaattaaataattttaactcatggaagtagacagtagatggatgattaccagagcctgggaagttagtgggggtgaaggggcaagtgagtattattaatggctccaaaatatagttagaaaaatgaataagacctagtgtttcctatcacaaataataagtttttgctagaatatcatgagaaaagaatatagaagggttttaactgaagttcttaagagatcatacaaggtataatcatacagmaagaacttgttgactaagacactaaaggatttattctgtgtcctaactatagaaagaagaaagaggaaaacattcaataaattattaacttcaactatagagactgaaaaatcttgcttcatttgcaaccattataaaggataaaaaacttcagaataaattatggttttaactgttactgttgtatcaaactactcttactgaggcttggttattgattggttgtttggtattgaaaaatcatgtttttctcccattatgttaaatg

SEQ ID NO: 73421 - DNA, 550 bp, Homo sapiens
acaaattcatgctttctcacttatttgtgggagctgaaaattaaataattttaactcatggaagtagacagtagatggatgattaccagagcctgggaagttagtgggggtgaaggggcaagtgagtattattaatggctccaaaatatagttagaaaaatgaataagacctagtgtttcctatcacaaataataagtttttgctagaatatcatgagaaaagaatatagaagggttttaactgaagttcttaagagatcatacaaggtataatcatacagcaagaacttgttgactaagacactaaaggatttattctgtgtcctaactatagaaagaagaaagaggaaaacattcaataaattattaacttcaactatagagactgaaaaatcttgcttcatttgcaaccattataaaggataaaaaacttcagaataaattatggttttaactgttactgttgtatcaaactactcttactgaggcttggttattgattggttgtktggtattgaaaaatcatgtttttctcccattatgttaaatg

SEQ ID NO: 73422 - DNA, 2321 bp, Homo sapiens
acacacaccatgcatatatatgccatatatatggtatacacataacatatatatatatgccatatatatggtatacacataacatatatatatgccatatatatatggtatacacataacatatatatatgccatatatatggtatacacataacatatatatgccatatatatggtatacacataacatatatatatgccatatatatatggtatacacaaaacatatatatatgccatatatatatggtatacacataacatatatatacacacacgtatacggtatatataccataaaatacataccacccaatggcaacagaatgcacattgtataattttcccacttagtatcaaagtaaagctatgtttcccagttttttgttcgatctacctggaccaggttgacttgtttgaacctgatgatgctgtcaaactcaaatgttcattgatgctatacgtgccctgaactttttcatcggccacccagcttttagagggcgagacttatcttagtaaaataaaaatctatcatgtcactctcatttacaagatattccattagctgaaatttaaagagctgactacataatgtgatatgaaatctcatttcctgccataccctcaatttatgttttttcattcatattaaactgtttttctctacttgtagtggccaacacctctagtctcctaataaacagcttatctttcagaatcaacttcagctctatttcttctatctgatcctatccctgccagatatcaggtgctcatttaataatttgagtgcatcccttgtactcaactgatgagttattacacacaaatgctttctattatttttatttcgtttctcctctgtaatttacaagcttcaaatcttcayttcttgtgtatcccctggtatatagtaggtattacataaacctttgctgcctctaacataaaatatttccaaaaaatagatgttgtatgcatatccgttagcttaataactagaagcagaagttcttagagagaaaacatcatattatgaaaagacagattataaaataactgaaacagaagaaggaattcttgaaggatgtgataatcagttatttctaatcattttagaaacaaacacaaatcctctagagggtctaaaggagaatatgctaaaagcgtaggagaatatatcaaaaacctaggtagaagtggacacataacacagggacatatttataagcctctctatttctattccattgaacctgcttggagctggcccagttgttaggctacacctatagaaaactaattcttctttatgcccacgtgattcactttccatctttgctgcgcacatacatgtggggatggggtatgtgtttaagtgtgttgggggtggattgcctattagtttgcttttaatgattagatagaggaaacatgtttataatacaacctccaagctgcctctgaaagtcctggggagaagcactaattgaaaattacaatctttatgtagaaaatgctttccttctcagcagagatgtattctttacaaggaatagttggagatcagtgctgctaaatagctttgttcatttaacaccagattatacacttcatctgtaatttcttaggtaattttggtacatttctattctcttcaattagtcaaaaaattacaaaaaacagggtttatttatcttatctttccctgtaggacttagatcattcatagttatttaattaaattcatctaacatgactcagtttatttagatgtgaagtcaggtttaattctatggttttactttaatagtgcttccaaaactcggtaaaaaataactaatgatatatttgaaatagaagaaacactatgttaattgattaattacctaaaatgcaatatggggtaacaagaagtataaataaggagcttataatttaattagaagtaagctactctgttggatgaaacttcagagtacgtcataccgatttgtaacgctgctcatattcacaaagtgaatccacaagattgctgcatatagttatgggaagcatgcagctaaaatgacttatattcatattttaaatagcaagtaattaatataattttgttgctaaaataaactatatatatttttcttttcagcttctaacattggcataaacatgaaaactaagatgagtaaaatgcattactgacataatactttaattcctgcccagaatctttaatattctaaagcctgtataactctgtactgacatggaattaaggcttatttttgtagccaatacatgacagcaaaaaaaaaaaa

SEQ ID NO: 73423 - DNA, 589 bp, Homo sapiens
ctgctattatgttggtacatgaaagataatggcaaaaaccgcaattacttttgcacaacctaatataaaccagcctacttgtcttgtcagtgttcttaaaactgtctcattgaaagggttaggaggtttcatcgacctatcaagcaaattttacgaattatattggttgtctwctgctgcttaacaaattaacataaatttagaaaatttaagtaacacctgtttaatatctcagagtttcagtaggtcaggatttcaggtagtatatgactgggttctctgttcagggtatcacaagactgacaacaaggtattagcttgtctgagttctcaccttgaggttttggaaaacattacttccaggtttttttcttcaggtcgttagcagaatttattactttatagtcataggactgatgtctttatgttcttgcagattgacagctagggagcacctttgcctctaaggtcactgttagatctttgccctgtggcctctgctctcacagcaatagaaaaccttccttcaattgaattctcattatttgaatctctctgacttctcctaaaacagccacagaaaactgct

SEQ ID NO: 73424 - DNA, 589 bp, Homo sapiens
ctgctattatgttggtacatgaaagataatggcaaaaaccgcaattacttttgcacaacctaatataaaccagcctacttgtcttgtcagtgttcttaaaactgtctcattgaaagggttaggaggtttcatcgacctatcaagcaaattttacgaattatattggttgtcttctgctgcttaacaaattaacataaatttagaaaatttaagtaacacctgtttaatatctcagagtttcagtaggtcaggatttcaggtartatatgactgggttctctgttcagggtatcacaagactgacaacaaggtattagcttgtctgagttctcaccttgaggttttggaaaacattacttccaggtttttttcttcaggtcgttagcagaatttattactttatagtcataggactgatgtctttatgttcttgcagattgacagctagggagcacctttgcctctaaggtcactgttagatctttgccctgtggcctctgctctcacagcaatagaaaaccttccttcaattgaattctcattatttgaatctctctgacttctcctaaaacagccacagaaaactgct

SEQ ID NO: 73425 - DNA, 589 bp, Homo sapiens
ctgctattatgttggtacatgaaagataatggcaaaaaccgcaattacttttgcacaacctaatataaaccagcctacttgtcttgtcagtgttcttaaaactgtctcattgaaagggttaggaggtttcatcgacctatcaagcaaattttacgaattatattggttgtcttctgctgcttaacaaattaacataaatttagaaaatttaagtaacacctgtttaatatctcagagtttcagtaggtcaggatttcaggtagtatatgactgggttctctgttcagggtatcacaagactgacaacaaggtattagcytgtctgagttctcaccttgaggttttggaaaacattacttccaggtttttttcttcaggtcgttagcagaatttattactttatagtcataggactgatgtctttatgttcttgcagattgacagctagggagcacctttgcctctaaggtcactgttagatctttgccctgtggcctctgctctcacagcaatagaaaaccttccttcaattgaattctcattatttgaatctctctgacttctcctaaaacagccacagaaaactgct

SEQ ID NO: 73426 - DNA, 1621 bp, Homo sapiens
ggggcctttgggaagtaattagatttagatgaggtcacgaggttggcaccctcatggtgggatgcccttattcaaagagggagagaccagggccctcctttctctgtcatgagaggatacagcaaaaaggtggccatctgcaaaccagatagagggtcctcaccagatagtgaatctgttgacaacttcatcttggacctcctcacatctagaactatgagaaataaaagtttgttatttaagctactctgtatatggtattttattgtaacagtctgaactgactgagacaagaacaataattgtgaaaatatattgtgtgcttactatatttgggtatattccaagtgccttatatatgttatttcatataatctccataataactctacaaagtaagtatgatcaagtaagactgtaggcaagagaactgagactttgaaaggttttatctggcttggagtaacagagggagtaagcagttgcactgagattgaaacccaggaagtcatgactctaatgtccttgttcttaacaatggaggttgaatgtaagaatacaagaaaacatgccgtagcatccaaaattgatggtaggttgtaccatgggcttcacagaaaaagagacaaattgatagacattactgagaataataatctgttcaagtaaccactttttatcctttttcagagagataatgagattagttgtgatatattgttagctttgtacctgcctatcaggcagttttctctgaagatacctcaaagcagaatgagttggtaattccrtggcctcgaatccaatccaatgcagctatgtaggcaggctatttcataacaaagtaaggtatagaaaccatcagaaagggggatccggtggggaaccgaggccacttacattagaagtgtatctatgtatggagaggaattaaaatcccatggctcatctttcatggctcattgtctcactcttgtgcagacattctcaagagctgagtgctagtctgccatcaaggactgcattcagcttgagttagcactcccaccccacaactcctctgcacccgacagaaaaacaaataaacaccccaccctccaattatagcttggagatgggaaaaagctctagtttagatatgaaagggtgagtgttaagagatttctacactgaattatcagggtttaagcagaggagaagaaacatcaggatgactatgccattataacatagccgaaaggaaacaaacagacaagaacattacatgctgaaaagagtctgaaattaaacataatacaaagaaaagaattttatgctctggaaaaatctaataagattatgaatttgataaaacaagagccccaaggtattataataaaacaatagaattagaagcaagaataattgtacagccaatacagttctgttggagataaaaaataaaccccaaacagcaagtgacagaacagacaaagcttaaaattgaatcactagcatgaaggagagggtcgagttagtttcagtgaatatgaagtaaaggaaaaaggagaaaaacaattagagaggtggtgctttatacggtagacaaagaattcctaaaaggagaatgtgtccttaagat

SEQ ID NO: 73427 - DNA, 574 bp, Homo sapiens
ttatagaagcagctcaaggatgttaaagatcagtaagtgacttacggctttggccaatagaaaggcatgggtaacagtttggggaggaagtttgaaaaaaaaactttagggctatagaggggactatagaaggaatacctcttttggataaagtagtgctgaaaggcagccctcctgaacacattgtaatgggaattagagatacaaaatctttttctagtatatataagagaagcaaagttgtagccttgaccctctatcctgcatgtggtgaaggacattcattacagcatcataatagmttttttccagcatatttcatttgaagagagaactcctttatgtgaacatgataatggaaaaatataacttcttaagaattacatcaataactctttggggacaaagctgatcaaatatattattacatcctaccacatagcataaaaaaatgaagtccactgatctggatagagaggagcaattattaccttgttccctctaaacaaatgttactctttattatatcctcaggacctctatttttcaaacaaaaagttgaatttatactcac

SEQ ID NO: 73428 - DNA, 574 bp, Homo sapiens
ttatagaagcagctcaaggatgttaaagatcagtaagtgacttacggctttggccaatagaaaggcatgggtaacagtttggggaggaagtttgaaaaaaaaactttagggctatagaggggactatagaaggaatacctcttttggataaagtagtgctgaaaggcagccctcctgaacacattgtaatgggaattagagatacaaaatctttttctagtatatataagagaagcaaagttgtagccttgaccctctatcctgcatgtggtgaaggacattcattacagcatcataatagattttttccagcatatttcatttgaagagagaactcctttatgtgaacatgataatggaaaaatataacttcttaagaattacatcartaactctttggggacaaagctgatcaaatatattattacatcctaccacatagcataaaaaaatgaagtccactgatctggatagagaggagcaattattaccttgttccctctaaacaaatgttactctttattatatcctcaggacctctatttttcaaacaaaaagttgaatttatactcac

SEQ ID NO: 73429 - DNA, 574 bp, Homo sapiens
ttatagaagcagctcaaggatgttaaagatcagtaagtgacttacggctttggccaatagaaaggcatgggtaacagtttggggaggaagtttgaaaaaaaaactttagggctatagaggggactatagaaggaatacctcttttggataaagtagtgctgaaaggcagccctcctgaacacattgtaatgggaattagagatacaaaatctttttctagtatatataagagaagcaaagttgtagccttgaccctctatcctgcatgtggtgaaggacattcattacagcatcataatagattttttccagcatatttcatttgaagagagaactcctttatgtgaacatgataatggaaaaatataacttcttaagaattacatcaataactctttggggacaaagctgatcaaatatattattacatcctaccacatagcataaaaaaatgaagtccactgatctggatagagaggagcarttattaccttgttccctctaaacaaatgttactctttattatatcctcaggacctctatttttcaaacaaaaagttgaatttatactcac

SEQ ID NO: 73430 - DNA, 666 bp, Homo sapiens
acaatgatgtmattcacatgattctctttcctttccttggaatgtaacttcctgtcatctctggagtctgtttactgtatatcagccaagttctttctcatatgacaccttcccacaaaacctccctgtattctaatttttcactcgtactctgtcctaaatgaatggatgttttatgtaacatcttgatacaaatttaaacttctggagtaggtgaagggtgtttctaaaaagcacagataattctatatcaaatgcagtggaaaatagatgactcagtctgcagcccatgattgctacagagaaatctgcatggaaagaaataaatggtaaaacagatctctcttaatcagtttttttaataaaaagccattctcttagatgtttacaaaactaccttcattgatgccttctgaatttcatgaccatgacaatggtatttctccatatatgaggtcatgtcctatttatttttataattccggaacccagtaaaagacctggcgtgcaattggagctcagatgtttgttgaattaaaaaaaaagtttatgaaagtacatttttatcttcctcacccaatgctttagatctggcaaaatgttttctattacaacaacactaatttggttgtagaactcttctggtcaagacatgactttaacatt

SEQ ID NO: 73431 - DNA, 666 bp, Homo sapiens
acaatgatgtaattcacatgattctctttcctttccttggaatgtaacttcctgtcatctctggagtctgtttactgtatatcagccaagttctttctcatatgacaccttcccacaaaacctccctgtattctaatttttcactcrtactctgtcctaaatgaatggatgttttatgtaacatcttgatacaaatttaaacttctggagtaggtgaagggtgtttctaaaaagcacagataattctatatcaaatgcagtggaaaatagatgactcagtctgcagcccatgattgctacagagaaatctgcatggaaagaaataaatggtaaaacagatctctcttaatcagtttttttaataaaaagccattctcttagatgtttacaaaactaccttcattgatgccttctgaatttcatgaccatgacaatggtatttctccatatatgaggtcatgtcctatttatttttataattccggaacccagtaaaagacctggcgtgcaattggagctcagatgtttgttgaattaaaaaaaaagtttatgaaagtacatttttatcttcctcacccaatgctttagatctggcaaaatgttttctattacaacaacactaatttggttgtagaactcttctggtcaagacatgactttaacatt

SEQ ID NO: 73432 - DNA, 694 bp, Homo sapiens
aaaatttttgataacctagttgtttagaaagtagattttgtcataaaaattaagatgattaatttcacaagttagtccacagaagtttatctcataatgaagcataagttagaatttttttgggttccattcaaactaatttcagcaaaaaagtggtgacattggtgggaggaagcagatttaatggctcacaaaccctgtgagggtaaggatcatatttgtcttgatcaccgttaaatctccaatgcttagcaaagtgccttgcatatagtaggtgctcactgactattyattcaatgaatgaaataaactaatcacaggaatgtcagggacttagctggacctgtgtgaagatggcagctaaggatgtgaatgctctcaagatactctttgttagcatttcgttatctgactttttgtgttttggcttaattctttcagaccacgtcattgttgtggctggaaacttggtcacatggaacgtttatgtttacatgtcccaggttttgtattgaacaaaaactctctctagtagtaaaaccaaaaatccaaggggaaagtttcaggttagcccagctggaattcagcgcatattagaacagtgaaccatggcaggtagaactgtgtaagaacagggatgcagtactggaagtgtagagttgaaatgagggaagggggtttgccaatcagtttt

SEQ ID NO: 73433 - DNA, 1137 bp, Homo sapiens
gttggtggagtggctgaatgagtgtttaatgttaatgttttatatgtttgtgtgtatgtgtgtgtgtgtgtctgtatgtacatttatgtgtgcatgttgaactgtagtttcagactatagtcctgaaaaattctagaacactttgagctttatggattgttagactatgcaagaaattatctgtgtgagttgtgtttgggttaggtattaaaaatatatattgctagaggtgtttgttggaggaagttttatacaatggaaaaacatgccctaccatgcggatacatactgtacacaaaaagatgatcaatccagatcttcgctaatacaaagaaaatatgacccatagcacttgactctgtaggtcagaaattgaaacagatattcccataaaactctggagaatgatgaaggcctcggggaagcaagtctacactgtttctctttccagtgctttctcgaataagtgtaaaacattagtgaggcttcatctgaaggtcagaaagtttacacagtyggagttatatgagtatcaggctttctgaattaagattcagaattcatatctaaaatttgaggctgtgcactgttccacatgactgattttttttctgatacataagatattattttccagtataattaatgtcaatctactgacatcagtgaaatgcacatgaaattctaaatgaatgtgccattagatgtaactcttagttgttacctaaagtcagggagcaacaccaaaaacagaaataaccttcctttataccaggaactgtcaatacagcatatttttaacatgatgagctgtagagggaaaatattcgtgtattcttcaagatcaaatgttcataaatctggagaccaagaattattcacattttgagtttttgtagaattctgctaagtaaggtattagagtactccatgatcactcagcaaactagtactggtattgatttctaattttgtccaatttcctttaaaactttctctttgatatttttgtagctctagcacccttgaacacatgattgaggtagttttggcctcacagatggaacagcttgatgcttgctcaaaaaggtaatgaaacatcctcaattcctgatgaacatctcttttctccttttt

SEQ ID NO: 73434 - DNA, 1424 bp, Homo sapiens
gtcatttaatagaatgaacctggttaagacagaacttgattatgtgactctttttaggttaaactggtttgggtcaaaagcctatttaaacataaagtagcagagatctcatcttcagataatgttcttttcatgtctttttaacctcaaaagcaaacccaccaacctcaatgccaagattttaaaattacttatccttcacaaaaaaacaaaaaatcaagcttttaaggtgtttgctcatttcattagtgggttttctaagggccaaatttctgcaatcggggtaaaatgcattactcatttgattaagaaaacaaacaaacaaaacggaattatttggctcttttccaaaatactaaatgacataaactatgtgcatcattacttaaggacagtcagttgattacaagacttactatatatctatactcaatcagaaataatgcactctgttctataaagtatcacttgccacttatttttaaaataactctaaactctgtttctaaaaataaaagtcctaaaggcctatgttcattccttacagaatacaaactttaaaagtaatgaaagtatgtaatttggagtgtagtcaacaaagggatattgtaaatatataattgaagtgcaagttgaaggaaatgattctatcaaaatctcactcagtgagagaatggaaagatagtatgtgtaaaatttgcccaaagtcattagtcacaatgaatattcatcagaagccaattatcaatctcatttaatgacaccccaaaagattttgccctgaagcagctgaatagcctaagactccagacaaaactagacaaattatacagccaacagccagtctagccaggacacagactgtacagtaaaccactggtggatttttggatgcactttagcaaattctgtcctcaattaaaggtgcacaaggtcatttatatctcagagctttctctatggctccattagttttctctgaggcaaagggagacgaggagaaggcagtgggagtaggacatgaayggagagtgatcaatgacggagtgggaaaaatcacaaggacacattttttttttcagtcatttctcagagataaagcccagattgtcacaatcttagataccaatgcctccgctgaatcctaatagcagctctgcaacttgacgtgaaataaaaataagaatgccccctccaaagacaaaaccacaatatgtgtaggtaccatgttggggtttagacccttgcaaagtattgttttaaaggaaagagtgcgtgtgtgttgatacacatatacactcatcaccacatttcacagattaggaaacagtttcagaggtgaaataacttgcccaaggccacatcgacagtaagtgacagaactgggactcacatccaggtctgtcagaatataatggccactg

SEQ ID NO: 73435 - DNA, 1424 bp, Homo sapiens
gtcatttaatagaatgaacctggttaagacagaacttgattatgtgactctttttaggttaaactggtttgggtcaaaagcctatttaaacataaagtagcagagatctcatcttcagataatgttcttttcatgtctttttaacctcaaaagcaaacccaccaacctcaatgccaagattttaaaattacttatccttcacaaaaaaacaaaaaatcaagcttttaaggtgtttgctcatttcattagtgggttttctaagggccaaatttctgcaatcggggtaaaatgcattactcatttgattaagaaaacaaacaaacaaaacggaattatttggctcttttccaaaatactaaatgacataaactatgtgcatcattacttaaggacagtcagttgattacaagacttactatatatctatactcaatcagaaataatgcactctgttctataaagtatcacttgccacttatttttaaaataactctaaactctgtttctaaaaataaaagtcctaaaggcctatgttcattccttacagaatacaaactttaaaagtaatgaaagtatgtaatttggagtgtagtcaacaaagggatattgtaaatatataattgaagtgcaagttgaaggaaatgattctatcaaaatctcactcagtgagagaatggaaagatagtatgtgtaaaatttgcccaaagtcattagtcacaatgaatattcatcagaagccaattatcaatctcatttaatgacaccccaaaagattttgccctgaagcagctgaatagcctaagactccagacaaaactagacaaattatacagccaacagccagtctagccaggacacagactgtacagtaaaccactggtggatttttggatgcactttagcaaattctgtcctcaattaaaggtgcacaaggtcatttatatctcagagctttctctatggctccattagttttctctgaggcaaagggagacgaggagaaggcagtgggagtaggacatgaacggagagtgatcaatgacggagtgggaaaaatcacaaggacacattttttttttcagtcatttctcagagataaagcccagattgtcacaatcttagataccaatgcctcygctgaatcctaatagcagctctgcaacttgacgtgaaataaaaataagaatgccccctccaaagacaaaaccacaatatgtgtaggtaccatgttggggtttagacccttgcaaagtattgttttaaaggaaagagtgcgtgtgtgttgatacacatatacactcatcaccacatttcacagattaggaaacagtttcagaggtgaaataacttgcccaaggccacatcgacagtaagtgacagaactgggactcacatccaggtctgtcagaatataatggccactg

SEQ ID NO: 73436 - DNA, 1424 bp, Homo sapiens
gtcatttaatagaatgaacctggttaagacagaacttgattatgtgactctttttaggttaaactggtttgggtcaaaagcctatttaaacataaagtagcagagatctcatcttcagataatgttcttttcatgtctttttaacctcaaaagcaaacccaccaacctcaatgccaagattttaaaattacttatccttcacaaaaaaacaaaaaatcaagcttttaaggtgtttgctcatttcattagtgggttttctaagggccaaatttctgcaatcggggtaaaatgcattactcatttgattaagaaaacaaacaaacaaaacggaattatttggctcttttccaaaatactaaatgacataaactatgtgcatcattacttaaggacagtcagttgattacaagacttactatatatctatactcaatcagaaataatgcactctgttctataaagtatcacttgccacttatttttaaaataactctaaactctgtttctaaaaataaaagtcctaaaggcctatgttcattccttacagaatacaaactttaaaagtaatgaaagtatgtaatttggagtgtagtcaacaaagggatattgtaaatatataattgaagtgcaagttgaaggaaatgattctatcaaaatctcactcagtgagagaatggaaagatagtatgtgtaaaatttgcccaaagtcattagtcacaatgaatattcatcagaagccaattatcaatctcatttaatgacaccccaaaagattttgccctgaagcagctgaatagcctaagactccagacaaaactagacaaattatacagccaacagccagtctagccaggacacagactgtacagtaaaccactggtggatttttggatgcactttagcaaattctgtcctcaattaaaggtgcacaaggtcatttatatctcagagctttctctatggctccattagttttctctgaggcaaagggagacgaggagaaggcagtgggagtaggacatgaacggagagtgatcaatgacggagtgggaaaaatcacaaggacacattttttttttcagtcatttctcagagataaagcccagattgtcacaatcttagataccaatgcctccgctgaatcctaatagcagctctgcaacttgacgtgaaataaaaataagaatgccccctccaaagacaaaaccacaatatgtgtaggtaccatgttggggtttagacccttgcaaagtattgttttaaaggaaagagtgcgtgtgtgttgatacacatatacactcatcaccacatttcacagatwaggaaacagtttcagaggtgaaataacttgcccaaggccacatcgacagtaagtgacagaactgggactcacatccaggtctgtcagaatataatggccactg

SEQ ID NO: 73437 - DNA, 611 bp, Homo sapiens
cagcttctaaccttgattctgcaactaacttgtgttgtgctctgcgactgattgtttaatgtctcagaatctgttcctcatctgtaaaactgatgttgctatctatctctcaggttgctgtattaaatgagatgacatgtgaacgcacctgccatcacacatggctcataataggcatcagacatgttttaaaaattaagtgaaaaagtctaattattcaaagagaacattttggggaacatgagaatagagctggctagtaagacacacatgaccagcactccatctgcaatgatgaaagaaagctaaaggcaggagtcatgaactcaatatcaaagctattctctgcaaaggagccgattcctccaaagacattaaattagaggaactaagttttgaaaccttattctcattactttcctagcaagcyactgagaaagtgaagccattttcttcttgggcagcttctccagtatactgttcttgggggaaaccaatattctttatttcctccaggactgggagttgcttggcagaaactgagataaaaacagaaatatttgccatatatttattgctggaggcttatggtgtgaaaaaaatctccacat

SEQ ID NO: 73438 - DNA, 1306 bp, Homo sapiens
ggttggaggtgtgaaccaggaattaacagtttattacggctagaacatagggtgtgtggttgggagggacaaaagatgagacccaaatagacaggagggaccagattgggaatggtcacaaaaacaartttggacttcaagtttggggcagtggggcatctactaaggtgattaagccagggaatgatgtgataaaattcatgctaccaggagtcccagactaagggtcgagtgttggatcccacctcttgctgctttgctggttgctagaatctgaccaaagctttcccccaccccacgtctactgatattggacttggggtcaggggacagtgtgctagagagaattcttagtagcacctgtgaccagcatccagtcattcatcccttgtgcttttcaggagttgtttgtccatccctgttctgtcttgggccacttggcgacactgtccatgctgtgacttgtaaatttcattcattcaggaagagagcatcgtgatccagtgagccttgccctaagcgtgtgtgtatgatttgtcaacgatcgaggattttatgggagtttatgggacttcattaaagatgctggagcaggagcactgtgggacatcagaagagacctcagcaataaaccacaattccaagctttggaatgcagtaaatgtttaagagacttccttcctttcattactgaattttactttactttcataccagtaaagagttgtgttttattggttgaaatttcttgattctgtttttcccaggtctgtttaaaagctacattttatctttgaggatgtttggctcgtggtggaggaagtgctgccagcgaattcaattaactggcagagctcacagatattgtacacggatttctttttttcttctttttcacaactgctacataaacacagctgggtttaatatttgtcgtaacaaagatttaacttgaatcattttaccccgggtaattaatgcttggaatcttggctactttttcgttcgtttgtaatcctctgcatttctttactctagctatctagataatgaagtgtgctcctctaggtctttgccctgccttaaaactgcttaatatttggccgttcccactagagagcagatgcttttctttgcaagaattgaatttctgtcagctcttttatgcatcatgtgtttggaactgtaagtggatcaagttgttcatcacagcggggacactgtgaaacacatctattatacacacttcccaccccccttcctgttttgtttttttttcctcccctgaggaggtggagatgcccgg

SEQ ID NO: 73439 - DNA, 641 bp, Homo sapiens
atctattctttgccactgaaaagaagaaagaaaaaggtccactgactaatgtattgttaattgcatatttattatacatatttttggaggatctaattttcttgtaatcaaatactccgaagttcaagtccattacctttatttagtgattttartaccacttagttctcagatttccagtgttacactctactgccctctttgcttcctaaaggaaaagatatttaataactaattttatagattgagatctgccaacactaggtcacaaaggtaattaagtttttcttctttggaggctctgcgttaggcaaaaaagggaaaaaatataattctctggtatttttagaaatgtgctatcttttgtagctgcaggtgatttcatattcatatcaatttagtctactttagtctagagctaattatgacttcttgttgcttttactaaaagtaagcctagaattatagtctattatattctccaccaaccaaaacattatgtatgtttcttttttcctcacacgggaaagtgaatgaaagaattgcccagtgggaattttttataagcaaaataaatccattcttttacaccatacaatgttacaaagttgtttatttgaagatatttaaggagattctaa

SEQ ID NO: 73440 - DNA, 641 bp, Homo sapiens
atctattctttgccactgaaaagaagaaagaaaaaggtccactgactaatgtattgttaattgcatatttattatacatatttttggaggatctaattttcttgtaatcaaatactccgaagttcaagtccattacctttatttagtgattttagtaccacttagttctcagatttccagtgttacactctactgccctctttgcttcctaaaggaaaagatatttaataactaattttatagattgagatctgccaacactaggtcacaaaggtaattaagtttttcttctttggaggctctgcgttaggcaaaaaagggaaaaaatataattctctggtatttttagaaatgtgctatcttttgtagctgyaggtgatttcatattcatatcaatttagtctactttagtctagagctaattatgacttcttgttgcttttactaaaagtaagcctagaattatagtctattatattctccaccaaccaaaacattatgtatgtttcttttttcctcacacgggaaagtgaatgaaagaattgcccagtgggaattttttataagcaaaataaatccattcttttacaccatacaatgttacaaagttgtttatttgaagatatttaaggagattctaa

SEQ ID NO: 73441 - DNA, 641 bp, Homo sapiens
atctattctttgccactgaaaagaagaaagaaaaaggtccactgactaatgtattgttaattgcatatttattatacatatttttggaggatctaattttcttgtaatcaaatactccgaagttcaagtccattacctttatttagtgattttagtaccacttagttctcagatttccagtgttacactctactgccctctttgcttcctaaaggaaaagatatttaataactaattttatagattgagatctgccaacactaggtcacaaaggtaattaagtttttcttctttggaggctctgcgttaggcaaaaaagggaaaaaatataattctctggtatttttagaaatgtgctatcttttgtagctgcaggtgatttcatattcatatcaatttagtctactttagtctagagctaattatgacttcttgttgcttttactaaaagtaagcctagaattwtagtctattatattctccaccaaccaaaacattatgtatgtttcttttttcctcacacgggaaagtgaatgaaagaattgcccagtgggaattttttataagcaaaataaatccattcttttacaccatacaatgttacaaagttgtttatttgaagatatttaaggagattctaa

SEQ ID NO: 73442 - DNA, 1068 bp, Homo sapiens
tcctccatgcctattcatggtttgatagctcattttcttttagtaatgaataatactccattctctggatgtaccagtttatttatccattcgcctactgaaggaaatcttggttgcttccaagttttggcaattacaaataaaactgctgtaaacatccatgtgcaggtttttttgtggatctaagtcttcaactcaattgggcaaatacccaggagaatgattgctatatcatattcacttttctsagcctcattttcttcactggtaaagtggagataacaatagtcccatagggggattgtgaagtttaattgagataatgcacatgaagcccttagcaatgcacccagcacataggcaatactcaactaatggtagcccatccttgttatcctattcaagagtaatgacaatacaaatgtgagagatggaaattcaagtattgaccgagggatatgacatatggaggtggcatagtcatgcgtcatctgtccatactccaagagggcacagggcaacaagaaatactagaagacagtcagggcaccactgctgccattgaggtgggatctggtcatctcctagggcctgtgaccctgagtcctgcagtcctgagctgccagggtaggggaggtggagatcaacccatggtcccacagtgaagtgtgtcccagctttagcaaaccaaggtatcctcccactgtgcattcctctcctccccaagcctgctcctccagcagctccccactcccctccttttgactcatctgagccaagccctgtccctaactagaaactcagaggtgatgaaaacaaagttttttcctcgcttcacttacttcctgtgaactcgcttaattgttcccagattactaggtcaccaggaggatttggtaccttggattttttttcttcttcttccttatgctttctggagacaacaagggtcacttggggtccagccttgtgtggcaagggtacgctgatcggatttctctggaatccatttctgtggtgtttcttgagtgaggggatggactgagtggcctgggtggtgtgtggctt

SEQ ID NO: 73443 - DNA, 1068 bp, Homo sapiens
tcctccatgcctattcatggtttgatagctcattttcttttagtaatgaataatactccattctctggatgtaccagtttatttatccattcgcctactgaaggaaatcttggttgcttccaagttttggcaattacaaataaaactgctgtaaacatccatgtgcaggtttttttgtggatctaagtcttcaactcaattgggcaaatacccaggagaatgattgctatatcatattcacttttctcagcctcattttcttcactggtaaagtggagataacaatagtcccatagggggattgtgaagtttaattgagataatgcacatgaagcccttagcaatgcacccagcacataggcaatactcaactaatggtagcccatccttgttatcctattcaagagtaatgacaatacaaatgtgagagatggaaattcaagtattgaccgagggatatgacatatggaggtggcatagtcatgcgtcatctgtccatactccaagagggcacagggcaacaagaaatactagaagacagtcagggcaccactgctgccattgaggtgggatctggtcatctcctagggcctgtgaccctgagtcctgcagtcctgagctgccagggtaggggaggtggagatcaacccatggtcccacagtgaagtgtgtcccagctttagcaaaccaaggtatcctcccactgtgcattcctctcctccccaagcctgctcctccagcasctccccactcccctccttttgactcatctgagccaagccctgtccctaactagaaactcagaggtgatgaaaacaaagttttttcctcgcttcacttacttcctgtgaactcgcttaattgttcccagattactaggtcaccaggaggatttggtaccttggattttttttcttcttcttccttatgctttctggagacaacaagggtcacttggggtccagccttgtgtggcaagggtacgctgatcggatttctctggaatccatttctgtggtgtttcttgagtgaggggatggactgagtggcctgggtggtgtgtggctt

SEQ ID NO: 73444 - DNA, 1068 bp, Homo sapiens
tcctccatgcctattcatggtttgatagctcattttcttttagtaatgaataatactccattctctggatgtaccagtttatttatccattcgcctactgaaggaaatcttggttgcttccaagttttggcaattacaaataaaactgctgtaaacatccatgtgcaggtttttttgtggatctaagtcttcaactcaattgggcaaatacccaggagaatgattgctatatcatattcacttttctcagcctcattttcttcactggtaaagtggagataacaatagtcccatagggggattgtgaagtttaattgagataatgcacatgaagcccttagcaatgcacccagcacataggcaatactcaactaatggtagcccatccttgttatcctattcaagagtaatgacaatacaaatgtgagagatggaaattcaagtattgaccgagggatatgacatatggaggtggcatagtcatgcgtcatctgtccatactccaagagggcacagggcaacaagaaatactagaagacagtcagggcaccactgctgccattgaggtgggatctggtcatctcctagggcctgtgaccctgagtcctgcagtcctgagctgccagggtaggggaggtggagatcaacccatggtcccacagtgaagtgtgtcccagctttagcaaaccaaggtatcctcccactgtgcattcctctcctccccaagcctgctcctccagcagctccccactcccctccttttgactyatctgagccaagccctgtccctaactagaaactcagaggtgatgaaaacaaagttttttcctcgcttcacttacttcctgtgaactcgcttaattgttcccagattactaggtcaccaggaggatttggtaccttggattttttttcttcttcttccttatgctttctggagacaacaagggtcacttggggtccagccttgtgtggcaagggtacgctgatcggatttctctggaatccatttctgtggtgtttcttgagtgaggggatggactgagtggcctgggtggtgtgtggctt

SEQ ID NO: 73445 - DNA, 1068 bp, Homo sapiens
tcctccatgcctattcatggtttgatagctcattttcttttagtaatgaataatactccattctctggatgtaccagtttatttatccattcgcctactgaaggaaatcttggttgcttccaagttttggcaattacaaataaaactgctgtaaacatccatgtgcaggtttttttgtggatctaagtcttcaactcaattgggcaaatacccaggagaatgattgctatatcatattcacttttctcagcctcattttcttcactggtaaagtggagataacaatagtcccatagggggattgtgaagtttaattgagataatgcacatgaagcccttagcaatgcacccagcacataggcaatactcaactaatggtagcccatccttgttatcctattcaagagtaatgacaatacaaatgtgagagatggaaattcaagtattgaccgagggatatgacatatggaggtggcatagtcatgcgtcatctgtccatactccaagagggcacagggcaacaagaaatactagaagacagtcagggcaccactgctgccattgaggtgggatctggtcatctcctagggcctgtgaccctgagtcctgcagtcctgagctgccagggtaggggaggtggagatcaacccatggtcccacagtgaagtgtgtcccagctttagcaaaccaaggtatcctcccactgtgcattcctctcctccccaagcctgctcctccagcagctccccactcccctccttttgactcatctgagccaagccctgtccctaactagaaactcagaggtgatgaaaacaaagttttttcctcgcttcacttacttcctgtgaactcgcttaattgttcccagattactaggycaccaggaggatttggtaccttggattttttttcttcttcttccttatgctttctggagacaacaagggtcacttggggtccagccttgtgtggcaagggtacgctgatcggatttctctggaatccatttctgtggtgtttcttgagtgaggggatggactgagtggcctgggtggtgtgtggctt

SEQ ID NO: 73446 - DNA, 1068 bp, Homo sapiens
tcctccatgcctattcatggtttgatagctcattttcttttagtaatgaataatactccattctctggatgtaccagtttatttatccattcgcctactgaaggaaatcttggttgcttccaagttttggcaattacaaataaaactgctgtaaacatccatgtgcaggtttttttgtggatctaagtcttcaactcaattgggcaaatacccaggagaatgattgctatatcatattcacttttctcagcctcattttcttcactggtaaagtggagataacaatagtcccatagggggattgtgaagtttaattgagataatgcacatgaagcccttagcaatgcacccagcacataggcaatactcaactaatggtagcccatccttgttatcctattcaagagtaatgacaatacaaatgtgagagatggaaattcaagtattgaccgagggatatgacatatggaggtggcatagtcatgcgtcatctgtccatactccaagagggcacagggcaacaagaaatactagaagacagtcagggcaccactgctgccattgaggtgggatctggtcatctcctagggcctgtgaccctgagtcctgcagtcctgagctgccagggtaggggaggtggagatcaacccatggtcccacagtgaagtgtgtcccagctttagcaaaccaaggtatcctcccactgtgcattcctctcctccccaagcctgctcctccagcagctccccactcccctccttttgactcatctgagccaagccctgtccctaactagaaactcagaggtgatgaaaacaaagttttttcctcgcttcacttacttcctgtgaactcgcttaattgttcccagattactaggtcaccaggaggmtttggtaccttggattttttttcttcttcttccttatgctttctggagacaacaagggtcacttggggtccagccttgtgtggcaagggtacgctgatcggatttctctggaatccatttctgtggtgtttcttgagtgaggggatggactgagtggcctgggtggtgtgtggctt

SEQ ID NO: 73447 - DNA, 1049 bp, Homo sapiens
agtatttactctctagagctaacatgaagaataagctacattgttttgtgttgaggtacagttgtattatttgatggatatctcactttatagctttcacaaaagtgctgtttttatatatttttatttcagtcagtgtgtgcacagtctattcattacgtgaataaattatcaaaatcaaaccttcccaatatataaattgaaattgtgcttyattgtttattttattttattctaattttttattttttaggtcttgtgcatttatcattacatagtctattcctgttttaaaaataattttaacttttattttaaattcaggggatacatgtgcaagtttgttatatggctatattgtgtgatgctgaagtttggggtaggaatgatcccatcatccaggtggtgagcatattattacccaatattacctaagagttttaaagcttgataaacaatgtggcctgcagagtaacggcacccaaagatgtccatgtcttaatcccaggtacctataaacacattatgcaacatagtaaaagaaaattaaggttgcagacaaaattaaggttgttagctgagtttaagctacaggtgttaacatggataatctggatgggctcaatgtagtcacaagcatccttaaatgtagacaacgaagccagaataattaactttaaaaaagaaaatgtgaccatggaattggtgtcagagtgttgcgatttaagaaagattcaatcagccattgcttgttttgaagatgaagatagaacatctacaaacccagaaataaaatcacaccctaaagctggaaaaggcaagaaaatatattactcctttcacatttaggaaagaccttggaggagcctcttgactaatagaatgaatccctgtaacatacacagaagatccataatggtttgataatgttatgccagcagaaatactgacaacttgtactgaaaggatcagagaaaagatgaaatgagagaagactgctgactcccaaaattctgtaggcagaaaataagattaataaaactattctg

SEQ ID NO: 73448 - DNA, 677 bp, Homo sapiens
ctataaacacactgaacctgtagtcatatatagaaaaaaaatgcttattgcataaaaagcaaatgacaataaaaacatctaaattaaatatataaaatgctttaaattcatgattgcaagtatatagatgcttattgygatatgctatgttttcttgtacagttgattttttttagtttaaaaccaagaaaaaatcaatagtaaaagtccataataatactgattgcctcaagtaatcattgataacagttctggtatttttttcccattcagtttatttaaagtatttgtcgtttttataaaattgatcctagtagctctaatgtttttttctactattgccattaatcatactcaaaaaaaacttgtgcaaaaaaacttgttttatactttttgtctagaaaatctttaaaaattaagtgtttaagaaacaatctaactcttaaaatgcaaaaatatgctcaacatgaccaatgcaggtacttaaaagagaaatgtgtatatgtctttgaaattatatatcaaaagctctctgattagtgtttgattgatgggtacaaatttacatattgatcattatctccattctgtgactttcaaagtaatagacaattgtgtgcttatctctaaatgtgttccttaatcatataagtacataactgaagagttagagggga

SEQ ID NO: 73449 - DNA, 602 bp, Homo sapiens
gctatgatcacagctcactacagcctcaacctcctgagctcaagcaatcctcccacctcagcctccctagtagcagggactacaggcatgcaccaacatacccaccgaatttttgtatttttttttaaagaccaagtctccgtgtgttgcccaagctagtctaaaactcctggrttcaagagatcctcctgccttggcctcacaaagtgctgggattataggcatgagccaccatacccagccttactttttcatactcatttcttcagcatatattttacatttacagcatatctcaatttggactcgccttatttcaagtgctcaatagccacacgtggctagtgtctatgaaactggacactacagagtgaataagaatggaaaagaacaaagcagacagaaatgttaaatgtaggcctatctgatttgttgataagtcatggaaatgggctagaaacgcaagtattgagcttcccaggcttacagggaagaagaaaccagaatcattgagctttgggagcacacagtttggataagagaatactttggttgaaaggacttgggtgaaaatgaacatcctcaagaatttttcaccacca

SEQ ID NO: 73450 - DNA, 602 bp, Homo sapiens
gctatgatcacagctcactacagcctcaacctcctgagctcaagcaatcctcccacctcagcctccctagtagcagggactacaggcatgcaccaacatacccaccgaatttttgtatttttttttaaagaccaagtctccgtgtgttgcccaagctagtctaaaactcctggattcaagagatcctcctgccttggcctcacaaagtgctgggattataggcatgagccaccatacccagccttactttttcatactcatttcttcagcatatattttacatttacagcatatctcaatttggactcgccttatttcaagtgctcaatagccacacgtggctagtgtctatgaaactggacactacagagtgaataagaatggaaaagaacaaagcagacagaaatgttaaatgtaggcctatctgatttgttgataagtcatggaaatkggctagaaacgcaagtattgagcttcccaggcttacagggaagaagaaaccagaatcattgagctttgggagcacacagtttggataagagaatactttggttgaaaggacttgggtgaaaatgaacatcctcaagaatttttcaccacca

SEQ ID NO: 73451 - DNA, 602 bp, Homo sapiens
gctatgatcacagctcactacagcctcaacctcctgagctcaagcaatcctcccacctcagcctccctagtagcagggactacaggcatgcaccaacatacccaccgaatttttgtatttttttttaaagaccaagtctccgtgtgttgcccaagctagtctaaaactcctggattcaagagatcctcctgccttggcctcacaaagtgctgggattataggcatgagccaccatacccagccttactttttcatactcatttcttcagcatatattttacatttacagcatatctcaatttggactcgccttatttcaagtgctcaatagccacacgtggctagtgtctatgaaactggacactacagagtgaataagaatggaaaagaacaaagcagacagaaatgttaaatgtaggcctatctgatttgttgataagtcatggaaatgggctagaaacgcaagtattgagcttcccaggcttacagggaagaagaaascagaatcattgagctttgggagcacacagtttggataagagaatactttggttgaaaggacttgggtgaaaatgaacatcctcaagaatttttcaccacca

SEQ ID NO: 73452 - DNA, 1132 bp, Homo sapiens
cacacggggctttcctggctctttaaaatcatccacctaccatccaggtctaaggagaaacagctagttatgggacacaagttcagattttgcctcagaaatatgcaaggggtcaggcaaatcatgaaaattattattgtgtgagtgtccaaaaacagaggtggctatgccgtatggactaacattaattaggcaccgacagtttgctaggagttttttaaaaagctctgtgggccgggtgcggtggctcatgcctgtaaccccagcactttgggaggctgaggcaggtggatcacttgaagtcaggagttcgagaccagcctggccaacatggtgaaatcctatttctattaaaaatataaaaatctgccaggcgtggtggcaggcgcctgtaatcccagctactcgggaggctgaggcaggagatttgcttgaaccccrgaaacagaggttgcagtgagctgagatcactccactgcactccagcctgggcaacagagagagactccatctcaaaaactaataataataaataaaataaaataaaataaaaagttctctgtgttcgttttgattcaaccatggatggttgacatctttgtctccaatgaggaaactgaacggacaaaaggttaagtcccctgtccaaagtcaaagctttggtctaaaacatgcgtctctttggtcccaatggaggactctttccacccacttatttcactcctgaactaagaaactgtgctttgtctgggatcacatcacatggaccttgtgcccagtgacctcacagctccaaagtcacagacaggaaacaaagcgatatcacctgtgcttccacttccctgcgcagaagccaagtgccaggcaccagctcacttggccactctgatttcctatttatgctctgaatgaaaagatcctgaggacatctccaggaaccctattctatttcaccattaattagctgggtcattatttttaaagccctgtcaatattcccctgtggcgaagtcagctttaacccacgacatttacatacaaattgtaaggcatctctacaccttagtcacttccactaggaagagctactgtgatcattttgctccttcctctttgcagcagcaacaaaaga

SEQ ID NO: 73453 - DNA, 1091 bp, Homo sapiens
ctctaatcatgataaatgtgacattttgtgtgttgatttttattcttagtattacactaggaatactttaagattgcttaaaaattactatttttgatggcttcacaatatccatatatacggatggccaacttctgtttgggaaatatttaaaatatttgctattttcccaaaggtagctaaattktaataaattgtatctttaatatacactttcagaaaagaaaaaatgtcataaaagacatgactacctctgtgatttttgctacgtgctatttccaaaagggttgagtcaatttataatgtcaatactagtatatgtttactagtttcacctaattttgtcagcattgggggttatcaagttcttaaaaatgttagtaactttttttggtaatgaaatgatatctcatgggtaactttaatttgctttctttgattattagtgagaaaaacattttgtccttgtgttgatcagttttctatatttcctcttaggaaaaatatttgtctttacagattttttttttttaacaaactaaatttttaaaagaagtttggagtcgactgtacacagggcaattggaatagccttttctatccaagcctttgctacagtagtagttgtttttgagtgtgttcacagaacaaagcacaagtaaacccatttctaggtacattcaagagattgatttgggggccttgtttccagggtcctggaagagcagatttgccaagtaagcatttcaaggcacataatattaatacttagagaaagcatttgattgacatggggttcatctatgctcacatagaagcatgaggaggttgcacgacctttacatgttacagattggtttagatgtttatccgtgagaaggctctgaatcctacaactcgaagaaacttagaagtcttctagtgaccagaggtgaccaataggtttcatctcccaagacaactttgctggattgagcagttgcctggaatttggtgttgaagaatactctgaggccaacatctcaaagccagtggaaaagaatagagaggtgaattggccattatccccagaggcctcagcaggggaagca

SEQ ID NO: 73454 - DNA, 1091 bp, Homo sapiens
ctctaatcatgataaatgtgacattttgtgtgttgatttttattcttagtattacactaggaatactttaagattgcttaaaaattactatttttgatggcttcacaatatccatatatacggatggccaacttctgtttgggaaatatttaaaatatttgctattttcccaaaggtagctaaattgtaataaattgtatctttaatatacactttcagaaaagaaaaaatgtcataaaagacatgactacctctgtgatttttgctacgtgctatttccaaaagggttgagtcaatttataatgtcaatactagtatatgtttactagtttcacctaattttgtcagcattgggggttatcaagttcttaaaaatgttagtaactttttttggtaatgaaatgatatctcatgggtaactttaatttgctttctttgattattagtgagaaaaacattttgtccttgtgttgatcagttttctatatttcctcttaggaaaaatatttgtctttacagattttttttttttaacaaactaaatttttaaaagaagtttggagtcgactgtacacagggcaattggaatagccttttctatccaagcctttgctacagtagtagttgtttttgagtgtgttcacagaacaaagcacaagtaaacccatttctaggtacattcaagagattgatttgggggccttgtttccagggkcctggaagagcagatttgccaagtaagcatttcaaggcacataatattaatacttagagaaagcatttgattgacatggggttcatctatgctcacatagaagcatgaggaggttgcacgacctttacatgttacagattggtttagatgtttatccgtgagaaggctctgaatcctacaactcgaagaaacttagaagtcttctagtgaccagaggtgaccaataggtttcatctcccaagacaactttgctggattgagcagttgcctggaatttggtgttgaagaatactctgaggccaacatctcaaagccagtggaaaagaatagagaggtgaattggccattatccccagaggcctcagcaggggaagca

SEQ ID NO: 73455 - DNA, 576 bp, Homo sapiens
ttgttctgcctgtggggtggagaatagatcagaagaaaccaatgcttatcagccttccaatcagtagataaacatgagactggcctggagtgaggtccaggaagatcagagttagggacagattcaagagatttaaagaacgtggattgacaagactcggtaactggcaggatgtgagagrtgagagggaaacggagataccaagtgtgagccccagcatttgttcttagatcaacactgggtccagggtggtgtcatttaccgaggaggggggaacactggaggaggaagattattaatttttgttttggacatgctgagtatgaggtgattttgagacatccgagagagaagcaggcagcttggtgggactggaggtcgggagaaacaatgagggtctaagacagagtgttgtcagcatggacctgtgtggaactgatcagagtcattgtggtttcaggacagtgggctcaggggcaccctgtggagtggcggaggaggtgaggaagtggagatcagaaaaaaagagacatttattttgagaagtttggctgtgaaggagaagaaagaggggca

SEQ ID NO: 73456 - DNA, 531 bp, Homo sapiens
tgcaatgagctgagatcacgccactgcactccagtctgggcgacagagagagaccctgtctccaaaaaaaaaaaaaaaaaaaaagagtaaaagttaatcaaaacggaagtgaagaagaaagaactgaattacatatatgccaaaattcattgagttacattcttgagatttgtttgcttgtttataagttatatcataacataaatgttagtattttaaagaactttactatatgtctcatttccagtactcaaccttaaacctcccaaatcaaaaggcaaaaaaacacctctagaacaacttctatttaaaaacaggtttttaaaaagtcacaaaaagcctaaaactgaagccaaataaacaaaaacctaggaaaagaccctctctcccctcaaatgcatattttcattctagagtarattatagaccaccaactatagcctgacttggatatcaagcacgggttcccacatgaaaattgttattgttggctttagtgcttcaatctaaagaggacacaaattctgctca

SEQ ID NO: 73457 - DNA, 235 bp, Homo sapiens
caatgaagaaagccctaatgcgaatgatcgagacgtttgatttgataagaaaacatggccctttatagagttgacctttgtagtgaaggaattgaatatataacagrgaggccacaaaagcagttcctgcagcgagcctgctgggagatgagaaggcttcctgggcactggcatgggtgagggagggaaaaggaagagctagcgatgctgggtagttgggtgtctatagggttgg

SEQ ID NO: 73458 - DNA, 1895 bp, Homo sapiens
tatttaaaaatatatatctatataaaaacatatagatatatatagttttttttttttgagacaaagtctcactttgctccctaggctggagtccagtggcatgatcatggcatgctgcagcctggaactcctgagctcaastgatcctcccacctcagcctcccaaagtgctgagattacaggtgtgagctactgcacctggcttaaaatatagttttaatgtattacatgtctgattgtatgccaggcaccatgccaagtgcctccatagatgttagttcatctgcacaaaaaccttctagggttgtaattcatattattgtcattatcattattattattgctagcacagaggactaaatgcactgctcaaatatccctgactaataagaaacacaaatgccttatgacacagctccggaaacagcttcatgagtttataatctgggtcttggagattatgatccagggcttagagacattcacattcccttgctccttatcataacaactcaggaaaggctgatacatggctacgagtcacaaactagctctctgagcacacctactttcttcacaggacagtgtttgacaccatgtaacttactcctcacaggttgctgtccccatgaggttcaatggtaaatctggagtcgaagtccgactgccaaatgacctggaagatttgaaaggatatacatctctgtccttgtttctccaaaggcccaactcaagagaaaatgggggtactgagaatatgtttgtgatgtaccttggaaataaagatgtaagtattgcttggacatctctcttgtttttgaaacaatgtttttcgagaggtgtgcttttgagatgtgtggcacggctgcatcactgccattagcacagcaggcagaaatcctactgagacatcgacaaatccctccagcttcctccctgcccacctccccactgtggcagtgccctcgaggggcctcccatgcattgttggttgctagaggatcaagaggctttacccaatgggcccagcacgtgggcatgtgtgtgtacatgtaaaaaacatatgcacttggggaggatgattggcacccctccatactaccaagttgtatgattgacaccacaccaccagggatcaataccaaggaggagtagctcctcctcacagaattgtgaccttgtcctcttcctcagactgcccagcctcagatccttcctcaagcctgtgggatggagagattatgggtgaggactggagtggaatgaatcctccctctcctgcctaaatgataagaaaagcagttgccctgtctctttatcagtgtaaattcatcactactactactatcagtgtaaattcactacccatacaggcattttgaatggctggctttagcttttaatccctccttttaaaatacatttctttgacataagtgtcagaggaaaagctaatcactcactgggttaggattcagttgttggaagaaaaatgcttgaaatatggttctcaaaaattctgcccaattaggaaattgttagttgtcactagtggatcttgtatttaaagattcttaaaatcaacactattgctaattactcttccatgcttcaagaggttggcattttatttgtagcttgttatgtcatgattttttgctttgttttgtggtaaaatgcacattactttattccttcagcaaatttataccatatacctactatgtgtcacattctggctttgtgataaacaaaaatttattctcgaatgtacttaatgccaatgcacacttaaaatggttaaaatggtaagttttatggatattatgccgtgattttaaaacattttgtttctaccttaaggcgctcacattctagcagggaagaaagatgca

SEQ ID NO: 73459 - DNA, 1895 bp, Homo sapiens
tatttaaaaatatatatctatataaaaacatatagatatatatagttttttttttttgagacaaagtctcactttgctccctaggctggagtccagtggcatgatcatggcatgctgcagcctggaactcctgagctcaagtgatcctcccacctcagcctcccaaagtgctgagattacaggtgtgagctactgcacctggcttaaaatatagttttaatgtattacatgtctgattgtatgccaggcaccatgccaagtgcctccatagatgttagttcatctgcacaaaaaccttctagggttgtaattcatattattgtcattatcattattattattgctagcacagaggactaaatgcactgctcaaatatccctgactaataagaaacacaaatgccttatgacacagctccggaaacagcttcatgagtttataatctgggtcttggagattatgatccagggcttagagacattcacattcccttgctccttatcataacaactcaggaaaggctgatacatggctacgagtcacaaactagctctctgagcacacctactttcttcacaggacagtgtttgacaccatgtaacttactcctcacaggttgctgtccccatgaggttcaatggtaaatctggagtcgaagtccgactgccaaatgacctggaagatttgaaaggatatacatctctgtccttgtttctccaaaggcccaactcaagagaaaatgggggtactgagaatatgtttgtgatgtaccttggaaataaagatgtaagtattgcttggacatctctcttgtttttgaaacaatgtttttcgagaggtgtgcttttgagatgtgtggcacggctgcatcactgccattagcacagcaggcagaaatcctactgagacatcgacaaatccctccagcttcctccctgcccacctccccactgtggcagtgccctcgaggggcctcccatgcattgttggttgctagaggatcaagaggctttacccaatgggcccagcacgtgggcatgtgtgtgtacatgtaaaaaacatatgcacttggggaggatgattggcacccctccatactaccaagttgtatgattgacaccacaccaccagggatcaataccaaggaggagtagctcctcctcacagaattgtgaccttgtcctcttcctcagactgcccagcctcagatccttcctcaagcctgtgggatggagagattatgggtraggactggagtggaatgaatcctccctctcctgcctaaatgataagaaaagcagttgccctgtctctttatcagtgtaaattcatcactactactactatcagtgtaaattcactacccatacaggcattttgaatggctggctttagcttttaatccctccttttaaaatacatttctttgacataagtgtcagaggaaaagctaatcactcactgggttaggattcagttgttggaagaaaaatgcttgaaatatggttctcaaaaattctgcccaattaggaaattgttagttgtcactagtggatcttgtatttaaagattcttaaaatcaacactattgctaattactcttccatgcttcaagaggttggcattttatttgtagcttgttatgtcatgattttttgctttgttttgtggtaaaatgcacattactttattccttcagcaaatttataccatatacctactatgtgtcacattctggctttgtgataaacaaaaatttattctcgaatgtacttaatgccaatgcacacttaaaatggttaaaatggtaagttttatggatattatgccgtgattttaaaacattttgtttctaccttaaggcgctcacattctagcagggaagaaagatgca

SEQ ID NO: 73460 - DNA, 1895 bp, Homo sapiens
tatttaaaaatatatatctatataaaaacatatagatatatatagttttttttttttgagacaaagtctcactttgctccctaggctggagtccagtggcatgatcatggcatgctgcagcctggaactcctgagctcaagtgatcctcccacctcagcctcccaaagtgctgagattacaggtgtgagctactgcacctggcttaaaatatagttttaatgtattacatgtctgattgtatgccaggcaccatgccaagtgcctccatagatgttagttcatctgcacaaaaaccttctagggttgtaattcatattattgtcattatcattattattattgctagcacagaggactaaatgcactgctcaaatatccctgactaataagaaacacaaatgccttatgacacagctccggaaacagcttcatgagtttataatctgggtcttggagattatgatccagggcttagagacattcacattcccttgctccttatcataacaactcaggaaaggctgatacatggctacgagtcacaaactagctctctgagcacacctactttcttcacaggacagtgtttgacaccatgtaacttactcctcacaggttgctgtccccatgaggttcaatggtaaatctggagtcgaagtccgactgccaaatgacctggaagatttgaaaggatatacatctctgtccttgtttctccaaaggcccaactcaagagaaaatgggggtactgagaatatgtttgtgatgtaccttggaaataaagatgtaagtattgcttggacatctctcttgtttttgaaacaatgtttttcgagaggtgtgcttttgagatgtgtggcacggctgcatcactgccattagcacagcaggcagaaatcctactgagacatcgacaaatccctccagcttcctccctgcccacctccccactgtggcagtgccctcgaggggcctcccatgcattgttggttgctagaggatcaagaggctttacccaatgggcccagcacgtgggcatgtgtgtgtacatgtaaaaaacatatgcacttggggaggatgattggcacccctccatactaccaagttgtatgattgacaccacaccaccagggatcaataccaaggaggagtagctcctcctcacagaattgtgaccttgtcctcttcctcagactgcccagcctcagatccttcctcaagcctgtgggatggagagattatgggtgaggactggagtggaatgaatcctccctctcctgcctaaatgataagaaaagcagttgccctgtctctttatcagtgtaaattcatcactactactactatcagtgtaaattcactacccatacaggcattttgaatggctggctttagcttttaatccctccttttaaaatacatttctttgacataagtgtcagaggaaaagctaatcactcactgggttaggattcagttgttggaagaaaaatgcttgaaatatggttctcaaaaattctgcccaattaggaaattgttagttgtcactagtggatcttgtatttaaagattcttaaaatcaacactattgctaattactcttccatgcttcaagrggttggcattttatttgtagcttgttatgtcatgattttttgctttgttttgtggtaaaatgcacattactttattccttcagcaaatttataccatatacctactatgtgtcacattctggctttgtgataaacaaaaatttattctcgaatgtacttaatgccaatgcacacttaaaatggttaaaatggtaagttttatggatattatgccgtgattttaaaacattttgtttctaccttaaggcgctcacattctagcagggaagaaagatgca

SEQ ID NO: 73461 - DNA, 2705 bp, Homo sapiens
  misc_feature (1)...(2705): n = A,T,C or G
ttagggtacatattttaagaagcattaaaactatctgctttatgtatccctagagtggaatagagtggttaatacagaaatttctgggtgttactggcagccacatgtggaatttatgaaagtcatattttaacacatcatcatatatacatatgcaaataccacatgaacacacacgtatgcacacacatacaaacacatgcaaaattgtaataggaaaaaatattttgtagatccttcaaatgagcttttctgctcatgtcttaaccttttccccctttgccagccatttgtctcaacatttattctactatctgcctatataaatatttccttaaatcaagagccccttctacagttgacaattgaacaatgcaggagttaagggggcagatcccctgtgcaataaaaaattagcacataccctgactccctaaaaacttagcttctaatgattactgttgatcagaagctttgctggtaacataaacagttgaataacaaatatttttgttttatgtattatatactatattcctacaataaattaagctacagaaaataaaatataacaaaatcataaggaaaggaagatataaatactgttcattaagtggaagcaaatcatcataaagttcttatcgttgtcgtcttcccactgagtaggctgaggagaaggaaaaggaagggttcgttttgctgtctcaggggtggcagaggtggaagaaaatccacatataagtggacacgtgtggttcaaacccatgtttttctggagtcaactgtacttacttatatgttttatgcatcccacatgctaacatagagtgaggtatttcttgatgtgttagcatttaacaatatccctgagacatttgaggatttctgaaggactttgaaattgaaggttataagctcttccattctgcctgtgtcccagcctcactgttatttttccactgtttcttaacagatgggattctgtactacttgacatcttgatcaactttcttccctgtcccayttccatctttgaattatctctaccttctctaaattgtggttggaatagacgcagagactaatcagatgagcgttcctctaagcaaaataaaataagtttctaccaaaaaaaaaaaatccataaatgatgacgtcatcagagtaaagtgttctattttagccaaattagtagagaaagttctgtcaaaactctgtaccataccctcgtcactgtatctctaatagttcttgccatttcagctaattcgtggggnnnnnnnnnnnnnnnnnnnnnnnnnnnnnnnnnnnnnnnnnnnnnnnnnnnnnnnnnnnnnnnnnnnnnnnnnnnnnnnnnnnnnnnnnnnnnnnnnnnngaaagagcgatgggtgggggcacacacacattccagataaaggctgcgctatgcactgttcacgtttagagtccaggctcttgttaaaaagttcatggagcaggtatttggagatttgattcccatccacaggcactaattcactcatttttctttatatttcctcatgcctccttttaaaatatttattttattatcttcccctcccatctcgctaaatatttctacacttcattttttaagttatacttttacttaagttggtttctctttctctattttatcttctctttctctctcgtatttgttctctaatgattccccttgcttttctcttatctcttctattttttctcctttgttgtttttacttctcaatgttcttgcagtttccaatatttttccactctctcttcttctctattcatttctcctttattagatctcatgtttgccttcccattaattctgagaagcatcactattgttttcttttgaaacagtagtaaggacagcacatgaagtttcttcactccaatttttgtaagggttaaaaatacctaacccatctttcagtactaaattactttccttgaatagtatcctacttaaaatatactgtgtaaatacttttaaattatttcccattacctcaaatattttgtctgtttataactgatcttaataaaagtggcactattcacctttctgcttgaaagaaatttctcattaatccaccctaccagcaaaaacacattttagaaatgttcccaaaataagaataagaatgtgatgtctattaatatgtgctatctaatttgtaacccataacctatataatcattaattttttgtgtgttctgagaaatgtggataaagttagagtatcatcaaatcattaactgataccaatgtttataatgccatgatttctaggcaaagtaatggatgtcatttaaaaagccctcgtttgggcatctatctgggtttaagttcttcattgtgcaatttttttaaccgtgagatcttgggaaggtcatcttccttagcctgagttattttatctcactgtgttgatttatgaatataatatgagaatgatagcaataagtagcatattgaagtctgactaaaccaaaactaaacaaggaaaaaatgtagatattaagaggggctttagtttctaagaagtaaatatataatatagatcctctgtccctgcctttgaaatgagttgctggggtaaaggtagctatgttaatgtaagaaattactagaaaagaatttatgaaggcttcatttcagccagctgtcaaagccccagattgg

SEQ ID NO: 73462 - DNA, 528 bp, Homo sapiens
tttaatgtttttatatatattttatatatatgtatatttacatatatataaaataagtaatatatttttatatatttataaatatatatttttatatatttataaatatatatttttatatatttaatcaatatataaataaatatatatttcccccccaaaatttggtggcgagataagaaaggaagccaatttgtttcatggtaaaatgtcatgaaattatttcacttattttttcttcagagcttcacgatgattattagacattattagatatttagtacttcagattgtattacagattacataaatcactccagttattttcaacatagtgaagcagcttcgttgtctggggaaatacctgcagttcgttgtcttgtgctgtgccgattaatgacacagactcacacacggagtgggttaaggaacagaaagtttattaggcaagaaggaagagaagagcttccccatasagagggagaagcactctgaatggagtaaccccacttgtggggaaagcagtca

SEQ ID NO: 73463 - DNA, 1090 bp, Homo sapiens
tataggtgagaatcaggagattaacatagtaaggaggttagtgttctaagatgactcctatccaggcttctgtctctccttccaatcaacattttctctgatagcaaagatggataatgataattatatatttgcttaaagtatgttatgcacataagtsctttatatgtaatatatttaatatgtataacactctatataaatgtactattcttatccacattttacacttgagaaaactgaggcaaagggaagtgaagtaacttgcctaaagtcataaagttagtaaatgctgaagctgaaatttgaaagtagaccagttagggttccaggcatctttttcacaacttctctcccccaccttccatcgcagctactctactcctgtggctggatctttctttatggcaccccaattaattcaattgctaacttttaagcttaacacacaagactctgtaatctagacttgccttcttgtcagcctcatctcctgacactttcctatgtggattgtgtgctgaatcatactcaacttgctggcactccccaaagaggatggtgtaatgatttttaccttcacatattctatttgctaggcctggaaagttcttcctgccctgtctattcttttgtgcccacaccctgcaatcctcatcatcatcaggttaactctaactcatctatcagaattccactcagtgacaacgtttgaaaaggcagtcctgtctctcctgggcttccttcctgagccccttcacagagaactgtcacagtttacatgtggacctcctccacttgattgagaatacttgccaaatcaaataatgactgaatgaatgatcagtatcacatcacttgttattacatccccactgtaaatttaatttgagaaaagttggcacagactctatgctgtgatgatcttgctagttgcagctatagtctttgtctctaaatagtgtatataattaaaaaaaacttttcatgattagaagaaaaggagtcttttgattattgtagaaggtttaaggctttcaaatgagaaacatatttggtggctttgatgccatcagacccaggatatgca

SEQ ID NO: 73464 - DNA, 530 bp, Homo sapiens
ttagcaagacaggtgtgggtagaatggagtagccatgaacatagacaaaaagtggagagagtgaaaacatatcagagtgaaaaaacatagataaatgtaagggagaagaaagaaaaaaaaataaagaacaatatttaaagagaacaaaataaatagagccagaaagaaacagagaaggggaaaagaacaggcaacaaattaacagggaaaagaartcacaaccagaaaaaaaaagaaaatgaactgcttattgatgaataaagaaagagagaaaaagaaaaataaggaaggaggcggagtaagcacataagatctctaaacacttggctccagcagcccatctgaccacactcagactccaggcatgcacacacagagttgcctggagatgtttctgtgtctccaccttgcaaatgtggtgaacccttctccttcatcttccctatttctgcagtgtgtcatcatggccataaactgatcaatccacgaattagctgaaatggcaagaacgattaagagataccagtgag

SEQ ID NO: 73465 - DNA, 530 bp, Homo sapiens
ttagcaagacaggtgtgggtagaatggagtagccatgaacatagacaaaaagtggagagagtgaaaacatatcagagtgaaaaaacatagataaatgtaagggagaagaaagaaaaaaaaataaagaacaatatttaaagagaacaaaataaatagagccagaaagaaacagagaaggggaaaagaacaggcaacaaattaacagggaaaagaagtcacaaccagaaaaaaaaagaaaatgaactgcttattgatgaataaagaaagagagaaaargaaaaataaggaaggaggcggagtaagcacataagatctctaaacacttggctccagcagcccatctgaccacactcagactccaggcatgcacacacagagttgcctggagatgtttctgtgtctccaccttgcaaatgtggtgaacccttctccttcatcttccctatttctgcagtgtgtcatcatggccataaactgatcaatccacgaattagctgaaatggcaagaacgattaagagataccagtgag

SEQ ID NO: 73466 - DNA, 530 bp, Homo sapiens
ttagcaagacaggtgtgggtagaatggagtagccatgaacatagacaaaaagtggagagagtgaaaacatatcagagtgaaaaaacatagataaatgtaagggagaagaaagaaaaaaaaataaagaacaatatttaaagagaacaaaataaatagagccagaaagaaacagagaaggggaaaagaacaggcaacaaattaacagggaaaagaagtcacaaccagaaaaaaaaagaaaatgaactgcttattgatgaataaagaaagagagaaaaagaaaaataaggaaggaggcrgagtaagcacataagatctctaaacacttggctccagcagcccatctgaccacactcagactccaggcatgcacacacagagttgcctggagatgtttctgtgtctccaccttgcaaatgtggtgaacccttctccttcatcttccctatttctgcagtgtgtcatcatggccataaactgatcaatccacgaattagctgaaatggcaagaacgattaagagataccagtgag

SEQ ID NO: 73467 - DNA, 530 bp, Homo sapiens
ttagcaagacaggtgtgggtagaatggagtagccatgaacatagacaaaaagtggagagagtgaaaacatatcagagtgaaaaaacatagataaatgtaagggagaagaaagaaaaaaaaataaagaacaatatttaaagagaacaaaataaatagagccagaaagaaacagagaaggggaaaagaacaggcaacaaattaacagggaaaagaagtcacaaccagaaaaaaaaagaaaatgaactgcttattgatgaataaagaaagagagaaaaagaaaaataaggaaggaggcggagtaagcacataagatctctaaacacttggctccagcagcccatctgaccacactcagactccaggcatgcacacacagagttgcctggagatgtttctgtgtctccaccttgcaaatgtggtgaacccttctccttcatcttccctatttctgcagtgtgtcatcatggccataaactgatcaatccaygaattagctgaaatggcaagaacgattaagagataccagtgag

SEQ ID NO: 73468 - DNA, 530 bp, Homo sapiens
ttagcaagacaggtgtgggtagaatggagtagccatgaacatagacaaaaagtggagagagtgaaaacatatcagagtgaaaaaacatagataaatgtaagggagaagaaagaaaaaaaaataaagaacaatatttaaagagaacaaaataaatagagccagaaagaaacagagaaggggaaaagaacaggcaacaaattaacagggaaaagaagtcacaaccagaaaaaaaaagaaaatgaactgcttattgatgaataaagaaagagagaaaaagaaaaataaggaaggaggcggagtaagcacataagatctctaaacacttggctccagcagcccatctgaccacactcagactccaggcatgcacacacagagttgcctggagatgtttctgtgtctccaccttgcaaatgtggtgaacccttctccttcatcttccctatttctgcagtgtgtcatcatggccataaactgatcaatccacgaattagctgaartggcaagaacgattaagagataccagtgag

SEQ ID NO: 73469 - DNA, 745 bp, Homo sapiens
ctcagagaacacagaacagcagaattacacccmctgatccccccacacacatttaggtaaatcttattaaaactgctgaaaaggaaagacaaatagaaatatatgcaggcaagtggaggtgagcagagggggcattccttccaaaagaacagaaaagatgatgacagcattcttctggttaaaaccttacaagcaagaggaaagttgatggtatctgtaaagtgttggatgaaaagtcaacccattattttataacgcatgggtgttctctaaaaagtgaaaaaaaattctatttctcttcgacagcatgagggtttcagtgaatccaggccctcatgagaccagtgaaaattattttgaaaaattacagggtttggaaaggctctaacagcataaagcaagtgaagaaatatttattcaagaaaatctagaaaactcggtaaggccagtcatcatgcttgatctaagatgatcttccttccttccacatcccagctcagcatgatgtaaactccactgccgacagatgcagccaagaagacaggacaccttctaccaactcccaccagaggaaactcttccccagggcccagtacgttggccctctgaccctgcacacagcacatgatgctgaggttcagtgctgaacaagagctaccgagagccagagactcacttcttccatggagccccactcatggatggaggctctgccccgggtccagtgccactgggaacactgggt

SEQ ID NO: 73470 - DNA, 745 bp, Homo sapiens
ctcagagaacacagaacagcagaattacacccactgatccccccacacacatttaggtaaatcttattaaaactgctgaaaaggaaagacaaatagaaatatatgcaggcaagtggaggtgagcagagggggcattccttccaaaagaacagaaaagatgatgacagcattcttctggttaaaaccttacaarcaagaggaaagttgatggtatctgtaaagtgttggatgaaaagtcaacccattattttataacgcatgggtgttctctaaaaagtgaaaaaaaattctatttctcttcgacagcatgagggtttcagtgaatccaggccctcatgagaccagtgaaaattattttgaaaaattacagggtttggaaaggctctaacagcataaagcaagtgaagaaatatttattcaagaaaatctagaaaactcggtaaggccagtcatcatgcttgatctaagatgatcttccttccttccacatcccagctcagcatgatgtaaactccactgccgacagatgcagccaagaagacaggacaccttctaccaactcccaccagaggaaactcttccccagggcccagtacgttggccctctgaccctgcacacagcacatgatgctgaggttcagtgctgaacaagagctaccgagagccagagactcacttcttccatggagccccactcatggatggaggctctgccccgggtccagtgccactgggaacactgggt

SEQ ID NO: 73471 - DNA, 745 bp, Homo sapiens
ctcagagaacacagaacagcagaattacacccactgatccccccacacacatttaggtaaatcttattaaaactgctgaaaaggaaagacaaatagaaatatatgcaggcaagtggaggtgagcagagggggcattccttccaaaagaacagaaaagatgatgacagcattcttctggttaaaaccttacaagcaagaggaaagttgatggtatctgtaaagtgttggatgaaaagtcaacccattattttataacgcatgggtgttctctaaaaagtgaaaaaaaattctatttctcttygacagcatgagggtttcagtgaatccaggccctcatgagaccagtgaaaattattttgaaaaattacagggtttggaaaggctctaacagcataaagcaagtgaagaaatatttattcaagaaaatctagaaaactcggtaaggccagtcatcatgcttgatctaagatgatcttccttccttccacatcccagctcagcatgatgtaaactccactgccgacagatgcagccaagaagacaggacaccttctaccaactcccaccagaggaaactcttccccagggcccagtacgttggccctctgaccctgcacacagcacatgatgctgaggttcagtgctgaacaagagctaccgagagccagagactcacttcttccatggagccccactcatggatggaggctctgccccgggtccagtgccactgggaacactgggt

SEQ ID NO: 73472 - DNA, 738 bp, Homo sapiens
gacgaggtacaagccattctctatgtgtattgctcaacccagagtcaggcacaggaggctgtttcatgtcaaataatgatgacagcagcaatgatcacattagcaacaaatacttagtgagcccttagtaagcactctgggttctaagctagacctgaggatttttttttttttttttttttcatgtttaccgatttattttattacaaaggatacagatgaagagatgctcagggtgaggtatgggggaaggggcacagaactcccatgccctccctgggcgagctgccctccaggaacttgcatgtgttcagctatccaaaagctctctaaatccagtcattctggcttttatttatttatttatttatttatttwtttattttattttttattttttattttttttaattaatttttttattgataattcttgggtgtttctcacagaggggtatttggcagggtcatgggacaatagtggagggaaggtcagcagataaacaagtgaacaaaggtctctggttttcctaggcagaggaccctgcggccttccgcagtgtttgtgtccctgattacttgagattagggattggtgatgactcttaacgagcatgctgccttcaagcatttgtttaacaaagcacatcttgcaccgcccttaatccatttaaccctgagtggacacagcacatgtttcagagagcacagggttgggggtaaggtcacagatcaaca

SEQ ID NO: 73473 - DNA, 738 bp, Homo sapiens
gacgaggtacaagccattctctatgtgtattgctcaacccagagtcaggcacaggaggctgtttcatgtcaaataatgatgacagcagcaatgatcacattagcaacaaatacttagtgagcccttagtaagcactctgggttctaagctagacctgaggatttttttttttttttttttttcatgtttaccgatttattttattacaaaggatacagatgaagagatgctcagggtgaggtatgggggaaggggcacagaactcccatgccctccctgggcgagctgccctccaggaacttgcatgtgttcagctatccaaaagctctctaaatccagtcattctggcttttatttatttatttatttatttatttatttwttttattttttattttttattttttttaattaatttttttattgataattcttgggtgtttctcacagaggggtatttggcagggtcatgggacaatagtggagggaaggtcagcagataaacaagtgaacaaaggtctctggttttcctaggcagaggaccctgcggccttccgcagtgtttgtgtccctgattacttgagattagggattggtgatgactcttaacgagcatgctgccttcaagcatttgtttaacaaagcacatcttgcaccgcccttaatccatttaaccctgagtggacacagcacatgtttcagagagcacagggttgggggtaaggtcacagatcaaca

SEQ ID NO: 73474 - DNA, 678 bp, Homo sapiens
taacacgtgagcaaaacccttagtctaactttttattatcacatcagcagctcgccattagcagtgcatctcagagtcctttctgatgtttactagtcattatctgaaggagagagaagacaaggacggtgtggggaggtgggcaggcattctacttggagtcaggagatctgggtttgactctgcgtttactttttactacctgtgtgattaagggcctaaactcctttaaaattgtctgtttttttcatttataacatgttagcaaccaaaatctcacttgttggaaatatgattctggctaaatgcgatggaaaacctgaccccgtgcttgccacatcatatgaattcaatacatgttagttgattgcttggggagaaggggtcgggcagccacaggtcctggataaaggcttggccattgtcaaaggccttgccttgaaagcaagggtgaagtckgtttcttctctaaaaagggtacaaatacagggggccgtgaacctaaaagacaaacttaccctagggaagtacattgtctagggtggtgtcttaccacagggatacaggaaggaggcagggcttcatcacttacaaagattgactgaggatctgaattcagtaggaggaagaaagcaaagtgctcttagaaagaaagatattcttcagtgtcagagtgaa

SEQ ID NO: 73475 - DNA, 908 bp, Homo sapiens
ctcttgaattagtacctccgtacgcccaatgcccaggaatttttttgtatctcctttgtgtaatgatgtgccactactaaatactcagtaaatatactatgaatgaataaaggtagcttctccctaaagcttaagatgatgataaagctgtcagaggtatgtaaaccagaacaactccatcttaaataggaactgggtaaaaggaggctgaaacctaccgggctgcattcccagatgcttaaggcattctaactcataggatgagataggaggtcagcacagaatacaggtcataaaggccttgttgataaaacaggttgcagttaaggagctggccaaaacccaccaataccaaataatgaagagactgacctctgggcatcctcactgttacactcccaccagcgccatgacagtatacaaatgccatagcaatgtcaggaagttaccccatatggcctaaaaagggaaggcatgaataatccaccccttctttagtatatcattaagaaataaccataaatatgggcaaacagcagccctcagggctgctctgtctacggactagccattcttttattcctttactttcttaataacattgttttcactttgcactgcagactcrccctgaattctttcttgtgtgagatccaagaaccctctcttggtgttcttggacccccgttcctacaggacccctttcctgtaacaaagccaatgacctggctttataaggaagctgaacactttcttctaactcaccataattaatattcacgatgtatttatttcattaaaagtaaaaatataaatggaggtcctgagtgtgttgctgatcttttaggggaggggtcatggagacctacaccagaagaaagctgttccctgttggtgatggggatcaa

SEQ ID NO: 73476 - DNA, 908 bp, Homo sapiens
ctcttgaattagtacctccgtacgcccaatgcccaggaatttttttgtatctcctttgtgtaatgatgtgccactactaaatactcagtaaatatactatgaatgaataaaggtagcttctccctaaagcttaagatgatgataaagctgtcagaggtatgtaaaccagaacaactccatcttaaataggaactgggtaaaaggaggctgaaacctaccgggctgcattcccagatgcttaaggcattctaactcataggatgagataggaggtcagcacagaatacaggtcataaaggccttgttgataaaacaggttgcagttaaggagctggccaaaacccaccaataccaaataatgaagagactgacctctgggcatcctcactgttacactcccaccagcgccatgacagtatacaaatgccatagcaatgtcaggaagttaccccatatggcctaaaaagggaaggcatgaataatccaccccttctttagtatatcattaagaaataaccataaatatgggcaaacagcagccctcagggctgctctgtctacggactagccattcttttattcctttactttcttaataacattgttttcactttgcactgcagactcaccctgaattctttcttgtgtgagatccaagaaccctctcttggygttcttggacccccgttcctacaggacccctttcctgtaacaaagccaatgacctggctttataaggaagctgaacactttcttctaactcaccataattaatattcacgatgtatttatttcattaaaagtaaaaatataaatggaggtcctgagtgtgttgctgatcttttaggggaggggtcatggagacctacaccagaagaaagctgttccctgttggtgatggggatcaa

SEQ ID NO: 73477 - DNA, 908 bp, Homo sapiens
ctcttgaattagtacctccgtacgcccaatgcccaggaatttttttgtatctcctttgtgtaatgatgtgccactactaaatactcagtaaatatactatgaatgaataaaggtagcttctccctaaagcttaagatgatgataaagctgtcagaggtatgtaaaccagaacaactccatcttaaataggaactgggtaaaaggaggctgaaacctaccgggctgcattcccagatgcttaaggcattctaactcataggatgagataggaggtcagcacagaatacaggtcataaaggccttgttgataaaacaggttgcagttaaggagctggccaaaacccaccaataccaaataatgaagagactgacctctgggcatcctcactgttacactcccaccagcgccatgacagtatacaaatgccatagcaatgtcaggaagttaccccatatggcctaaaaagggaaggcatgaataatccaccccttctttagtatatcattaagaaataaccataaatatgggcaaacagcagccctcagggctgctctgtctacggactagccattcttttattcctttactttcttaataacattgttttcactttgcactgcagactcaccctgaattctttcttgtgtgagatccaagaaccctctcttggtgttcttggaccccygttcctacaggacccctttcctgtaacaaagccaatgacctggctttataaggaagctgaacactttcttctaactcaccataattaatattcacgatgtatttatttcattaaaagtaaaaatataaatggaggtcctgagtgtgttgctgatcttttaggggaggggtcatggagacctacaccagaagaaagctgttccctgttggtgatggggatcaa

SEQ ID NO: 73478 - DNA, 579 bp, Homo sapiens
ctacaatagggctctatgcacattagggctctatgcactgtttccctaagaagaaacagaagcatcacagtaaagaataaaaatctgtgagaagaggagagtaatagagtgtatgcacataaaaacgagttttgagtatctctgtctggtagcttgggaaagtaacaaacagtgtaaggtttagacatgaataggattctaatggtttcaccgtggaaactgtacaatggactattttcaatggtactgcaggtagaaaccgacttaatgacatttgctcataatggcaatgtagattgcatagtttgaaaattgaagagagaaatacttcagattaaaaagaatttatarggtttttatgggttgcttcatttgatcagccatcatttgctcagaagtctttaataactctgtggtatcttcaatgaaaagctttcctcaacaaaggtagtgttactttaaaaagacaactttttaatactgccctgaatgataaagagaacctattgaaaataattgaagaaccataggcatgttgccttcctgtgattgctagagatttggaagaatttctgccca

SEQ ID NO: 73479 - DNA, 755 bp, Homo sapiens
tgtgagcacaaggtgggaaataggtactccagcaacactgaataggaaattgaataggagaagctatgcccacttgttagcaaaggaacttcagccaggaacaggagagtgtggtactttcttgataagaaagtgctctgacgcctgtcagtttgaggaatttgaacctgcagcattccaggatcaaagagggctctgctgtgatgataggttctttcctgttgactgcttccttttattgcctgatctggcactaaaacagatcaaaatgagctcaggccacttccatcacttgagaatcttcatatttaaaaaaaaaaagtcaacacatagagaaactaygggttatttaaatgagtattatgattttttttgtttatttgtttttgtttttgtttttaaatggaatctctgttgcccaggctggagtgcagtggtgcgatcttggctcactgcaacctccatctcctgggttcaagcgattctcctgcctcagcctcctgagtagctgggattacaggcacatgccaccatgcccggctaatttttgtatttttagtagagacggggttttgacatgttgtccaggctggtctcgaattcctgacctcaagcaatgtgcctgcttcagtctcccaaaatgccgagattacaggtgtgagccaccacacctggccaaatgagtattgtcttcgttcgttttgtgttgctgtaatagaatacatgaggctgagtaatttagaaagaaagaggtt

SEQ ID NO: 73480 - DNA, 755 bp, Homo sapiens
tgtgagcacaaggtgggaaataggtactccagcaacactgaataggaaattgaataggagaagctatgcccacttgttagcaaaggaacttcagccaggaacaggagagtgtggtactttcttgataagaaagtgctctgacgcctgtcagtttgaggaatttgaacctgcagcattccaggatcaaagagggctctgctgtgatgataggttctttcctgttgactgcttccttttattgcctgatctggcactaaaacagatcaaaatgagctcaggccacttccatcacttgagaatcttcatatttaaaaaaaaaaagtcaacacatagagaaactacgggttatttaaatgagtattatgattttttttgtttatttgtttttgtttttgtttttaaatggaatctctgttgcccaggctggagtgcagtggtgcgatctyggctcactgcaacctccatctcctgggttcaagcgattctcctgcctcagcctcctgagtagctgggattacaggcacatgccaccatgcccggctaatttttgtatttttagtagagacggggttttgacatgttgtccaggctggtctcgaattcctgacctcaagcaatgtgcctgcttcagtctcccaaaatgccgagattacaggtgtgagccaccacacctggccaaatgagtattgtcttcgttcgttttgtgttgctgtaatagaatacatgaggctgagtaatttagaaagaaagaggtt

SEQ ID NO: 73481 - DNA, 1365 bp, Homo sapiens
ctttgaccatcctgctggattcaaaacctacgagatgctgcctgctggccttgggtgctgacttcctccttctagggagaaagagacctggtcagggccaacggtgggtacccagtgagcttagattgccggtgagctggaggttggtgaggagggtgctggcgccagagggtgacgaggcgtgaagagggggakgtaacacggggtgagtttgggaggcaccgcggggagcccggactagagttgccggggggcgcgggaggagagcctgcctccgacctccgaacgtccctgccctttcctatgccgcccccgcttccctgcctgggttctacgtttatgcggtgctccctgagccctattttaaagctgctttttcagaacttcctttctgctcgcctcccccaactcctggcagcggtgaccgtgaactcgcaggaccttcgcccccgcggaggcccagggaagaacgcttttttcctctctattcgccctcaacctgacccgctgggccaccagggcttggggagagacctcagaggcctagagccaggagaggcgagaaagggttgtggtttttttgagtgattgagatgggggacagagagagcacttaaaattaggcaactttaattaggctcccaggagaatttctggatccacagaccaagaaaacagccaagtgggaacagcagcaaagaatataaataatacataatccagggctttgcgccgagtggggttgttcgcaggtcagtgattcccactttgggtgcgggagaccccaagtatcacctctgaaaccgttttctagctttccctctgctcctttagaaagaaatgttacaacacatgaaatagatgcagaaaaggctttctgtaaaattcaacatcccttcatgttaaaaaccctcaataatctaagttttaaaggaacatacctcaaaataataaaagccatgtgtgacaaacccacaaccaacatcatactgaatgggcaaaagctggaagcattccccttgaaaaccggcacgaaacacggatgccctctctcaccacacgtattaacatagtattggaagttctgaccagggcaataaagcaagagaaagaaatacagggcattcaaataggaagagaggaagtcaaactcttcctgtttgcagatgacatgatcctgtatcgagaaaaccgcctcatctcagcccaaaagcttaagaaagctgacaagctgccgggtggggcggctcacgcctgtaatcccagcactttgtggggctgaggcgggtggatcacctgagatcagcagttcgagaccagcctggccaacatggtgaaaacccatatctattaaaaatacaaaaa

SEQ ID NO: 73482 - DNA, 1365 bp, Homo sapiens
ctttgaccatcctgctggattcaaaacctacgagatgctgcctgctggccttgggtgctgacttcctccttctagggagaaagagacctggtcagggccaacggtgggtacccagtgagcttagattgccggtgagctggaggttggtgaggagggtgctggcgccagagggtgacgaggcgtgaagagggggaggtaacacggggtgagtttgggaggcaccgcggggagcccggactagagttgcsggggggcgcgggaggagagcctgcctccgacctccgaacgtccctgccctttcctatgccgcccccgcttccctgcctgggttctacgtttatgcggtgctccctgagccctattttaaagctgctttttcagaacttcctttctgctcgcctcccccaactcctggcagcggtgaccgtgaactcgcaggaccttcgcccccgcggaggcccagggaagaacgcttttttcctctctattcgccctcaacctgacccgctgggccaccagggcttggggagagacctcagaggcctagagccaggagaggcgagaaagggttgtggtttttttgagtgattgagatgggggacagagagagcacttaaaattaggcaactttaattaggctcccaggagaatttctggatccacagaccaagaaaacagccaagtgggaacagcagcaaagaatataaataatacataatccagggctttgcgccgagtggggttgttcgcaggtcagtgattcccactttgggtgcgggagaccccaagtatcacctctgaaaccgttttctagctttccctctgctcctttagaaagaaatgttacaacacatgaaatagatgcagaaaaggctttctgtaaaattcaacatcccttcatgttaaaaaccctcaataatctaagttttaaaggaacatacctcaaaataataaaagccatgtgtgacaaacccacaaccaacatcatactgaatgggcaaaagctggaagcattccccttgaaaaccggcacgaaacacggatgccctctctcaccacacgtattaacatagtattggaagttctgaccagggcaataaagcaagagaaagaaatacagggcattcaaataggaagagaggaagtcaaactcttcctgtttgcagatgacatgatcctgtatcgagaaaaccgcctcatctcagcccaaaagcttaagaaagctgacaagctgccgggtggggcggctcacgcctgtaatcccagcactttgtggggctgaggcgggtggatcacctgagatcagcagttcgagaccagcctggccaacatggtgaaaacccatatctattaaaaatacaaaaa

SEQ ID NO: 73483 - DNA, 1365 bp, Homo sapiens
ctttgaccatcctgctggattcaaaacctacgagatgctgcctgctggccttgggtgctgacttcctccttctagggagaaagagacctggtcagggccaacggtgggtacccagtgagcttagattgccggtgagctggaggttggtgaggagggtgctggcgccagagggtgacgaggcgtgaagagggggaggtaacacggggtgagtttgggaggcaccgcggggagcccggactagagttgccggggggcgcgggaggagagcctgcctccgacctccgaacgtccctgccctttcctatgccgcccccgcttccctgcctgggttctacgtttatgcggtgctccctgagccctattttaaagctgctttttmagaacttcctttctgctcgcctcccccaactcctggcagcggtgaccgtgaactcgcaggaccttcgcccccgcggaggcccagggaagaacgcttttttcctctctattcgccctcaacctgacccgctgggccaccagggcttggggagagacctcagaggcctagagccaggagaggcgagaaagggttgtggtttttttgagtgattgagatgggggacagagagagcacttaaaattaggcaactttaattaggctcccaggagaatttctggatccacagaccaagaaaacagccaagtgggaacagcagcaaagaatataaataatacataatccagggctttgcgccgagtggggttgttcgcaggtcagtgattcccactttgggtgcgggagaccccaagtatcacctctgaaaccgttttctagctttccctctgctcctttagaaagaaatgttacaacacatgaaatagatgcagaaaaggctttctgtaaaattcaacatcccttcatgttaaaaaccctcaataatctaagttttaaaggaacatacctcaaaataataaaagccatgtgtgacaaacccacaaccaacatcatactgaatgggcaaaagctggaagcattccccttgaaaaccggcacgaaacacggatgccctctctcaccacacgtattaacatagtattggaagttctgaccagggcaataaagcaagagaaagaaatacagggcattcaaataggaagagaggaagtcaaactcttcctgtttgcagatgacatgatcctgtatcgagaaaaccgcctcatctcagcccaaaagcttaagaaagctgacaagctgccgggtggggcggctcacgcctgtaatcccagcactttgtggggctgaggcgggtggatcacctgagatcagcagttcgagaccagcctggccaacatggtgaaaacccatatctattaaaaatacaaaaa

SEQ ID NO: 73484 - DNA, 773 bp, Homo sapiens
tccagggaagcccgggaccaccctttctgcgctggggatgcccttggaatgtgacctccctctggggagccgtgctactgccatgggcgtaggcgtcggtctacccgagcgtgcagagcggccttcttcctcaacaagaaacccggcaattgcccaacccaacctctccttgctcaaactgcaggagggagcggccatcgagtttcctttgaacgcggtgacaggcttacaggtctgtgaacgaaagggcgcctaataagtgacgtgaacttcgaccccatggcactctaagcaatatttgtacccacagaaccacgatccaacagcaaggagttcttattcttcagtcttctcgaataactttcaaatcaccagtaggatttttaaagtctccgtgttttattgcctaggttaaagaaaagataaaggtcttccaaagacattgacgctaataatcttccattacctgctagcccacttcccagggcgagtgagaattcagtaattcctcctctccttgagtttgcttagatccctaaggatgaatgaaaatgctatccggaaccctgcttccgcgaagaaaattcagaattttgcacttgtacgctggggcaaaatgctgacagaatgaagaaggtaattgcaaactcctayaacgtgtgtggtagtgtggccgagcggtctaaggcgctggatttaggctccagtctcttcgggggcgtgggttcgaatcccaccactgccagtggtacgttttagcacaacaaggatcc

SEQ ID NO: 73485 - DNA, 609 bp, Homo sapiens
cgacgctgtactttttcgtctcaaatccaggatctggctttcatggaaagatcataaaatgcttcctttcttcactagtttgtttcagcgttgaaaaggctaaaaagctcctgctcttytgcttgggaaaagtattcctacagccgaggccccagcgagatttgaactcgcgacccctggtttacaagaccagtgctctaacccctgagctatggagccgccacagaaagcaaacatttaacaatcaatctattatgcagctaaaatcctaggtaaatagtgtttaagtctaaataaagtttaagaaataaattaaaaggaatttttgaaggacgtgcctcttacgtataagaaagaaacattttcttgaccaggctcggactggaatgcaagtcactgtaagggtaaaatggggaataacaaaattatttaataaaaagtgatgattatttattccaacttttaagttctggattatttgcttctttggagacagttgaattattgtcttttgaaagtggctctgtttttattacaaaaattaaaagtatgtgtttcgatagacaaatgacttacgttctttaaaagagatgagttttcagcttgctt

SEQ ID NO: 73486 - DNA, 609 bp, Homo sapiens
cgacgctgtactttttcgtctcaaatccaggatctggctttcatggaaagatcataaaatgcttcctttcttcactagtttgtttcagcgttgaaaaggctaaaaagctcctgctcttttgcttgggaaaagtattcytacagccgaggccccagcgagatttgaactcgcgacccctggtttacaagaccagtgctctaacccctgagctatggagccgccacagaaagcaaacatttaacaatcaatctattatgcagctaaaatcctaggtaaatagtgtttaagtctaaataaagtttaagaaataaattaaaaggaatttttgaaggacgtgcctcttacgtataagaaagaaacattttcttgaccaggctcggactggaatgcaagtcactgtaagggtaaaatggggaataacaaaattatttaataaaaagtgatgattatttattccaacttttaagttctggattatttgcttctttggagacagttgaattattgtcttttgaaagtggctctgtttttattacaaaaattaaaagtatgtgtttcgatagacaaatgacttacgttctttaaaagagatgagttttcagcttgctt

SEQ ID NO: 73487 - DNA, 609 bp, Homo sapiens
cgacgctgtactttttcgtctcaaatccaggatctggctttcatggaaagatcataaaatgcttcctttcttcactagtttgtttcagcgttgaaaaggctaaaaagctcctgctcttttgcttgggaaaagtattcctayagccgaggccccagcgagatttgaactcgcgacccctggtttacaagaccagtgctctaacccctgagctatggagccgccacagaaagcaaacatttaacaatcaatctattatgcagctaaaatcctaggtaaatagtgtttaagtctaaataaagtttaagaaataaattaaaaggaatttttgaaggacgtgcctcttacgtataagaaagaaacattttcttgaccaggctcggactggaatgcaagtcactgtaagggtaaaatggggaataacaaaattatttaataaaaagtgatgattatttattccaacttttaagttctggattatttgcttctttggagacagttgaattattgtcttttgaaagtggctctgtttttattacaaaaattaaaagtatgtgtttcgatagacaaatgacttacgttctttaaaagagatgagttttcagcttgctt

SEQ ID NO: 73488 - DNA, 451 bp, Homo sapiens
aagaggctacagagtaaggacaaccgtcccccccaccacccacccaccaccttttgagtggtagaggagtgggcttctacagaaragagtgtgggcagacagcaacttttccccgacggcacctcctgggcgcccttgaaagacgccttaaatctaaacctataatacataggtaatcaactaaagctgaaagggaatggccaaagcacccacgtggagtgctgggtgctgtaggcgagaggtctgaggtagtggcttttagagctcaacatcttggtaatgttggttcgaccttttcccctgccagtcccgcggtgacctttatctttcggtgagtgaaatcggtcgttcgtgtttttcgtgggtcttccaaccacaggccgcctgagatggttctagtccctttgagtatacagacccttcctgtgcattgaccgacacagctcggccc

SEQ ID NO: 73489 - DNA, 451 bp, Homo sapiens
aagaggctacagagtaaggacaaccgtcccccccaccacccacccaccaccttttgagtggtagaggagtgggcttctacagaagagagtgtgggcagacagcaacttttccccgacggcacctcctgggcgcccttgaaagacgccttaaatctaaacctataatacataggtaatcaactaaagctgaaagggaatggccaaagcacccacgtggagtgctgggtgctgtaggcgagaggtctgaggtagtggcttttagagctcaacatcttggtaatgttggttcgaccttttcccctgccagtcccgcggtgacctttatctttcggtgagtgaaatcggtcgttcgtgtttttcgtgggtcttccaaccacaggccgcctgagatggttctagtccctttgagtatacagacccttcctgtgcattgaccgacacagctcgrccc

SEQ ID NO: 73490 - DNA, 844 bp, Homo sapiens
ttcacatgcgcactcaatctacacataccatcataccaaaatttcaggcaaatttatttcatataatagtwtgaataaagacgcttgtcatggtacctttatagaaattcgaagccaggcgcggtggctcacgcttgtaatcccagcactttggggagggtgaggctagcagatcacctgaggtcgggagttccagaccagcctgaccaacaaggataaaccccgtctctgctaaaaatacaaaattagctgggtgtggtggcacgtgcctataatcccagctactcgggaggctgaggcaggagaatcgcttgaacccgggaggcagaggttgcagtgagctgagatcacgccattggtttccagcccggacaacagagtaagactccatctcaaaaacagaaaaaaaattatatatttatatattcatatgtattatgtctaccccaaaagtctatgaattccttgatggcaggggccaatatttgtacctctaacataccaacttacttcctagaacacagtattcaacaaattttattgaattaaattgagcccaaagttatttttcacaatgaaacacatgttgaaaatggatggtttaacatgctttattgccataatatgtggcaattacttcaagaaatgctgtaaattgttgcatgaattcctttccttggccagtggctggaatagacttcagatttttatgtttcatgaaactaggtaatttttaaggcgatatttcatctcctctctgggcaacacttctagatcactccagaagagttatttttaccttcgaatcattctttccattcctttagtactcagaaatattttg

SEQ ID NO: 73491 - DNA, 611 bp, Homo sapiens
tctgtggagtgccatgtgagtgggggtgaatggggagggaggcaagaggaggtggagaatccagttcggtggtgctgcacctgcccagggctcctgtgacaaagcatctccaactgggaggcttaaacaatagaaattcatcatcccacacttaaaaaaatctgatatcaaggtgtcagcaggggtggttccttctgagagctgggagggaaaattcatttcctatctcttacctagcttctggtagtttgttgacaatctttggcatcaccataatctccaccttcatctttacaaggcattctcccacgtccatgtctgtgtctaaayttcccctttaaataggaacattaggggcccatactactccagtatgacctcacgttaagtaatcacaccagcagtgaccctatttccaaagaagatcacattctgaggtggtgggtgggggagcctggatttgaacatatacatttaattggtggacacaatttgacccataaccagaggctcctgcccttaaccaggccagactgaatgtgacttaggtgctatcaatggagttgagaaggctggttagactgaagattattttgaaaacagagccgata

SEQ ID NO: 73492 - DNA, 611 bp, Homo sapiens
tctgtggagtgccatgtgagtgggggtgaatggggagggaggcaagaggaggtggagaatccagttcggtggtgctgcacctgcccagggctcctgtgacaaagcatctccaactgggaggcttaaacaatagaaattcatcatcccacacttaaaaaaatctgatatcaaggtgtcagcaggggtggttccttctgagagctgggagggaaaattcatttcctatctcttacctagcttctggtagtttgttgacaatctttggcatcaccataatctccaccttcatctttacaaggcattctcccacgtccatgtctgtgtctaaacttcccctttaaataggaacattaggggcccatactactccagtatgacctcacgttaagtaatcacaccagcagtgaccctatttccaaagaagatcacattctgaggtgstgggtgggggagcctggatttgaacatatacatttaattggtggacacaatttgacccataaccagaggctcctgcccttaaccaggccagactgaatgtgacttaggtgctatcaatggagttgagaaggctggttagactgaagattattttgaaaacagagccgata

SEQ ID NO: 73493 - DNA, 611 bp, Homo sapiens
tctgtggagtgccatgtgagtgggggtgaatggggagggaggcaagaggaggtggagaatccagttcggtggtgctgcacctgcccagggctcctgtgacaaagcatctccaactgggaggcttaaacaatagaaattcatcatcccacacttaaaaaaatctgatatcaaggtgtcagcaggggtggttccttctgagagctgggagggaaaattcatttcctatctcttacctagcttctggtagtttgttgacaatctttggcatcaccataatctccaccttcatctttacaaggcattctcccacgtccatgtctgtgtctaaacttcccctttaaataggaacattaggggcccatactactccagtatgacctcacgttaagtaatcacaccagcagtgaccctatttccaaagaagatcacattctgaggtggtgggtgggggagcctggatttgaacatatacatttaattggtggrcacaatttgacccataaccagaggctcctgcccttaaccaggccagactgaatgtgacttaggtgctatcaatggagttgagaaggctggttagactgaagattattttgaaaacagagccgata

SEQ ID NO: 73494 - DNA, 743 bp, Homo sapiens
aatacaggttttctggttgtgttgggcgccatgaagataccaaagctggctaactgcagagaactgctgggctgggagagggtcagaatgggtcgacgaaggccagcctgagccagtgacatttgagccaagacatgaatgaagaagtcagccaagcaaagatctgtaagaaaagcattccaggcagggaacacagcaggtgcaaaggcctgaggaaggaggagcttggttatttgaagattggaaagaaggtgagagaacggaccagtgagagcaagaaagaagcccgggaggaaatgatgcttaggaggtacaggaatgggcctgatggctaagaccctctttagagctacctgtggacaggcccattccgggaggtagaggtcaggagtcctgcaggggcacttggccaacatttcctaagacacccaacccatcacacagggtaaagctcatgtcatctctaactcaccagcatgggtacactgtacccccagggcatgggacgcacctggagggcgagggtgctggcgtctccagaaggctggagagtagtgtggatcagaggagcctcttagggatgcagatgcttgagtccrttacaacccgaccaagacgctcccagcaggaggccaaggacctgcgtttttaatctgctcccctaagcactgaggcacagccaggaccaacccctttaccatcagcagggagaatacaggcctggggctggccacgactccctg

SEQ ID NO: 73495 - DNA, 1094 bp, Homo sapiens
ctgccccagctctcagtggatgtcaaattcttggctaaatccatcagcaatggaaagttggttggccctgggaagaggagaggccggcggatggctaggtccaggactggaccaggggggatggggtcccagatttccaccctgcattaggagctggcatagggactgtccccactgcacagataggtaagctgaggtttgggraaggggagtgattgatcacagcctagagctggctgggctcattccccttctctcttcctccccatggccctgagttgctctagtggaggggattggatggggctgtttgggacccagatgttcattttgtcttagccgctgccagctgaggtcaggtcccttctgtctgcctcagcttccttagggggctcagaatggctggaccagagcactgcagtgccctttctcatcataaagacctggccagcagcctgctcaggaatcacatttggtggggtaacaggctttttcccagggcacagtgccgccactcctagaatatgggggaggccaaggctgagaaaaatgtgctggggaagggtcattgttaatgggaggtagagagggggcagggtgggtgaggctagagggtgggcccattccttcggaggtcacaggggaggcaggacatgcagggcaacctctggggtggccccagagcaggagctgggaagctggcctggctccaggggtgggtgtgggatcctcctgggtcagcagggcctgcacttccaggccggcctcaccgcaggctcccctagacttcctggtgagacctgacagggcctcagggtctgcaggttggtgctccaggggaccagaggctcccttcacccttgagtctatctgtgtcttagtctctctgtcccggcctctctcactccccgctctgtaccttgctctgcccaagcccctcagcaatctcagaggagaggcccagggagccctggggagggagccctgacaggcccggtttccttttgttaccagtgttcctgccagagctgccaagtgtctgggctggttaaatggccgcttccctgcctgggaaccaggggccctctgtggga

SEQ ID NO: 73496 - DNA, 1094 bp, Homo sapiens
ctgccccagctctcagtggatgtcaaattcttggctaaatccatcagcaatggaaagttggttggccctgggaagaggagaggccggcggatggctaggtccaggactggaccaggggggatggggtcccagatttccaccctgcattaggagctggcatagggactgtccccactgcacagataggtaagctgaggtttgggaaaggggagtgattgatcacagcctagagctggctgggctcattccccttctctcttcctccccatggccctgagttgctctagtggaggggattggatggggctgtttgggacccagatgttcattttgtcttagccgctgccagctgaggtcaggtcccttctgtctgcctcagcttccttagggggctcagaatggctggaccagagcactgcagtgccctttctcatcataaagacctggccagcagcctgctcaggaatcacatttggtggggtaacaggctttttcccagggcacagtgccgccactcctagaatatgggggaggccaaggctgagaaaaatgtgctggggaagggtcattgttaatgggaggtagrgagggggcagggtgggtgaggctagagggtgggcccattccttcggaggtcacaggggaggcaggacatgcagggcaacctctggggtggccccagagcaggagctgggaagctggcctggctccaggggtgggtgtgggatcctcctgggtcagcagggcctgcacttccaggccggcctcaccgcaggctcccctagacttcctggtgagacctgacagggcctcagggtctgcaggttggtgctccaggggaccagaggctcccttcacccttgagtctatctgtgtcttagtctctctgtcccggcctctctcactccccgctctgtaccttgctctgcccaagcccctcagcaatctcagaggagaggcccagggagccctggggagggagccctgacaggcccggtttccttttgttaccagtgttcctgccagagctgccaagtgtctgggctggttaaatggccgcttccctgcctgggaaccaggggccctctgtggga

SEQ ID NO: 73497 - DNA, 677 bp, Homo sapiens
tgaaaataaaaacttgtaaagtataggttctttaaattaaaggtctcagttaagagcaaagaaagtaataccacatctttttcataaagtaattgctatggacaaagtgttttcacatgaagactgaataatttttctgcacagaatatttattcttttcacctcttcaccataaccaacaacatagaaatccattaaaaattaaacgagatgcccacttaagtcctaaatttcaactgcttttttcccccccaagaagggcagcctaaagctgagctggcagtgttttgggatatccaaaaatattactagtatactaaatttgagttgacttcttaattcagcacataagaagtatgtttggagcatcttgtgatagtttgcgagatgctgttataagttctaaaggcaaggcagtagaatttatattcttcagagactgctcagaataaaatttttgttttattttwttatttttattatttatttatttatttatttatttatttatttatgagatggagttttgctcttgtcacccaggctggagtgcagtggcgcgatctcagctcactgcaacctccacctcccaggttcaagtgattctcatgccttagcttccctagtagctgggattacagatggccaccaccatgcccagctaatttttgtatttt

SEQ ID NO: 73498 - DNA, 677 bp, Homo sapiens
tgaaaataaaaacttgtaaagtataggttctttaaattaaaggtctcagttaagagcaaagaaagtaataccacatctttttcataaagtaattgctatggacaaagtgttttcacatgaagactgaataatttttctgcacagaatatttattcttttcacctcttcaccataaccaacaacatagaaatccattaaaaattaaacgagatgcccacttaagtcctaaatttcaactgcttttttcccccccaagaagggcagcctaaagctgagctggcagtgttttgggatatccaaaaatattactagtatactaaatttgagttgacttcttaattcagcacataagaagtatgtttggagcatcttgtgatagtttgcgagatgctgttataagttctaaaggcaaggcagtagaatttatattcttcagagactgctcagaataaaatttttgttttatttttttatttttattwtttatttatttatttatttatttatttatttatgagatggagttttgctcttgtcacccaggctggagtgcagtggcgcgatctcagctcactgcaacctccacctcccaggttcaagtgattctcatgccttagcttccctagtagctgggattacagatggccaccaccatgcccagctaatttttgtatttt

SEQ ID NO: 73499 - DNA, 938 bp, Homo sapiens
ctatttaaatgtgtgtgcatgtgtgtgtgtgtgtgtgtgtgtgtccttgttcaggctgctataacaaaataccatgaactgtgtggcttataaacaacaggaatttatttctcacagttctggaggctgggaagtccaagatcaaggtgccagcagatttgggtctgctaagagactcctgaatcctggatagccagctgtcttcctgctgtgttctcacatggcagaaaggggtgagggtctctctaaggtgtgagggtctctctaaggtttcttttataaagacactaatctcatttactaaagacttcaccctcatggactaatcacctcccaaaggccccaccctgcaataccatcaccttgggaattaggatttcaacatatgaatggcaggggagagacagaaatattcagcagtctgaacatatgtgcaagtcctctgtgctttgaatatggaaagttgtccaagatagtgggaaaagcaagaagcaaaactctgcatattgttacataaaaagagaggtggggaataataaaaaatgtatattgattatatatatagagagaaacatctctgggaagatactaaaaaaagttacctggattggctaccttggttggatgagggaatgcaggagaatggaaaatggacagatgagagacagtaaagaaaggaataattttcaactttttatatattttaattttcatytttaaattttaataaataatatcacctgaaatatattcaaaagaaaggaaggtcatgtaacagatatctttttgatgtttgtttcagtaaattttacaattcttattacatgggaaaaaatctgaattacctcatttctatataaaattcctttgtacaaaattaaacctagaagtgatattttcacatagtacagctttataaacctaaacacaatatagct

SEQ ID NO: 73500 - DNA, 972 bp, Homo sapiens
actcctaaccagtgcactatatcccaattccataggagcccttctttgtgattcatagcactttcccatgagttttgttgattttgtgagaaacaaaactctttttcctttggactgtctggaatctctcttttwcaaatttttgaaatgtatttctatgccaaaagacaaagatttctagaggaatatgcctaggatgagaattatgtaatttaaatcacagctggaaagagagaaagtcctaagttactaagaaatgttcaaacacaaatgggctttcagtctattggaagacctttatagctagaagtatactgaactgtacttgtccatggacccctgaagaaacaggttaaatcaaagagagttctgggaaacttcatttagatggtatcattcatttgataaaaggtatgccactgttaagcctttaatggtaaaattgtccaataataatacagttatataatcagtgatacatttttagaattttgaaaaattacgatgtttctcatttttaataaagctgtgttgctccagtagacattattctggctatagaatgacatcatacatggcatttataatgatttatatttgttaaaatacacttagattcaagtaatactattcttttattttcatatattaaaaataaaaccacaatggtggcatgaaactgtactgtcttattgtaatagccataattcttttattcaggagtgcttttttgatgatatggagagcataccagcagtgactacatggaacacataccttcgatatattactgtccacaagagcttaatttttgtgctaatttggtgcttagtaatttttctggcagaggtaagaatgttctattgtaaagtattactggatttaaagttaaattaagatagtttggggatgtatacatatatatgcacacacataaatatgtatatatacacatgtatacatgtataagta

SEQ ID NO: 73501 - DNA, 972 bp, Homo sapiens
actcctaaccagtgcactatatcccaattccataggagcccttctttgtgattcatagcactttcccatgagttttgttgattttgtgagaaacaaaactctttttcctttggactgtctggaatctctcttttacaaatttttgaaatgtatttctatgccaaaagacaaagatttctagaggaatatgcctaggatgagaattatgtaatttaaatcacagctggaaagagagaaagtcctaagttactaagaaatgttcaaacacaaatgggctttcagtctattggaagacctttatagctagaagtatactgaactgtacttgtccatggacccctgaagaaacaggttaaatcaaagagagttctgggaaacttcatttagatggtatcattcatttgataaaaggtatgccactgttaagcctttaatggtaaaattgtccaataataatacagttatataatcagtgatacatttttagaattttgaaaaattacgatgtttctcatttttaataaagctgtgttgctccagtagacattattctggctatagaatgacatcatacatggcatttataatgatttatatttgttaaaatacacttagattcaagtaatactattcttttattttcatatattaaaaataaaaccacaatggtggcatgaaactgtactgtcttattgtaatagccataattcttttattcaggagtgcttttttgatgatatggagagcataccagcagtgactacatggaacacataccttcgatatattackgtccacaagagcttaatttttgtgctaatttggtgcttagtaatttttctggcagaggtaagaatgttctattgtaaagtattactggatttaaagttaaattaagatagtttggggatgtatacatatatatgcacacacataaatatgtatatatacacatgtatacatgtataagta

SEQ ID NO: 73502 - DNA, 957 bp, Homo sapiens
tttttgctaatttagctataattctattatatttttccctgtatactctgggtatgtactaaaagtgaatttaatctgcgtgtttctgtttattgccacaccttcaatgacaaaaatttaacatttctggaatacaaatcctatatgatacaggttgtgcatcctttatccaaaatgcttggaaccaaaaatgttttaaatttttaattttttttaaagcttgggatatttacacatatataatgagctattttgaggatgagacccaagtctaaacacaaaatttatttgtgtttcatatacaacttatacatgtagcctgaaggtaattttaattttcccttggggatactgaataaactgtgtgttatacgtttgtgttttgattgtgacctgtcaggtgtggaattttccacttgtggtgccatatcagtgctcgaaactttccgatttttgaagcattgtggatttcagattttctctttttctttttcttttttttttctttttttttttttttttttttttttgacagtttcactcttgttgcccagactggagttcaatggcacaatctcagctcaccgcaacatctgcctcctgggttcaagcagcttcctgactcagtccccccagtagctgggattacaggcatgctccaccatgcccggctaattttgtatttttagtaragatagggtttctccatgttggacaggctggtctcaaactcttgaccctcgggtgatctgcccacctccgcctcccaaagtgctgggattacaggtgtgagccaacatgcctggctcacattttcaaattaaggatgtttaacctgtacatcactgatatccataatgaaggttgcatagacattttaagacatgcaaaaggtatcaaattgagtacaccactgtggctaaaaaattcaatgtgaaatgagtaggctggtgagaa

SEQ ID NO: 73503 - DNA, 959 bp, Homo sapiens
aattaaaacacacacaaggaatccacttaatctgaaggaccatttacagttgtactcctatttccattattagtgtgaggtgaaacaaatacttaaacttgatattaacaaaatctaattgaagctmaaattccacttctagcaaagatggagtaattgatgctagccttgctcagaataattaaagaaagtgttttttagataattgataagaggaatgtgaactttgacagtaaagaaatattcaagttgaagttcatgtctcctccatatttctgcttaggagcactttccagagtagtcatagggaagaaggggcaaagcagagtatagtgttcttgctgatgtgaagaggcacagctcagagctcagaacaacgaaatggtagaaatttttaaggcaaacgctgaagaggaaagagaggctgaagattgacagaggtggacactgtgtttacatgaacatttctataatttttgcctaacactaatatgtggttttatggggtgaaatcttaggctaacacagagggaatataatggggtggcaagctcagtagagataccaaagggcaaagggtgctggggaaatgtgaatcctggccaagaagaaattcactcacacctcagtaaaaccatcccttagaaataaacacaactctctgtacagtaaaggccagatcctcaggataagggcaaaacaggaggagcatttttaaagtaattatgaaagcaagcttggcaggacaaaataactcaccagtaatttaagtctttgtcaaaacaatccagagaccttccagaatgacatcaagaatggctgtaatagatataattgttataaaatgtataagacatatgaatgagtagaaaatagtgataattaatgttttattttttaagtatttatttatttatttttaattatactgtaagttctggggtacatgtgcagaacag

SEQ ID NO: 73504 - DNA, 959 bp, Homo sapiens
aattaaaacacacacaaggaatccacttaatctgaaggaccatttacagttgtactcctatttccattattagtgtgaggtgaaacaaatacttaaacttgatattaacaaaatctaattgaagctcaaattccacttctagcaaagatggagtaattgatgctagccttgctcagaataattaaagaaagtgttttttagataattgataagaggaatgtgaactttgacagtaaagaaatattcaagttgaagttcatgtctcctccatatttctgcttaggagcactttccagagtagtcatagggaagaaggggcaaagcagagtatagtgttcttgctgatgtgaagaggcacagctcagagctcagaacaacraaatggtagaaatttttaaggcaaacgctgaagaggaaagagaggctgaagattgacagaggtggacactgtgtttacatgaacatttctataatttttgcctaacactaatatgtggttttatggggtgaaatcttaggctaacacagagggaatataatggggtggcaagctcagtagagataccaaagggcaaagggtgctggggaaatgtgaatcctggccaagaagaaattcactcacacctcagtaaaaccatcccttagaaataaacacaactctctgtacagtaaaggccagatcctcaggataagggcaaaacaggaggagcatttttaaagtaattatgaaagcaagcttggcaggacaaaataactcaccagtaatttaagtctttgtcaaaacaatccagagaccttccagaatgacatcaagaatggctgtaatagatataattgttataaaatgtataagacatatgaatgagtagaaaatagtgataattaatgttttattttttaagtatttatttatttatttttaattatactgtaagttctggggtacatgtgcagaacag

SEQ ID NO: 73505 - DNA, 959 bp, Homo sapiens
aattaaaacacacacaaggaatccacttaatctgaaggaccatttacagttgtactcctatttccattattagtgtgaggtgaaacaaatacttaaacttgatattaacaaaatctaattgaagctcaaattccacttctagcaaagatggagtaattgatgctagccttgctcagaataattaaagaaagtgttttttagataattgataagaggaatgtgaactttgacagtaaagaaatattcaagttgaagttcatgtctcctccatatttctgcttaggagcactttccagagtagtcatagggaagaaggggcaaagcagagtatagtgttcttgctgatgtgaagaggcacagctcagagctcagaacaacgaaatggtagaaatttttaaggcaaacgctgaagaggaaagagaggctgaagattgacagaggtggacactgtgtttacatgaacatttctataatttttgcctaacacwaatatgtggttttatggggtgaaatcttaggctaacacagagggaatataatggggtggcaagctcagtagagataccaaagggcaaagggtgctggggaaatgtgaatcctggccaagaagaaattcactcacacctcagtaaaaccatcccttagaaataaacacaactctctgtacagtaaaggccagatcctcaggataagggcaaaacaggaggagcatttttaaagtaattatgaaagcaagcttggcaggacaaaataactcaccagtaatttaagtctttgtcaaaacaatccagagaccttccagaatgacatcaagaatggctgtaatagatataattgttataaaatgtataagacatatgaatgagtagaaaatagtgataattaatgttttattttttaagtatttatttatttatttttaattatactgtaagttctggggtacatgtgcagaacag

SEQ ID NO: 73506 - DNA, 959 bp, Homo sapiens
aattaaaacacacacaaggaatccacttaatctgaaggaccatttacagttgtactcctatttccattattagtgtgaggtgaaacaaatacttaaacttgatattaacaaaatctaattgaagctcaaattccacttctagcaaagatggagtaattgatgctagccttgctcagaataattaaagaaagtgttttttagataattgataagaggaatgtgaactttgacagtaaagaaatattcaagttgaagttcatgtctcctccatatttctgcttaggagcactttccagagtagtcatagggaagaaggggcaaagcagagtatagtgttcttgctgatgtgaagaggcacagctcagagctcagaacaacgaaatggtagaaatttttaaggcaaacgctgaagaggaaagagaggctgaagattgacagaggtggacactgtgtttacatgaacatttctataatttttgcctaacactaatatgtggttttatggggtgaaatcttaggctarcacagagggaatataatggggtggcaagctcagtagagataccaaagggcaaagggtgctggggaaatgtgaatcctggccaagaagaaattcactcacacctcagtaaaaccatcccttagaaataaacacaactctctgtacagtaaaggccagatcctcaggataagggcaaaacaggaggagcatttttaaagtaattatgaaagcaagcttggcaggacaaaataactcaccagtaatttaagtctttgtcaaaacaatccagagaccttccagaatgacatcaagaatggctgtaatagatataattgttataaaatgtataagacatatgaatgagtagaaaatagtgataattaatgttttattttttaagtatttatttatttatttttaattatactgtaagttctggggtacatgtgcagaacag

SEQ ID NO: 73507 - DNA, 1458 bp, Homo sapiens
gccaagatcacaccactgcactccagcctggattagaaagtaagagtccatctcaaaaacaaacaaaaaatgtgctgtaatagctaatgacagtgatctcagtgcagaaaggagaaccccaaaagctccctgtggagcagctgtatatttttaaattacacagtcaaatattaatttacatttaaaatatttgaatataaacatttcaattattaagtgataattccaaaataatctgaaaatatcagctttttcaagtttcacaaatcctcaaacaaaatgaattgtgattacgcccctcttcctagccaactttagtaaagtagatcaataaacagagttgttatcctatcttgacagggatttttgtctactttggtcaggccaatgttttcatggattactttattttttaaggcaatcttctcagttgtgactccagcagatgcattgcaagtcccagggaacctcccacactcagagactgctttcaaaatagattcatacaaaagtgaaaaagcaatcaaaccttaaacaaaggccaatggatggaagcagtggctcatgcctgtaatcccagcactttgggaggccgaggcaagtggatcacctgaggtcaggagttcaagaccagtctggccaacatgatgaaaccccatctctactaaaactacaaaaattagccaggcatggttgtgcacgcctgtagtcccagctactcgggaggctgaggcaggagaattgatcgaaccagggaggcagagcttgcagtgagccaagatcacgcacctgcaccccagcctggggtgagacttcgtctcaaaaaaaaaagaaaaaaaatgctaatatgttttatgctggccgagatataaataatatataaaaatataagagtattcctctttattccaaaaaataaagtagctctattgtgtttattggattgtttttcagacaggtttcctggttgctattgttttggtttaaatgaaaagcatttcaagaaaataaggattatattttttctctttttatcatgtatctattggattagtccaatatccctcctgtctggggaacctcatacactgatttttcaggtcagttcatatcatgaatctgttttcattcaaagccacccagttgcactcagggtcatattgtaatayggctccatgtactttataatctctttcttaacctgtttttcatggactttcttgcttccagccttttacatatgttctttcctctgtctaaaagaatttctgacttccctccaaccctaaacctgatagctctagcttcttatgtgagctgggacaaaccctaatatttaatctgtattggaagtttacacaaacattggctcaccttcagctgaaattgccttcagtgtgcttcagcaataaatgcccaactagacgttcaattgacaaagggaacaaggatacaaaa

SEQ ID NO: 73508 - DNA, 943 bp, Homo sapiens
tcttgtcctcaatgagcccctgagatctcagcagagccaaattggagttgtagacaaatcctggggttctcagggcccagctgtgttttgtcttccaggagtgattaaagtggaggccatgattgagtacagagtgcgaggaggactccaatcagcaggacaggggaaagtgacctgcagtaacatatgcctcctcagcattctttcctgcagatgactaatgaacgctctgggagtgaccttaatcagatgtgctgtaattacttattgaatgtgatccagctgcagaagacaaagggttatgcaatattaaaggcagctggaagcagagtccccgcagcagggcacaagtagaagggcaggcaatgacctgtgtgaccgaatttaattaaaagggtgcttttctgctcagagaaccaggtattattagtaggataaaatcagttctgaaattaacaattatttgggaaaaaaatcaatacattgtcatagtaactcttccaacccacactgaggttttttgttcccactgaagtggaaatgtccaaggaaagaggtattccgtacaagtcaattttatgaatagtttaaggttaaaatagacaaagctgtttgcattgtttatgggaatatttatacattttcaaactctgctgcatttgtgctgcatcagcccagctaagctggaattgtatttctcagaattcccagccctgccatgtttcacatyagtgctggccaccaggggtatcttgtgtgtgatttggaagatgatatacagcagcaacctggtttgcaccctctcaaggtcagtgtagggcaccaggtgcagctcacaggccagcagctgggccccaatccctctaactcccactgagctcaacttctctgcatcccaggccagcatgtgaagctcccagcagaggactccagcttcccatgc

SEQ ID NO: 73509 - DNA, 803 bp, Homo sapiens
ttttgtttatgtttctttaagtggagagtagttttatgttattcaaaacgtggttttatagaacacatagactccagtctaactgccagggtaagctgagcctaaataatttatttcagaatgttctgtcactttgtactggcactttaatggaaaaggttctctagtattcattttgatgaataattagttcaggaggaatctctagattgtagtcttggattgcagagttgaaatttaatcatttcaacacagttgtcttcaatgccaacataaaccagagataaattatatccaatcagtgaacggatttaatgcatggttcacaggttgtgggaaccaattaatatttgtaagcatattatcaaaattcttaagggcattatacgatttgcattatagtagactgggttcaagttaaaaaaattattctaacttatattgcatctggagcaagggaaaatgaaaaaagactttttagttgggctaatactttccattctgaaacgtagcttggatataataaagaataaaacactgagaaaaacaattggtaaaaccagtattgaaaagattgacaaagsgtttttttccctctccctcttccaaaggcgaacctccacacaaaatcttagcctgaagttttaaattgtctgctacagacaattgccactttccaagtgcagaccggcaagtgcacaaagagcaaagtttagtcaaagttcattttcaggtcatccaccctggaaccatcaatctggacaacctctgcgtaacctcttccaagattgtggactggaacg

SEQ ID NO: 73510 - DNA, 770 bp, Homo sapiens
gttggttgattggatagtttttctagtttttcctgtcttcattgggtttgattgggctcatgtactgattgtcagtcggttggttagctagagtctggctggtctagagtggcctcactcacctgtctggccaggataggctgggcttgttttatatagcagtggcagtgttccatgagagtaagtagaagtgttcaggcctctcgattactaggctcagaatcagacagcattactgctactgtattctaatggcagaagcaagtcacaagatgagcccagattcaagaagcagggaaataatctccacttctggacgggaggaactttaatgtcaaattkcaaagggcatggatacagtgatcaatctatcacaaaatctatgtaaatatatttgaaggcctcacaaggactcttaatgtaaatattaaagccatccatcctgttccctgctggccatgatcttgtgtgtttattttccttagtggcttcccctcactccaacacatttaaaaaaacctgattctggaaagctgatgtgagactcagagaccaaaaattggctcttatgaggggtttatcataattttttaaaataatttccacttgttagtcacacttcctcctctttgcctaccccattatttttaccccttttgcttgtacataagttcttcaaatataaatttataagttcattgaaaaaagtgagtaaaatgatcactgcacatttacatatgacaaaaggaaacttttcagaaaattgggat

SEQ ID NO: 73511 - DNA, 770 bp, Homo sapiens
gttggttgattggatagtttttctagtttttcctgtcttcattgggtttgattgggctcatgtactgattgtcagtcggttggttagctagagtctggctggtctagagtggcctcactcacctgtctggccaggataggctgggcttgttttatatagcagtggcagtgttccatgagagtaagtagaagtgttcaggcctctcgattactaggctcagaatcagacagcattactgctactgtattctaatggcagaagcaagtcacaagatgagcccagattcaagaagcagggaaataatctccacttctggacgggaggaactttaatgtcaaattgyaaagggcatggatacagtgatcaatctatcacaaaatctatgtaaatatatttgaaggcctcacaaggactcttaatgtaaatattaaagccatccatcctgttccctgctggccatgatcttgtgtgtttattttccttagtggcttcccctcactccaacacatttaaaaaaacctgattctggaaagctgatgtgagactcagagaccaaaaattggctcttatgaggggtttatcataattttttaaaataatttccacttgttagtcacacttcctcctctttgcctaccccattatttttaccccttttgcttgtacataagttcttcaaatataaatttataagttcattgaaaaaagtgagtaaaatgatcactgcacatttacatatgacaaaaggaaacttttcagaaaattgggat

SEQ ID NO: 73512 - DNA, 736 bp, Homo sapiens
accattatctcaacaaacaagtgaaagaaaacttaaaaaaaaataagttgtttggaggaaaatttaagggctgcgtctctttgccaagaatttgagccatgtttcctgcccatccatgttgtgagagacagggaagtgaactccatttactgaatctttttaacatgtacacacrtgttcgtaaactgcaaagaattatctgctattgagaaaagactcctattagccaattagagtaattacatggattaagatttcttgtttttggtgatttctttttttttaatccctaatgctttcttgctgaggaaaggaagggctaaacagctgatatggccagagaattaagtgggtgcaaagtagggcattctcattttcagattccaaaatgtaattgaaattttatgcttacctcaacataacaacatgtgatgatttctgtgcaagggaaggcataaaggatgacatttccccaagacttcaattatagtagcttctatctcccctaaaacagcatttggtctcggaaaattgcttttaatggtgcaggtgtttgttgagagtatccatcatattcactcccaagtaatccatattaattcaccagcttcattagcagcaaccttttcttccaaatgacaatgcaaagtaaatacaatttcaaacagatgtgctggttttctatgaatcagaaagaggataaagaaactgacactggctggagaagggaagatag

SEQ ID NO: 73513 - DNA, 1766 bp, Homo sapiens
ccaaatgagaaaataacattataaggaaaataaactatgtacgaatattcttcataaaagtagaaacaaaaatcattcataaaacrttagcaaaatcaaatctaacaatacataaaaagatgccacacatggccatgtgtagtttgtcccaaaaatgcaaggttaatttaacagtcacacacacaaaatcagtcaatacagtttaatattttaacaaaataaaaaaagttatttgcctatctcaatagataaggaaaaagcatttgaaaatattcaactaccaatcatgatttttcaaaaaattcctatagaacttaggaatcaagaggggcagaggaggagcttccaaaacctaacaaaggccatctatttaaaagaaaaaaacctgcagctaacatcatacctgacactaaaacttggaaatattttccctaagattgggaacaggtgtctactcttaccatttatatttaacattttattgaagatgctattctatgatataaggtaaggaggggaaaaaaagcataaagattataaataaagaagcagaattctcatcagaatcaagacaatgatgcccagttttactatattatttgacaacgtggctcttcctctgcaaaatagtctttttgtgtttggtaaaaccctaaatagaaggttactatttagtctaacttccaccagactaaatagacattttcagacatcatctcaagtacgtaatgctgggaactttcttccctggaaaaagaaaggtcacgtgattagaacttagatactaagcaatgtttagcttaaattgcaatatgaactagatagtagtgacacatttgaggggaatgacggtggctattaaggcatgcaccctgattacagctgtttaaatgctaccttgagacctcaaactttgtttttcattgttcaaagaagatatttataggagtcagcagcacacctttgccattagttcagaaggatccagtcatactaaatcagtaatcattagatacattattatatatttacctatgatattagcaatagttaatgcttactctgcacttattatgcataggatgtcttctatgagatggacatatgatgattaaatgaattccctgaaaaagtaatgaggtcagttttattttcccactattttacaaagagaaaagtggcacagagagtttaagtaattggcaaaatttgattaatacacataagccacttggaaaccaaaaatgcagtggtccaaaaataacagaaatatcttctattttgttcacaatattgaaattaataagtcccttttcattatttacttgtttacatccagaatgttcaattaaggtaaaacatattagtgaaccatagttaattaaaataggcttcccataatatgatcaagttaatctggaagtcattctgaaactcagtgaactctagatatgataattctacaaactgttttttcatttatctttaataagatgatttactttaaaagttcttcattattattttttagaagcatccttactatcttgggaaaacacttcatgataaaaaatttattacatactggatagtctatacaattttattatttaataattttgaatttgataattaaaattccttacactacagtttcaagattgtttaatcaagcaacacatacttatttgtcaccagccctcttcacttcaatggctattcaaggtaaaattgatttcataaaagactagccaagacaacaagga

SEQ ID NO: 73514 - DNA, 1766 bp, Homo sapiens
ccaaatgagaaaataacattataaggaaaataaactatgtacgaatattcttcataaaagtagaaacaaaaatcattcataaaacattagcaaaatcaaatctaacaatacataaaaagatgccacacatggccatgtgtagtttgtcccaaaaatgcaaggttaatttaacagtcacacacacaaaatcagtcaatacagtttaatattttaacaaaataaaaaaagttatttgcctatctcaatagataargaaaaagcatttgaaaatattcaactaccaatcatgatttttcaaaaaattcctatagaacttaggaatcaagaggggcagaggaggagcttccaaaacctaacaaaggccatctatttaaaagaaaaaaacctgcagctaacatcatacctgacactaaaacttggaaatattttccctaagattgggaacaggtgtctactcttaccatttatatttaacattttattgaagatgctattctatgatataaggtaaggaggggaaaaaaagcataaagattataaataaagaagcagaattctcatcagaatcaagacaatgatgcccagttttactatattatttgacaacgtggctcttcctctgcaaaatagtctttttgtgtttggtaaaaccctaaatagaaggttactatttagtctaacttccaccagactaaatagacattttcagacatcatctcaagtacgtaatgctgggaactttcttccctggaaaaagaaaggtcacgtgattagaacttagatactaagcaatgtttagcttaaattgcaatatgaactagatagtagtgacacatttgaggggaatgacggtggctattaaggcatgcaccctgattacagctgtttaaatgctaccttgagacctcaaactttgtttttcattgttcaaagaagatatttataggagtcagcagcacacctttgccattagttcagaaggatccagtcatactaaatcagtaatcattagatacattattatatatttacctatgatattagcaatagttaatgcttactctgcacttattatgcataggatgtcttctatgagatggacatatgatgattaaatgaattccctgaaaaagtaatgaggtcagttttattttcccactattttacaaagagaaaagtggcacagagagtttaagtaattggcaaaatttgattaatacacataagccacttggaaaccaaaaatgcagtggtccaaaaataacagaaatatcttctattttgttcacaatattgaaattaataagtcccttttcattatttacttgtttacatccagaatgttcaattaaggtaaaacatattagtgaaccatagttaattaaaataggcttcccataatatgatcaagttaatctggaagtcattctgaaactcagtgaactctagatatgataattctacaaactgttttttcatttatctttaataagatgatttactttaaaagttcttcattattattttttagaagcatccttactatcttgggaaaacacttcatgataaaaaatttattacatactggatagtctatacaattttattatttaataattttgaatttgataattaaaattccttacactacagtttcaagattgtttaatcaagcaacacatacttatttgtcaccagccctcttcacttcaatggctattcaaggtaaaattgatttcataaaagactagccaagacaacaagga

SEQ ID NO: 73515 - DNA, 1766 bp, Homo sapiens
ccaaatgagaaaataacattataaggaaaataaactatgtacgaatattcttcataaaagtagaaacaaaaatcattcataaaacattagcaaaatcaaatctaacaatacataaaaagatgccacacatggccatgtgtagtttgtcccaaaaatgcaaggttaatttaacagtcacacacacaaaatcagtcaatacagtttaatattttaacaaaataaaaaaagttatttgcctatctcaatagataaggaaaaagcatttgaaaatattcaactaccaatcatgatttttcaaaaaattcctatagaacttaggaatcaagaggggcagaggaggagcttccaaaacctaacaaaggccatctatttaaaagaaaaaaacctgcagctaacatcatacctgacactaaaacttggaaatattttccctaagattgggaacaggtgtctactcttaccatttatatttaacattttattgaagatgctattctatgatataaggtaaggaggggaaaaaaagcataaagattataaataargaagcagaattctcatcagaatcaagacaatgatgcccagttttactatattatttgacaacgtggctcttcctctgcaaaatagtctttttgtgtttggtaaaaccctaaatagaaggttactatttagtctaacttccaccagactaaatagacattttcagacatcatctcaagtacgtaatgctgggaactttcttccctggaaaaagaaaggtcacgtgattagaacttagatactaagcaatgtttagcttaaattgcaatatgaactagatagtagtgacacatttgaggggaatgacggtggctattaaggcatgcaccctgattacagctgtttaaatgctaccttgagacctcaaactttgtttttcattgttcaaagaagatatttataggagtcagcagcacacctttgccattagttcagaaggatccagtcatactaaatcagtaatcattagatacattattatatatttacctatgatattagcaatagttaatgcttactctgcacttattatgcataggatgtcttctatgagatggacatatgatgattaaatgaattccctgaaaaagtaatgaggtcagttttattttcccactattttacaaagagaaaagtggcacagagagtttaagtaattggcaaaatttgattaatacacataagccacttggaaaccaaaaatgcagtggtccaaaaataacagaaatatcttctattttgttcacaatattgaaattaataagtcccttttcattatttacttgtttacatccagaatgttcaattaaggtaaaacatattagtgaaccatagttaattaaaataggcttcccataatatgatcaagttaatctggaagtcattctgaaactcagtgaactctagatatgataattctacaaactgttttttcatttatctttaataagatgatttactttaaaagttcttcattattattttttagaagcatccttactatcttgggaaaacacttcatgataaaaaatttattacatactggatagtctatacaattttattatttaataattttgaatttgataattaaaattccttacactacagtttcaagattgtttaatcaagcaacacatacttatttgtcaccagccctcttcacttcaatggctattcaaggtaaaattgatttcataaaagactagccaagacaacaagga

SEQ ID NO: 73516 - DNA, 1766 bp, Homo sapiens
ccaaatgagaaaataacattataaggaaaataaactatgtacgaatattcttcataaaagtagaaacaaaaatcattcataaaacattagcaaaatcaaatctaacaatacataaaaagatgccacacatggccatgtgtagtttgtcccaaaaatgcaaggttaatttaacagtcacacacacaaaatcagtcaatacagtttaatattttaacaaaataaaaaaagttatttgcctatctcaatagataaggaaaaagcatttgaaaatattcaactaccaatcatgatttttcaaaaaattcctatagaacttaggaatcaagaggggcagaggaggagcttccaaaacctaacaaaggccatctatttaaaagaaaaaaacctgcagctaacatcatacctgacactaaaacttggaaatattttccctaagattgggaacaggtgtctactcttaccatttatatttaacattttattgaagatgctattctatgatataaggtaaggaggggaaaaaaagcataaagattataaataaagaagcagaattctcatcagaatcaagacaatgatgcccagttttactatattatttgacaacgtggctcttcctctgcaaaatagtctttttgtgtttggtaaaaccctaaatagaaggttactatttagtctaacttccaccagactaaatagacattttcagacatcatctcaagtacgtaatgctgggaactttcttccctggaaaaagaaaggtcacgtgattagaacttagatactaagcaatgtttagcttaaattgcaatatraactagatagtagtgacacatttgaggggaatgacggtggctattaaggcatgcaccctgattacagctgtttaaatgctaccttgagacctcaaactttgtttttcattgttcaaagaagatatttataggagtcagcagcacacctttgccattagttcagaaggatccagtcatactaaatcagtaatcattagatacattattatatatttacctatgatattagcaatagttaatgcttactctgcacttattatgcataggatgtcttctatgagatggacatatgatgattaaatgaattccctgaaaaagtaatgaggtcagttttattttcccactattttacaaagagaaaagtggcacagagagtttaagtaattggcaaaatttgattaatacacataagccacttggaaaccaaaaatgcagtggtccaaaaataacagaaatatcttctattttgttcacaatattgaaattaataagtcccttttcattatttacttgtttacatccagaatgttcaattaaggtaaaacatattagtgaaccatagttaattaaaataggcttcccataatatgatcaagttaatctggaagtcattctgaaactcagtgaactctagatatgataattctacaaactgttttttcatttatctttaataagatgatttactttaaaagttcttcattattattttttagaagcatccttactatcttgggaaaacacttcatgataaaaaatttattacatactggatagtctatacaattttattatttaataattttgaatttgataattaaaattccttacactacagtttcaagattgtttaatcaagcaacacatacttatttgtcaccagccctcttcacttcaatggctattcaaggtaaaattgatttcataaaagactagccaagacaacaagga

SEQ ID NO: 73517 - DNA, 1046 bp, Homo sapiens
aagatataggtaaataaaatttgacttcagtaggcttttgctatttcatgatttctctccaatccagtatcactttaacttgtggatatataaaaaaacaaaagaaaaaaaaaatcagtgggactcctgtctgctcttccactaattgatttaaatgaaaactgactttattggttgataatcaatatggagttgagaaggcagtaccccagggtttaggatttgagcaatatcatttttgtgatttgcctttggccttcttttatgttactgaaacacgactgtttaaaataaatctttgtgaattgaagaagcattttatttcttatcctgaataaaaaaaaatattactgtaatagaccccatggctttctcctagacatataaaaaagtttgaatttaagacataaagtggttcaagtggttttctagggctgccataacaaattactacaaatttggtttaaaacaacagaaatgtattgtcctacagttacggagaccagaatctaacatgaaggtgtctatactctaaagaagaatctgtaccttgacttttacagctctggtcactgcaggtatttcttggtgttccttggcttgtgaccacattacttcagtctctacctctgtcttcacttcacttgtatgtgtgtgtcttgtttgtgtgtgtgtcaccctttgcctctctctcctaaggacactactatggcatttagggtccagaatgatccaaaatattatcttcatctcaagattcttaacttaatcatatttgtaaygagcctttttccaaataagataacattactattttgacacataagattatattcaggggtttcagggattagaaggtgactatatatttgggaggccatttttttcagactaccacaatggttgccatgagtttaaacagaagtatttcctaaaataaattctttaaaaaaattgctgggagtacaacataaattatttgaaaagagacagaaacaagagacaagattatcttagagataagagatgcctactttactttggtc

SEQ ID NO: 73518 - DNA, 585 bp, Homo sapiens
cttcttccatatactagaggtttggtctaggtcaagggtttggtctaggtcaggggtgtggcttargtcaggcctgctgctcccctttcttggtgctacagcctagaagatgggagctcagtctcaaatccatctccctgactgattaaaactaggggtttatacatcagggaagaaatgtaacaatgtgtaaaaaaacaggaactagggaggggcaaaggaagcaatcataatgaatgaggggttgtcatctggtgctgtgatccattgagtttcagttctttgatactttttccagaggcctgaaggttgtttcctgaggaaggaactcagataaaacaaatataaatttcaagctttaagatcaggagggtcaatttctatgtttatcaaaaagaaccatctttgggactattggattggtttcaaaaacaacctaaacttctatcaatacataaaaggataaacaaattgtggtatatccatacaatggagtgtgactcagcaataaaaaggaactattgatatgcacaatgacatggatgaacctcaagatattaatgctgaatgaagcaagtcagttct

SEQ ID NO: 73519 - DNA, 806 bp, Homo sapiens
cctctgaaaattgcacacacccatgtttaaatgtacacacagaactcttgccacaggcaagcrgagatttgtcatctgctgtccctgcctcatcttcttcctgaaatccactccatgccaggaataaactgcatgctctccaccagcccaaactgacctgccttcccgccagccatcccgggcagggtgacctggcttagtacatcgggttcagagatctttccagtttactcgttgaataaaaagtgagggctgatcgagaaagtaatggcagtcagggaaggcgaaggaggtaaagaagagattttacaaatgaagtaattcaacagagtgctgacattggtaaactggcaaacagatttcagggtggttggttgagagtagagtagaaaaggattaaataaagcaaacttgtggtgtactgaatcttaggaattccatgtatccaataagtatagtcatttatgaattaataaattcggcctaagaagccttcttatcgcttaaatcaagactaagtaacaatatatcagttttaaaaagtcattatatcagaaaatcatttaaatgatacacatagatttccaagattttactttaaccgaaactatataaatgtgaatttgttcacccatcttttgacacagggctcaggtcttctcttggtgtctggatcagccagttgaaatttcttgtctgttttgcctatgccacattaataatgcactgtctgggtcctccgatttcagtttggattttgggtttacattgtggagtcatctgaatgcagaatccttcagggattt

SEQ ID NO: 73520 - DNA, 806 bp, Homo sapiens
cctctgaaaattgcacacacccatgtttaaatgtacacacagaactcttgccacaggcaagcggagatttgtcatctgctgtccctgcctcatcttcttcctgaaatccactccatgccaggaataaactgcatgctctccaccagcccaaacygacctgccttcccgccagccatcccgggcagggtgacctggcttagtacatcgggttcagagatctttccagtttactcgttgaataaaaagtgagggctgatcgagaaagtaatggcagtcagggaaggcgaaggaggtaaagaagagattttacaaatgaagtaattcaacagagtgctgacattggtaaactggcaaacagatttcagggtggttggttgagagtagagtagaaaaggattaaataaagcaaacttgtggtgtactgaatcttaggaattccatgtatccaataagtatagtcatttatgaattaataaattcggcctaagaagccttcttatcgcttaaatcaagactaagtaacaatatatcagttttaaaaagtcattatatcagaaaatcatttaaatgatacacatagatttccaagattttactttaaccgaaactatataaatgtgaatttgttcacccatcttttgacacagggctcaggtcttctcttggtgtctggatcagccagttgaaatttcttgtctgttttgcctatgccacattaataatgcactgtctgggtcctccgatttcagtttggattttgggtttacattgtggagtcatctgaatgcagaatccttcagggattt

SEQ ID NO: 73521 - DNA, 806 bp, Homo sapiens
cctctgaaaattgcacacacccatgtttaaatgtacacacagaactcttgccacaggcaagcggagatttgtcatctgctgtccctgcctcatcttcttcctgaaatccactccatgccaggaataaactgcatgctctccaccagcccaaactgacctgccttcccgccagccatcccgggcagggtgacctggcttagtacatcgggttcagagatctttccagtttactcgttgaataaaaagtgagggctgatcgagaaagtaatggcagtcagggaaggcgaaggaggtaaagaagagattttacaaatgaagtaattcaacagagtgctgacattggtaaactggcaaacagatttcagggtggttggttgagagtagagtagaaaaggattaaataaagcaaacttgtggtgtactgaatcttaggaattccatgtatccaataagtatagtcatttatgaattaataaattcggcctaagaagccttcttatcgcttaaatcaagactragtaacaatatatcagttttaaaaagtcattatatcagaaaatcatttaaatgatacacatagatttccaagattttactttaaccgaaactatataaatgtgaatttgttcacccatcttttgacacagggctcaggtcttctcttggtgtctggatcagccagttgaaatttcttgtctgttttgcctatgccacattaataatgcactgtctgggtcctccgatttcagtttggattttgggtttacattgtggagtcatctgaatgcagaatccttcagggattt

SEQ ID NO: 73522 - DNA, 806 bp, Homo sapiens
taagaggcagtcctgactgcagatcaggctgtgtggaccccagccttgcatgtttacagaccttcatgtcttattcttacagggtatcagaagaacacctactggggaaacttataaattagtaaaaggtgggcrttctccccgcccatcttctgtctgtctgccaggactagcacagcactttgaagtcattcacatagaatcccaacttaagagggtaaaatcctcctcaacagactgaaaataagtttaaattccctttgctatattaactcccctgaggaaagagtcttagatcaatgtccaacactaaaaacagttttaaatcagcaagtgagaattaaatctgaagcaattgataataatgtttcattcattcctctcctttggccccgtccaccctactgctaaatccaggcatcaaagagaagagggacataattatctctagtcccagctgctggttttccttccagcctatggcccagttttctgttttactgagaaggctggtgatgttatcttgggatctaagtctgcagtttcaccacaaaaagtccagggatgcactttcatgcttgtgtcctcctccctgggatagcaaggatattagaagacccctggctctgtaattgcttgtcatgtgctctacagacgccacagaatgccaagaacgaagtgctgggaaggacaaattcatggaaccgtgggacggtgctcctcccccagcgtaaaggacagctcctcctcctgaattggagccagcgttctaaatcatgtgtcaacagagttgtcctggatcggat

SEQ ID NO: 73523 - DNA, 3683 bp, Homo sapiens
ataaaaaaaaaaaaaaagaaaagaaaaagaattgcaagaaataaattattgtttatgagctatatggtctgtggtaccttgttgtgggactgggagtcttggcgtctccctgaccctgcctgttgctgcagcrccgctcagccctgcctgctccctacctgcctcccctcggcctctcctgcctccaccgggcccctggtgcctcctctagagacagtcctcctgggaccgattgtgttctcacttacacgaggcatccaggactacagataaccagaggaaggggcgccccccccgcctgccctcctccctggcatcctcacgctgcagaggtcagagcctcatcccagccccttacctgcccctactctgtggagaaccgtggtcagttcgccaggccggatccacgaacggccttgtggaagatggtgagctcacacccagagctggctccgatgaccctgtctcctttacatgtttctaccttcccctccctaccttcccccactgctgggcgcagagtggaggcagatgaggtttaaagctcagaagggcttaaacgggttggggcgcagtggctcatgcctgtaatcccggcactttgggaggccaaggcagaggatcacttgagcccaggagttcgagaccaacctgagcaacatagtgagaccgcgtctctacaaaaaataaaataaataaaattagctttgcagggtggcatgcacctgcagtccctgctactcagaaggctgaggtgggaggatcgcttgtgcccaggagtttgaggctgcagtgagctatgctggcaccacagcactccagcctgagtaacagaatgagatcctgtctcaaaacaaacaaacaaacaaacaaaagaaggcttaaagggggctccaggtgggcttggcagcacaaagctatgaagttctatcttagacacaagttctgttactgggcctttgcaggctggcctgggtacctggctgccatagacagggaaccttccagatgagctgcaggcgtggagcacaggagccagggtgctcttcctgggctctgtccacaggcagaacgtacacagtctttgtacacgtccggcggctctggtgcctatttttgtttgtgtttttcttttgtttggggggatggatttggtttcccccgagccctctgtcctcctgtcacctggctggtgctcggcaatgttgaccagctgcctggctggagttggcagtggctaaggctgtgacagctaacatgttcctgagtcctctcatttcttcaccataatgccctgttgagtttgcagatactgtctctgtttttatctcccggggaaactgaggctcagagtggctaggccaccttcccatggtccctcagctcatgagggccacacagggcattgcggtggccttctcctcagccttgaccctccggccccagcattgctgcctcaaggggtctcctctgctgagccgtgcaccttctgcctggcagctccaactctgtggctgtgttcagtggctcagcactgccccttgaccctccctggccttctgcggatgccagactggagcactctgacaaggtctggggtggttgtatgggtcctgtgacctctatacacctcccagtgcctgggaatcctgcagatacaccctccttagccgtccctaaccatagaggacatttctgaggtccccgagagagtggggcacccctgcaggatccaactgctgggcccaggaaggatagcagcagcatgaggggttccattagccacaaactcacggcatggaaccttcacccacctcgcccctcatctgctgtttagcacctggcacgccgtgtatacttactgattattacattttaatggcaaattatagtggcaaacgtatgcatctttgcacaattgttgtacagcatgatgaacaagtcattaatagtaaagaataaatgtgaaagtgagaaaaatctgactgccaaagtttttactccttccttccctccccagacttttaaatgaaagtttagggataatcccttagttgtcctgctagtaggacttgcaattaaaagaattgggccaagaacacttctacgcttctccttttaggtttgggtgtaaattcggggtatttctcactgatgaaagcctggtgcagggcagaccgtgggaagctttcatttccggaatggaccatcaacatcccttggagaagaattctcttctccagacccagacctggtgtcctggcacccattgggcaagtgggtcctagaagacaaacctggtcagagcctggaggctgcttagcattccccacgcacattagcagctcggagagctcaggaagccgcagcccctccttgcctcaccagcctggatcaggacagcatcccctggaagacacacagggcctggcctctgattacccagcctggagggaaagctcaatcgagcatcatgtcacccggtgcccccatgcagggtggcactggtgagacccccaagccaatgataccacctcacaggagtgcaggcccattgtggccagatcatcttgacttttcaagataaatcagaaatcgtatttccatgagatatccctatttgcaagtgatggtgactaaattagaagtttttgaatattgtaacatgttcgtaggctgtttgtctggtttaaactctatctggaggaattcaagctagacttcaggaataacttcttgaggcaaggattttgagaccttagggaaagaaggacgtcttgggggtattctgactgttgtcctcctggaagggaagaacagagaactagaagactgcccttagcgaagttcaaagcacctaagcccgggaccctcagcaagtgttcttgagtcacagattctccctgaggcgcctctttctggctccatagaatggctgattctgtaactcggtgagtttgctttttttttttcctccatcacccaggctggagtgcagtgaagctggagtgccgtggagcgatcactgcaacctctgtctcccaggttcaagcaattctccttcctcagcctcccaagtagctgggattacaagcatgcagcaccacacctggctaatttttgtgtttttaatagagacggcccgaagtgctaggattacaggcatgagccaccgcggccagccataactctgtgactcttgttacaaaggccttatattttgctctttgagggtggttttggtttgatgcctgttggttgccatcttttaactagggatgttttatcaaaatgcccagccaaagtgtccaaacaaattataccttaaagtttgaaaatgtctggcacttctaattcaatgcctgttgtgccaggcactgggctgctgaggaactgagtcccgtccctgcaggctagctagagaacacacacacacacacacacacacacacacacagagtggtcttacaagtcagttttatattctacctatatgcaataaaggtattattatgttgaggtgccttgatataaaaatttttcttaaaggagaggatgcctaaaacaggcattacctgaaacctcctctctccagcattggttgtcttctgtcatgactcagggttttcactgagaatgggatggaaatgtggtctaaagatagggccaatgttgggactgga

SEQ ID NO: 73524 - DNA, 747 bp, Homo sapiens
ccctccagaaagttctacatgttcatatcaggagatgaggaggtcttcagtgaattcaagtgcaatggtatatctggattttcctgccccagttatttttgccttgatttccaaaggctaatgttattcagggagtctccatcccatcgtcatgagatcagtggagagttcaggtggacattcagggacccaagatcttggtttcctggacccaaatatttctgtgactaacttgctggatgtttaccgagtttgtgttttagactaatgctctctccccgttattccctacagtctaatcagcctgccgtgtaagtctgtgtgaaaactgtaacaaaggtgtgaaatgattcatagtacgcataagccatgccttcagtctgaccgcaccctaagctagactctgcaccgtctacagcacgccaccctcctygtcccctctcatcacccacctcgttccatgctgtgtgtgcgcattcccgtcgacagagccgtcctgtttacctattgtgttttacaggccgagacagcggctaacaggatatgtaaggttcttgctgtgaatcaagagaatgagaggctgatggaagaatatgagaggctagcgagtgaggtaaaggaaactggtgacctgcagttctgtccatcctcacgcaggggctgaggcacagagggtgaaaaaatactccgtgggggcatatatatatatatatatattttgcatttttcatctcagataggatgaaa

SEQ ID NO: 73525 - DNA, 1012 bp, Homo sapiens
aagttaagtcgtttttttccccctccattaggaatatggacgattaatgaagtaaagctagccracatcattacagacaactagggaagggcaaagaaaataacttagaaatctaggctaatgaatgtttatgctctcctgaattattgtttaaagatatgtatttaaataattgcgtaagaaatacctgtttattgtagaatatttaggaaatattacattttaaaattagaagtttttaaatattaaaaaagtcacaacctggagaaaacaagtgtgtacattttgccgagtgcctactagctcactttatgctatagtctagaagcatctatttatgtattttatactctaatatgctatggtctgaaatggctccagatgtaaagactttattacccattttcctgaataccagtcagcaggagccctggggaagaactcttggtggaggaaatcccagcttgattccctccggtgtggagttggcaggaacattggaagtgcccagcttctctgtttttattgcatatgttaatcagagttttccccatatgtaggggaaagctatagctgtacctgactgtgggctgttccttacttagaattgttctctggtctgggacagcaatgcagagaatatggtgtattacagagagctgtttcattctaaatgaatgcttgcatctctgtgtgtaggcagccatttatttgggtccctgaaaatagtagcagtatggtgaacttaaattaaagaatatttattttgctgtctgtgtagtacaagctgcttccccagttgccggatgggttgagaggagaatcatcagtgtgcttttcttttagcttgaattcatccctaagaagagaatgaggaaagtacaataaatgctgctgctgctgcctaaaactgagcaacagttgggtctgccctgtcacagagccacatcttgcacgtaattacccaggctccaagggaacaagttattttgagaagcatagctcaggatca

SEQ ID NO: 73526 - DNA, 1034 bp, Homo sapiens
tttcctgacaaaaaatatattttttcctatataaatggttaatgataataacatttgcatgtcagattcaaatttactttatattggttgtttagattcaagaacccttggagtcttacgatgaagtcatttcagattacattaaaaaaatccataattataacatttgccacattgcactagacaattaatttgttacaggaggcacatggtaataattttaaacaataactatgttgtaaatgagtatgcaatgcaatacaatacaaccaaaagtaaattgaacttctatccsttccagaactaaggactccttacatagagcaatcctataagtttcttatatatatcatccagcaaaattctgtatatttaaaacatagtaactggatcttgtttaagatctcttggcattatcacctacttttagctgggcatgttggctcacacctgtaatcccagcattttgggaggctgaggcaggcagatcacatgaggtcaggagtttgagaccagtctggccaacatggtgaaacccatctctacaaaatacaaaattagctggaagtggtggcaggcacctgtaatcccagctactcaagaggctgaggcaggagaatcacttgaacctgggaagcagatgttgcagtgagccaagatcacgccactgcactccagcctgggcaacagagtaagactctgtctcaaaaaaaaaaaaaaaaaaaaaaaaatcacgtgattttgagctaacttgatttagaaacactaaagtgaaataataagttctaagtgcaaatttaatcaattgctctcaaacgttataccctaaatattaaaataatgtaagtaatacacaataaatagaatttctaaatgttgaaatgatacaagtctatgataacatagtatattagatgtttacttcttactgaaaaactattattccctgacatgagtgttctctcagcatacatggctgagactcgttgagcatttaatgaaacatggtgtatgtgtgttcaggtcgtgaacac

SEQ ID NO: 73527 - DNA, 736 bp, Homo sapiens
ccctttctgcccaggagcctgtctgcctcctgctgccatctacatgtcatccagggcacccagactgttcatgtctacgggtgcctgcaggcccaccctgagctgccttcggcatctccagcagcctccctcccatgctagtcagcacccaaagtctggagggggctgaggcagcagggggctggcatatcagtgctgccctgagtgtgcgcgcaaccggccaggtcgccamagcgcctgagctcatcctcaactttgatctgaaatcagagcaggtgctgggagcagaggaacccaggtaatggaagcagggaacctgcgggatacgggtggcttcccaggaccccaagggtgcagaggtgcccaggtttgtagccttggctatgcaactgcagctgcaccagggagtgaggggctcccattccaccaactaggtaggaggcggggctcctgccagctcccagcccccagtagcccaggtatgccagggtctggaaccacagctgggcagctatagctgtgcggggaaacacggggctccggcccagaggacctggaagtgggagaggcccccactggctccgcggagcacgcagcccctctgtaccgcccccatattagccgacatcttctcagtggccatcccggacgggctgccgctgccatgattattaacattcataatttgtaatctttcagtatatactacagttgaagatctaagaaaatacaaaga

SEQ ID NO: 73528 - DNA, 736 bp, Homo sapiens
ccctttctgcccaggagcctgtctgcctcctgctgccatctacatgtcatccagggcacccagactgttcatgtctacgggtgcctgcaggcccaccctgagctgccttcggcatctccagcagcctccctcccatgctagtcagcacccaaagtctggagggggctgaggcagcagggggctggcatatcagtgctgccctgagtgtgcgcgcaaccggccaggtcgccaaagcgcctgagctcatcctcaactttgatctgaaatcagagcaggtgctgggagcagaggaacccaggtaatggaagcagggaacctgcgggatacgggtggcttcccaggaccccaagggtgcagaggtgcccaggtttgtagccttggctatgcaactgcagctgcaccagggagtgaggggctmccattccaccaactaggtaggaggcggggctcctgccagctcccagcccccagtagcccaggtatgccagggtctggaaccacagctgggcagctatagctgtgcggggaaacacggggctccggcccagaggacctggaagtgggagaggcccccactggctccgcggagcacgcagcccctctgtaccgcccccatattagccgacatcttctcagtggccatcccggacgggctgccgctgccatgattattaacattcataatttgtaatctttcagtatatactacagttgaagatctaagaaaatacaaaga

SEQ ID NO: 73529 - DNA, 1786 bp, Homo sapiens
ataaagctgaaggcctggggatggtgactgaagaaggaacacgtaagtaactaatgaatgtgaaggccattctcttcctgattaaaatctttttttttttttttttttttttycccatacagagtttcgctcttgttgctcaggctggactgcagtggcgcgatctcacctcactgcaacctctgtctcctgggttcaagcacttctcctgcctcatcctcccgagtagatgggattacaggctcccaccaccacagccagctaattttttgtatttttagtagaggcagcatttcatcatgttggccaggctggtcttgaactcctgacctcaggtgatccaccccaccttagcctcccatagtgctggaattacaggcgtgagccaccgcacctggccatttaaaatcttaattacctatttctggtcagagctcatgtctttgcttagtatgcaaggacttgctctgtttcagtaaaatgcttccatcggtagctttaataaagctatcatctaggatggatgtgttcacatagccagttttaactaaagacagtttatcatgatgtttacagttttcttactttctattcttctgtttttctctcattaccagtcattgttcgggaacgtggtaagtttcagtttctggcctgagttcctaccgtgtgtgaatcctaggagatctcatttaattgcctcagcacagaaacattttaggcttggtagttgcatgttgagttgaactcagcagtttggtacttaattaaagaagtgtcttccatctgtaaagcatgggttatggaccgtgagccatttactctccttatccagttgtcttcattacaaatgcatttattgggcattgtgccttgcagcccagctcagtttaattgggcttttcaccattcatccaaagttccttttccaaaccattctgacacaactcctttatcatctgtgtagtcatttacattagaaagtattctctggtgagaagccaaaccaatgctcatcaacgttctgtgttttcaaggtgaaaaagtactccagaatgacgagttcacgcgtgatctctttagattcctacagttactttgtgagggacataacagtggtgagtggaacagattgatctgccaaggaaacacagcactcgggcaaaactagaattccgttcagtatgccccatttgatgcaactagttgttaactcaaggacatcagttaatgcgttcctcaataagaaactatgtaaatatcatggctagtgatatttagtgccaccaaggctaagctgcttccagaatcttcagatgagaaatctaaatacccagccctttccatctagccccttggggctcgttaagtccagtttctggtgtccgcaggttgggggggtgctcagagcagagctctgccctgcaggatctgccatgacccaaacatggtatttcttgtaagccttttcacatagaatgtcttatctgagctcagctgagagggcatgcttggccccctcggcatggcagggacaagctctgacccagcactggtgctctcagactttcagaacttcctgcggactcagatgggcaacaccaccaccgtgaatgtcatcatcagcactgtggactaccttctgcgtctgcaggtgagtgggagggccttggacaatgggacctctcacctttgcttccagaagataaacacagttacacagggtcagggacagcccaggatacagtcaagcccctataaggaaggcgttgtaacgtgtatccac

SEQ ID NO: 73530 - DNA, 1786 bp, Homo sapiens
ataaagctgaaggcctggggatggtgactgaagaaggaacacgtaagtaactaatgaatgtgaaggccattctcttcctgattaaaatctttttttttttttttttttttttccccatacagagtttcgctcttgttgctcaggctggactgcagtggcgcgatctcacctcactgcaacctctgtctcctgggttcaagcacttctcctgcctcatcctcccgagtagatgggattacaggctcccaccaccacagccagctaattttttgtatttttagtagaggcagcatttcatcatgttggccaggctggtcttgaactcctgacctcaggtgatccaccccaccttagcctcccatagtgctggaattacaggcgtgagccaccgcacctggccatttaaaatcttaattacctatttctggtcagagctcatgtctttgcttagtatgcaaggacttgctctgtttcagtaaaatgcttccatcggtagctttaataaagctatcatctaggatggatgtgttcasatagccagttttaactaaagacagtttatcatgatgtttacagttttcttactttctattcttctgtttttctctcattaccagtcattgttcgggaacgtggtaagtttcagtttctggcctgagttcctaccgtgtgtgaatcctaggagatctcatttaattgcctcagcacagaaacattttaggcttggtagttgcatgttgagttgaactcagcagtttggtacttaattaaagaagtgtcttccatctgtaaagcatgggttatggaccgtgagccatttactctccttatccagttgtcttcattacaaatgcatttattgggcattgtgccttgcagcccagctcagtttaattgggcttttcaccattcatccaaagttccttttccaaaccattctgacacaactcctttatcatctgtgtagtcatttacattagaaagtattctctggtgagaagccaaaccaatgctcatcaacgttctgtgttttcaaggtgaaaaagtactccagaatgacgagttcacgcgtgatctctttagattcctacagttactttgtgagggacataacagtggtgagtggaacagattgatctgccaaggaaacacagcactcgggcaaaactagaattccgttcagtatgccccatttgatgcaactagttgttaactcaaggacatcagttaatgcgttcctcaataagaaactatgtaaatatcatggctagtgatatttagtgccaccaaggctaagctgcttccagaatcttcagatgagaaatctaaatacccagccctttccatctagccccttggggctcgttaagtccagtttctggtgtccgcaggttgggggggtgctcagagcagagctctgccctgcaggatctgccatgacccaaacatggtatttcttgtaagccttttcacatagaatgtcttatctgagctcagctgagagggcatgcttggccccctcggcatggcagggacaagctctgacccagcactggtgctctcagactttcagaacttcctgcggactcagatgggcaacaccaccaccgtgaatgtcatcatcagcactgtggactaccttctgcgtctgcaggtgagtgggagggccttggacaatgggacctctcacctttgcttccagaagataaacacagttacacagggtcagggacagcccaggatacagtcaagcccctataaggaaggcgttgtaacgtgtatccac

SEQ ID NO: 73531 - DNA, 1786 bp, Homo sapiens
ataaagctgaaggcctggggatggtgactgaagaaggaacacgtaagtaactaatgaatgtgaaggccattctcttcctgattaaaatctttttttttttttttttttttttccccatacagagtttcgctcttgttgctcaggctggactgcagtggcgcgatctcacctcactgcaacctctgtctcctgggttcaagcacttctcctgcctcatcctcccgagtagatgggattacaggctcccaccaccacagccagctaattttttgtatttttagtagaggcagcatttcatcatgttggccaggctggtcttgaactcctgacctcaggtgatccaccccaccttagcctcccatagtgctggaattacaggcgtgagccaccgcacctggccatttaaaatcttaattacctatttctggtcagagctcatgtctttgcttagtatgcaaggacttgctctgtttcagtaaaatgcttccatcggtagctttaataaagctatcatctaggatggatgtgttcacatagccagttttaactaaagacagtttrtcatgatgtttacagttttcttactttctattcttctgtttttctctcattaccagtcattgttcgggaacgtggtaagtttcagtttctggcctgagttcctaccgtgtgtgaatcctaggagatctcatttaattgcctcagcacagaaacattttaggcttggtagttgcatgttgagttgaactcagcagtttggtacttaattaaagaagtgtcttccatctgtaaagcatgggttatggaccgtgagccatttactctccttatccagttgtcttcattacaaatgcatttattgggcattgtgccttgcagcccagctcagtttaattgggcttttcaccattcatccaaagttccttttccaaaccattctgacacaactcctttatcatctgtgtagtcatttacattagaaagtattctctggtgagaagccaaaccaatgctcatcaacgttctgtgttttcaaggtgaaaaagtactccagaatgacgagttcacgcgtgatctctttagattcctacagttactttgtgagggacataacagtggtgagtggaacagattgatctgccaaggaaacacagcactcgggcaaaactagaattccgttcagtatgccccatttgatgcaactagttgttaactcaaggacatcagttaatgcgttcctcaataagaaactatgtaaatatcatggctagtgatatttagtgccaccaaggctaagctgcttccagaatcttcagatgagaaatctaaatacccagccctttccatctagccccttggggctcgttaagtccagtttctggtgtccgcaggttgggggggtgctcagagcagagctctgccctgcaggatctgccatgacccaaacatggtatttcttgtaagccttttcacatagaatgtcttatctgagctcagctgagagggcatgcttggccccctcggcatggcagggacaagctctgacccagcactggtgctctcagactttcagaacttcctgcggactcagatgggcaacaccaccaccgtgaatgtcatcatcagcactgtggactaccttctgcgtctgcaggtgagtgggagggccttggacaatgggacctctcacctttgcttccagaagataaacacagttacacagggtcagggacagcccaggatacagtcaagcccctataaggaaggcgttgtaacgtgtatccac

SEQ ID NO: 73532 - DNA, 562 bp, Homo sapiens
tgaagagaactgctgactctatgaaaactaagatgcatattttgtaaasacctgcaattgcaggcttccaaatacgtaatttttgaattaggtatgggtgagaaaactgtcaaagataagggaggaaatttgaaaaatatctagggtactacataatccatcacacaaacagaaccaatgacaaaaaccacatgattatctcaatagagggagaaaaggccttcaataaaatttaacatccttcatgctaaaaactctcaataaactaggtattgatggaacatctctcaaaataataagagctatttatgacaaacccacagccaatatcaaataaggtatcaaatgacagctatttatgataaacccacagccaatgggcagaaacgggaagcattccctttgaaaacaggcacaagacaaggatgccctctctcaccactcctattcaacatattattggacgttctggccagggcaatcaggcaagagaaagaaataaagggtattcaattaggaaaagaggaagtcaaattgtctctgtttgcagatgacatgattg

SEQ ID NO: 73533 - DNA, 562 bp, Homo sapiens
tgaagagaactgctgactctatgaaaactaagatgcatattttgtaaagacctgcaattgcaggcttccaaatacgtaatttttgaattaggtatgggtgagamaactgtcaaagataagggaggaaatttgaaaaatatctagggtactacataatccatcacacaaacagaaccaatgacaaaaaccacatgattatctcaatagagggagaaaaggccttcaataaaatttaacatccttcatgctaaaaactctcaataaactaggtattgatggaacatctctcaaaataataagagctatttatgacaaacccacagccaatatcaaataaggtatcaaatgacagctatttatgataaacccacagccaatgggcagaaacgggaagcattccctttgaaaacaggcacaagacaaggatgccctctctcaccactcctattcaacatattattggacgttctggccagggcaatcaggcaagagaaagaaataaagggtattcaattaggaaaagaggaagtcaaattgtctctgtttgcagatgacatgattg

SEQ ID NO: 73534 - DNA, 543 bp, Homo sapiens
cccttctctacaaaaataaattttaaaaattagccaaatgtggtggtgtatacttacagtcccagctactcaggaggctgaggcagggggattgcttgagcccaggaattcaaggctgcagtgagctatgatttcaccactgcacttctggctgggcaacagagcragaccctgtctcaaagcaaaaagaaaaagaaactagaactagcctaagtttgtgggaggaggtcatcatcgtctttagccgtgaatggttattatagaggacagaaattgacattagcccaaaaagcttgtggtctttgctggaactctacttaatcttgagcaaatgtggacaccactcaatgggagaggagagaagtaagctgtttgatgtataggggaaaactagaggcctggaactgaatatgcatcccatgacagggagaataggagattcggagttaagaaggagaggaggtcagtactgctgttcagagattttttttatgtaactcttgagaagcaaaactacttttgttctgtttggtaatatacttc

SEQ ID NO: 73535 - DNA, 543 bp, Homo sapiens
cccttctctacaaaaataaattttaaaaattagccaaatgtggtggtgtatacttacagtcccagctactcaggaggctgaggcagggggattgcttgagcccaggaattcaaggctgcagtgagctatgatttcaccactgcacttctggctgggcaacagagcgagaccctgtctcaaagcaaaaagaaaaagaaactagaactagcctaagtttgtgggaggaggtcatcatcgtctttagccgtgaatggttattatagaggacagaaattgacattagcccaaaaagcttgtggtctttgctggaactctacttaatcttgagcaaatgtggacaccactcaatgggagaggagagaagtaagctgtttgatgtataggggaaaamtagaggcctggaactgaatatgcatcccatgacagggagaataggagattcggagttaagaaggagaggaggtcagtactgctgttcagagattttttttatgtaactcttgagaagcaaaactacttttgttctgtttggtaatatacttc

SEQ ID NO: 73536 - DNA, 1172 bp, Homo sapiens
tcatttattcaagtcaacatcttcttgagtccctactatctgccaggcattgtgccaaggtcagcacttacaggcacataaataatggatacaaagtgattgctgctacaagggagaaactttaaaaaaaaaaaaagctatttatgcagagaaggagcaataggatggaaagctgggggaatcagggaaaggtcaagagggaaggagacatttggctggttctttacggatgtctgccaattgcagagaggacaagggcagagatgatggaaggaggaagggtcagaagacatatagtatcttagaggaacagccagttgagggggtagcatgtgggcggagcaggtgataatgttggagaaacaggtctgcccacgaccaccagcacttagactaaggcttaatgaccttcaacaggaaagtgtgaagttgtgaaacaggagagtgaaactgtgtgaccggcatcctggaatacaaagaacagcatacagattgaagaagccaacgaggagcscaggcaataattcaagcaagagaagataagcacctaaactgaagcagcaccagtgagcaaaggacaaactccagaaacaagtcagagatgactgataggatgtagacagcgacaaagagagggtccaaaatgttggacctgaatgactggctggctggtgatgctttaactgggatggagaagacatgagaacaagcactgggaaaagtcaatggctcggttttgagagagtctgaactatttgtagaacaccagagtatagatgttccacagccagttggcaaaacacaggtctagagcccaagagctgggggcggggtgggagatccatgtttgagagtatctagataagtttgccagtgagataagtgccatctaccaagcacttactacatgccaggtattgtgctaagcactttgctacatcccttatacatatattttcccttcacattgaccctgcgaggaaatatttttcccattttacagatgtggaaaccaaggttcagaggaatatgcccacagttgcagggctgctcagtgacagaacaagggtttgaattcagtgatgacgctaaatcctgggctctacagcatcccaaaaggtaaggtgagctctaagagttatttggcagatgaggaaatgggagggatcgtg

SEQ ID NO: 73537 - DNA, 1026 bp, Homo sapiens
tttgcaatgcattgtatctttccaacacagggcctggcacatagtagatgctcaagaaatatttcttgactaaatgaaggagaagacaagggcatctcaaagacttctgaaatcacctcctagttctagcctatggtcattcagccactgcttaataactttcatctttctgcatcrtggttgacaagataaagcagtccaaagaggtagcaaagcatagtctccatagctttaaaaatcaacatgaccgacccgcttttccctaatatatacttaaaatgattgcaaaatatattacttctggtttccaaccttaggcctgtcccctagcactggagtgattgaaggtacttggaattggcctgctgacaggtatttagatatacacattgccagagatatgcttctgagtccccaagtccccactgtccctctaacaaaacacaggaaattaaaggccttaactgagaatgtaaactcaatctctgaaataaattgcacaccaagcacatccccacacaacccccaaaaggtcatgttctgaaaagcccaactttgctcaggtcaggaaagaaacatgataactcatggtatttttttaaaaagtcagtttttttctctttgtatttgtcacagctgctaataactttttactatgtttagcttccacctatcatttggggaatattttgtggaacccatttaaacttacaaatagggtcttcctaccttctgtgagtccacagattacccaactggaacatgcctaggacattgaaaccggtctgtgggattgccatgtctcattaaagcttggcaagaaactaaaaagctgtttaacttttcagctgcccagaaacacaacctgattaacatgagtagacgtttagtagtttatgaaacaaggttctaaccagcttttaaatctactaatcttctctcatggctgtgcccacgagtcccagaaaagcagccacttagctcttagctcacatctcctggtcccagaccctcagccagttttca

SEQ ID NO: 73538 - DNA, 1026 bp, Homo sapiens
tttgcaatgcattgtatctttccaacacagggcctggcacatagtagatgctcaagaaatatttcttgactaaatgaaggagaagacaagggcatctcaaagacttctgaaatcacctcctagttctagcctatggtcattcagccactgcttaataactttcatctttctgcatcatggttgacaagataaagcagtccaaagaggtagcaaagcatagtctccatagctttaaaaatcaacatgacckacccgcttttccctaatatatacttaaaatgattgcaaaatatattacttctggtttccaaccttaggcctgtcccctagcactggagtgattgaaggtacttggaattggcctgctgacaggtatttagatatacacattgccagagatatgcttctgagtccccaagtccccactgtccctctaacaaaacacaggaaattaaaggccttaactgagaatgtaaactcaatctctgaaataaattgcacaccaagcacatccccacacaacccccaaaaggtcatgttctgaaaagcccaactttgctcaggtcaggaaagaaacatgataactcatggtatttttttaaaaagtcagtttttttctctttgtatttgtcacagctgctaataactttttactatgtttagcttccacctatcatttggggaatattttgtggaacccatttaaacttacaaatagggtcttcctaccttctgtgagtccacagattacccaactggaacatgcctaggacattgaaaccggtctgtgggattgccatgtctcattaaagcttggcaagaaactaaaaagctgtttaacttttcagctgcccagaaacacaacctgattaacatgagtagacgtttagtagtttatgaaacaaggttctaaccagcttttaaatctactaatcttctctcatggctgtgcccacgagtcccagaaaagcagccacttagctcttagctcacatctcctggtcccagaccctcagccagttttca

SEQ ID NO: 73539 - DNA, 1026 bp, Homo sapiens
tttgcaatgcattgtatctttccaacacagggcctggcacatagtagatgctcaagaaatatttcttgactaaatgaaggagaagacaagggcatctcaaagacttctgaaatcacctcctagttctagcctatggtcattcagccactgcttaataactttcatctttctgcatcatggttgacaagataaagcagtccaaagaggtagcaaagcatagtctccatagctttaaaaatcaacatgaccgacccgcttttccctaatatatacttaaaatgattgcaaaatatattacttctggtttccaaccttaggcctgtcccctagcactggagtgattgaaggtacttggaattggcctgctgacaggtatttagatatacacattgccagagatakgcttctgagtccccaagtccccactgtccctctaacaaaacacaggaaattaaaggccttaactgagaatgtaaactcaatctctgaaataaattgcacaccaagcacatccccacacaacccccaaaaggtcatgttctgaaaagcccaactttgctcaggtcaggaaagaaacatgataactcatggtatttttttaaaaagtcagtttttttctctttgtatttgtcacagctgctaataactttttactatgtttagcttccacctatcatttggggaatattttgtggaacccatttaaacttacaaatagggtcttcctaccttctgtgagtccacagattacccaactggaacatgcctaggacattgaaaccggtctgtgggattgccatgtctcattaaagcttggcaagaaactaaaaagctgtttaacttttcagctgcccagaaacacaacctgattaacatgagtagacgtttagtagtttatgaaacaaggttctaaccagcttttaaatctactaatcttctctcatggctgtgcccacgagtcccagaaaagcagccacttagctcttagctcacatctcctggtcccagaccctcagccagttttca

SEQ ID NO: 73540 - DNA, 1026 bp, Homo sapiens
tttgcaatgcattgtatctttccaacacagggcctggcacatagtagatgctcaagaaatatttcttgactaaatgaaggagaagacaagggcatctcaaagacttctgaaatcacctcctagttctagcctatggtcattcagccactgcttaataactttcatctttctgcatcatggttgacaagataaagcagtccaaagaggtagcaaagcatagtctccatagctttaaaaatcaacatgaccgacccgcttttccctaatatatacttaaaatgattgcaaaatatattacttctggtttccaaccttaggcctgtcccctagcactggagtgattgaaggtacttggaattggcctgctgacaggtatttagatatacacattgccagagatatgcttctgagtccccaagtccccactgtccctctaacaaaacacaggaaattaaaggccttaactgagaatgtaaactcaatctctgaaataaattgcacaccaagcacatccccacacaacccccaaaaggtcatgttctgaaaagcccaactttgctcakgtcaggaaagaaacatgataactcatggtatttttttaaaaagtcagtttttttctctttgtatttgtcacagctgctaataactttttactatgtttagcttccacctatcatttggggaatattttgtggaacccatttaaacttacaaatagggtcttcctaccttctgtgagtccacagattacccaactggaacatgcctaggacattgaaaccggtctgtgggattgccatgtctcattaaagcttggcaagaaactaaaaagctgtttaacttttcagctgcccagaaacacaacctgattaacatgagtagacgtttagtagtttatgaaacaaggttctaaccagcttttaaatctactaatcttctctcatggctgtgcccacgagtcccagaaaagcagccacttagctcttagctcacatctcctggtcccagaccctcagccagttttca

SEQ ID NO: 73541 - DNA, 1026 bp, Homo sapiens
tttgcaatgcattgtatctttccaacacagggcctggcacatagtagatgctcaagaaatatttcttgactaaatgaaggagaagacaagggcatctcaaagacttctgaaatcacctcctagttctagcctatggtcattcagccactgcttaataactttcatctttctgcatcatggttgacaagataaagcagtccaaagaggtagcaaagcatagtctccatagctttaaaaatcaacatgaccgacccgcttttccctaatatatacttaaaatgattgcaaaatatattacttctggtttccaaccttaggcctgtcccctagcactggagtgattgaaggtacttggaattggcctgctgacaggtatttagatatacacattgccagagatatgcttctgagtccccaagtccccactgtccctctaacaaaacacaggaaattaaaggccttaactgagaatgtaaactcaatctctgaaataaattgcacaccaagcacatccccacacaacccccaaaaggtcatgttctgaaaagcccaactttgctcaggtcaggaaagaaacatgataactcatggtatttttttaaaaagtcagtttttttctctttgtatttgtcacagctgctaataactttttactatgtttagcttccacctatcatttggggaatattttgtggaacccatttaaacttacaaatagggtcttcctaccttctgtgagtccacagattacccaactggaacatgcctaggacaytgaaaccggtctgtgggattgccatgtctcattaaagcttggcaagaaactaaaaagctgtttaacttttcagctgcccagaaacacaacctgattaacatgagtagacgtttagtagtttatgaaacaaggttctaaccagcttttaaatctactaatcttctctcatggctgtgcccacgagtcccagaaaagcagccacttagctcttagctcacatctcctggtcccagaccctcagccagttttca

SEQ ID NO: 73542 - DNA, 1026 bp, Homo sapiens
tttgcaatgcattgtatctttccaacacagggcctggcacatagtagatgctcaagaaatatttcttgactaaatgaaggagaagacaagggcatctcaaagacttctgaaatcacctcctagttctagcctatggtcattcagccactgcttaataactttcatctttctgcatcatggttgacaagataaagcagtccaaagaggtagcaaagcatagtctccatagctttaaaaatcaacatgaccgacccgcttttccctaatatatacttaaaatgattgcaaaatatattacttctggtttccaaccttaggcctgtcccctagcactggagtgattgaaggtacttggaattggcctgctgacaggtatttagatatacacattgccagagatatgcttctgagtccccaagtccccactgtccctctaacaaaacacaggaaattaaaggccttaactgagaatgtaaactcaatctctgaaataaattgcacaccaagcacatccccacacaacccccaaaaggtcatgttctgaaaagcccaactttgctcaggtcaggaaagaaacatgataactcatggtatttttttaaaaagtcagtttttttctctttgtatttgtcacagctgctaataactttttactatgtttagcttccacctatcatttggggaatattttgtggaacccatttaaacttacaaatagggtcttcctaccttctgtgagtccacagattacccaactggaacatgcctaggacattgaaaccggtctgtgggattgccatgtctcattaaagcttggcaagaaactaaaaagctgtttaacttttcagctgcccagaaacacaacctgattaacatgagtagacgtttagtagtttatgaaacaaggttctaaccagcttttaaatctactaatcttctctcatggctgtgcccacgagtcccagaaaagcagccacttagctcttagctcacatcwcctggtcccagaccctcagccagttttca

SEQ ID NO: 73543 - DNA, 730 bp, Homo sapiens
atgtatctatagcttcttgtagtggacatacattaaggtgacccctagtgagtcatatatttgtataatcctttctgctgctggagtgtgggcaggacctctgatttgtttgcttttttttctttttttttttttctgacctccttttaaccaacagaatacagcaaaggtgatgggatgtcactcccaggattaggttacattatataaggcttcctcttagcagactgactagagacaccacttgctggctctggagaagtgagcttccgtgttctgagggcctttagagagacccacatggcaaggaactgctggtgcccaccaggagttgagatggtccctggacaccatccagcaataacacagggacctcagttctatctgtcagcaractggaagtggatctgtcccagtagatcccagatgagaacacagcctcagctaacaccgtgattgctgttagtgagactgagaagcacagaatctagttaagtgtaccaagactcccaacccaaggaaactgtgatgtaataaatgtgtgttgttttacgctattaagtttttggtaatttgttacacatcaagcaaaaaccaagcccctttctccccaaattcttgtattatcatgaaatacttgattgacttaaataaatatccactagtttgtcattcacaagaggcactgagtcattcctggttggttatttttggttttgcttacagatag

SEQ ID NO: 73544 - DNA, 862 bp, Homo sapiens
ctggaaagacaattgatgggaattctgatacaagagtttgctctcctcagttcaatatttcagtagctgaaatggagtggagaacatagtccaagctattttttttcactaattggtcactgaattaatgttgttgttaaacaggagcactataaagacatcattctaattatattaaagctaaaatgaattttataaaacttgattctagcagaggtagacaaacaaggcatttaaagagctagccaaatattcttatctacagatcaaacatgtcaaatgctttttgattcttctgtgaggaaatgcattttcgtgaaacaactgctttttccaaagactccattccttcttttttttttttgtttgcattgattgcatttgcatttattttacctacaaacagctcctgggcccaggaggtcggcccacatcaaggttctataacctggtgtgtgtgtgtgtgtgtgtgtgtgcatgtgtgctggcaataacatacctcagcactaccaaggggcctgtgggaactaggtctattgtgcttgtgatatactaataccataatacgtagaatcactactkttagactgtaggcaaagtgcactatgagctgggataacagggcctgactccagtgctcagttgagcttaaatagagggaccctctagaccttgggggaaacaggcatccagctttccagtatacagcagagatagacagttccaggaacagcaggcccccacatggctttaggaatgttaaaggactgtgcccttgatatggccatctgggctatagccatcagcaagtgccaggagcagtggccgcagtgagatggctcacacagcaccctagacagca

SEQ ID NO: 73545 - DNA, 734 bp, Homo sapiens
aaatgtaataaataatttacttacatgtaataaaccccacaatatagtgttattacatttattttaaattagataatagccttttaaatatatatgtatgtttagttgaaatatatattgaatatgtattaaaattttatatatatatatatatatatatatatatatatatatatatattctgctttggttttgcctatcttctagtctgttggttgatgtcttttgtatcttggcaaattcttggctattgtgtttaaaaatattaattttttcccattctttgtctcttctccttctgtgcctccaattgttcatctgttacaccatttgatactgtcctccaaatcttgacactttcatttttttcatttatttaaaagaaattttgtgtgtaatttctgttgacccctctttaatttcactttttttctgctgtatttagtcttttgatatgccttcagatgagttcacttttcaatttgaaaattrtacttttcatttctaacattttcatttgcttttttaatagttttatttctcttctgaaattatttgtctatgctttgcattatatacaatatacagaacatttctgtctctttagaaaccctccttccgctcctttgtagttgatcctgtccaccagcactgggcctcaggcaactgttgatctgctttctgtcacctactgtttgtgtctgctatgatttcatataaatttagattcatgc

SEQ ID NO: 73546 - DNA, 1056 bp, Homo sapiens
tgcattgcgaaataatctgttcataatactcagttattctgtggcagagctcttcccaaaatatattttttattcatttgaaaaggtatgttatgcaatttgctgtcttcatagcaaaatgaaaaaaaaattaagtactagaaaataatttgctctattaatctctctaacctcttacctccagaaatcattagaagagagagaaattgtaagctttggcagcttgtggtggatttctgaggcgacctgattttcttgcaaattttgctttgtggtgagctggcaggaaggtggaagaatattttcatattcacaaatatgtcctaggtgacataaagctctgaggactcttctggcttctattgtctgacaagtcatcttagaagttcattgcttaaccgttttttactgtaagactatgtgctttccacactagaacaaccaatgtcaaataacaattatcagtgaaacaggcatccgtattacttctacttggtattacctaggcaatcatttttctcattaagagactcttttgcccctctaggggtagttggattgggtgttaacagaaaaataatttgcaaacttgactcccaattttattatcaatgactcctaatatgaaactgaaatatgggtaccctaacctccactcatcataacctcagtctatttatcatcttatttttactcatatatcttacctgataaaggaatccattagctgcaagattcctatcctgaaaattagcagtgataactttactctttttaggtgctcatatttgtataaaaagcatagatattaaacatatatgtaagacacaatttaaatgtattgatgtcttatacacacacacataccyacatttatattccacccaatcaataaattgcattccagttgatcaataaattacaagaaaaagtcattattataaactatagcacagaattctaatgggtgaagaaggagcagcatgtttagtggaaacccaaaggttatatgtacatatctatagttgccaggccgccactacctcttgtattcag

SEQ ID NO: 73547 - DNA, 989 bp, Homo sapiens
gttgatattacttataatattcattttataaaactcatattgcaaagcaacatattaaatgctattaaaatgctgcaagaaaagtataaaaaatcataaacacacttctctagctgatttgattgtaatttttatttccatattttgttttaagtctcagaggactctctttggaggtcttccttctcctatggaattctctttggaaaactttcacagagtaatcaaatttttatttttacaccaaggaaggactaagaaaggcaatattaagcccagaaattttgtatgtatgtgcaagagtaggtgcatgtgtgtatgctacccgctcatcaaaaagttatttataagatcttttttccttaccacccacatgtcttcagcaagtccccaactccgccttgacagtaaaactatttgatttacagagaaatctcctacttcttccattaccaccctgattaaagctattattatttcctagatttttttaaaaagccacctaactcatcccaatgtcttttcactctccgaaaagcggctagaacatgaaaggagaagaaccatcagatttttctgtttaaaactttctaatagtttccagttacatttagaatgaaatttatactttgcacaatggtcaacaagactctctaagacctgaaacctgaacccaccatctctctggtattacctcctgtccgtctccctctcatttaagatacaaactgacctttgtgtcattactcaaacttgcaagtttttttttgtttttttttccatctcagatattgtacttgttattccctctgcctggaacattsttctttcaatatttacacggttagttactttcttctaaatacttaactgtctattcaaaatatttttaaatatattttaaaataatattaacacagaaaatgtgttgtgttcatatataccaggtggtatgcttaaatataacttattttatttaatcttcacaa

SEQ ID NO: 73548 - DNA, 590 bp, Homo sapiens
ctgttttaggattcagccaaattcagtgtcatgagttattataaaaacagtcttaaagaaaagtgctcaaatggtattgtcaaatttaagagtataaaataaaaatatctcggctgaaatgaatgtaaatgtatatggactttaaaattaaaaaaacaattaaaaggcttgcttatagtatacattctaggaactaaactgcaaaactcgtttgattgactatgtctgtggcttcaaagcagatagaccaagagaaggaaaagagaactatcaaattgcaaataactgccaactttacagcagtgtctatgagaggttctttcttaattaccaccgcctgtcctgacattgggtgtacaaattactcaatatgttaaaccactcctscctttcagctaaatagatatgaaacacatagaaatggaaacaaaggcagactttgaacttttgatacttcatgtgaacctccattttaaatatacatttctcagctgttagttctcacttcagtttcagaacaatgtttttgacctaaccttcctaccaaatcctgttatatgaagcaagtaagtgtattccccctcgggatc

SEQ ID NO: 73549 - DNA, 583 bp, Homo sapiens
atcaaatgtgactgaggaaacacctgaaggttaggaacatcatccagtggcaggcactgaaaataaggagaatgaagtggaagaggtaaaagaggagggtctgaaagagatgactttagatgagtggaaggctattcaaaataaggactgggcaaaagtaaaatttaatatctgaaaaccaaatgaaggtgctgatgggcagtggaagaagggatttgttcttcataaatcaaaaagtgaagcggctcatgctgaagaatcggttatggaccatcayttccagaagccagcagatgatataacatctcagctggagatcaattttggagaccttggccgcccagaacatggtggcaggggaggacgaggtggacgtgggcgtgttgggcgcccaaaccgtggcagcaggaccaacaagtgcttctgctcctgatgtggatgacccagaggctctggcgtaactgatgccataagacacccctggttcctttgtgaactcttctgttcaaagcttttgcacgcttaaggattccaaacaactaagaaattaaaaaaaaaaactgtcattcataccattcacacc

SEQ ID NO: 73550 - DNA, 617 bp, Homo sapiens
ggaaggcctctctggccaggaagagggtggttgagtaaagcagcgttagtctgtaaatgaaagggagaaatcaataaggtctcaagttttttcatagagagaacttctgggatttttccagcaacagggaggagataaagtcttggtcataaaccactggtggtgatgtggaaggcagtgggctcttacaggaccccctaccggtctgatccatgagaactaatgagttaggaaccaaatgaaagacacctgagggtgtgtgcctacagttacgtgaaggatagaaactgctgcagtggcctcaaaaggcttcagccttcatggctacaggcagaggtgtggccatgaccayaaggaggagaagaagataagattataaccccacccttcttggtcacactgacacgagtgaccgatggcccctgtgagaaaagctgagcctctaccgagtggaggctctggccaaaagaatctcaagacaggcaacaaggctggcaaccattacagaggctgctgcaacccagatcagcaaggcgtgcctgggtacctcccaggtgggcagcacctgggtgagccttcctgcatcttagcgaggagtagctgagatctcccctcct

SEQ ID NO: 73551 - DNA, 578 bp, Homo sapiens
gttatggcgcctggctctttctatttcggtaggttttgcgctgtctgtcgcttgtgcgctgtctgtccctctcttccccgtataaacgaaatagtgtggcgagtactaagagataccgttaaagaatccaaagttccttctctgaggctttcagccaccaaccaagaagcactaactttcctggcctcatctgccaaaaggggaacaaacttctcactggccygttaagaagattctcaccattgacctttgcttacagaatcacagccacagaccctctgaattaggctggacaggaattgtcctcatttaacagagaaagaactgaggaccagaagttagatatagcactgttatgtgtatggttttgtgaaatccttccgaaagctctgagaattggcccctgtggttagagatgagtaaagccttggagatgggaagtgacttgttcgaatctacacaacttgtttcctgactaagtggataccaggctcctgatcctaaacttatcactcttgcctgtatgctagaaattgtgagggcagagtggaagaaggactggaagtgctttgtaaaaa

SEQ ID NO: 73552 - DNA, 585 bp, Homo sapiens
ctcaaaatgagctaatctggtactcagtctgatttaggaatattttcctaagagtaccttcacagtatcatcataattttggaatgtttagcaggagaagcacagagctggctagtgtatatgaaaacttgctgcacatttaagaataaatattagtggtctggtgcagtggctcatgcctgtaagcctcacgctttgggaggccaaggcaggaggattgcttgaggccaggagtttgagattagcctggtcaacatagtgagactcccttctctatttctatttaaaaaaaaaaaaaagaacaaatatcagaggggaaagtgagtgtttcctaagcaatatttgaaacaatttatcccaagtgaattgaaaactaaccctcccccttacgacctaaggagacacacactttttccttcatttgctaactgacgtgaaaacaaacacrctacaaaaaaatagtgatatccatcacgctgttggaagagtgaactgtaaaacagtgaagggagaaggccagacgtgaaggatgaaggttttcttcagctcatgattcatccaacttccttccctcttccctggccc

SEQ ID NO: 73553 - DNA, 634 bp, Homo sapiens
caaaagtcagcccccggcaaggcaacctacgtgggcttttgcagagcaggtcagatcctaacaaaacccagaattggctgtcagtctctccaggagttccgcaacctgcattctcaccgctgtccaccacatcatcatgtttaggttgacccctggctcttctcagagtatgtcatggtctttcacactagtcctgatttaagcccattctacagaaaggatcagcttttcacactttctaaggtgtcagtgatgagtcagcctgaagggtgaactcctagaagcacagcataaccttttcccagctatgaaaaaatacaaaagaagttttgtcgttacaaaaaattataaaattgttaatatttataattataaaaacaaattatataattataaaattattttttaaatacaaaaaaaaaggagcttgaaccatttggttttatatcrgggcagggctttcctgacctccctcaaacatagtctggggcaacgtttcccaaacattgacgggaggtgcagctctccttattctccacacacatacacacatatacacacacaaaagtttgagactcggggggaaatagagtgcagaatttccccaggctgtcaatatggttatctgaacttt

SEQ ID NO: 73554 - DNA, 621 bp, Homo sapiens
  misc_feature (1)...(621): n = A,T,C or G
gatccaaggatgaccaggagggaagcagtgaagagtagcangcagagcagtgcaggcaggggaaaactaacttacttgttcctgctgccamtaagcctgttttgtgtgtgtgtgtgtgttcatgtctcagtgaaaaatgttggcctcccataattatttttaaggtatgaaatctttctttagattccacagtcttcttcagtaaaaatcccctgaacttttttgatattttcctttccaagcccatgacagctcttaaacgctcctactttctagcaatctatccaagcaagcatagaatggctatgataatcattgaacccatgtcttctaagagtcatgctccccaaaccctctttgccccagtttttagtcactgccattcaaatcctctctaataagatttataacacagaatgaattttaccttggcagttcccagctccccagctcttgctccatacagttttggtgggctcatcccgaaatacagggttggggaggtggaccatatgacccaatcttggatagtcaaagcaatgcactctcctgatccactgtgattggcttgtaaaagaaccaacacaaaagacaaactgtctcaatgtggtatgaaaaaga

SEQ ID NO: 73555 - DNA, 638 bp, Homo sapiens
tgagtaaccatatggttggatctggggaagaggcagttcctaagagaggaaaatgctgttcctagaggcagaaagggtacaggacagaaaatacgacatgatgtgcactaaactatgggcatagggtgccacactgttccccaaacaaagttaatttgaatatactctaattattttcatgtctgcacacatacagtatttggaggagtagagtggcattaaagcttcaggactagtatagctccataaatatgaaggaacacaatattaatagtttaaaaaacagtatgtgctgaaacttttaaaatgtgatattatctcacaaataaatcaaacagccaacttaaatagatcatttgactagaatggtatgcttagcatccattctaaacattttaaatgtttcartgttctcatattggtgaacatttgtattagtctgttctcatgctgctaataaagatatactgggtaatttataaaggaaaggaatttaattcactcacagttccacatggcaggggaggcctcacaataatggcagaaggcaaaggaggagcaaagtcacatcttacatggcagcagacaagagagcttgtgcaggggaacttccctttaaaaccatcaagtctcatgag

SEQ ID NO: 73556 - DNA, 638 bp, Homo sapiens
tgagtaaccatatggttggatctggggaagaggcagttcctaagagaggaaaatgctgttcctagaggcagaaagggtacaggacagaaaatacgacatgatgtgcactaaactatgggcatagggtgccacactgttccccaaacaaagttaatttgaatatactctaattattttcatgtctgcacacatacagtatttggaggagtagagtggcattaaagcttcaggactagtatagctccataaatatgaaggaacacaatattaatagtttaaaaaacagtatgtgctgaaacttttaaaatgtgatattatctcacaaataaatcaaacagccaacttaaatagatcatttgactagaatggtatgcttagcatccattctaaacattttaaatgtttcagtgttytcatattggtgaacatttgtattagtctgttctcatgctgctaataaagatatactgggtaatttataaaggaaaggaatttaattcactcacagttccacatggcaggggaggcctcacaataatggcagaaggcaaaggaggagcaaagtcacatcttacatggcagcagacaagagagcttgtgcaggggaacttccctttaaaaccatcaagtctcatgag

SEQ ID NO: 73557 - DNA, 543 bp, Homo sapiens
ttgcctttttatgagagatattttctctgcatcaaggtttaggaccaaaaggaaaacatatgcagcagaagggacaaaatgtaagtgatctgaatttcagttttgagaaataggaatgataaaccttagaatgccattcccaacaccagtgtttctttgatgagcaagctaccttgtatagaatttcatacctttgtgttcttgtctttgctgtcttcttggcataraaatcctcttcccctggaagcctgacaaaaatgtcacctcctccatgaagacttcccaagccagtgccatacttgcgtcctttgacatgtccttacaacgtgtccctcaagtcttctgaaacctctgcatagtttaatcattagtttatattgctgtctcctccagtgcagtaaacatttctgtttttctactgtgcctcgcacaatgcctggctcaaagtagtagccaaaaaatgtgtattgacttttcaaattgtgatcttaataggtaggacatgaaccttcacaattacaagcactcttctctatatcgggt

SEQ ID NO: 73558 - DNA, 666 bp, Homo sapiens
aaaccaaagtcttgtctcccacccttaattagctttttggaaccatcccacatcactttttctgtatgtttccatgttcgcgactatacaatggccattgtaacagcttaaaatttaggggcacaggctccagagctactctgcaggggtttgaaacttagcgcctccaatcatgggcaatgtgacttcaaacaagttgctttaatctttctgtgccttagctttctcatctgtaaagyggaaatgggattagaacatattttataggatcattgtgaggattaagtgagttcatacatgttcaatgttagctgtgtgcctggcacatggtaagagttcaatacatgggacctattatccttggaaaggttggaaaaaggatgcattaaaataagtggaacacatagagttctgaacagagagatccatgttcctttgtcttctttagcgtaggtctatgctacattatttcacagataacttacgatgttcatagtgctgtgctacgcatccaagctcggcaattttaagacaattcctaccctacagggatttagagctaggtcagtaggaaagatggcacacttaaagctgatcagttgcaatccagggcggtgtatgggatcaagtgcctacacaaggataaagggtatacatggtgtagga

SEQ ID NO: 73559 - DNA, 666 bp, Homo sapiens
aaaccaaagtcttgtctcccacccttaattagctttttggaaccatcccacatcactttttctgtatgtttccatgttcgcgactatacaatggccattgtaacagcttaaaatttaggggcacaggctccagagctactctgcaggggtttgaaacttagcgcctccaatcatgggcaatgtgacttcaaacaagttgctttaatctttctgtgccttagctttctcatctgtaaagtggaaatgggattagaacatattttataggatcattgtgaggattaagtgagttcatacatgttcaatgttagctgtgtgcctggcacatggtaagagttcaatacatgggacctattatccttggaaaggttggaaaaaggatgcattaaaataagtggaacacatagagttctgaacagagagatccatgttcctttgtcttctttagcgtaggtctatgctacattatttcacagataacttacgatgttcatagtgctgtgctacgcatccaagctcggcaattttaagacaattcctaccctacagggatttagagctaggtcagtaggaaagatggcacacttaaagctgatcagttgyaatccagggcggtgtatgggatcaagtgcctacacaaggataaagggtatacatggtgtagga

SEQ ID NO: 73560 - DNA, 666 bp, Homo sapiens
agtaggaaaggaaattaccttgtcttaattcactgggcttgggtctggagcccactggagagaacattaggaacccagaattagtggctgggtgcaatggctcctgcctgtaatcccagcactttgggagcccgaggcaggcagattgcctgagctctggagttcgagaccagcccaggtgacacagtgaaatctcatctctgctaaaacacaaaaaattagcccagcgtggtggcatgcgcctgtgttcccagctacttgggaggctgaggcaggagaaatgcttgaacccgggaggtggaggttacagtgaaccaagactgcgccactgcactccagcctgggtgacagagcaagactccatctcttaaaaaaacaaaaacaaaaacaaaaaaacacctaaaattagtgaagtatcacaccaaaaccggcctctttctgcccacctttattctcattagcmaaaagagactgtcctctagaatgtgacccatccagaccctcctcccaggagaggagggaatggaagggaaggaccttgctgacatataacttggagcccaagggaaagttgcacctgagaaaccctggacagcaagagaacattgctctgtagcaagggcaggctgcaagttgggagaaacgcagcaatggtgccctaagcaa

SEQ ID NO: 73561 - DNA, 664 bp, Homo sapiens
ttcagtttgtgaggtgggagcctgttggcaggacccttttttttttttttcctgagagatttcttttaataaattctgctctcctcacctttcaatgtgtccacatgcctaatttttcctggtcatgacacaagaacccaggttttagctgaactaacgagttaaaaaaaaaaatccatcatcatcgcttgaagttcttaagtggtaaatgaaatgataaaataaaaacttaatcatttgcaaaataatagaaaacaaatgtaaagctttttggttttactggaataacaaaaaatcctggtacaaatayaatgaaaagtaggaaatcgttcatttttcatctaataaattctgaatcttgcttcaggttttctcaatttttgttctagatcaagtatcttttgggtccaggaagaaataaattttttctactccattctcctcagaataaaacacagtcttcttttaaagacagtgaaaaaagcagcaacagtcagcctttcagaaactgagggtgccacttttcccaagagacgtagagtattttagaggggactctgggtctcatctgctgtgatcccactttccaggtctgtatacagatgaggcaaagggcacagcactgtgttgcagaactaatagagtccaccggatcattttgcaa

SEQ ID NO: 73562 - DNA, 906 bp, Homo sapiens
cctcctgcctcagcctccctggtagctgggtctacaggtatgtgccgcaagcccagctaattttttattttttgtagagatggagtgttgctatgttgcccaagctggtcttgaactcttgacctcaagcaatcctccttccttggcctcccaaagcactgagaatatttacttattcaagtcttagtttaaatgtcaccttcccrtgtggctgattctcatcatcctaattaaaattaggaatttccatcatgcaccattcccactatcctggcctatgttttctatagcacttgctgtcttccgatataccatttacttcttcattattttttcatccaatgtatgatctcctgttagaaaatatgctccatgggcaggattttttctttttctttttgtctttcattcattgatgtctccaagcacctagaatagttcctgccacaaataggcactcaatacttatttgtttgatgaatgaacagatgaatgggcaaatgaaaacagcacatcaaaaatatttggtagaaatatgtacacatttctgacattctacagtcagaatattaaaaataatatttagttttttccaatttcagggtagtaaagtgaatgaatgattttttaaaggtatacttaaatttgttgttatctttcttcaatggcctcatgttttaaaattaaatatgaccgcgtgcaagctcaaaatgagttcctgggattttggaaattttccagcattccaaggtgctgatttatagttaccacgtgaacgacctcatgaatagacctttcattacacagtcctcagaatagcaaactcccagctgccccttcttactgggccatgacttaactctggaatgtgttttgactcactgactgtaatagtgactaaaagga

SEQ ID NO: 73563 - DNA, 818 bp, Homo sapiens
cgagcctctagcctgagcctctcaagtaactggtactataggtgtagaccaccatgtctggctaaatttttaaatttttttgtagagatggggtcttgctatgttgcccaggcctatgttacacctggaactcttgacacagtcctgagacctgatgtgtcttaatttgctccactcagaggtgacggtccaggctggaagaatgagatatacgatatactggcttgatgaaagtttggttggtgaattgtctttctaaaatgttgcaaggcatgacctgggataaaataaggctggaccaaggaaaaccaagtggttcagtctggacttgcccaggaagcccatctcaggtctgagtcagtgtgaactgagaggtcagatacactctaggggtgacctgagcgtgtgtctccataaagattagtttaccaggtcctgggtcagcttggaaatatatggatggagctttctcagaattgagccccaaagtatgttaaaatgtcccagcctaggcaatcccggcactttgggaggctgatgtgggcagatcacgaggtcaggagatcgagaccatcttggccaccatggtgaaaccccatgtctactaaaaatacagaaaattagctggggcgtggtggcacacacctgcagtcccagctactcgggaggctgaggcatgagaatcacttgaacctgggaggtggaggttgcatgagccgaggttgcgccattgcactccagcctgggccacagggcgagactccrtcttaaaaaaaagtcccagactcccttctgcttctctagattagaccaagaat

SEQ ID NO: 73564 - DNA, 766 bp, Homo sapiens
gaaggcctctgaggaagatgctatgagctttcttcatgtgctgggtggcccttccccagatcttgtattcagtcatttttcatcaattaaaagacaaaatggttgtggtgaaaaacagactattttgctttctgaggagcaaacaaaagcctccaattttaaaattcaattaaaatcaatgaaaaaatgrcattctatactatgagcttgaaaatataaaatgaatagcttaaaaaaccaccataattagttatcttaccagtctaagacttagacttagacctgagtcacttacaaaggaataccaatggatggggtgtgaatatgtatacagattatgtatattatatttgatagacagatcaggagagagaaagaggaaaagtagggtgttgcagacggcacaaatgaaaagactctagattttcccttcggggagtgcagacagcatgctccaagctgttgagtggctctgctcagcagtgagaaaacccaaaggcatcgtgcctcccagaatacccctcggctggccagaaatagagagttaatgaacagggacagacgctaccaacaaaagaagaaatgctttatttattattcactaatctccagggtccctgtgctattcagaattaacatgctctctggaataatggtttaacacctcctggtttgacagagctgtgcttatccaagcacgtgcagcatttcttttcctgagagccaggatggagcataaaatggagcccctgactcttccagcctt

SEQ ID NO: 73565 - DNA, 766 bp, Homo sapiens
gaaggcctctgaggaagatgctatgagctttcttcatgtgctgggtggcccttccccagatcttgtattcagtcatttttcatcaattaaaagacaaaatggttgtggtgaaaaacagactattttgctttctgaggagcaaacaaaagcctccaattttaaaattcaattaaaatcaatgaaaaaatgacattctatactatgagcttgaaaatataaaatgaatagcttaaaaaaccaccataattagttatcttaccagtctaagacttagacttagacctgagtcacttacaaaggaataccaatggatggggtgtgaatatgtatacagattatgtatattatrtttgatagacagatcaggagagagaaagaggaaaagtagggtgttgcagacggcacaaatgaaaagactctagattttcccttcggggagtgcagacagcatgctccaagctgttgagtggctctgctcagcagtgagaaaacccaaaggcatcgtgcctcccagaatacccctcggctggccagaaatagagagttaatgaacagggacagacgctaccaacaaaagaagaaatgctttatttattattcactaatctccagggtccctgtgctattcagaattaacatgctctctggaataatggtttaacacctcctggtttgacagagctgtgcttatccaagcacgtgcagcatttcttttcctgagagccaggatggagcataaaatggagcccctgactcttccagcctt

SEQ ID NO: 73566 - DNA, 728 bp, Homo sapiens
aaactcaccgcatcttcctccagccttctcagctacgattcaacaaatatcctttattaatttagtccgagttgagggtttttgagtgtgtgtgtgtgtgtcacttgcagcataaatggtgtgtccctactgaaacgctgcattacagttaaaacattcctatggcaaacagaaacccttcatgatttcagaagataaaacttgtaaactattcttgctatctcatttggatgtagacgtctaaaatgttgaaaaatttcaaagctttgggtacttacatatgacctcccttgatgtacaaacccagagtggaatcatctgttaaaytgaatttccagaaaggggttccatctatcaattaggaaatggccttttttttttttgcactttaccaatttattgtaattgagtgcttggtgcatagcaagtgctcatggaatgtttaagaagtggagttttctggttatacttgaatttctgattaattgaaagttaattagaaactctccccccaccacctaccatttcctctctttagaaaatctttgtaaaatgtatgagtgcactctttccttagtaattacagtatagtgagcataattgcatttttgatgattaagaattttacagtgcctgagggttgccagtcagactataaattctcattgtaggatattttacatggagaagttgcaggaaattgggctaaatatggattgatcctggga

SEQ ID NO: 73567 - DNA, 616 bp, Homo sapiens
tgggtgcagcctcagactgtggggtggtgcattgcattccaaggtgcacacacaggctgctctgaagggttcagagcaggtcaacacacctcggggctctgggagagacgaggcaggctgataagggacgggaccacagctttgccatctacacaacagtcctggggcccaaacaatccagcttgctcccctcraccactcagaacaaacgccctaagtgctgaccccactcacccggcgctgtgctaggtgctgggggtgggaaaaataacaggcagagtacctgcctttgagaagttcagaatcaaaggaactaaaggcaaagatcttcaactcccaagtgaggcctcctcctgatggagccaggcacagggaacagggttcctggggagggaaggaggggtgaagggagggaggacaggccaaatgagatgagtttgaggtgggtcaggagcagctcaggatggtctttcttgtttgcctgctgcacgcgtagggacatatggagcccctgcaggccatggctctcagctctgccagacctcctgggggccggctggtgcagagccattttgcagcaaggaaggagaggaatgacgtcaaggagaagcctgga

SEQ ID NO: 73568 - DNA, 1158 bp, Homo sapiens
ggaccccaggcaggctgggggtggggcgggggctttgtagaacttgggctcacagcccagacaagggagcctggattctccactgctcctggatgacatcatgattaattttcttgtctgttcatcaaggccactcagtaataacctcccggcctttcatccttccctaggctkagtagaattttgtgctagagtagcggcctgctcaatggcagacaggagctggggcaggggtcagggtggggccaatgccatggcaggggcgggggagcggagtccacctggcacaaccaagaatctgcagggtttatggttgaagagtgaagtttgcaagatcctcaggagcccatgaacaaggaggcggaggaagagaccatccaagacaaaagacaaaggctgacactgcagcagctgactttctgggtctctcctgaaatgctccccctgcctgccgccacctccaaggcaatggtgggagctggcggcgtgagggaggcacggggttcagcatctgggatcctccctctccggctctcaggatccctgttaggctgagctgctcatgcctgactccgtggtgtgtaacatgccacgtgccaataaacgtcctcaaagcggccagctacatgtgctctcttgctatttattccatctaaggaccatgactgaggaaagtgggccttcacgagaggggcctgggctgcccaagctcacactctgcggtaaggtggttccccgctaagttggtggggccacccaggctggcgcctctcccaaccccaacgcaccgaagagtcagcatcctcagaccgcaggtggtcggcaatgtagtgcacaccttccagtgccttctgcatgtggggtgatagcagcagctcaccctcctgcagcagagcctcagccttgggacctgaggccccagagtgcaggtggccgtggctgcagagggtgcccacagagggggccacatgacctgcacatgcccatctgtcctcctcctccaccaccacctccctctcctcggcatccacgttgctctccagccagtgataagaggggctgagcttcaggcgtagggggtggcagagctccacgggtggtgggggccggttcatcagaagccaccggggcacacagcccagaagggccccccgcacc

SEQ ID NO: 73569 - DNA, 1158 bp, Homo sapiens
ggaccccaggcaggctgggggtggggcgggggctttgtagaacttgggctcacagcccagacaagggagcctggattctccactgctcctggatgacatcatgattaattttcttgtctgttcatcaaggccactcagtaataacctcccggcctttcatccttccctaggcttagwagaattttgtgctagagtagcggcctgctcaatggcagacaggagctggggcaggggtcagggtggggccaatgccatggcaggggcgggggagcggagtccacctggcacaaccaagaatctgcagggtttatggttgaagagtgaagtttgcaagatcctcaggagcccatgaacaaggaggcggaggaagagaccatccaagacaaaagacaaaggctgacactgcagcagctgactttctgggtctctcctgaaatgctccccctgcctgccgccacctccaaggcaatggtgggagctggcggcgtgagggaggcacggggttcagcatctgggatcctccctctccggctctcaggatccctgttaggctgagctgctcatgcctgactccgtggtgtgtaacatgccacgtgccaataaacgtcctcaaagcggccagctacatgtgctctcttgctatttattccatctaaggaccatgactgaggaaagtgggccttcacgagaggggcctgggctgcccaagctcacactctgcggtaaggtggttccccgctaagttggtggggccacccaggctggcgcctctcccaaccccaacgcaccgaagagtcagcatcctcagaccgcaggtggtcggcaatgtagtgcacaccttccagtgccttctgcatgtggggtgatagcagcagctcaccctcctgcagcagagcctcagccttgggacctgaggccccagagtgcaggtggccgtggctgcagagggtgcccacagagggggccacatgacctgcacatgcccatctgtcctcctcctccaccaccacctccctctcctcggcatccacgttgctctccagccagtgataagaggggctgagcttcaggcgtagggggtggcagagctccacgggtggtgggggccggttcatcagaagccaccggggcacacagcccagaagggccccccgcacc

SEQ ID NO: 73570 - DNA, 1903 bp, Homo sapiens
catggagtagttccatggtagagatatgggcaggctggaaataggaactttgaaagggagtaacaaatacattgagacaaaagttaaaaaaaatttttttttgaggcggaatctcactctgttatcgggctggagtgcaggggtgtgatctcggctcactacaacctctgcctcccaggttcaagcaattctcctgcctcagcctcccaagtagctgggactacaggtgccaccaccacacccggctaatttttgtatttttagtagagacagggtttcaccatgttggccaggatggtctcaatctcttgacctcctgatccgccggcctcggcctcccagagtactgggattacaggtgtgagccaccgcgcccaggcaaaaacaaaaaatttttaagcattttgtttatcacaaacaatgaccactagatggcaacatgtgctcacttgggggaaggaaccttgcaaactctaagatgccttcctcttaaccttgagtggggtatctgggtggaggggatccatctctaaatgtaagcaagacttcggcttggaattttgtcccccaccaacatttcttgtaataaatcaggtaacaccggctgaagtcttattggataattgtcaaactcgaagtcatatttgatgtaggactttgctcctgacctctgccacatgtacaggaagtggaaactagaaggaccctgggtgccagctatggggcacagagatacgacagggtggggagttcatgagtcctgcagcagctgcaaacactaggcacctgctgtgtgagagcggccagtgtaagaacccaggatgaacacgtgttccccaaaatggcttaggtgcaagggcgtagttctgaccagaactggacggtgtaaaaaaaaaaatctgacccatctgaagacacaaaatccagaaatgggttgtttttccttttatttctttctttaaagatagcatttccaaagtaggatcaaatgaattgggaaatgctgggctaggtgggtgtctttgctgcagaacttcaaataacattttttaaaatgctattgtgctctgccattttccaaaggacttgggtggggatgggggtgggtgttgtgacatacaatgttatccaaaattacttgaccacagaaccctttttcatacctatttataactcaaagaagccatgctccttacagccccaccttagaaaacctttttagatgaacataacaccaaatatcttttcattttaacttctttacttctaagggaagaattgtctgataccaaacacagaaatgaaattatagatgtctatttattccatcaaaatattttttattgatttatttttgtcccctggggctctctttagactcctctgccttctattaacttcttgtcattgtggtcaaagattactcctttttagtcttgaagacaactacaaaacaacatgattgggaaaaaggaaactgcataccaagtgagcacatgccmtttgaaggtgctggcccgatgctgcctgcctgtctgaacaacactgccacccctcacaacttcaaccccaaggtattgttttttgagcctgcaccaaatttttcaaagaatactcagtatggacaaatctctgtccctctagcacagtgccaggcactgatacctaaaaggtgctcagctgccattcattttggtgtagagtgagaacaaaaggaaagaaatgaaggaatagagagagaggtaggggaggcatgctcagcacagcagtcgagaaggaggcgaggaagctgacaccaggggggcccctcccaaggccatggacccggcccctgcaagttggcctcccctcatccccccaggaccccaatggcttcctacttgttgtagagaacaatgtcggg

SEQ ID NO: 73571 - DNA, 1005 bp, Homo sapiens
tgcatttccttggattaattccttttccagttgagtctctaataacatgtttctgatcttaaaagcccaggagaaaaataattcccttcaaagggaaaaaagaatcacgtgcaataataagtataaaatgccaggaaattcaacaacaaagtgcctaccaaaaagagccaggaaataaacattatccagggagagactggtgacccccctgagaggaggccaaggcactgaatatgatacaagaggggttgtagggcagatggcatgggagttcccaggaggatgggctaaactgcaaagacaaggctatggcttggaaacctcaaagtgagaaagctcttaaatacccgaaggtgacttccctgcctacttggtgggaggagggctgtgagtccataataaactggtgttttaatttacaaaatgaaatatttatcattgtgcattttgtgcgatattccttgcacccctgagtttgagaactgaaaaccagaagagagactcacagtgattttaaaatagaaatcgatctatatgaaaatagttgcattttccaatatgggaagaacaactatctttacattaataaagggtaggatagaactaaattgctttaagactgaaaattctcaaatatgggttagaagcaaagcaggtactgggtgcagctgttggactttcttccaggattttcagatgttttatttgtttagcatgaacaaattctgccgaggaaataggttcactcagtgttttctaaccccagactcaggcagcataatggactaaaaaggcctctgagatgcagaaaagagacctgggctcaatgagaagctctgactgaagggcmtgtgtccagacactggggccacatttccccatcagcacatgagaagtttggattaattcactctcaagcaactgtaccttgaggcaggccgagggtaggggtcacaccagtgcaaggaaaatgttatcactggcattgtttaaaattacctatgc

SEQ ID NO: 73572 - DNA, 2005 bp, Homo sapiens
aatgtgagaggctgaaggggaaaagaacctatgtctaaatgtagtatgccatatttgtcccttgcagagcctggaattcccacctgggaacaaagaggcctttgttgacatgaccttttcacagagcatcaaagaaccatgccactggagcagtcctggggaaaatggggcagacctaaaagggaagaggcagttctcttggattgattgatttaaaaagctaaaccttccaaatatgccagcctagaggaacctctgagctaggtatgtctaaaagatataattagagtcttcactttacacaagtttctcttgctcataaataggaagttcagtgccagaaaatattataccactgcatgagttaggaatgtatttagcagcaaataatagaaaatttgactgagtggtttaagccatgtgatatatatttttacttaataataaatctataggcatttggattctaaatgggtacagcacctccaagtcggagctggtggatatgtctgagattttcttgccattctctttggggttgccaagtgactacttcaacactggatataaaatcttcatatgactgtgcccaagggtaggaaataggagagtgaccagggctctcggagagaggaagaagtgaacaaaacagcaagtgagagagggttcttcttgtgaccctctcatttcatctggaagaaaaatctttcctggaagctctccagcagacattatcttacatttcactggtctgaattgagccaatattacccctagatcaatcacttatggaggagatgctatccagaggctcaactgagaataaccacagttcatctcctgggacctggcacatttccacttgaacaaaactaaacatcgttagcaaagaagaaatgaggcaaaaagcagtgtttgctataactttagaggcaaggtcaatagttagctggtgcatgatactcgtgcatagttttggacttggcaatgcattcccttactctttgttaactattttgaaaattatacctaaataaaagaactttggggattatctgtcccaaattcttacatgcccttccccctacccaaaaaatatatctatatcattgcactgatatcagttatgttatgtgcagtatcctactgtagaaaaacaaataccctctaagttgtgtggagatcaggactgggtcttcccctatcatttccccagcgccttttattgtgtttggcacacaaaagacactttaaaaatgttttctgcttgaattaatgggatgaaacttcatattatagatgagcaaacataggcccatcgaagggaaatggtaagtttaaagtctttctgctagttacgcccagaaccaaaaccacaagttagttcttctgatttgtgatttgatttttattttcccattttcacatggtacttatccaaaaaaaggacatatacagattttttaaatgtacccaaaaaatcaacttctcagaaaaaaactatgaagctggagacctaggaagcggttctctcacctatgattgcataggaagctggcgagataatggaagatgtgatcttgaagacataaatgcccataggaagtggaagctgcagataggacttatttcaggactsgaaagaaatcgttttcttctagcaagaactctgtccctcgattctatctgagcccaactgctctgcaggaagacttgagctacactttctgactagcctctctactgtctgagttgaccatcctatttaatatttttaaatgacttcctgaaacatgtgaactatctatcagttctcctaattcagggggtggtgatgagggatgaaaaggactccacatagtcctgcgtcatttccaaactgtcacctactggcagaatggcatttatgagaccacagatgattagcatttttaatgtgccattgtgacagtcacagagtcaacaaaacataggggtctagacatgggtaatgtctaggttaaaa

SEQ ID NO: 73573 - DNA, 963 bp, Homo sapiens
ttggaattatattcataatgcaaaaaatagaaaacataaaaataactgtatcatacttaccaagatgaataatagatccctttaatttttgtacattaaacaaacagcaaatcctagataacaaatacatcgatggttacggtacaccatttcatacttgtgctatttttgttttgggaggttttttgttttgttttgtttcttttttttttttttagtcagggtctcattctgtccctcaggctagagtgtggtggcacaatcatagctcattgcagcctcaacctcctggactaaaggaatcctccttcctctgtctcccaagtagctaggactacaggcatgcaccaccgtgcccagctaattttttatttctttgtggagaggaggtgtcagtatgttgcccaggctggccacaaactcctggcctcaagggatcctactgccttsgccccccaaagcactggaattatgggaatgagccaccatgcccatccagattcctatcttaaattttcatggcaaatcactcatggtccttgctcaatgaggccttagctaggatgacttaaatagctgggatctggaataaactcaggccttctttcttcacatatctgttacgtaggctagcattacttgaagacttaaaatatctgcacatggcatctccatgtggctggagcatctcttaggggagtttatgggttctgagagggaggcccctaattgaatctggtggaaactgcttgactttttatgacttaatggcatagaatcacttccgccattctcaattgactgaagcaaacgtaacttcatacatctgatcccctgggagaagtggaattattagacattagtaaacaaagaacagttttctcagtttcgaggttataagccttatgtatttcaggggtatctctaacttttatgattgttaatcctggaataaacatgacc

SEQ ID NO: 73574 - DNA, 963 bp, Homo sapiens
ttggaattatattcataatgcaaaaaatagaaaacataaaaataactgtatcatacttaccaagatgaataatagatccctttaatttttgtacattaaacaaacagcaaatcctagataacaaatacatcgatggttacggtacaccatttcatacttgtgctatttttgttttgggaggttttttgttttgttttgtttcttttttttttttttagtcagggtctcattctgtccctcaggctagagtgtggtggcacaatcatagctcattgcagcctcaacctcctggactaaaggaatcctccttcctctgtctcccaagtagctaggactacaggcatgcaccaccgtgcccagctaattttttatttctttgtggagaggaggtgtcagtatgttgcccaggctggccacaaactcctggcctcaagggatcctactgccttggccccccaaagcactggaattatgggaatgagccaccatgcccatccagattcctatcttaaattttcatggcaaatcactcatggtccttgctcaatgaggccttagctaggatgacttaaatagctgggatctggaataaactcaggccttctttcttcacatatctgttacgtaggctagcattacttgaagacttaaaatatctgcacatggcatctccatgtggctggagcatctcttaggggagtttatgggttctgagagggaggcccctaattgaatctggtggaaactgcttgactttttatgacttaatggcatagaatcacttcygccattctcaattgactgaagcaaacgtaacttcatacatctgatcccctgggagaagtggaattattagacattagtaaacaaagaacagttttctcagtttcgaggttataagccttatgtatttcaggggtatctctaacttttatgattgttaatcctggaataaacatgacc

SEQ ID NO: 73575 - DNA, 697 bp, Homo sapiens
ggtgaggtgtgcttcacagttccccgggcttcttcctgaagtgcactgaggtttctgagcccctcttcaaggcagctcctttgctatcaaaggtgcacctgttgctggccatccagcctctgggctagagctctggaagagctgccatgtcaaagccacccaccgtgaaaccagttccctcgttcccagcattacgcttcytccagtgacagacttaatgcttccccacttgcttttttgaaaaataactaaataaacccaagggagagttcaacagttttaaggaggatgccagaataccaagaagaaaggattcattcctaaaatagaaattctgaagcactaggagtacatgctacagaccccagttgtagaacccagggtgtaagccatttttctatgatgaagtttgagtttgttttgcttttggtttagtttggtttactgttttcctagtgagttctgactccatagggtttttgtttgtttgtttgtttgttttctgtaggacaggggttctgctgacactgttttgtttgaagggagatggggacagctgagactctggtaagcagttcttatgcacaaaagttaacagagttgtcccatagcaactggctcctgctgccagggttggctgggcctgcagagtagtgactgcaggactccaggccccctgcttctgtttccaaatggg

SEQ ID NO: 73576 - DNA, 697 bp, Homo sapiens
ggtgaggtgtgcttcacagttccccgggcttcttcctgaagtgcactgaggtttctgagcccctcttcaaggcagctcctttgctatcaaaggtgcacctgttgctggccatccagcctctgggctagagctctggaagagctgccatgtcaaagccacccaccgtgaaaccagttccctcgttcccagcattacgcttcctccagtgacagacttaatgcttccccacttgcttttttgaaaaataactaaataaacccaagggagagttcaacagttttaaggaggatgccagaataccaagaagaaaggattcattcctaaaatagaaattctgaagcactaggagtacatgctacagaccccagttgtagaacccagggtgtaagccatttttctatgatgaagtttgagtttgttttgcttttggtttagtttggtttactgttttcctagtgagttctgactccatagggtttttgtttgtttgtttgtttgttttctgtaggacaggggttctgctgacactgttttgtttgaagggagrtggggacagctgagactctggtaagcagttcttatgcacaaaagttaacagagttgtcccatagcaactggctcctgctgccagggttggctgggcctgcagagtagtgactgcaggactccaggccccctgcttctgtttccaaatggg

SEQ ID NO: 73577 - DNA, 565 bp, Homo sapiens
taacctgtgaattttgacatccttggccaatgaccatgtggaatagtgtcctggtaggcagtcattgtcttcaacagccactgtattcagcacaagagcctgaaattgaaagacttcacaaccttttcaaagaaagcccacttacctgtttgctgccccatctgaagataaacgaaatgctttcatgctaagaggtggcacatgcctccttgcacccaactcaccattgcctgtgctaggtcacctgcaggaaggtaggtaaagacctgtgatcacagcctcaccctcttcttttcttctaattcatggactctatatttagtgataggatttccaaactagccttggacatcatctgaaattgagtatggagacttcctcctctgattataccacacccccgccccccgcaaagattgacagtgattgtctctgggagctgagactatggttgatctgtacttttatttctttgtatttctctggatatcccaaatttcccaataagaagggtagactctttttgtaattaaacaaaactattaayttttaaaagaagggtggg

SEQ ID NO: 73578 - DNA, 520 bp, Homo sapiens
tacaacattcaagattcatgcaccggtcttccaactggaccagagattaattttcattagttaatttcattcttgcctagatattctgttgcttctcttactgttagtacacaactaggtcaaccagtatcccagaaggactgaggtggtgagaggcaaagtgcaaagtgaggtggacagcaacaggagcagtcattagagtatgtgtaaaaagcagaagttgcagaggctgggtcagcagaattcatgtcatgagtacttaaaatcctaaaccttgtttgatctcatgcggtacataaaagatrttaaaaattaaaccaacattcttcccattgcctgtttttatgaaacactggatctaaaaaggtttctgaatgcagaaagctgccgtctggcattggatttgctgtttagtgtgcttttatttatgaaacatagtgatcatgtttcatttgctgtatattggcaagtgctcttggaactggcagaatattatcctttattaatttgcagattgaga

SEQ ID NO: 73579 - DNA, 503 bp, Homo sapiens
atttattccctttagaaaacttaagtttgtggattcatatccaaatattgccctttactgatctagctttttctgctgtaagttctaggaaccttttaattcagagaggggwaaagaaaagagctagcatacactcaatagcttttatgttttggatgcttcataaatatcacctcatttggacccttacaagagctttgggaggcagggagctttagacacattttacacctgagtaacttgatcaggacattttgaaaaaaaggtttttgattatctgtttttcaacttgagagagtcgtgagataactaaactacaaatgaaaaatacgtaggtaagtctctttgtaaggtcatattcgtaaaggttgcaaaagagaccaaacaatgtattccaattgagaagtccaggtagagtatttggttcatttgtgctgctataacagaataccatagactgggtaatttataaagaatagatctttatttctcacagttctgga

SEQ ID NO: 73580 - DNA, 503 bp, Homo sapiens
atttattccctttagaaaacttaagtttgtggattcatatccaaatattgccctttactgatctagctttttctgctgtaagttctaggaaccttttaattcagagaggggtaaagaaaagagctagcatacactcaatagcttttatgttttggatgcttcataaatatcacctcatttggacccttacaagagctttgggaggcagggagctttagacacattttacacctgagtaacttgatcaggacattttgaaaaaaaggtttttgattatctgtttttcaacttgagagagtcgtgagataactaaactacaaatgaaaaatacgtaggtaagtctctttgtaaggtcatattcgtaaaggttgcaaaagagaccaaacaatgtattccaattgagaagtccaggtagagtatttggttcatttgtgctgctrtaacagaataccatagactgggtaatttataaagaatagatctttatttctcacagttctgga

SEQ ID NO: 73581 - DNA, 734 bp, Homo sapiens
atcctgttccagctgggatggaaaaagtgcattggtcatgctgtcaaaagcatatcacatttctccactgctatttccttccttcttaactaaaaacaaaacaaaacaccatagacaacaaatagacacacacacamaaaaaaagacactaggtgagagtgaaggtagtttgtactattttcatttttcgtgtgttcaatcgtatttctctcagcaaatatgattggaagtggtgcttttccttccttccccaccttccagcattaggtttgtaggtgaacataaaaatacactgacactcaaagaaagagctctttctgctctgcacacatcccatctcgccctcttccttgctcctgcttatttctctctctttctgcctccttacctccttcagtttagagcttagagaagtttttcactcttcttttgacaggtgtcagatagacagtatgagctcatttaagctgaactgtctgggggaaactaaatttgttcaggagaatagcaatttggatgacaagtgccaggacataccagatggcacggctggagaaattcttatcgggctcccagctcacgttccaggcggcctctctgtctctctcctctattcttatttgttcatggttgacccagatggaaacttgaaatgcaaatgtatttcttcttggaagtttccaagtaaaaaaggtgatagtgactcagcataagatgcttacatgcccccaaaa

SEQ ID NO: 73582 - DNA, 734 bp, Homo sapiens
atcctgttccagctgggatggaaaaagtgcattggtcatgctgtcaaaagcatatcacatttctccactgctatttccttccttcttaactaaaaacaaaacaaaacaccatagacaacaaatagacacacacacaaaaaaaaagacactaggtgagagtgaaggtagtttgtactattttcatttttcgtgtgttcaatcgtatttctctcagcaaatatgattggaagtggtgcttttccttccttccccaccttccagcattaggtttgtaggtgaacataaaaatacactgacactcaaagaaagagctctttctgctctgcacacatcccatctcgccctcttccttgctcctgcttatttctctctctttctgcctccttacctccttcagtttagagcttagagaagtttttcactcttcttttgacaggtgtcagatagacagtatgagctcatttaagctgaactgtctgggggaaactaaatttgttcaggagaatagcaatttggatgacaagtgccaggacataccagatggcacggctggagaaattcttatcgggctcccagctcacgttccaggcggcctctctgtctctctcctctattcttatttgttcatggttgacccaratggaaacttgaaatgcaaatgtatttcttcttggaagtttccaagtaaaaaaggtgatagtgactcagcataagatgcttacatgcccccaaaa

SEQ ID NO: 73583 - DNA, 940 bp, Homo sapiens
ctaatgcatttggaaattataaagcactaacagatgtaaagcgtgttcttaaattacttattgaatgaatgtaggttttataatttttcctttgaacacaaagtttctaatcatgatgacattcttttttagacattgtctatttgcacacatctcaccaaaatcaggaatgattttcttctttgctaggccccagttaattgattcttgttaaaattaacaagatatgccaagcatggtggctcatacctgtaatcccaagactttgggaggctgaggcaggcggatcccttgagcccaggagctcaagaccagcctgggcaacacggtgaaaccccgtctctactaaaaatacaaaaattagctgggtgcagtggcatgcacctgtagtcccagctacttgggaggctgaggtgggaggatcacttgagcttcggaggtgaagggtacagtgagccatgattgtaccactggactccagtttgggtgatagagcgagaccctatctccaaacaaaaacaaaaagctatcaagacaaaaattttaggctgggcatggtggctcacacctgtaatcccagcactttggaagaccaaggtggaaggatagcttgagtccaggagtttgagatcgcctgggcaacatacagagaccaccatctctacaaataataatttaaaaaatacccaggcacggtacatgcctgtagtcccagctacttgggacgctgaggtgcaagaatcacttgaatctgagaggytggggctgcagagagctgtgatcacgccactgcactttagcctgggcaaaagagtgagacgttgtctcaaaaaatgaaataagtaagtaaatttcagcacacaagaaaacagcactgcattcaaaaaggattttccttcttgttcttttttctccaagacaatattaagtaatagctgtc

SEQ ID NO: 73584 - DNA, 2096 bp, Homo sapiens
atcctggaaaatggggtatagctgaatggtgcagattcattcattcatattcagcaaattatgttctaagcacctacttcagtaygtgaacagcactaaactcagaatattggtctgctggggtcctttattagcttccatgattccctgaacttggccaagacccttctggtcggctgcagataggcacaatggatagttttgcttctagataatgtaactgggacattcagcattatctatcgccttgaaattcctctagtcaggtggctttctaatgggtacccagagccctatgactacccagattgatggtgcacccaacaggactttgcatttatgagctgataagtcacagtcactagctgagattaatctgtgtgacaccagaatgtgtctctatctaaaggaaaagggatgaagggtgatatctttggtcacaagtaatgtatttccatgtagtctttgacaaaggatctaagtggattttgtaattgaagaaaaatctatgcactaatctttacagcatttccgtgagtgtacgcaagtcagctcaacaattcaacatttgctctgtggggttgtgctagaccctgtcaggggataactactgctggctggggcccagttcagggaagacttgccaaagaccatcaggaaaagagggaagctgagtcttaggtttcttcctttagagatggtgacagtcctctcaccacctccaagcatctcacaatgtttccctgcctccaagtcatcaaattcatttttgattcctacttcataaaaattacattctcccagcactttgggaggccaaggcgggcagatcatgaggtcaggagttcaagaccagcctgatcaacatggtgaaacaccgtctctactaaaaatacaaaaattagctgggcatagtggcactcacctgttatctcagttacttgggaggctaaggcaggagaatcgcttaaacccgggaggcagaggttgcagtgagccgagattgtaccactacactccagcctgggtgacagagggagactccatctcaaataaataaattaaaaaaaaaaatatatatatatatgtatatattctctatggatgctgaccattggaccctggtttcatctgcacgtaacagagtaagcttggacttgtgcttgtaaattaaagctcgacacctccttttggcttctctatacctgaatattcttactcactctccttaatgtgaatatgcatggaagcaggaccatttcctcaaacactagcagcagcgaaccctgtggaaagtcagtccacatagaataattcaaataaagtgttcagagaaatggggtttcagagcaattactttttccagacctttcacaaatcagtggtgtaggtatgaccagccttgagttgagacctctgtaatatccatctttaataacattaatatgctgtggatgagcaactgatcactggagggagtttagctgcccataggagttcatggctaatgacaatatctgaataaggacaggtgtggagcccaggtgcaggaagcaggcgaaggtctttctgtgagtctcctctgagggaactgggtctttatacatagttactgtttcagaattgatccttctggaatcatcagtcttcaccagtagcttgttacatctggggttatctcataattcaaacaaagctgacaagttgtaacaatgagcacacactgacttctgcaacaggcgctgtccacttcccatccgcactctaccggcttgctcctggccgcctcccactcgccttcctgggtggtcccccagcagttatacctacctggttgtcgccccctctatcctaccacaattgctcactagcggtttcctgcgtacacagcttgtctccctaaccagagtggaggtgccttggggacacagccaggctcagacattcactcagctcatcatagtgccatcccatcaataaccccttctgagtgatcctgggttagtaaaccgagtgtccctgaaattccactaccgctgattccctccagctgggcagaggcatcgagcgctggctgaagcttccggtgggaaatg

SEQ ID NO: 73585 - DNA, 2096 bp, Homo sapiens
atcctggaaaatggggtatagctgaatggtgcagattcattcattcatattcagcaaattatgttctaagcacctacttcagtatgtgaacagcactaaactcagaatattggtctgctggggtcctttattagcttccatgattccctgaacttggccaagacccttctggtcggctgcagataggcacaatggatagttttgcttctagataatgtaactgggacattcagcattatctatcgccttgaaattcctctagtcaggtggctttctaatgggtacccagagccctatgactacccagattgatggtgcacccaacaggactttgcatttatgagctgataagtcacagtcactagctgagattaatctgtgtgacaccagaatgtgtctctatctaaaggaaaagggatgaagggtgatatctttggtcacaagtaatgtatttccatgtagtctttgacaaaggatctaagtggattttgtaattgaagaaaaatctatgcactaatctttacagcatttccgtgagtgtacgcaagtcagctcaacaattcaacatttgctctgtggggttgtgctagaccctgtcaggggataactactgctggctggggcccagttcagggaagacttgccaaagaccatcaggaaaagagggaagctgagtcttaggtttcttcctttagagatggtgacagtcctctcaccacctccaagcatctcacaatgtttccctgcctccaagtcatcaaattcatttttgattcctacttcataaaaattacattctcccagcactttgggaggccaaggcgggcagatcatgaggtcaggagttcaagaccagcctgatcaacatggtgaaacaccgtctctactaaaaatacaaaaattagctgggcatagtggcactcacctgttatctcagttacttgggaggctaaggcaggagaatcgcttaaacccgggaggcagaggttgcagtgagccgagattgtaccactacactccagcctgggtgacagagggagactccatctcaaataaataaattaaaaaaaaaaatatatatatatatgtatatattctctatggatgctgaccattggaccctggtttcatctgcacgtaacagagtaagcttggacttgtgcttgtaaattaaagctcgacacctccttttggcttctctatacctgaatattcttactcactctccttaatgtgaatatgcatggaagcaggaccatttcctcaaacactagcagcagcgaaccctgtggaaagtcagtccacatagaataattcaaataaagtgttcagagaaatggggtttcagagcaattactttttccagacctttcacaaatcagtggtgtaggtatgaccagccttgagttgagacctctgtaatatccatctttaataacattaatatgctgtggatgagcaactgatcactggagggagtttagctgcccataggagttcatggctaatgacaatatctgaataaggacaggtgtggagcccaggtgcaggaagcaggcgaaggtctttctgtgagtctcctctgagggaactgggtctttatacatagttactgtttcagaattgatccttctggaatcatcagtcttcaccagtagcttgttacatctggggktatctcataattcaaacaaagctgacaagttgtaacaatgagcacacactgacttctgcaacaggcgctgtccacttcccatccgcactctaccggcttgctcctggccgcctcccactcgccttcctgggtggtcccccagcagttatacctacctggttgtcgccccctctatcctaccacaattgctcactagcggtttcctgcgtacacagcttgtctccctaaccagagtggaggtgccttggggacacagccaggctcagacattcactcagctcatcatagtgccatcccatcaataaccccttctgagtgatcctgggttagtaaaccgagtgtccctgaaattccactaccgctgattccctccagctgggcagaggcatcgagcgctggctgaagcttccggtgggaaatg

SEQ ID NO: 73586 - DNA, 2096 bp, Homo sapiens
atcctggaaaatggggtatagctgaatggtgcagattcattcattcatattcagcaaattatgttctaagcacctacttcagtatgtgaacagcactaaactcagaatattggtctgctggggtcctttattagcttccatgattccctgaacttggccaagacccttctggtcggctgcagataggcacaatggatagttttgcttctagataatgtaactgggacattcagcattatctatcgccttgaaattcctctagtcaggtggctttctaatgggtacccagagccctatgactacccagattgatggtgcacccaacaggactttgcatttatgagctgataagtcacagtcactagctgagattaatctgtgtgacaccagaatgtgtctctatctaaaggaaaagggatgaagggtgatatctttggtcacaagtaatgtatttccatgtagtctttgacaaaggatctaagtggattttgtaattgaagaaaaatctatgcactaatctttacagcatttccgtgagtgtacgcaagtcagctcaacaattcaacatttgctctgtggggttgtgctagaccctgtcaggggataactactgctggctggggcccagttcagggaagacttgccaaagaccatcaggaaaagagggaagctgagtcttaggtttcttcctttagagatggtgacagtcctctcaccacctccaagcatctcacaatgtttccctgcctccaagtcatcaaattcatttttgattcctacttcataaaaattacattctcccagcactttgggaggccaaggcgggcagatcatgaggtcaggagttcaagaccagcctgatcaacatggtgaaacaccgtctctactaaaaatacaaaaattagctgggcatagtggcactcacctgttatctcagttacttgggaggctaaggcaggagaatcgcttaaacccgggaggcagaggttgcagtgagccgagattgtaccactacactccagcctgggtgacagagggagactccatctcaaataaataaattaaaaaaaaaaatatatatatatatgtatatattctctatggatgctgaccattggaccctggtttcatctgcacgtaacagagtaagcttggacttgtgcttgtaaattaaagctcgacacctccttttggcttctctatacctgaatattcttactcactctccttaatgtgaatatgcatggaagcaggaccatttcctcaaacactagcagcagcgaaccctgtggaaagtcagtccacatagaataattcaaataaagtgttcagagaaatggggtttcagagcaattactttttccagacctttcacaaatcagtggtgtaggtatgaccagccttgagttgagacctctgtaatatccatctttaataacattaatatgctgtggatgagcaactgatcactggagggagtttagctgcccataggagttcatggctaatgacaatatctgaataaggacaggtgtggagcccaggtgcaggaagcaggcgaaggtctttctgtgagtctcctctgagggaactgggtctttatacatagttactgtttcagaattgatccttctggaatcatcagtcttcaccagtagcttgttacatctggggttatctcataattcaaacaaagctgacaagttgtaacaatgagcacacactgacttctgcaacaggcgctgtccacttcccatccgcactctaccggcttgctcctggccgcctcccactcgccttcctgggtggtcccccagcagttatacctacctggttgtcgccccctctatcctaccacaattgctcactagcggtttcctgcgtacacagcttgtctccctaaccagagtggaggtgccttggggacacagccaggctcagacattcactcagctcatcatagtgccatcccatcaataaccccttctgagtgatcctgggttagtaaaccgagtgtccctgaaattccactaccgctgattccctmcagctgggcagaggcatcgagcgctggctgaagcttccggtgggaaatg

SEQ ID NO: 73587 - DNA, 590 bp, Homo sapiens
cttaaaaatgtagtagcttaaaatgataaacatttagcatctcacacagttgctgtaggtcaggaacctgagagctacttagctgagtggttctggctcaggatctttcttgaggttgcagcttgggcatcacctgggactgcagtcatctgatggcttgactgagtctggaggatctgcttccaaagggactcacccacaagcctggaatgttaatgctggttgttggcagaagacctcagttccttgccatgtggactcttaatagaattgctggaatatcctcatgacatggaagctggtgttccccatggtgagtgatcgagaaagtgtgagacagaagctgcaatatattttatgtagtagtctaggaagtcacacaccatcactttcacaatttcccattaggggtgggactgtacaaagtgtggataccaggaggtgaggatcagtagagtccatcttggagctggctgccatagtctgycctgtggcctcccatgaccccacctttcccacttgcaaagtatagtaatttctcctccaggccctgagagttgctgctcataacagcatcagctctatgtcca

SEQ ID NO: 73588 - DNA, 590 bp, Homo sapiens
cttaaaaatgtagtagcttaaaatgataaacatttagcatctcacacagttgctgtaggtcaggaacctgagagctacttagctgagtggttctggctcaggatctttcttgaggttgcagcttgggcatcacctgggactgcagtcatctgatggcttgactgagtctggaggatctgcttccaaagggactcacccacaagcctggaatgttaatgctggttgttggcagaagacctcagttccttgccatgtggactcttaatagaattgctggaatatcctcatgacatggaagctggtgttccccatggtgagtgatcgagaaagtgtgagacagaagctgcaatatattttatgtagtagtctaggaagtcacacaccatcactttcacaatttcccattaggggtgggactgtacaaagtgtggataccaggaggtgaggatcagtagagtccatcttggagctggctgccatagtctgtcctgtggcctcccatgaccccacctttcccacttgcaaagtatagtaatttctcctccaggccctgagagttgctgctcataamagcatcagctctatgtcca

SEQ ID NO: 73589 - DNA, 2761 bp, Homo sapiens
aatatcagctaaattcagatgtcatttttgctacaaatgtgctgcacactggtgaaatatttgacaaaggagaagtagatgtaactatggaaatcataactttaattgacaacaacatgaaaattcagaaggataacaagcatcatggatggagaagacaattatgcaggagtaaaaaatcaaatatgagctgcagaatttaaaaaaaagagtctatttttcctctctggatatttcccactactttagaaagaagaagaagaaggatggaaagaatattcttcctgttaatgaaaataggacaaaggaacagccaggacattcctacctggtttccagatgaactgattatcctttttgccttccaaatgagctgcatgggacagcaagagagaaagcaatagaaagagcttcctcatgctcctccatacccagcaagtgactgttaggttgctctttggaaacatgcttcagatttttcagcctcttgacttgcctattcctaaaagagaaaaagaaaaatcaggtaagtttcttctgtaaagaaaagataacaactcattttgactgctagaacctttattatgatggtattgcaagtttttcattagcatgaagatagtacatataatatcaaccctgtgggaaaagctacaaaaagcaaatccacattctgtttttaccatgttttgtattattttttgtagtgaagtgtattcatgaatgaaatctaccactggatgataaaactacttatttccccaattgctttttattttatacttttggtaaaaaaagatcaatgtaacgtgataatattatcatggattctcacaggatccaaagtagttacttgattcccatagtagctctaaaaagaaaagaaacaaaagcctgaggtggttaactcatgtttatacttttggtaagaaaataagctttaatggtacacattattaaaagaaagtagtaaatatatgttatgttaaatgttaaatgtataccttttatttctctgaaataaaatcaggtaagtttcttctgtacaaaaaatcaagtaagtttcttctgtacagaaatgataaaaactgactttgactgctagaacgtttattatgatggtattgcaaattttctattgccatgaagatagtctttataatattaacatttgaaggtcagcagttaattagccaagttttcaatcctcacccactgaaggcctcatcaattctatggactccacagtctctgtgtcggtatattttattcttaaaagcagagttggcagataccttgtatattccctcccttctactcagacaaagtccatgaggagctcatgatttggagaaagagatatgcatacacaacaagtccaaagcagggcaagggatgctctaacagtagtattaagaaagtgggatggaaagactgaggacaaggcaactagttcctctgtgctgtgcaaaaaagagaggagagcctcacacaagataatatttgagaagagactagggaaacattaggacttgaaggagttgggaagggcatctcaggcagagaaaacaacaaggcgttgaaatgcgttttgtgtttggggactggtgattaggctggtggttgctgtgaaggacacaaacaagagggaggaatggactaagatgagatttaaaacataggttgggagccagattgtaaagagctgtgaatggcatatgagggatttgggcttcatgctgtaagtagtaacaagaatcatagaagagcaaatgatttttaaataactagaatcagtgtgcataatggattactagtagacaatggtagagaaattgagggcagttagaaaattagtgaaacagtagtccaggcaagtactggtgaatgaaaagatcaaggatcaggagagacttgagaagtcatagaaattgcttctggatttaaacgatctggttaacaactggatgtgctacataagaggaagatgatgaaaaaggacagaaagactgcaaacttagatgcctgaactgatgggatccctttaycaaaaacaggaaacaggaagaggggcacatttgagaacatgctttactttagaatagaatagattaagtctgatgaggctaccagatatccatgtacagttttccaaaagataataagaaaactgtagtggagtgaaggagatctaaaataacttaccgcaatatatgtattatgaaaaataaaaagatataggtactggagagtaaaaagattgaacagtaaaaaggggatctgaagggtagaagttattgcccctaaatatatacccacacaattactacaggtgggtggcaaatctgactatgagcttcctagtggccaaggaaaagaaatagcttgttataatttctgttcttttacatttgctgaggagtgcgttacttccaactatgtggtcaatgttggaataagtgtggtgtggtgctgagaagaatgtatattctgttgatttgaggtggagagttctgtagatgtctattaggtctgcttggtgcagagctgagttcaagtcctggatatccttgttaactttctgtctcgttgatctgtctaatgttgacagtggggtgttatagtttcccattattattgtgtaggagtctaagtctctttgtaggtttctaagggcttgctttatgaatctgggtgctcctatattgggtgcatataaatttagaatagttagctcttcttgttgaattgatccctttac

SEQ ID NO: 73590 - DNA, 2761 bp, Homo sapiens
aatatcagctaaattcagatgtcatttttgctacaaatgtgctgcacactggtgaaatatttgacaaaggagaagtagatgtaactatggaaatcataactttaattgacaacaacatgaaaattcagaaggataacaagcatcatggatggagaagacaattatgcaggagtaaaaaatcaaatatgagctgcagaatttaaaaaaaagagtctatttttcctctctggatatttcccactactttagaaagaagaagaagaaggatggaaagaatattcttcctgttaatgaaaataggacaaaggaacagccaggacattcctacctggtttccagatgaactgattatcctttttgccttccaaatgagctgcatgggacagcaagagagaaagcaatagaaagagcttcctcatgctcctccatacccagcaagtgactgttaggttgctctttggaaacatgcttcagatttttcagcctcttgacttgcctattcctaaaagagaaaaagaaaaatcaggtaagtttcttctgtaaagaaaagataacaactcattttgactgctagaacctttattatgatggtattgcaagtttttcattagcatgaagatagtacatataatatcaaccctgtgggaaaagctacaaaaagcaaatccacattctgtttttaccatgttttgtattattttttgtagtgaagtgtattcatgaatgaaatctaccactggatgataaaactacttatttccccaattgctttttattttatacttttggtaaaaaaagatcaatgtaacgtgataatattatcatggattctcacaggatccaaagtagttacttgattcccatagtagctctaaaaagaaaagaaacaaaagcctgaggtggttaactcatgtttatacttttggtaagaaaataagctttaatggtacacattattaaaagaaagtagtaaatatatgttatgttaaatgttaaatgtataccttttatttctctgaaataaaatcaggtaagtttcttctgtacaaaaaatcaagtaagtttcttctgtacagaaatgataaaaactgactttgactgctagaacgtttattatgatggtattgcaaattttctattgccatgaagatagtctttataatattaacatttgaaggtcagcagttaattagccaagttttcaatcctcacccactgaaggcctcatcaattctatggactccacagtctctgtgtcggtatattttattcttaaaagcagagttggcagataccttgtatattccctcccttctactcagacaaagtccatgaggagctcatgatttggagaaagagatatgcatacacaacaagtccaaagcagggcaagggatgctctaacagtagtattaagaaagtgggatggaaagactgaggacaaggcaactagttcctctgtgctgtgcaaaaaagagaggagagcctcacacaagataatatttgagaagagactagggaaacattaggacttgaaggagttgggaagggcatctcaggcagagaaaacaacaaggcgttgaaatgcgttttgtgtttggggactggtgattaggctggtggttgctgtgaaggacacaaacaagagggaggaatggactaagatgagatttaaaacataggttgggagccagattgtaaagagctgtgaatggcatatgagggatttgggcttcatgctgtaagtagtaacaagaatcatagaagagcaaatgatttttaaataactagaatcagtgtgcataatggattactagtagacaatggtagagaaattgagggcagttagaaaattagtgaaacagtagtccaggcaagtactggtgaatgaaaagatcaaggatcaggagagacttgagaagtcatagaaattgcttctggatttaaacgatctggttaacaactggatgtgctacataagaggaagatgatgaaaaaggacagaaagactgcaaacttagatgcctgaactgatgggatccctttaccaaaaacaggaaacaggaagaggggcacatttgagaacatgctttactttagaatagaatagattaagtctgatgaggctaccagatatccatgtacagttttccaaaagataataagaaaactgtagtggagtgaaggagatctaaaataacttaccgcaatatatgtattatgaaaaataaaaagatataggtactggagagtaaaaagattgaacagtaaaaaggggatctgaagggtagaagttattgcccctaaatatatacccacacaattactacaggtgggtggcaaatctgactatgagcttcctagtggccaaggaaaagaaatagcttgttataatttctgttcttttacatttgctgaggagtgckttacttccaactatgtggtcaatgttggaataagtgtggtgtggtgctgagaagaatgtatattctgttgatttgaggtggagagttctgtagatgtctattaggtctgcttggtgcagagctgagttcaagtcctggatatccttgttaactttctgtctcgttgatctgtctaatgttgacagtggggtgttatagtttcccattattattgtgtaggagtctaagtctctttgtaggtttctaagggcttgctttatgaatctgggtgctcctatattgggtgcatataaatttagaatagttagctcttcttgttgaattgatccctttac

SEQ ID NO: 73591 - DNA, 2761 bp, Homo sapiens
aatatcagctaaattcagatgtcatttttgctacaaatgtgctgcacactggtgaaatatttgacaaaggagaagtagatgtaactatggaaatcataactttaattgacaacaacatgaaaattcagaaggataacaagcatcatggatggagaagacaattatgcaggagtaaaaaatcaaatatgagctgcagaatttaaaaaaaagagtctatttttcctctctggatatttcccactactttagaaagaagaagaagaaggatggaaagaatattcttcctgttaatgaaaataggacaaaggaacagccaggacattcctacctggtttccagatgaactgattatcctttttgccttccaaatgagctgcatgggacagcaagagagaaagcaatagaaagagcttcctcatgctcctccatacccagcaagtgactgttaggttgctctttggaaacatgcttcagatttttcagcctcttgacttgcctattcctaaaagagaaaaagaaaaatcaggtaagtttcttctgtaaagaaaagataacaactcattttgactgctagaacctttattatgatggtattgcaagtttttcattagcatgaagatagtacatataatatcaaccctgtgggaaaagctacaaaaagcaaatccacattctgtttttaccatgttttgtattattttttgtagtgaagtgtattcatgaatgaaatctaccactggatgataaaactacttatttccccaattgctttttattttatacttttggtaaaaaaagatcaatgtaacgtgataatattatcatggattctcacaggatccaaagtagttacttgattcccatagtagctctaaaaagaaaagaaacaaaagcctgaggtggttaactcatgtttatacttttggtaagaaaataagctttaatggtacacattattaaaagaaagtagtaaatatatgttatgttaaatgttaaatgtataccttttatttctctgaaataaaatcaggtaagtttcttctgtacaaaaaatcaagtaagtttcttctgtacagaaatgataaaaactgactttgactgctagaacgtttattatgatggtattgcaaattttctattgccatgaagatagtctttataatattaacatttgaaggtcagcagttaattagccaagttttcaatcctcacccactgaaggcctcatcaattctatggactccacagtctctgtgtcggtatattttattcttaaaagcagagttggcagataccttgtatattccctcccttctactcagacaaagtccatgaggagctcatgatttggagaaagagatatgcatacacaacaagtccaaagcagggcaagggatgctctaacagtagtattaagaaagtgggatggaaagactgaggacaaggcaactagttcctctgtgctgtgcaaaaaagagaggagagcctcacacaagataatatttgagaagagactagggaaacattaggacttgaaggagttgggaagggcatctcaggcagagaaaacaacaaggcgttgaaatgcgttttgtgtttggggactggtgattaggctggtggttgctgtgaaggacacaaacaagagggaggaatggactaagatgagatttaaaacataggttgggagccagattgtaaagagctgtgaatggcatatgagggatttgggcttcatgctgtaagtagtaacaagaatcatagaagagcaaatgatttttaaataactagaatcagtgtgcataatggattactagtagacaatggtagagaaattgagggcagttagaaaattagtgaaacagtagtccaggcaagtactggtgaatgaaaagatcaaggatcaggagagacttgagaagtcatagaaattgcttctggatttaaacgatctggttaacaactggatgtgctacataagaggaagatgatgaaaaaggacagaaagactgcaaacttagatgcctgaactgatgggatccctttaccaaaaacaggaaacaggaagaggggcacatttgagaacatgctttactttagaatagaatagattaagtctgatgaggctaccagatatccatgtacagttttccaaaagataataagaaaactgtagtggagtgaaggagatctaaaataacttaccgcaatatatgtattatgaaaaataaaaagatataggtactggagagtaaaaagattgaacagtaaaaaggggatctgaagggtagaagttattgcccctaaatatatacccacacaattactacaggtgggtggcaaatctgactatgagcttcctagtggccaaggaaaagaaatagcttgttataatttctgttcttttacatttgctgaggagtgcgttacttccaactatgtggtcaatgttggaataagtgyggtgtggtgctgagaagaatgtatattctgttgatttgaggtggagagttctgtagatgtctattaggtctgcttggtgcagagctgagttcaagtcctggatatccttgttaactttctgtctcgttgatctgtctaatgttgacagtggggtgttatagtttcccattattattgtgtaggagtctaagtctctttgtaggtttctaagggcttgctttatgaatctgggtgctcctatattgggtgcatataaatttagaatagttagctcttcttgttgaattgatccctttac

SEQ ID NO: 73592 - DNA, 767 bp, Homo sapiens
ttcatgaaggtgtttatacctcagatcctccttgtcatgcactcaatttagaactcctttaacaagtggtcttggttctagttccttaaattggtgtttcccaaaccccaaagtgaaacaatttcccaaatgatgtgttccttaaaaatgcatgcagtttaggagagcagtggtaaataattggcaactcagtagctttagacctttttactctctcaaagctcttgactacagttggcaatctcataaaacaaccagagaataaatagttgcctaaaacagtaatatcacggagtatatttttgcttctgccaaaatatattcttggtaattagtactaacctcaggcaaaacccaagcaggcaatatttttgtagtgtttccttccctttcttgtctatacctcaccttgcagcagtctgctttttgggagaccagcttgcttcattctgatgacccagatcagaccatgtaaatggctctttataatgccagttgcttctcataagaatgtttatyttctaacaggcttattctaaatgtacagcatctttcccaaagtacttaaatctaggattgtggcaggcaggattattaaaattgaagttcaggggacttttctctctgtcacaggatatttggagtgtcacttttccagccagaaacctctgtggccagtggcacctttttcctagtttttcttgggcctactgggcttgttccacctgcttggcccagcaggctgcatatggctcacactactggcc

SEQ ID NO: 73593 - DNA, 758 bp, Homo sapiens
gcatcagaatcactctctcccttgctggcttttaagaagaaagctgccatgttgtgagctgtcttatggagagagccacatgggaataaactgaaagcatcctctgactgaaagtcagaaagaaattgaagctcttagtctaacagcctgcaagaaactgcatattgctgaaaaccatattagtttgaaatcagaytctttcccaggtgagctttcagatgggaactcagtcctggccaacatcatgattgcagccttgcagaacacccaataaagccatgacaagaaccttcaccaacaataactgagagataataaatatgtgttgttttaagtcactaagtgttggtaatatagttaggtagcaatagaaaactctatgctagatgttagtcatactactgctatttgaggcctaattagttatttaatatattgtgtcagcacccatggctatgtgtaacaagggaattcatatatttctataacctcaagtttccatagaatatattccatgcagacaactttcagatatataaacaaatttattctcaatctattgcttattcattcttctcctaagacaagaaggtctcctaatggtagatggtatccattggtccatggttattaattgcatagaactaatggcatattctacacctgcactgtttaatgtaatagtcatatggcaaacgtggctatttatttttaaaccaggtaaaactaaatcaaataaaaattcaattctctattta

SEQ ID NO: 73594 - DNA, 758 bp, Homo sapiens
gcatcagaatcactctctcccttgctggcttttaagaagaaagctgccatgttgtgagctgtcttatggagagagccacatgggaataaactgaaagcatcctctgactgaaagtcagaaagaaattgaagctcttagtctaacagcctgcaagaaactgcatattgctgaaaaccatattagtttgaaatcagactctttcccaggtgagctttcagatgrgaactcagtcctggccaacatcatgattgcagccttgcagaacacccaataaagccatgacaagaaccttcaccaacaataactgagagataataaatatgtgttgttttaagtcactaagtgttggtaatatagttaggtagcaatagaaaactctatgctagatgttagtcatactactgctatttgaggcctaattagttatttaatatattgtgtcagcacccatggctatgtgtaacaagggaattcatatatttctataacctcaagtttccatagaatatattccatgcagacaactttcagatatataaacaaatttattctcaatctattgcttattcattcttctcctaagacaagaaggtctcctaatggtagatggtatccattggtccatggttattaattgcatagaactaatggcatattctacacctgcactgtttaatgtaatagtcatatggcaaacgtggctatttatttttaaaccaggtaaaactaaatcaaataaaaattcaattctctattta

SEQ ID NO: 73595 - DNA, 758 bp, Homo sapiens
gcatcagaatcactctctcccttgctggcttttaagaagaaagctgccatgttgtgagctgtcttatggagagagccacatgggaataaactgaaagcatcctctgactgaaagtcagaaagaaattgaagctcttagtctaacagcctgcaagaaactgcatattgctgaaaaccatattagtttgaaatcagactctttcccaggtgagctttcagatgggaactcagtcctggccaacatcatgattgcagccttgcagaacacccaataaagccatgacaagaaccttcaccaacaataactgagagataataaatatgtgttgttttaagtcactaagtgttggtaatatagttaggtagcaatagaaaactctatgctagatgttagtcatactactgctatttgaggcctaattagttatttaatatattgtgtcascacccatggctatgtgtaacaagggaattcatatatttctataacctcaagtttccatagaatatattccatgcagacaactttcagatatataaacaaatttattctcaatctattgcttattcattcttctcctaagacaagaaggtctcctaatggtagatggtatccattggtccatggttattaattgcatagaactaatggcatattctacacctgcactgtttaatgtaatagtcatatggcaaacgtggctatttatttttaaaccaggtaaaactaaatcaaataaaaattcaattctctattta

SEQ ID NO: 73596 - DNA, 726 bp, Homo sapiens
ttaattgagtttgtactgttattggttaattacttaatttgttttagtttcaaaattagttgaatcccactataccaaagataaagacaaaattgggattataaacttcttgttttatagtaaaataatgggttgctgtggagattaaattatttggggcatgcaaatcatagtgctttacaaacagtaatggtggctggtgcacttctaaatataattcgctcrtctacatttatacaaaactgttctgccttgctttaaaagttctaccataggtgccttaaaatacatgcttatactgtttcttccaggatagaaaacccatttcggtaagggttctatgtctgttgtcttactttttttttttccaaatttgtaaacaattctttctttcacaaccagttctgaaacccacaaaagtcttacaatgtcattcaagatgagaaaatatcttggaatggacaggctcacttctatacttgaagaagttgttggagtacctgtaggcagagtcttccactactctgactgatagacaagtttgcactccatcatgtatgttctaagtactcagcctctctagaggttttcaatcccaattattactttttctactagataagagagtttttgagagagacactgggttgacgacagggaattgattgaaagtatgaatattaatgagtaaatttcccattcaatcaatctatcctaaaaagtaag

SEQ ID NO: 73597 - DNA, 726 bp, Homo sapiens
ttaattgagtttgtactgttattggttaattacttaatttgttttagtttcaaaattagttgaatcccactataccaaagataaagacaaaattgggattataaacttcttgttttatagtaaaataatgggttgctgtggagattaaattatttggggcatgcaaatcatagtgctttacaaacagtaatggtggctggtgcacttctaaatataattcgctcgtctacatttatacaaaactgttctgccttgctttaaaagttctaccataggtgccttaaaatacatgcttatactgtttcttccaggatagaaaacccatttckgtaagggttctatgtctgttgtcttactttttttttttccaaatttgtaaacaattctttctttcacaaccagttctgaaacccacaaaagtcttacaatgtcattcaagatgagaaaatatcttggaatggacaggctcacttctatacttgaagaagttgttggagtacctgtaggcagagtcttccactactctgactgatagacaagtttgcactccatcatgtatgttctaagtactcagcctctctagaggttttcaatcccaattattactttttctactagataagagagtttttgagagagacactgggttgacgacagggaattgattgaaagtatgaatattaatgagtaaatttcccattcaatcaatctatcctaaaaagtaag

SEQ ID NO: 73598 - DNA, 726 bp, Homo sapiens
ttaattgagtttgtactgttattggttaattacttaatttgttttagtttcaaaattagttgaatcccactataccaaagataaagacaaaattgggattataaacttcttgttttatagtaaaataatgggttgctgtggagattaaattatttggggcatgcaaatcatagtgctttacaaacagtaatggtggctggtgcacttctaaatataattcgctcgtctacatttatacaaaactgttctgccttgctttaaaagttctaccataggtgccttaaaatacatgcttatactgtttcttccaggatagaaaacccatttcggtaagggttctatgtctgttgtcttactttttttttttccaaatttgtaaacaattcttyctttcacaaccagttctgaaacccacaaaagtcttacaatgtcattcaagatgagaaaatatcttggaatggacaggctcacttctatacttgaagaagttgttggagtacctgtaggcagagtcttccactactctgactgatagacaagtttgcactccatcatgtatgttctaagtactcagcctctctagaggttttcaatcccaattattactttttctactagataagagagtttttgagagagacactgggttgacgacagggaattgattgaaagtatgaatattaatgagtaaatttcccattcaatcaatctatcctaaaaagtaag

SEQ ID NO: 73599 - DNA, 1156 bp, Homo sapiens
tttctaatttcatttcaatttcctatgagacccacagtttctacatttatttaacgaagccattaaatatcccattggctttggggaaatgaagattcagagcaacagcattttctgagtatgtgtgattcaggcactatggggtgtgtagtggagagttagagatgaagcaggccttgtgcctgtctcttgagacctcatagtcaaggtctatgtgagcccccacactcttgcccagtcccctttgaccaatgtgatcagtggtcacctttgctcatggggttgcctattatatctgggttaaaaccctttttctgtgaaaaatgacatgatcttgtggggatccaatctcaacttcagtcttggtctctggcacactgttctcaatcataacccatagaaacaattcttttagtttaaagttgggtagttataaacttgcttttgagggggcagagagagggaaggaagttggaaacattgattacaaggcagaattaaatactaacactaatttctcatttcaatttaagcaaaaagggggcctttctgagagttcttatgcttttgaaacattaaagattgggaaggtgcaccctatggataatagtgacgagcttcatacatctgaggccatcctcttgactctccttgctcaggaaaatttcctatttgggagaatgaagagcacaaaccagatagtatattcaactatggaaaaataatgacaaatttcattcagcaactacatggaagagaaagtttgatttccaaattgtagtcattttattgcagtacctgatcataagagagtaaaaccttcaattgaagttacaaagaatagggcaatgatacatgtcagcctttcatgtcttccaataaagtctcagtcactccccacaattaattacccttcttagtgaagatctggatagttcattgcttagtactaatccctgtgaacaggctctcyctttccattgatttatctagatttgcactagtatttactatttaggcatcattcactttgtagaacccctgcaattcatagatctctgattgcttcccatgcactatgctatgggttttggcatgcattatcttactcaattctcacatgttgtaggtagattataattttcaactcacatag

SEQ ID NO: 73600 - DNA, 725 bp, Homo sapiens
actccagctccacttctctgcaatgactctcagctgcaccctctgagttttgggttgcagtacaatgacacggaagtcccaggagccaaatccagacaggatgaaggcccaggggaagaacaaaaacgtctttttctcattctctgaagcaagaaaaacattcccagaattcccccagagcattggccagaattgcattacatgacagatactaaaccartcactgacaaagggagggagataactctgattggcttgaatcgatcaaagtttcctcttagaactggggataaggagtagcttgggagcaggtgactttctgaaagtgatctgggttctgttagaaggaagaatgaacagaaagacattgtgctgcaggtgaacagctgagcacattatgcacagagatatttcattttttagataattagaatagggagaggacattctacacagggcaaaagtgaagctgcctcttttgaggagaaatggttaatttagctgaagcatgaaagcaagagggggaatcactgcagaagaagatattctggacaacaatacaattatgatatcagagaactcttaatttctcaaaaacacttcactgactctcacatcaactagaacagcaagtatcaacagagaaatctgaagtccagagcaggtgagtaaatcttccaaggtcacacagcctgtaaacaacaaggtctggtgactcttgcctg

SEQ ID NO: 73601 - DNA, 654 bp, Homo sapiens
ggtataatataataatcatgtcaactgttgcagaaaaatatttttttaatttgataccattaaaaacaacaataaccagagtctgggaagggtagtgtggagggggagaaagaaaggagttggttaatgggtataaaaatataattagaaggaatcaaatctaccatttggtagcacaataaagtgactataggaaacaataatttattgtatatttcaaaataactaaaagastggaattagagcgtccctaacacaaagaaatgatcaatgtttgaggtggtagataccccacttaccttgattttattgtcacacatcatatgcttgcaacaaaaatcacatgaatcccataaatatgtacaattagtagtattcgtaataatttaaaaagttaagcaacaacaacctgactgctaattctagcaagttagaatagacagcaattttattaacagcataaaatattttttcaaatacttatagtgaacatcatgtttaatggtaaattattcgaagcaagaaaaagataaaaatgcccactattaacatttcgacttaatatttcatttgaggtcttacacaaaaagcaagaaaaataaatgataaaaaaatttaagataagaaaactaaactgtcattattcataaacat

SEQ ID NO: 73602 - DNA, 799 bp, Homo sapiens
catagcactttggggccagaccattaacgtgcagatgaaattctctcccgaattatctgccagttgagatggtggttgcttcaacactcagggtcctggagcgaggcagcctggggcagagtcccagccatattgtggtgctgcatatgcacgatgagcaagaaataaaacttctttctttctttctttctttctttctttctttctttctttctttctttctttctttctttaagcagagagatacactggttgtttgccaccatggaataacctggtttattctagcttattagtaagagctcagtactgaaaagagaaatgataatgatgaaagttgtaatgagcaataatactaatacatatatgtgtgtatatatgtatatatgtgtatatatgtgtatgtgtatatatatatatgtatgagacaggatctcactttgtcactcaggttggagtgcagtggcacaatcttggctcamtgtaacatctgcctcccaggttcaagcgattctcccacctcagcctccagagtagctgagattacaggtgtgcaccaccacacctggctaatttttgtattttttggtgcagatggggtttcaccatattggccaggctggtcttgaactactgacctcaagtgatccacctgcctcaggctcccaactaatatatcagtttattattactaattatagcctcttaccttactttacagaaatttatttatttattaattgtagcctcttaccttactttacaaaaatttgttttgtttacaaatacctctcattac

SEQ ID NO: 73603 - DNA, 1065 bp, Homo sapiens
ttcagaagcacatgcttatctctccaaaccttgtcccttgtaacactagtgcaccatgagatttaatagatttatcacacacacatatgtgcaccctaacataaacacacagacacacacagacacakgattacaagaggatttcccagaactttataacgtttatgttaagtgtaaatatttaaggcaaagatatgatatttagtgtttcctaaattgacagtggaactttctttgtgccaaatatctataaacatatgaaagttttcagtaaattgttgtttcagaaatattgcttagaggaacaggttagcctagctgctttgagcctctttgttgaaaactattaaggacagcataaaacacttccctgtacttttaatcctcttgtcatttagatttcaaatgtctgttatttttcatgcttctctacttcttatcattcttaacaaaacaattatcaagtcctttcatttatgtccttagaacatttctttctctactcttttctttgtgcttctccacttcaaagccctctagcctcccatttaaaatttaatgatatttaaaaattaatcttctagtcttcagcccctcttccacagttccttggttctcaagttatcagattagtctttaaactttgtcatggttatgtcactcctttcatttgtaatttgccatggccctttattttctaccaagtgaaacatggattcttctgagattgcaagcactttatacctactctccatctattccatctctttcctcctttcacaactcttatgctacggtcattctgggtgacttattgctcctaggacctgtcttacgcttcccttcctaagcctttgtctactctgctttgtctgcttttatgcttctctctcttttgtctgaactggtctctgtcctcgtccatgcttcaagtcctaattcaaatgccactgtctttatgaagggctccctgattgttccaaccaaaataagcttttattcctttgaacttgcatggcagtagtactttatttgtagctctgaatttctgagtatatttctcag

SEQ ID NO: 73604 - DNA, 1172 bp, Homo sapiens
gatgtgatggttgagcattcagtgcgactaaatgagtttatatcttctggaaagtgattgatcatattttccccagcatttacgccttatgcaggcaaaaagaaaagttttacttcttaacaccatttactgaaaatatagaaacacaaatatttccaaaagacaatgaggaattataaaggaacttccttctaagtatagatatcaagatctcgacagggttaatgtaagcctaaagtcagctttttattgatagaaaaacaacagtaaaacaaatcatttagagtaaatagtttatgccttgagctatcgcctcaaaataaacattccattttcccacttgacattgactcaaatgacattgttttgcttctaaacagaattattttttctaggttccacggatgtcggtgatttccttcaggagagttgaaactgataaatattgttttagagagctgatctgggagttgaaaggaaaatattttatgccaataaaaattaaattagcttcaacgtgaaagctatacaaaagaggaaaatacrtaacacaggactataattcaatgatttaggcaatgttaagagctgaaataccatagagcttttaatattattatttggaaaagtttctgcctagggcaataccaatgtaaacatttccagtttcatccctgccaaatattgttgttttttccattattgaagcttaaaaatacttgggctgttttaaagattagtgtgttggcataaaaccgcacatgcttcctagaagtatgttctttaaccctcaatcatgacatttaaaattatttttcatgatacttaaatattgtcaaggtactttggcatcagaagagaatttcaccaattctcattaggcaattagttatgatagaaatgaggtaacatgctgagccatgaatattcagtatttatcactacttaaaatgctaatatgcaagataaaaatgccaagtacacttttttggattcatttaaacttaaatcatagggatggcattgtgttttcaccatctcagctttcatcattatattaagattttaaatataatagccagaatatattaattacaaagcaaagtggtcagcaatggtttcccagggttattttgtagtatcttaaaatgctggccagatgaaaagcatgc

SEQ ID NO: 73605 - DNA, 1172 bp, Homo sapiens
gatgtgatggttgagcattcagtgcgactaaatgagtttatatcttctggaaagtgattgatcatattttccccagcatttacgccttatgcaggcaaaaagaaaagttttacttcttaacaccatttactgaaaatatagaaacacaaatatttccaaaagacaatgaggaattataaaggaacttccttctaagtatagatatcaagatctcgacagggttaatgtaagcctaaagtcagctttttattgatagaaaaacaacagtaaaacaaatcatttagagtaaatagtttatgccttgagctatcgcctcaaaataaacattccattttcccacttgacattgactcaaatgacattgttttgcttctaaacagaattattttttctaggttccacggatgtcggtgatttccttcaggagagttgaaactgataaatattgttttagagagctgatctgggagttgaaaggaaaatattttatgccaataaaaattaaattagcttcaacgtgaaagctatacaaaagaggaaaatacataacacaggactataattcaatgatttaggcaatgttaagagctgaaataccatagagcttttaatattattatttggaaaagtttctgcctagggcaataccaatgtaaacatttccagtttcatccctgccaaatattgttgttttttccattattgaagcttaaaaatacttgggctgttttaaagattagtgtgttggcataaaaccgcacatgcttcctagaagtatgttctttaaccctcaatcatgacatttaaaattatttttcatgatacttaaatattgtcaaggtactttggcatcagaagagaatttcaccaattctcattaggcaattagttatgatagaaatgaggtaacatgctgagccatgaatattcagtatttrtcactacttaaaatgctaatatgcaagataaaaatgccaagtacacttttttggattcatttaaacttaaatcatagggatggcattgtgttttcaccatctcagctttcatcattatattaagattttaaatataatagccagaatatattaattacaaagcaaagtggtcagcaatggtttcccagggttattttgtagtatcttaaaatgctggccagatgaaaagcatgc

SEQ ID NO: 73606 - DNA, 733 bp, Homo sapiens
tcaagaaaattcagatctaattcatatctttgaaaccacatagatgtgaactcaatgtggatgtaaaatgctgcccaactagtcatcagggttacctagctctaatcgggttctctaacatattatactagttctttcagagtgtggtccctggatcagtagcatccactttaccagggaacttatcagccatgcaaacaatcggccccccttcccaagcctactgaagtagaaactgttgggggtggtggtgctaggggcagcaatayggatcttaacaagaccttctagagactccaatgcacactagtttcaaagtcactgtattgacacaaagatcttttaaataacaactatttcatagtgctccccttattagcctaaattttataaatgacgtaacttacccatataaatttttgaatcaatataataccttagctgtgtaatgcctaaataaaagtagtacaataaaataatcttaatttctctatattagcattcaggcatgatgacacttagagattctgaagtattgaaacaattgaaccaatcaccgtgagtacaacagctacacatgcagagaaggagggcagtgaaagattcttgacaaaaatatcatgatcacattactgatgtgatacaactgagtaactctgggaaattttaaactacaaagaaatacaatcctcaatcttttatcaatatgtacaatagtagcactcctggaaaa

SEQ ID NO: 73607 - DNA, 646 bp, Homo sapiens
ttctatagctgatttattttctttgtcaaagaaaaaccagagctggatagtagttaacatggtaaaaaaaataataataataacagatttaatttatgacaattgcagtagagagaaaagaaacatcaataaagaatcaggctcaattctgaatacagcataggcaagtgggaattcatagccaaggatcagggtcagggtggtcagtgaatagaaaatcactgaagggaaacatcagcagtaaggagggattctggctaaaccaacctaataggaatcttgctcaagtcagaccagggtgctgagaccaccagaacgaaagcaccattgtgcacagaccctttagcttttttcatcgctgtatgcctcacgctaagcagaaytactgatacatgatgaacactcaatcaatgtttttgaatgaatatttaattgaagagtgagacttaaagactattaaaaaatattaactgtatgttaaaatacaacaatattaaaagtatgtttttctacctctattttgttaatttgacattgcctcagtttttttaatttgacttaatcctttacaattataaaaaataaactgtgatggctagcgaaaggaacagtgcctttatttcataaggactgcagtaataataat

SEQ ID NO: 73608 - DNA, 956 bp, Homo sapiens
tcttcatacattcaagtaactacaggaaactagaaaaatgcaaacaaaacaaaataagcaaaacatccttctaaggagaagaaaatctaaaataggttgtaatgagagacataattttcccggtactgatgttcatccactcattaggctaaaacacaaatcatctgctgactgctaatgtttaatttgcatctatgctaattaattttgagagctgttatttgctttgataggattacttgttccgctagagaacaacctcaccaaaaagctgtaatttctaaatcttcaatggatcttagaaacagatttctagctcatccaaataatgtaaagatggcttcctttttgaaagttattctctgctatatgttctttgcattattgtgctcttacactaatgcactgtaaagccatgtattacttcaagaagtaagaaaatatacaaagaacaatatttaaatacacaaacatcattaaatacaatcaaatggaggaaagcagaaggaatttttacctctaaacaaagtttgatgtaattttctttaaaaaaatatcaaacagggacatcaaatttactcaggtactgaatttttaaaaatagtgtgtaaatacagcattagagatataaatcttagaaaatctctattttgcatagtgtaggattctttcagctgttattatagaaaagcaaatatattaatattttcatttgagatctgcaaatatactaagcaattacaayggcctgtaaaattcatattcatatttctcatttttatccaaatgttaaatctgatttttaaattatgacaattaagataaagcatacaaacagtgtggtgctgaacactaaacaggaactagtagcacacacagctaaaaaaaatgtaagggtgtaaatatcaagctgaatagcattgcaattaacgtctgacttaggtaattacatccca

SEQ ID NO: 73609 - DNA, 1111 bp, Homo sapiens
ccagatgaagttcagtggtttcagggggaggaaataatttttaaaacgatgtcgataacacttcacatttaaaatcatcataataattctaattctagaattgtgtctaattctaatactgtttctagctttgcttgaataaacagaaatgtagtagggaagagacagaatgtttagcttgcagtatctaattactcatttgggtatctgggaagatagctctccatggccccactgtcactgacctataatgcttctcctgacgtcttcggtaaaatccaacagattacaaagaaactggaatgccttgaagaaatagagctttttgtgtgatgtcagattcaatagacctctaatccttagtaaaacagtacaaaacagtagaataatttttagtgttttctaatatcaactgaggttttatttgggagattaaccagaggtttgcacaaaaacaaaagtgaagaccattagtctttaaagaaactaagactctaggtttggatcccatttgtggagccctacattccaagtcatctaatgttcttgtctagttagcttgtaaaagtctatacaatggaggaaaaccccttttttccccttagtataagtgtattatatgttgatagaaaggatagaaagttaaataacagttcartaaatgtacttctaaatgaaatttaaaagtactttaaaggtgttaaattatttcactttctaaagaggttttatgcaacactaaaatgtaatgactgagctgcctccttttgttaagagactagtgcaagtagagtcttgctctgtcgcccaggctggagtttagtggcacaatcccggcttgcaacttctgcctcctgggttcaagtgattgtcgtgcctcagcctcccaagtagctgggattacaggtgcacgccaccacatggggctaatttttgaatttttagtagaaacagggtttcaccatgttggccaggctgttctcaaactcctgaccacaagtgctccgcttgcctcagtctcccaaagtgctgggattataggcttgaactaccacgctcttcctagtgcaagccatttaaacattgtatccaacagctaaagaaagaattc

SEQ ID NO: 73610 - DNA, 1066 bp, Homo sapiens
gaccaaaccctatatatgtttttttcctagacatacacacctataataatgtttaacttctaaattaagcacatcaaaatattaacaataataactaataataaaataggacggttatgacaatatactgtaataaaagttatgcratgtgttctctctctcttaaaacgtcttgctgtactgtactaacctatctttggactgcagatactgggggcaaactaaaacctaggaaaggaaaactggatgggagggatgactgtgacagcaactctaaaggaccattgtacagattaaatgtgagtattgatttacagagcctgacatatactacagatattcagtaaaggagaataagtaatattgagggtaaaattgatagaggaggcatgtcaggagtgagattgtttgatgccagtgaacatttatttgacaaatccacttaaactgaaaaaataaagtcacctctctattttcatatttgatcttcaaagccagcagttacagtaggataggtagataatttcccaacttaataaatatggagggaatacaaacagcaatggggtccaatgatgatgtaaggtccccagccattctgaggcagagctagggctgaatcccagcttcccaatgacaaaagtctggggcctttagccagagcggtgcctcccctgaggatatgctactacgcatgtgatgtcccttgcagctgtgtcccaaggcccctgctgatgaccatgtttcccatcaagatagttgagacatgaaagagaagggctctgcatagaatcaacaaaatatcgtctccacaaggcaggcgatcttttctattccacggatttatctgaaatacatatttatcctaagggcataacaggaacagtgtcttgcctgtactaggcatcgggaatatttgttgggttaatcagcaagcatgtgcttccgtatagcaatggaaggtggctagcttacacagtctgtctgctctgggcaattttcatcttcacgaggcctgaatctcttacctttttttttttttatgagcattaagttcagggagatg

SEQ ID NO: 73611 - DNA, 2304 bp, Homo sapiens
tatctggatacattagcagtagatacacttacaggatgcaataattgtcaatgtttccaggaagcaagtccaattcatggtggtcattaaaggatgaactgttaatttgacaagtcgaaatgtgggatacacttttaagacacttatggattcagtaaaaatgtatgtgttgtgtattaaagccacatcacatccaggcatgaaagatgctgtttggcccaacacacccatcagctctgactactgtctttcatgctgcttttggtttacatcctgtgcctgggttctcaaatggctcagtttcagagctctctcagaaccacagcttttagccctggttttcagcattcccccagttttgccctttgaaactcccagtaacaccttcgtaaggcgtttcactttatatgcaaggctctgtttctcaaatcatgcacaggaactcctgatttcttttcattgacctctagaactaacttcttgtgctcctggaataggaccttgctgtacttgctggtgacaaatagtaaacagaatgccagtcagaaacatarcaaaacaaaataacaacaataatgtatgtttctttacctgggcattaattttcctgaaactaattgtttgagcatatcagaatgacttgtgaacctctttacccataacattacccatcatccatagcgttattatgtttgtgtttttagtctataactgaaatctagcagcttcatcctgcctcttgccaagagaagctataatgctcagtgaagaacctgatgtggccccacaaatacagtcttatgtaaacaattaaatgtagtgattgaacccactttctgtcacctcagaaggacaatcaacttttaggaccattcttaaacatttaaaggacttggggcagatatagcaggcaagagaaaacataaaaagaccgagacttaatataatatagaattgatcttgcataactgcaaaacctctagcttctgcatattcctttattactggaaaattctgaatttattgcttttatctgggccccaacttactttctgccatattgaatagtagtcagttacttagaaacaattaatatagtttattgtaatgaatttcttcttcacccttaaaaaagtatgtgtgtgtgcatgcatttgtgtgtgtaataaaagcatagcatataaatatatgtattcatttttagtatacagttttccagttctaataagttatcaagaaggaattaattatcaggccatgatacgagaggtgagggaaaacctacttctcagcagttaggtcagcatcaaagagaagctgattgaattgacttggaacatagcagaaaatggaaagtaacatcaggagctcaggaagacagagtagagttgataaatcagtcccgaacatgcaaagtcattattgtaaagggcagtgaaaagaccaagaagtgagcatgatagagctggatgaatcagtggttagccaggaggcctaaagatctgaaattgttagttgagccttgagtgttacctgcttctacacctttctacttcacgagccaaaccacttttaaaaaaaggcagaatgtttcctactctaaaagaatgtagcagagaaaatcaagacatgatacttcacacatcatttttcatgtcatgtttagaaaaatgtatccatattttataattaaatatatttacaatatcaaatatatgtctataatttatcattataaattatataatctttatatatacagacagagaaaaaagaagagagagagaagtggagattggagaagtcttgagacattctgaaatgggcttatatgagaaatccaaagaatgaatgaatccacaaagaaatgactaaatctagaagagttaaacaggtacatatcatggtaggtgcccgtgtcttcatctagggttgaggaataatggagtatgtctacggagattgtctctacctagcatatatttattaaccatatttttgttagtgtcacaagttaataactaaaataaatcatagctattcattattttacaccacatgtgcctaccagtatcccaacaggtgattatcaaacagctttctaatttaaatccttgttgctcattattcttccaaactttatgcttaggattactgaaatattccagatgtagcctcattttacagtttttcctctttataatggattgttttgtgttatagtaagatgattgctgtgcaatcacctggtatatgtcagcatgttataacactttcagtaatttcatcttacttcgtacatac

SEQ ID NO: 73612 - DNA, 2304 bp, Homo sapiens
tatctggatacattagcagtagatacacttacaggatgcaataattgtcaatgtttccaggaagcaagtccaattcatggtggtcattaaaggatgaactgttaatttgacaagtcgaaatgtgggatacacttttaagacacttatggattcagtaaaaatgtatgtgttgtgtattaaagccacatcacatccaggcatgaaagatgctgtttggcccaacacacccatcagctctgactactgtctttcatgctgcttttggtttacatcctgtgcctgggttctcaaatggctcagtttcagagctctctcagaaccacagcttttagccctggttttcagcattcccccagttttgccctttgaaactcccagtaacaccttcgtaaggcgtttcactttatatgcaaggctctgtttctcaaatcatgcacaggaactcctgatttcttttcattgacctctagaactaacttcttgtgctcctggaataggaccttgctgtacttgctggtgacaaatagtaaacagaatgccagtcagaaacatagcaaaacaaaataacaacaataatgtatgtttctttacctgggcattaattttccwgaaactaattgtttgagcatatcagaatgacttgtgaacctctttacccataacattacccatcatccatagcgttattatgtttgtgtttttagtctataactgaaatctagcagcttcatcctgcctcttgccaagagaagctataatgctcagtgaagaacctgatgtggccccacaaatacagtcttatgtaaacaattaaatgtagtgattgaacccactttctgtcacctcagaaggacaatcaacttttaggaccattcttaaacatttaaaggacttggggcagatatagcaggcaagagaaaacataaaaagaccgagacttaatataatatagaattgatcttgcataactgcaaaacctctagcttctgcatattcctttattactggaaaattctgaatttattgcttttatctgggccccaacttactttctgccatattgaatagtagtcagttacttagaaacaattaatatagtttattgtaatgaatttcttcttcacccttaaaaaagtatgtgtgtgtgcatgcatttgtgtgtgtaataaaagcatagcatataaatatatgtattcatttttagtatacagttttccagttctaataagttatcaagaaggaattaattatcaggccatgatacgagaggtgagggaaaacctacttctcagcagttaggtcagcatcaaagagaagctgattgaattgacttggaacatagcagaaaatggaaagtaacatcaggagctcaggaagacagagtagagttgataaatcagtcccgaacatgcaaagtcattattgtaaagggcagtgaaaagaccaagaagtgagcatgatagagctggatgaatcagtggttagccaggaggcctaaagatctgaaattgttagttgagccttgagtgttacctgcttctacacctttctacttcacgagccaaaccacttttaaaaaaaggcagaatgtttcctactctaaaagaatgtagcagagaaaatcaagacatgatacttcacacatcatttttcatgtcatgtttagaaaaatgtatccatattttataattaaatatatttacaatatcaaatatatgtctataatttatcattataaattatataatctttatatatacagacagagaaaaaagaagagagagagaagtggagattggagaagtcttgagacattctgaaatgggcttatatgagaaatccaaagaatgaatgaatccacaaagaaatgactaaatctagaagagttaaacaggtacatatcatggtaggtgcccgtgtcttcatctagggttgaggaataatggagtatgtctacggagattgtctctacctagcatatatttattaaccatatttttgttagtgtcacaagttaataactaaaataaatcatagctattcattattttacaccacatgtgcctaccagtatcccaacaggtgattatcaaacagctttctaatttaaatccttgttgctcattattcttccaaactttatgcttaggattactgaaatattccagatgtagcctcattttacagtttttcctctttataatggattgttttgtgttatagtaagatgattgctgtgcaatcacctggtatatgtcagcatgttataacactttcagtaatttcatcttacttcgtacatac

SEQ ID NO: 73613 - DNA, 2304 bp, Homo sapiens
tatctggatacattagcagtagatacacttacaggatgcaataattgtcaatgtttccaggaagcaagtccaattcatggtggtcattaaaggatgaactgttaatttgacaagtcgaaatgtgggatacacttttaagacacttatggattcagtaaaaatgtatgtgttgtgtattaaagccacatcacatccaggcatgaaagatgctgtttggcccaacacacccatcagctctgactactgtctttcatgctgcttttggtttacatcctgtgcctgggttctcaaatggctcagtttcagagctctctcagaaccacagcttttagccctggttttcagcattcccccagttttgccctttgaaactcccagtaacaccttcgtaaggcgtttcactttatatgcaaggctctgtttctcaaatcatgcacaggaactcctgatttcttttcattgacctctagaactaacttcttgtgctcctggaataggaccttgctgtacttgctggtgacaaatagtaaacagaatgccagtcagaaacatagcaaaacaaaataacaacaataatgtatgtttctttacctgggcattaattttcctgaaactaattgtttgagcatatcagaatgacttgtgaacctctttacccataacattacccatcatccatagcgttattatgtttgtgtttttagtctataactgaaatctagcagcttcatcctgcctcttgccaagagaagctataatgctcagtgaagaacctgatgtggccccacaaatacagtcttatgtaaacaattaaatgtagtgattgaacccactttctgtcacctcagaaggacaatcaacttttaggaccattcttaaacatttaaaggacttggggcagatatagcaggcaagagaaaacataaaaagaccgagacttaatataatatagaattgatcttgcataactgcaaaacctctagcttctgcatattcctttattactggaaaattctgaatttattgcttttatctgggccccaacttactttctgccatattgaatagtagtcagttacttagaaacaattaatatagtttattgtaatgaatttcttcttcacccttaaaaaagtatgtgtgtgtgcatgcatttgtgtgtgtaataaaagcatagcatataaatatatgtattcatttttagtatacagttttccagttctaataagttatcaagaaggaattaattatcaggccatgatacgagaggtgagggaaaacctacttctcagcagttaggtcagcatcaaagagaagctgattgaattgacttggaacatagcagaaaatggaaagtaacatcaggagctcaggaagacagagtagagttgataaatcagtcccgaacatgcaaagtcattattgtaaagggcagtgaaaagaccaagaagtgagcatgatagagctggatgaatcagtggttagccaggaggcctaaagatctgaaattgttagttgagccttgagtgttacctgcttctacacctttctacttcacgagccaaaccacttttaaaaaaaggcagaatgtttcctactctaaaagaatgtagcagagaaaatcaagacatgatacttcacacatcatttttcatgtcatgtttagaaaaatgtatccatattttataattaaatatatttayaatatcaaatatatgtctataatttatcattataaattatataatctttatatatacagacagagaaaaaagaagagagagagaagtggagattggagaagtcttgagacattctgaaatgggcttatatgagaaatccaaagaatgaatgaatccacaaagaaatgactaaatctagaagagttaaacaggtacatatcatggtaggtgcccgtgtcttcatctagggttgaggaataatggagtatgtctacggagattgtctctacctagcatatatttattaaccatatttttgttagtgtcacaagttaataactaaaataaatcatagctattcattattttacaccacatgtgcctaccagtatcccaacaggtgattatcaaacagctttctaatttaaatccttgttgctcattattcttccaaactttatgcttaggattactgaaatattccagatgtagcctcattttacagtttttcctctttataatggattgttttgtgttatagtaagatgattgctgtgcaatcacctggtatatgtcagcatgttataacactttcagtaatttcatcttacttcgtacatac

SEQ ID NO: 73614 - DNA, 2304 bp, Homo sapiens
tatctggatacattagcagtagatacacttacaggatgcaataattgtcaatgtttccaggaagcaagtccaattcatggtggtcattaaaggatgaactgttaatttgacaagtcgaaatgtgggatacacttttaagacacttatggattcagtaaaaatgtatgtgttgtgtattaaagccacatcacatccaggcatgaaagatgctgtttggcccaacacacccatcagctctgactactgtctttcatgctgcttttggtttacatcctgtgcctgggttctcaaatggctcagtttcagagctctctcagaaccacagcttttagccctggttttcagcattcccccagttttgccctttgaaactcccagtaacaccttcgtaaggcgtttcactttatatgcaaggctctgtttctcaaatcatgcacaggaactcctgatttcttttcattgacctctagaactaacttcttgtgctcctggaataggaccttgctgtacttgctggtgacaaatagtaaacagaatgccagtcagaaacatagcaaaacaaaataacaacaataatgtatgtttctttacctgggcattaattttcctgaaactaattgtttgagcatatcagaatgacttgtgaacctctttacccataacattacccatcatccatagcgttattatgtttgtgtttttagtctataactgaaatctagcagcttcatcctgcctcttgccaagagaagctataatgctcagtgaagaacctgatgtggccccacaaatacagtcttatgtaaacaattaaatgtagtgattgaacccactttctgtcacctcagaaggacaatcaacttttaggaccattcttaaacatttaaaggacttggggcagatatagcaggcaagagaaaacataaaaagaccgagacttaatataatatagaattgatcttgcataactgcaaaacctctagcttctgcatattcctttattactggaaaattctgaatttattgcttttatctgggccccaacttactttctgccatattgaatagtagtcagttacttagaaacaattaatatagtttattgtaatgaatttcttcttcacccttaaaaaagtatgtgtgtgtgcatgcatttgtgtgtgtaataaaagcatagcatataaatatatgtattcatttttagtatacagttttccagttctaataagttatcaagaaggaattaattatcaggccatgatacgagaggtgagggaaaacctacttctcagcagttaggtcagcatcaaagagaagctgattgaattgacttggaacatagcagaaaatggaaagtaacatcaggagctcaggaagacagagtagagttgataaatcagtcccgaacatgcaaagtcattattgtaaagggcagtgaaaagaccaagaagtgagcatgatagagctggatgaatcagtggttagccaggaggcctaaagatctgaaattgttagttgagccttgagtgttacctgcttctacacctttctacttcacgagccaaaccacttttaaaaaaaggcagaatgtttcctactctaaaagaatgtagcagagaaaatcaagacatgatacttcacacatcatttttcatgtcatgtttagaaaaatgtatccatattttataattaaatatatttacaatatcaaatatatgtctataatttatcattataaattatataatctttatatatacagacagagaaaaaagaagagagagagaagtggagattggagaagtcttgagacattctgaaatgggcttatatgagaaatccaaagaatgaatgaatccacaaagaaatgactaaatctagaagagttaaacaggtacatatcatggtaggtgcccgtgtcttcatctagggttgaggaataatggagtatgtctayggagattgtctctacctagcatatatttattaaccatatttttgttagtgtcacaagttaataactaaaataaatcatagctattcattattttacaccacatgtgcctaccagtatcccaacaggtgattatcaaacagctttctaatttaaatccttgttgctcattattcttccaaactttatgcttaggattactgaaatattccagatgtagcctcattttacagtttttcctctttataatggattgttttgtgttatagtaagatgattgctgtgcaatcacctggtatatgtcagcatgttataacactttcagtaatttcatcttacttcgtacatac

SEQ ID NO: 73615 - DNA, 669 bp, Homo sapiens
tgctggatttgtggccatgacgcactgttcagtcagcagaaattgagargttgttcattcctctatgttgtcattgatatgtgaaagcctgtatattagcagacagggagctgagctcaaaatggtcagatgggccctgcctaaagcagagtagaaggctgttcacaaaccaactcaagttttagctcaattcaaatataggctgttagtaatgcaaattaccatcacctttccaaagctcttcaaagtatagaggcggtcaatgaatgttctaacaggactgattcatgaagcttgaactaggagcacacagaaatgataaagactaattaaaataaggaaaagttttaaaatcacagttttgtggtgttaagcaaggttgttgaagcaaacaatgaatcagcacgggcaaaaaaaatcagtgacttcaaatgggcacaattcattaaaataaacctttaaaataaaagtaaaaagaatataaggtaacacagctgcgtataaagatgattttgcaaaaatagctttgtcaaattgtggataagagaatatgcaaatatcttgcataggtacaaattggaggcccagtgaatggatattaactgcatgattctgtttctccttaacatatgggttggtcttggatatctggtctgtcctgatcatctg

SEQ ID NO: 73616 - DNA, 1507 bp, Homo sapiens
  misc_feature (1)...(1507): n = A,T,C or G
tgcgttttttctataagatgagggctaccaaaagacagaatacgtagtcactaaatgagtgacattggatagggcaacgtcatgatttattatccaaataagctcagttggtagagtgaaaagaggcagcaaccaactgggcctctgagcaggcctaaactgacaggcttgtgtgagctcgcaggacatctggtccccccaggcacgaaggacacagattggaagtcctcattccacacttctctagtgttctgagggcttgaaattgccatagatgatgattgttttggatcaaaggtttgaagttttctttaaaatgaaagtatgagataggcacctctgtaaaagattagttacaatagttttaccagattagtcgaattccctgagggtgtttgagaaatgagacattgtgttaggcaacaggaggctgtgctaatgaaygaactaaagtaatcatggcccaatactagaaaactttctctcttactcattgttttaatttcctatgggtgctctaaaaaaataccatgagctgagtggctttaaacaagggaactttattctctcaggattctggaggacagagaccgaaaatcaaggtgtcactaggccatgctctttccctgggctctaggagagaatctgtcccatgctatgctcttagttgccagtgttaccgtcagtgctttgaacacatcactccagtctctgcctctgtcaccgcatgggcttccctccgtgttcttctcctcttcttatcaagacaccagtcatgtggattagtaccatccaatgtcctccatcttaactggataacacctacaaagaccctattcccaaataaggtcacatttgcaggcaccagaggttaaggcactatttaggagggaacagttcaacctacagcagaactttgggtcaagaagccaaataatttttagagatcaaataagatggcaccaaaagccccagtgacgtgggtttaaaagtgacagaagatgatcaaacagagtgtgtaggaaagaggtcatgagaagtttatctctgaaaggaaggaagctggaaggaggtgaaggattgaaaggaggagatttaaatatgcataaaagccagtagtaagaatctagttgagaaggtaagttttaatataaaagaaaaaaaacagtataaacatcacattaggcagccagaaataaatccaaaccattggcgtaggcctcagctttggggaggagaaatgacccttctagcaaaagtagaggaatataacaggatcctgataggtttatactgcaacttacaaaaatgagaaatgtgtaggagttcgagcaggagactggctcactggggtgggctggggaggaggcactggtgggagagaggagctttaggtaggagagaagnnnnnnnnnnnnnnnnnnnnnnnnnnnnnnnnnnnnnnnnnnnnnnnnnnnnnnnnnnnnnnnnnnnnnnnnnnnnnnnnnnnnnnnnnnnnnnnnnnnna

SEQ ID NO: 73617 - DNA, 1507 bp, Homo sapiens
  misc_feature (1)...(1507): n = A,T,C or G
tgcgttttttctataagatgagggctaccaaaagacagaatacgtagtcactaaatgagtgacattggatagggcaacgtcatgatttattatccaaataagctcagttggtagagtgaaaagaggcagcaaccaactgggcctctgagcaggcctaaactgacaggcttgtgtgagctcgcaggacatctggtccccccaggcacgaaggacacagattggaagtcctcattccacacttctctagtgttctgagggcttgaaattgccatagatgatgattgttttggatcaaaggtttgaagttttctttaaaatgaaagtatgagataggcacctctgtaaaagattagttacaatagttttaccagattagtcgaattccctgagggtgtttgagaaatgagacattgtgttaggcaacaggaggctgtgctaatgaatgaactaaagtaatcatggcccaatactagaaaactttctctcttactcattgttttaatttcctatgggtgctctaaaaaaataccatgagctgagtggctttaaamaagggaactttattctctcaggattctggaggacagagaccgaaaatcaaggtgtcactaggccatgctctttccctgggctctaggagagaatctgtcccatgctatgctcttagttgccagtgttaccgtcagtgctttgaacacatcactccagtctctgcctctgtcaccgcatgggcttccctccgtgttcttctcctcttcttatcaagacaccagtcatgtggattagtaccatccaatgtcctccatcttaactggataacacctacaaagaccctattcccaaataaggtcacatttgcaggcaccagaggttaaggcactatttaggagggaacagttcaacctacagcagaactttgggtcaagaagccaaataatttttagagatcaaataagatggcaccaaaagccccagtgacgtgggtttaaaagtgacagaagatgatcaaacagagtgtgtaggaaagaggtcatgagaagtttatctctgaaaggaaggaagctggaaggaggtgaaggattgaaaggaggagatttaaatatgcataaaagccagtagtaagaatctagttgagaaggtaagttttaatataaaagaaaaaaaacagtataaacatcacattaggcagccagaaataaatccaaaccattggcgtaggcctcagctttggggaggagaaatgacccttctagcaaaagtagaggaatataacaggatcctgataggtttatactgcaacttacaaaaatgagaaatgtgtaggagttcgagcaggagactggctcactggggtgggctggggaggaggcactggtgggagagaggagctttaggtaggagagaagnnnnnnnnnnnnnnnnnnnnnnnnnnnnnnnnnnnnnnnnnnnnnnnnnnnnnnnnnnnnnnnnnnnnnnnnnnnnnnnnnnnnnnnnnnnnnnnnnnnna

SEQ ID NO: 73618 - DNA, 1998 bp, Homo sapiens
gaatccgaagatacaggtcatgcaataggctccacccagtaaggcatagtagcactcatgggatccacagcattcatggagtacagatgtgggggttgtgagcagtttggggactagaatgctctcaagtatacacctttaggaaactaggagctttaacaattctgggtcccattcccttggcacagtgaagttaaaaagagagcacactttaaagcaaatcatggttcagagcagtggagaaatgaaacatggacttggccctakaaagaactgggcacaaatgctgactctaccgcctactggctatgtcacaggacaagggatctgacctccctgagtctttatttctctgtgtaaacaatggacccaatcctattaatttcagataactgcatggagaactgcatgaccatagggtaagaggcaagtgcacacatgttatggagagaatcttcaataaggggtgtcttatagcactgctaagttcagtggccacatgagaacttatttgaatgatgaccgactgttaacccgtcaactagtgggatctaccctgatggctctggggccagcagctactaaacttacaccagagtgtatgtgaacaaagactaatttgtaatttgtgcaatttagtgttcacatcctccagagacatagctgaggtttgtgctatggctgccaagcactgccatttattcctgctgcagctagagctggagcagaatccaatctcatcacaagtactttagattccttggaagaaagggtttctgttgaatattaatataaactgttattatagatacccgccaaagtcgcctttttattttgtatctcatcagaggttgtaaaataaaaccttccaggaaatatgcagttgattggctttgtttcattccaacaatgatttgcaaaattgggacttcaatcttcttggatgtgtacatttatatacctgacatcacataccagagagagttaggctgggtaaataggcttccatttaaccctgggtcactaatgcttttccactggcatgatgcatgatgaagggatgagtgggctgaagtcagacatagcttcaaatatgtgagctttgttggccttgggatgtctgggcatttgaaggaaagtttgcgcaaagggaaagttctccttccatctcctttcatttccactgctggggttaggctctttttcttcttttcctctgtgtttgcaacacattgtctttcctttgccatctggctgtgttctctactattgttccctggcctggagattctctcggctctgtcgacagctccttcttcttgtttgctgtgtgtgtgtttgtctttctgggatgaagtttgtttttcaagctctgacagactggcaaggcaaacaaggttgccatttttgttttgttttgtttttatgagtatggcaatttttagccctttgaaaacaatccggagacttgggaggttataattcgggatgccatgtgtataggcatacattcagagcttattgtggctgaggaaacgaactgaggaaaggaggtggaagacagattaatgtggatgatttataaattgtaaagggaccaagctcctgacagaactaaaagatgaaacagcagaaagggaaggaattttagagaatattttgaaaagttaatgttgaagaatatgtttatgtctgtatatacatatgtatatagagtgcataaataaacattgcatctcacacatacacttacctcctgcttatatatgtcaggcttctggcaacctcattcttttagaatccacaggagtaaagacaaaagggtccctgaatgtggtaaatagtgatctcaaagttatgccgtaggcatgggacacacctctatctccatttggcagataaaaaaaccagagggtcaaagaacttccacaacttgcttcaaatgaaagagctgtgaaaccacagagccaagggtaaactctaggcttacttttggat

SEQ ID NO: 73619 - DNA, 979 bp, Homo sapiens
tgcataactccagatggcatagcctaagacatacctaggctatgtggcacagcctatgctcctagcctataaagctgtgcagcatggactgtactaracaccttaggagctggaacacaatggtaaatgtttgtatctaaacacaaggaaggtacagtaaagatataatcttatcacacagtatatgcaattgtcaacaacagcaacgtcttcatgcagtacatgactgtatttacgtgtgtgcggccttaagcaccatcttagctttttctaaataatacctttaaaaaaaaaaagtctgtggttgtcttttgcactctggagaaaagagctttcctaattcagactaaacagaaaagactaaacaggtcacatcagatcgaagagttttttaaattgtgcaattataggaatttcaagtagattttaaaactcaacctaagataacaagtaaaccgatgcctttgggaatactttcttgtaatgacgacgaagtggtcagcaccgtggggacagagtcctgtgtccctcaccctgtggctctggagccagcaaagagtgtggtcatgatgctagcaaaatatgcttaaatgatccgtgacaggtggggccagcacctatggggtggggtgccagggctaggccaggctccgcctctgggagacgagcaaacttctaggggcacaggttggggaggcagcatcatggcttctacacttccaattagttctagcacgcttttttgctataaactgggtgaatatatggacccacagaatcacacatttactgaaaatgaaactgaactctgaccccatagctggggaggtgaggctggtgctggggttgtaggtggaacctaaggcagtgatattcactggagcctctgcattcccacatgctgcccagtcctcagagtaccccaagaaaaatggttacctcaaagctgtgtgtgtggctcctttgagaaaagctagta

SEQ ID NO: 73620 - DNA, 713 bp, Homo sapiens
tcccatgctccaggcggtagcccctctatcctcattgtgaatggggtgtgagmgagagaggtggaactccacaaagccagtcatgtgcaatgccagttgatggaaagttgggaaccatccaaattaaggtcagctaaatgaggactgagcccccaaatggcactgcagccaagaaagagaggtcagtgcccataacaggcataatcccagaacagaaacagtgaggaagagagacacacccctctacaagcctggtccgtgcagggaaggcagggctctcacctggttcttgtctttctccacctatatatttttaattgcattgattgtgggtttgtgtgtttgtgtgtgtgtttgattaatcacctctaatgtatttttagcaaggaagagaagcattaaagaaacagcaaatatagtcagagcccaagtcagtggctatttttgttttcacttagagaacaaagtgccaaagtccagccatgatgaaagggcaagaaaacaccaccctccctcactcctgctggccggcagggcctgctcctatgcccaaactgtgcatttctgtgttgctttttggctgagaggagaggtgatgaggctgtattttgaccgagagatgaaaaggtctattgtttgattttgtggtcagaaggcatccgtaccacacacccttccatctgctcttctatttctgcctaataagcagcacc

SEQ ID NO: 73621 - DNA, 713 bp, Homo sapiens
tcccatgctccaggcggtagcccctctatcctcattgtgaatggggtgtgagcgagagaggtggaactccacaaagccagtcatgtgcaatgccagttgatggaaagttgggaaccatccaaattaaggtcagctaaatgaggactgagcccccaaatggcactgcagccaagaaagagaggtcagtgcccataacaggcataatcccagaacagaaacagtgaggaagagagacacacccctctacaagcctggtccrtgcagggaaggcagggctctcacctggttcttgtctttctccacctatatatttttaattgcattgattgtgggtttgtgtgtttgtgtgtgtgtttgattaatcacctctaatgtatttttagcaaggaagagaagcattaaagaaacagcaaatatagtcagagcccaagtcagtggctatttttgttttcacttagagaacaaagtgccaaagtccagccatgatgaaagggcaagaaaacaccaccctccctcactcctgctggccggcagggcctgctcctatgcccaaactgtgcatttctgtgttgctttttggctgagaggagaggtgatgaggctgtattttgaccgagagatgaaaaggtctattgtttgattttgtggtcagaaggcatccgtaccacacacccttccatctgctcttctatttctgcctaataagcagcacc

SEQ ID NO: 73622 - DNA, 493 bp, Homo sapiens
ggcactggctagagagggcaggaggttccagtgagcatgcagggtgggcacccatcagcctacagagcatggctggccatctcaccttcaggaaacgctctgccccacctcaggcttcgggctgtgtgttctctgctgactttctgtatcacagaagcaaggcacttaagctttgyggccaggtgggcgtgcactgccacttctccatggataagccctgcaccgccctcaagtgaccaactcccctggactcaggttcctcctctgcaaagtggatctcaccgttttaacacagagggtggttttggagctaaataaatgatatgctgtgaggtgtggaaacactgtcctcaaggtgggatcactaagctgagaatgctatttcctttaatccccttccctttaagtcagggctagagctggccagagagaaagtagttaggacctggaagcaggcagggaggcaacagtagatgcaatgatgggcaggtgc

SEQ ID NO: 73623 - DNA, 1307 bp, Homo sapiens
tgtgagaatctatgcccacaaagcaggaagtaggaaatgaactggaaaggatgaagctgctgccacagtctagtgcggtatgcctccctctgcatccttacagatcaaagggatgctaatgtaggggaatatgcagatttttcagactctagctcgctgggtgggtgatttcttttatgtcatgaaataacatgaaagaaggaaacccttggctttggattggcctcctgcggtggaaagtcccagagatgtgaagtctcatactaaggcctcccatgcatgatgtgaggtgagagtaagattggatgggaggtgctggcccttcctgggaggacatctgatactgaaggtgactaaggtacgttgggccctgttacccacaaaagacctctgcacttcggggctgatcacaggctaaagggccccataaagagcaggcctgttgatgctttgggaagcctggaagctttggtttcttgtcacaaaaaagtgctgaggtggtgtagagtctccgtgaatgaggtattaccagccagcctgggacagacgcctgtggaacaagcctcaagctcaccctggctaagttaacaagcttgacttcctgctctgcgaatgttctcaaagcaatagagwgatgttaggtgactgaggctcactgcagaatgtgtgtggttgtgtgtgtgtgtgtgcatgcaggtgaggggtagtgcagtgggggcaagagaaagggtcctggccctggatcctgggacttaagagagcttccaggacctgaatggtgactcatttttgtaggaaaaatccttatcatatcctatgatgtcattcagaattgactctggcctcctgtcctcatatctggacatatttcccactgtcttgctgtaaccctgacctgacgcaagttttgggagctgtgcttaagacctggcttgtaccattctcctcttggggccccaggagggtgcactgccatcccatgctggccctgggttaaacagaactcaagagccttcatgcttgtgcttactgccagagacaatctccagtctgtatggagagtagagtacaagatgggacagcactggacttcctagctgttagtgatacccactatttgtccttataaagtgctaagactcatactaataccaatatggatacaaatactaatatgaatccaaatactaatgccaataccaattctacctcaaatacccatagcaatcctaaccctaatcctaattctagtttttccatttgctccttagggctacctcaggagagatgagtcagtgtttgcagga

SEQ ID NO: 73624 - DNA, 702 bp, Homo sapiens
agaataatacacttgtatccctgtttcctaatttcatcagctttagaacattccatggacttcttgttataatggaaggagatttaggtcacatggccttgcattctcctacctcttctcttctttatgtttcatagtgatttaaatagttataactctttaaaaagtgatttaaaaagtaacccataagaaaagcatttatattattataatcagttaatcgttgccctctacagggagggacaatatgctaggattccatgtttctctttgcaggtctgatgtcgggacctatgggtgacttgaaagagaggaggcacaataacttcaaggtcaaatggtttttcttttctttctgtcagttgcttaaaatcatgtcacattttactttgccgtgtatttggattactactttcttgttcaggatttggtcttcctgacatctgtcrtatcttttttccttctttttattcttccttctttctttcctttctgacaaaaaaaaggtcaggggagaatgtacctcgatcacaacctcaagttcaccaagcctttcaagcctaccaacaattacagagtccccatctttttcccacctaagttctcaagttctcctacctgatattggacctgttgctctctcctatatagctatccttctgggatttttctgtacatatttcctaggttgaacccactgtt

SEQ ID NO: 73625 - DNA, 1594 bp, Homo sapiens
aatatataagatgtggctactgtccccgaggaagacatggcatgtataggtggaaaatttgtaagtgttctactttttaattactttaaaaataaatataggtactggtaactccccctgacacaggtattgactggtcagtggtcattttctcttgcccattgagcatgttccctagctgctcacttattttaaggctacctcttctagtccatcacactcaccctcaggagtcagaaaggaagagcaagagtttagattgtataagtttatataaaactctttttggctcatctatatcactactttcctcattgaatrttgatggaagtgtcatttcatgatgtttgcaaataatgttgaggaatgtggaaagagcatatgccttaaagtttggaaaaataaaaaaattttaatagtgaaaatatgagtttagaaaatatttatagtaaaacatattcaataaagaaatcttggaaaatatagaaaagtgggaagaagggtcatcaatgccccaaaccaagcataattggcattttgttatatttccttttagatttagttttcatcctaaactttgactattagtgtttcatttgctttaaatagttatatagtaaacatgaatttgtaacctgctttttgatgtagcattattcataattttaaaaacatcatttgtaatgactgtaattttacaaccatgtagtactctttattttttatttaattttttttttaatatcagaaaacatttacagtatgtaccactctttacttaatccttcctctgagtttagaattttggggtgtttccaattttccagaatattaaataatgttgcaatatacatatttgcataaaggtttctctcatattcttatttacttccctagtacagattcttggaaatggatttgtttgatcaaagggcagaagtatttctgaagtttctgatgcatattacttaaaaaacatactaaatggaagggtggtatacttgcatgtgcagtgaggactgcaaattttttacaaataaacaccaaatgcagaaagcaccatcatttcaatattgccctcaagtctacacagttgatataatatttagatagatggccatgtcttgataatggaaaacattttgtccttattcaaatgattccaggctataggaaaaaaggaaaaacaaagtgattaaagttataaacttggcttgattagtaatccgtaatccagatagcaacttaaacttatatttcatattcaaaatatgatagaacagaaaaaacatctcttagaaattgctaggaaaggtattacacattctgttgttaaacaaaatacaagccatctaaattcataatttttcttcactctggacttcttgatagcagtttcaaccataactaaattaacattagtattttagcagacgaagtagaagtagtttcaatgggataaatacatatttcccttcttcttcaaaagcactcctatgcactcgagataaaggttcattagttgaatgtagcagcattcagaagagaagttatttcaatgagataaggttctgagcctttgcttaacttatga

SEQ ID NO: 73626 - DNA, 1594 bp, Homo sapiens
aatatataagatgtggctactgtccccgaggaagacatggcatgtataggtggaaaatttgtaagtgttctactttttaattactttaaaaataaatataggtactggtaactccccctgacacaggtattgactggtcagtggtcattttctcttgcccattgagcatgttccctagctgctcacttattttaaggctacctcttctagtccatcacactcaccctcaggagtcagaaaggaagagcaagagtttagattgtataagtttatataaaactctttttggctcatctatatcactactttcctcattgaatgttgatggaagtgtcatttcatgatgtttgcaaataatkttgaggaatgtggaaagagcatatgccttaaagtttggaaaaataaaaaaattttaatagtgaaaatatgagtttagaaaatatttatagtaaaacatattcaataaagaaatcttggaaaatatagaaaagtgggaagaagggtcatcaatgccccaaaccaagcataattggcattttgttatatttccttttagatttagttttcatcctaaactttgactattagtgtttcatttgctttaaatagttatatagtaaacatgaatttgtaacctgctttttgatgtagcattattcataattttaaaaacatcatttgtaatgactgtaattttacaaccatgtagtactctttattttttatttaattttttttttaatatcagaaaacatttacagtatgtaccactctttacttaatccttcctctgagtttagaattttggggtgtttccaattttccagaatattaaataatgttgcaatatacatatttgcataaaggtttctctcatattcttatttacttccctagtacagattcttggaaatggatttgtttgatcaaagggcagaagtatttctgaagtttctgatgcatattacttaaaaaacatactaaatggaagggtggtatacttgcatgtgcagtgaggactgcaaattttttacaaataaacaccaaatgcagaaagcaccatcatttcaatattgccctcaagtctacacagttgatataatatttagatagatggccatgtcttgataatggaaaacattttgtccttattcaaatgattccaggctataggaaaaaaggaaaaacaaagtgattaaagttataaacttggcttgattagtaatccgtaatccagatagcaacttaaacttatatttcatattcaaaatatgatagaacagaaaaaacatctcttagaaattgctaggaaaggtattacacattctgttgttaaacaaaatacaagccatctaaattcataatttttcttcactctggacttcttgatagcagtttcaaccataactaaattaacattagtattttagcagacgaagtagaagtagtttcaatgggataaatacatatttcccttcttcttcaaaagcactcctatgcactcgagataaaggttcattagttgaatgtagcagcattcagaagagaagttatttcaatgagataaggttctgagcctttgcttaacttatga

SEQ ID NO: 73627 - DNA, 1149 bp, Homo sapiens
aaaactattttttgatatgtttgtgaaagtgtttccagaagaaattagtatttgaacttgtagccagagtaaagaagttttccttcagcaatgtgaatgggtgtcatccaataagttgaggctctgaataggataaaatggcagaggaagggcaaatttgctctctttatatgagctgggacatccatcttcttctgtcctgggacatcagcactcctggttctcaggcctttggactcagactcggagttatgcaagcaggctccctgattctcaggcatctgggcttgaattggaacacaccactggctttccaggacctctagcttgtatatggcaaattatgggacttctcagtatccatgattgcatgagcaaattcctcctaataacttwctttctatatatctacatatgttctatgagttctgtttctctggataaccctaacaatacatctggatatacaaggaggtaactacacacatctaatttgggaaaaatggagtgaaaacagaaaacaatggaaggggaagttgtttttttctctatctccttttttcttgcagagatatataagtccaagtgtgtttgaaaacttctggagatgttccaatttgtggcttctcctgctaattccagttaagatgagcatatttagtaaatcttgtacttgtaaatcttcattgcctcatttctcctgacaatcaatttccatcactgcctgaaggaaaaggtagaagtccatacttctgatgctgagtttgagccagaactcttcaggacaccatatgaaaaacggctttctttctcaagtatggattgcatgttgatgtccacgatgtgtttatttgcctcaagtatgttttggatgatgatgtccagatagagaaatagaactgggagtcaataggaagaaaatgtcatacctcattcaagaagcaacttttttttgccttctttatttagtcaacatcatttacttggccactactgcatgctgggcatcatttcaggcactgtagatacagcaataaataaatctgtgaatgggtgtgagcacagattaatttacaattaaaatacaaagtgaaaagtcatactggaaaggaaactgaccttggtaatgcacaatctttactacatttt

SEQ ID NO: 73628 - DNA, 635 bp, Homo sapiens
cagaagtctgtctcgaaaaaaaaaagaaacaaagaaagaaagaaagagaaaggaaggaaggaaggggaagggaaaggaaaggaaggaaggaaggaaggaaggaagggaaagaaggaaggaaagaaaaagaaaagaaaaagaaaggctacaagtttcaagtgatatgacaatatatttgggccaaatcaatccccacccagaattccctagatgaaggctgaagccctgttaatcctagaccagaatcccaggctggtgatggctaacctggctccttgaaaggaacatctggccaaagatgcagacactaaactgatgagctgcttgctgcccagctcacgtcccctccctgattcccacacgtatgtgtacgtgagcccttgctccacaactgtgtctttattacctcctttagactccactcaatccagtgaagtgggctgtatcaggtgaagctaatatcagctaggttcattcattggttattcatttaacaaatatctgtggggttcctaggctcagttctaggcaccaggggaaaaaaagcagtaaagaaagtagagmaaattctctatcctggccaggcatgatggtgcacacctgtagttccagcttctctggaggctgaggcagga

SEQ ID NO: 73629 - DNA, 1189 bp, Homo sapiens
cattttgtatttttttctacaatgaacttttggaacacaataaaaacgacaaaatcacgtcaccttcctgctaaaaactctcccaatgcccccacggcctttggactctggtccaaattcctcagcactccaaggaccctcgtgaaggatcttggcctctctcctcatcccctcacccaaatctcacacatgaagttcgtgaggactccctcttttacacctcagttctctctgcccggcacatccccgcccaccgttccagggatacagcagcaaagccccctagccccgccccgagcagccacagaagggcctcccgcgggctrgccgaattccgctgggaggaaatgcgcacggagactccggaggcccgggtctatcgcgtgaccgcgccacgagcctgcgcgcagggacagactgggagcccccgggccgcgagcaggggcagggccgtagcgtccgagcggcacagaagcctctgggctccgggcatggagtccggccgggctgtctccatggccggactggggagaggctcccggcaggacccgccccgacctcaccttggcgctgctcacgaaacggacttccacggagacccgcgcgccgcccgccacgcccacgcagaaggagaacacgtcgcacatggaggccgccatcttgggcgcgcctccgccttatgacccttaaccccgcctcgacctgagaggccacacccccttctggtcccgcccccggcgagagtgcccctgaggctgcgaggttttgggctccaccaagtctgaatttaggttccgtggtttgttgacgggagtgtaactgggcctgcctttgtgcttttacatcggtgcctttttgtgtctgtacctctgtatcagagtctgtgtgcgcgtacagttttgatgtgtgtatctttgagtccgttgcatgttttgttgtggttttttttttttgagatagtctcactctgtcgcccaggctggtgtgcagtggcgcgatctcggctcagtgcaacctctgcctcccaggttcaagtgattcattctcctgcctcagcctcccgagtagctgggcgtacaggcgtgcgccagtaagcccagctaatttttgtatttttaggggtttcaccatgttggccaggctggtctcgaactcctgacctcaagtgatccgcccgcctcgacctcct

SEQ ID NO: 73630 - DNA, 539 bp, Homo sapiens
tgatggagcataagaattataatcattattaaattccctgctccttataaattcatacccaaaaagaccacagtagtttatgcctcatcaaattattaaaaaatgattttatatgagcctttgaatcatcaaagcagraaaatttgtgtgtgtgtgtgtgtgtgtgtgtgtgcgtgtgcatgtgcgcacatgcatacttggtaaatgtaagcttagataacagatactttactgtacatttaaagcataagttgacagaattaatcaaataagcattacaacctgcaattgtgtaatatattagtattctcacatatttagagataatcatcaatctgcccacacaggcaagaatccatagtgaaatgcactcatagatgatgttagttctgcctccttcatttcagaacatttgccttttaggagaaagagtattatgctctagtcttagtgaaatgtttggtttaagttctagcttttctcattgtttaatctcacttcttaagggaaaggaaaataacaatagttgagcacctact

SEQ ID NO: 73631 - DNA, 577 bp, Homo sapiens
tactagagagagtcagaagcaacaatatatcctctactgtgagccaccttacatttgtgtcatggactgaggtttaaatgggaagagtggaagtctaaggatttgagaagctcttttcataactagtaaagtccatcaaatcatccaaagatacacagacaaatctgccrttgtaaagagattcagttctgttaaagaatctacactacatttcaaatacgtcctgtaatagaaacagagggtagaaggcagataggaggcagtccttcccaccaaggagctcatagtctagaaggcaagacaagcttttaataattataaacaataaattagtaacactttaaatttagaatatttccagtaagaggtaaataaggcagataatttattgagagaaggaagtaatcatctgtccaaaacatcatggaaagccttacatgggagatgataaagaatagattttccatggtgtatatgtgccacattttcttaatccagtctatcattgttggacatttgggttggttccaagtctttgctattgtgaataatgccacaataaacatacgtgtgcatg

SEQ ID NO: 73632 - DNA, 577 bp, Homo sapiens
tactagagagagtcagaagcaacaatatatcctctactgtgagccaccttacatttgtgtcatggactgaggtttaaatgggaagagtggaagtctaaggatttgagaagctcttttcataactagtaaagtccatcaaatcatccaaagatacacagacaaatctgccattgtaaagagattcagttctgttmaagaatctacactacatttcaaatacgtcctgtaatagaaacagagggtagaaggcagataggaggcagtccttcccaccaaggagctcatagtctagaaggcaagacaagcttttaataattataaacaataaattagtaacactttaaatttagaatatttccagtaagaggtaaataaggcagataatttattgagagaaggaagtaatcatctgtccaaaacatcatggaaagccttacatgggagatgataaagaatagattttccatggtgtatatgtgccacattttcttaatccagtctatcattgttggacatttgggttggttccaagtctttgctattgtgaataatgccacaataaacatacgtgtgcatg

SEQ ID NO: 73633 - DNA, 577 bp, Homo sapiens
tactagagagagtcagaagcaacaatatatcctctactgtgagccaccttacatttgtgtcatggactgaggtttaaatgggaagagtggaagtctaaggatttgagaagctcttttcataactagtaaagtccatcaaatcatccaaagatacacagacaaatctgccattgtaaagagattcagttctgttaaagaatctacactacatttcaaatacgtcctgtaatagaaacagagggtagaaggcagataggaggcagtccttcccaccaaggagctcatagtctagaaggcaagacaagctyttaataattataaacaataaattagtaacactttaaatttagaatatttccagtaagaggtaaataaggcagataatttattgagagaaggaagtaatcatctgtccaaaacatcatggaaagccttacatgggagatgataaagaatagattttccatggtgtatatgtgccacattttcttaatccagtctatcattgttggacatttgggttggttccaagtctttgctattgtgaataatgccacaataaacatacgtgtgcatg

SEQ ID NO: 73634 - DNA, 577 bp, Homo sapiens
tactagagagagtcagaagcaacaatatatcctctactgtgagccaccttacatttgtgtcatggactgaggtttaaatgggaagagtggaagtctaaggatttgagaagctcttttcataactagtaaagtccatcaaatcatccaaagatacacagacaaatctgccattgtaaagagattcagttctgttaaagaatctacactacatttcaaatacgtcctgtaatagaaacagagggtagaaggcagataggaggcagtccttcccaccaaggagctcatagtctagaaggcaagacaagcttttaataattataaacaataaattagtaacactttaaatttagaatatttccagtaagaggtaaataaggcakataatttattgagagaaggaagtaatcatctgtccaaaacatcatggaaagccttacatgggagatgataaagaatagattttccatggtgtatatgtgccacattttcttaatccagtctatcattgttggacatttgggttggttccaagtctttgctattgtgaataatgccacaataaacatacgtgtgcatg

SEQ ID NO: 73635 - DNA, 718 bp, Homo sapiens
tcttcaaattccaaatcccttcactagggaataatatatttcttagcatttccccagtttctaactggtgcagtgctgcaacattaatagttrctctgtgaatagttggtgacttgtttctatttgatacttgcctcttttctatgtttaggcatttttctgactttaaaattcattgcctactgcagagagagacataagctacaaattaaatgtttccctgtagactagaaatattcagcaatgtattcattacagtgaaagtctaatataaaagatttgaatgatcttatgtaattttctgaaatatgatttagtggtatcatataagcaaaactaagcagagatgttagatgtatttcctctgttgttatgtaaaagatcaagtagaaatcagagagaaatatattttaaatgcttcaggaatggcctattcccagatatttgtgttgtgggttaggatgtctactgagtttactaaaagccattttaaataagaagtatgaaatttagttataaaaaatgatgatgccagggatcattttttaaaaaagacaaccatccaaacaacattatataaagacaaaagactgtaattacaggccttcccattggccactgaaaagcagggttctactaacaatagctttccttgattgtgtactaatctgcactagggctgtgcgtgcattagatcgtttaataatcttctcttgag

SEQ ID NO: 73636 - DNA, 2426 bp, Homo sapiens
taattttaaaaaaaatttttttgtagagatgggatctcactgtgctgcccaggttggtctcaaatacctgggcctaagtaattctcccatcttggcctcccaatgtgctgggattacaggtgtgagccaccgtgcccagcctacttgcattcttgatcataattttaaaagtcaggcaagacctaaatcttattattaagtatatataggtagtacaatactttcacaacttgacataatatttctctttttattgtaatagacactatcgtggtgaagagagatgagttctgagtcttacatggcatttaattgagccaggtgatatttttgaaaattaaaaataatttttaaaatttgaaattcaaatgaaccattttttagactccctcaatttcttcatagagtcctattcttagaacacagcttgaaaatcattgcttgagataatgattattgaggaagtgttaccaattggttttaacccttaatattagctgaatataaacattgtttgtacacttaagatctcctgtaagtgctattttctacaagaacacagagacgtaattaatttttctctgtaaatgtttatgccatgattatcatgtactaggcagtgttcaaagtactttaaatttaattattaagcatcctgtgaggcaggatttatagatgatgaaattcagttggaggttaaataacttgtccatagtcacactagtaagtggtagaaccagaatgcaaacccacagattctggttccagagttcatgctcttaatcattgtactatgccattctttacaataaagtcccacgaatccactgttcaagagggtaagatgctttaaagcctattgtgtgtgggtatgtgtgggtgtgcacacgtgtgcacacacatatgcatgtgtgaattattttaaatcattgatattccttaattgttaaaggcttctcatgttctgtgatccatacttagataactcttctaccaagtattagttgatgataagaataatattaagaactagaacataaacaagttactaatagataaaagtttttaacagataaaaagttttatgataaattttaatagataagtttcaaataaatttcaatttccatactattaatatagtttaagtttagaacaagatattgctataaccatatgttgctgtttaagatatggtcatcttattatttaagaaacagtttcagtgacatagtggcataccttaattaggaaatctgtggttaagtatgtagatttacccaaatataaataactagagttttaattggcagaaatttgggatacttaaaatattatttcttgagaaatgataaaaacagttaagtattaactaacatttgtaaattcaaaatgtataatcttttctatgagcaacaacgtaaatttactcttttaaaaaactagtagaaaaaatatttatggaragcttcccaaatgaatagtaagtacaagaagatttttgcttaacaagaaatattgtgttcaaatatttaaaatattttacaaacttttaggttcagagtaaaagactttcaaattagtgcagtgtattgattgataatgaatttaaattgatctactaggtaacatttaggttgctcacatgataacctatatccttttctgcagtaatttaaattaatgaaggatcattgttcatacataacaaatgttactttttatgccattgtttcaagctatatttttattctcctatttcactattacaagtacattctacatgactgtgttgactgtccaactgttcattaatgaaactatgtgtcccaattctgctgcttactgggtgaccctgtgcaagtctcttactctctgtgaacccttgtttctttacactgtgaaacagggattcaaacagtttctcatatcactgtgatgattaaatcggtacatgtgaagtgcctaacctatggtaggtgctcagagaaggttagcttctttccttgataataaagtcttaactattaaaaaaaaagccatggtatatttatacaccatattttgtctattctaagacatattttaacacctctgaatttccatgcatattacaaccaatggtgacttgtcaaagagatggcagtgatgaaacagttgtcactgccttcatgtgcagtttgttttccttttcatgtatatacagagtgatatatgatacttacatgtgtcatttcaaacatagcatacttttttaatgacacacacattgacagtgtgttttataactgatggcaccttaaattcaatgagataacaacataagaagagcctctttgttctaagcataatggcacatgtcttatttatcatttcatatattctttttgcagactttatgcagttggtggtcgtgatggaagttc

SEQ ID NO: 73637 - DNA, 2426 bp, Homo sapiens
taattttaaaaaaaatttttttgtagagatgggatctcactgtgctgcccaggttggtctcaaatacctgggcctaagtaattctcccatcttggcctcccaatgtgctgggattacaggtgtgagccaccgtgcccagcctacttgcattcttgatcataattttaaaagtcaggcaagacctaaatcttattattaagtatatataggtagtacaatactttcacaacttgacataatatttctctttttattgtaatagacactatcgtggtgaagagagatgagttctgagtcttacatggcatttaattgagccaggtgatatttttgaaaattaaaaataatttttaaaatttgaaattcaaatgaaccattttttagactccctcaatttcttcatagagtcctattcttagaacacagcttgaaaatcattgcttgagataatgattattgaggaagtgttaccaattggttttaacccttaatattagctgaatataaacattgtttgtacacttaagatctcctgtaagtgctattttctacaagaacacagagacgtaattaatttttctctgtaaatgtttatgccatgattatcatgtactaggcagtgttcaaagtactttaaatttaattattaagcatcctgtgaggcaggatttatagatgatgaaattcagttggaggttaaataacttgtccatagtcacactagtaagtggtagaaccagaatgcaaacccacagattctggttccagagttcatgctcttaatcattgtactatgccattctttacaataaagtcccacgaatccactgttcaagagggtaagatgctttaaagcctattgtgtgtgggtatgtgtgggtgtgcacacgtgtgcacacacatatgcatgtgtgaattattttaaatcattgatattccttaattgttaaaggcttctcatgttctgtgatccatacttagataactcttctaccaagtattagttgatgataagaataatattaagaactagaacataaacaagttactaatagataaaagtttttaacagataaaaagttttatgataaattttaatagataagtttcaaataaatttcaatttccatactattaatatagtttaagtttagaacaagatattgctataaccatatgttgctgtttaagatatggtcatcttattatttaagaaacagtttcagtgacatagtggcataccttaattaggaaatctgtggttaagtatgtagatttacccaaatataaataactagagttttaattggcagaaatttgggatacttaaaatattatttcttgagaaatgataaaaacagttaagtattaactaacatttgtaaattcaaaatgtataatcttttctatgagcaacaacgtaaatttactcttttaaaaaactagtagaaaaaatatttatggaaagcttcccaaatgaatagtaagtacaagaagatttttgcttaacaagaaatattgtgttcaaatatttaaaatattttacaaacttttaggttcagagtaaaagactttcaaattagtgcagtgtattgattgataatgaatttaaattgatctactaggtaacatttaggtygctcacatgataacctatatccttttctgcagtaatttaaattaatgaaggatcattgttcatacataacaaatgttactttttatgccattgtttcaagctatatttttattctcctatttcactattacaagtacattctacatgactgtgttgactgtccaactgttcattaatgaaactatgtgtcccaattctgctgcttactgggtgaccctgtgcaagtctcttactctctgtgaacccttgtttctttacactgtgaaacagggattcaaacagtttctcatatcactgtgatgattaaatcggtacatgtgaagtgcctaacctatggtaggtgctcagagaaggttagcttctttccttgataataaagtcttaactattaaaaaaaaagccatggtatatttatacaccatattttgtctattctaagacatattttaacacctctgaatttccatgcatattacaaccaatggtgacttgtcaaagagatggcagtgatgaaacagttgtcactgccttcatgtgcagtttgttttccttttcatgtatatacagagtgatatatgatacttacatgtgtcatttcaaacatagcatacttttttaatgacacacacattgacagtgtgttttataactgatggcaccttaaattcaatgagataacaacataagaagagcctctttgttctaagcataatggcacatgtcttatttatcatttcatatattctttttgcagactttatgcagttggtggtcgtgatggaagttc

SEQ ID NO: 73638 - DNA, 785 bp, Homo sapiens
taaggataataaagtggatattgtccacacttccttacttgctctctttatgtaagtgtgtatatgtgtgtgtctataacaggtttttttcctaacagttgtatgtgtgtttggaagtttttaaaatagatttttcaaggctattttatgtacactttttttggttagtattttggtgatttttagttaaagaaaaacaatgttttccaagggcaaaaaaaagaactgaagttcggaaggaagctggatgtggacttcttacaagctcttgctccaaaacctggaaacgaggaaagagggccctcccgggaaacctgagaaacattggcacagcagagggaatcctttggtggggtgggcggagatgccagcccacttgtgtgactgtattgttttgagtgggctctaaggcaatttctgtgtgccactccattgacttaattaacattattaatcttggagggcattaaattaatgaatgatacaagggccaaaagagtgatttattcccttggattctgaatcacaatcaggagatagtctttatctggtgcaaccatagtttcattcttcatggagcggatttgaaggaaggwaaggtcattctagggatcgatttcattcatggtactctgtgccttccaggtgaagttgtgcgtgaggctggcatactgtgtggtggtgggattgcccacggtacttttgatgggaatacctttaaggagtaaaacaactggatcactagggctgttgttgggttctagacggcaactgtgtgcacgcca

SEQ ID NO: 73639 - DNA, 864 bp, Homo sapiens
gggaacatcacacaccaaggcttgttgggtgtgggggacaaggggagggagagcgttaggacaaatacctaatgaatgtggggcttaaaaactagatgacaggttgataggcgcagcaaaccattatggcacatgtataactatgtaagaaacctgcacgttctgcacatgtatcccagaacttaacataaaattaaaattaaaacaaaccagcctgtgatatttataaatgtatgttaacaaaaaactccagcgcatgaaagctcctagcagctttattcataacagctccaagctggaaacaacctagatgtctttcaagggagggatggttaaacaaacggtggtgcatccctacagtgggaatacaactcagcaatgaacagtggtgggctattcatacacacagccactggatgaatctccaggaaactatgctgagtgaaaaaacttagttccaaaaggtgtatatgataccatttataaagcatccttgaaacaatgatattaaataaatggaaagtacattaatggttgccaagtgttgaggcaaaaatgatgcagtgggagaagggaagtaggtgtggctrtgtaatagctataggaagaaacctcgtggtaatgaaaatgctctgtaaatggactgtattaatgtcaatatcctggttgatatattgcgctatagttatgcaagatgttaccactgtggaaaaagtaagtgaaagaaatatggggcctttctgtagtatttttaacaagtgtatgtaaatctgtaattatgttaaaaatatttttaaaaaccagcagcttgtgtgtacaggtaacataagagagattaagataaggtattttatatcataaaaa

SEQ ID NO: 73640 - DNA, 1486 bp, Homo sapiens
ttgatgagtttcttcctatgagtcagctttctgactttcataattcgttttgatataaaaatggatgatcgtgattcttattcttgctaatacaatcaattattttctactttcctgctttcaacaaggaaattttggaattaattgtggcaaatcatcaatgactttcctaagaaccagttttcttctaatacgcaacacaaatacatctatagcttatataagaaaatagttttcccttctcttaagatgcctgagtcctatttgctaaacacttgctgttcatggattactgaagaataaatgaaggacatagttgtataggtcagggtttgctgtgttcttgtaccatagttaataatcttatactggaaaacatgttggtttttcagaaaatgtataaagattaaattttagaaaatatcaatgtcttgtaattaaaaatggcagtaacaaaagattttgttcatctggacagttgttttatttttttaatttgctgctcattaggctctctggtatatctttgacgacttattggaggtgtatctgaacaaatttaaaccttagtttctttcctgctgcttattcaaaattcacgtatttccccacagggacagtacggataataatcagggcttatattcaacattctaaaatgttatgacctattcaaataggttatgaaaatactgaaatgccaccctgccagaaagtagtagaagccctactcctacaagagccctcactggacagctttgtgtctcccccagggatcctgaacacaatatacagggttagaaatattaggaaattgatattgagattcctaatatctgggaaaggtatggaattagagctgattgaacaattcaggggagagaagaaaataaacctcaagagttaagctaaaacataacttggaataatttgtgttctttgtggtcacttttgtatataacattaaaagcctgtggtgaaggtgaagcagcccagtggttatcagagagtccattgaatgttatatcaaaaacaaggcatccacaagtatcagtctgggttttatcagtgtagcgaaaccacataatgatttaaacaaagaacattaaatgtaaagaattattacactataataaaacagtaattatgaaatacaatagaattctatataatatgcaacggctgaggaaggatacccaaggaagaaacatcttgaaaagagtccctcttcctattgttaaggatcagacttccttgtgaaggtacagttgcaacccacgggaagacaccaagggtcactgctttgcccaagactgagctggtctgcaatagctgrtgaggcagagcgtaagcttccaaggtttgggtgagcctcagctcatggctgaatgcacacatgtccagagaaagtgggggtattaggtatagcatgtatgttgagggttataggaagatgcccaccagtctggatgaggacttcaaggtc

SEQ ID NO: 73641 - DNA, 972 bp, Homo sapiens
ttaaaaaaatttcctaccatgaattttcattgtctgttcatgacacggtgaagtcttaagttcctaataaattcaagaaggcactttctgtataatttccaaagacagattttaaaagttggcatcaaattaggctatactacagaaaaattaaaatctccattgtatgctacaactttaattttattcaactctaatcaaagtcaaagaaatttttcttaaaagttattgtactaaattaatagcatcgaaaagttattatttctttgatattaataaagaaatgtatattagagtaatgggctaagtcttatttcaatttcaaatcatgtttgactttaacattgatattctaaatttggggttgaatattaatagagatttaggcttttaaatataatttggtgtatttttagcccttttcatgatgtattaagtctatttaaaaataaacttaggtaggcaggtgcggtgactcatgcytataatcccaactctttgggaggctgaggtgggcagatcacttgaggtcaggagttcaagaccagcctggccaacacggtaaaacactgtctctactaaaaatacaaaaaaaaaaaaaaaaaaaagccaggtgtgggccgggcatggtggctcatgcttgcaagcccagatactcaggaggctgaggcacgagaatggcttaaaccggaaggcagaggttgcagtgagctgagatcgtgccactacactccagtctgggtgatagggtgagtctctgtcaaaaaaaaaaaaaaaagaaagaaaagaaaaaaaagatgtaaataagattattctttatctgtattttctgtatttattcattataaaatctaggtacagagaaatttttgacttgcctgaaatgcctgttaggaatctttaaggattgtaggatttttttttaaaaaagaggtattataagccagactaaaggagatgacttacatccac

SEQ ID NO: 73642 - DNA, 972 bp, Homo sapiens
ttaaaaaaatttcctaccatgaattttcattgtctgttcatgacacggtgaagtcttaagttcctaataaattcaagaaggcactttctgtataatttccaaagacagattttaaaagttggcatcaaattaggctatactacagaaaaattaaaatctccattgtatgctacaactttaattttattcaactctaatcaaagtcaaagaaatttttcttaaaagttattgtactaaattaatagcatcgaaaagttattatttctttgatattaataaagaaatgtatattagagtaatgggctaagtcttatttcaatttcaaatcatgtttgactttaacattgatattctaaatttggggttgaatattaatagagatttaggcttttaaatataatttggtgtatttttagcccttttcatgatgtattaagtctatttaaaaataaacttaggtaggcaggtgcggtgactcatgcttataatcccaactctttgggaggctgaggtgggcagatcacttgaggtcaggagttcaagaccagcctggccaacacggtaaaacactgtctctactaaaaatacaaaaaaaaaaaaaaaaaaaagccaggtgtgggccgggcatggtggctcatgcttgcaagcccagatactcaggaggytgaggcacgagaatggcttaaaccggaaggcagaggttgcagtgagctgagatcgtgccactacactccagtctgggtgatagggtgagtctctgtcaaaaaaaaaaaaaaaagaaagaaaagaaaaaaaagatgtaaataagattattctttatctgtattttctgtatttattcattataaaatctaggtacagagaaatttttgacttgcctgaaatgcctgttaggaatctttaaggattgtaggatttttttttaaaaaagaggtattataagccagactaaaggagatgacttacatccac

SEQ ID NO: 73643 - DNA, 972 bp, Homo sapiens
ttaaaaaaatttcctaccatgaattttcattgtctgttcatgacacggtgaagtcttaagttcctaataaattcaagaaggcactttctgtataatttccaaagacagattttaaaagttggcatcaaattaggctatactacagaaaaattaaaatctccattgtatgctacaactttaattttattcaactctaatcaaagtcaaagaaatttttcttaaaagttattgtactaaattaatagcatcgaaaagttattatttctttgatattaataaagaaatgtatattagagtaatgggctaagtcttatttcaatttcaaatcatgtttgactttaacattgatattctaaatttggggttgaatattaatagagatttaggcttttaaatataatttggtgtatttttagcccttttcatgatgtattaagtctatttaaaaataaacttaggtaggcaggtgcggtgactcatgcttataatcccaactctttgggaggctgaggtgggcagatcacttgaggtcaggagttcaagaccagcctggccaacacggtaaaacactgtctctactaaaaatacaaaaaaaaaaaaaaaaaaaagccaggtgtgggccgggcatggtggctcatgcttgcaagcccagatactcaggaggctgaggcacgagaatggcttaaaccggaaggcagaggttgcagtgagctgagatcgtgccactacactccagtctgggtgatagggtgagtctctgtcaaaaaaaaaaaaaaaagaaagaaaagaaaaaaaagatgtaaataagattattctttatctgtattttctgtatttattcattataaaatctaggtacagagaaatttttgacttgcctgaaatgcctgttaggaatctttaaggattgtaggattttttttwaaaaaagaggtattataagccagactaaaggagatgacttacatccac

SEQ ID NO: 73644 - DNA, 1117 bp, Homo sapiens
tattttgtagataaatcttctgatgcgatacctgcaaaaatatagtaaaccgcagatttgatayagttgactcctgcttggatccttgggcataaaaatgattaataaaacatgactacataacttagataattcacttctataatatgtaaaaacaaaaatgttgctaaattaataattcctgaattcctaggtgcttcctgaagtggctgagttgtaaatcacattttctattacctgtggtgagactcagagaatgctttcatttactctgttaggcttggaaaatacctctataagccattccagagaagaagctgatacaatttggattttgtcccctacaaatcttatgttgaaatgtgacccccagtgttggggatgaggccaggtgggaggtgttggggtcatgggggcagactcttcatgaatgaagtggtgctcttcccatggtaatgagttcacgcaagatcctgttgttagagagactggaacctccttcctctctctcttgctccctctccttttgccctgtcacaagcctgctccccttttgctttcaggcatcagtaaaagcttcctgggcctcataagaagccaagcagatgctggtgctgtgtgtacagtcaacagaactatgagccaaataagccacctttctttataaattacccagtctcagatattcctttgtagtaacacaaaatagattaatactaaagtctttctcagtttttggtgacttgtatcttttgtaaagtaaactaaaataaaattgtgtctcctctctacgtcactaatcatgtccagtcctaagacaaatcagaatggcactctcccttccttctcttgtgtctttcttttctccttccagaactaccacaccccagcttgggcctgggaagcataatttaacatagaagctttgcactttgcccgtcaggtttaccaggctcccagtctattattattttatgataaaatttgtctttgaaaggagtctgaatgttagtgcaatacttttccaaatagtgtcttcatagggcttcaagggatagtttaaatgcaaaacaaattcaaggctttctgatttctcaattaactcttacataaagtt

SEQ ID NO: 73645 - DNA, 1117 bp, Homo sapiens
tattttgtagataaatcttctgatgcgatacctgcaaaaatatagtaaaccgcagatttgatatagttgactcctgcttggatccttgggcataaaaatgattaataaaacatgactacataacttagataattcacttctataatatgtaaaaacaaaaatgttgctaaattaataattcctgaattcctaggtgcttcctgaagtggctgagttgtaaatcacattttctattacctgtggtgagactcagagaatgctttcatttactctgttaggcttggaaaatacctctataagccaytccagagaagaagctgatacaatttggattttgtcccctacaaatcttatgttgaaatgtgacccccagtgttggggatgaggccaggtgggaggtgttggggtcatgggggcagactcttcatgaatgaagtggtgctcttcccatggtaatgagttcacgcaagatcctgttgttagagagactggaacctccttcctctctctcttgctccctctccttttgccctgtcacaagcctgctccccttttgctttcaggcatcagtaaaagcttcctgggcctcataagaagccaagcagatgctggtgctgtgtgtacagtcaacagaactatgagccaaataagccacctttctttataaattacccagtctcagatattcctttgtagtaacacaaaatagattaatactaaagtctttctcagtttttggtgacttgtatcttttgtaaagtaaactaaaataaaattgtgtctcctctctacgtcactaatcatgtccagtcctaagacaaatcagaatggcactctcccttccttctcttgtgtctttcttttctccttccagaactaccacaccccagcttgggcctgggaagcataatttaacatagaagctttgcactttgcccgtcaggtttaccaggctcccagtctattattattttatgataaaatttgtctttgaaaggagtctgaatgttagtgcaatacttttccaaatagtgtcttcatagggcttcaagggatagtttaaatgcaaaacaaattcaaggctttctgatttctcaattaactcttacataaagtt

SEQ ID NO: 73646 - DNA, 1758 bp, Homo sapiens
atgattttaggtgtagtgtttcagcttcaaattaactgagataatcagcagcctgtgtgtatacagcacctgagtattttccttataagatcactacactaacaggtgcacccatgttacagcctcaaattatatcagacttcatcatgaaaacacacgtttggatttcacttttgcacttgtgataaaactgttgttgaaactgtctgatgtaatcatccaatggacctttcataggatcccaatcaagacaattccccttrtatttaataaatagaaaatctatattgtccaagaaatgtggattatttctcccaagtcaataaatcttagtttgggggtgggggaaatgtggggttttatgagaaactattttgtgcaagcagtgtctctaacttcaaggaaatcaatttagtgggatacagactctaagaaagttaattttaaaacaatgcaataaatccagtgctagaaatatacataggttgctatggaagcaagaagataagttctgtaagtaattacatttccatttctgccttagctacaggaagataagagctaagctctgtgctcgattacagcaacgtcacttaccacagcatgtttgctgcttctttctcctccaatttactttatccattttatactttataattcattgcactatatcttgtttctgctaagtaaaatcaaggataaaggatttagctaaaaatgcatagtttaaaaaatttcttaccagatattactactttaaaaaaaatttttaaattatgggataggaagaaaaatcatgagtatttagtagtgatattatattccataaacacatgtattctaaatagaagagtgttaaaagataaaaaaataagaatttagaagtaaatgtaaggcattaggtataatttttacaatctgtttggcggtagagtgataaatgaagtgacccacaacctcatttctctaagaggaacaagtctattgatataatgaagcaaaaagctcaatgctttttattatgggtctcacttaattttaaagagccacctggaagctagctaatagaatgatcctcatattctggtacgagtacattagctcatcccagattctaatttccataaagtccaccgtcttagcactattgctcagacctactagtcacctaatgtcatcagatgtgctgctttagagataagaaaaatgctgttttcttatagagaagtctgcggtttgagtgacatcttatttaatcgtgatagcccaattcacattggtatctaccagctctatacaatccccttcctgggcagtttggaaaataaaacaaatcctactggtccaaacaaatatagatcccctaattgagatatcagttttggggatgttgctttaaccagctgagctttctggtggcctacactttacttttcttccctcagattttcttctacaaagtagtaaataaaataaaataacattaacaataatatacattttcatctcctattttattctccactctttaaaagtcaagcatttttaggagggtagctttatgacgggtaactttagagggtagctttatgaagttatagatgcaatacatattaacatatcactcagctctgtcattttctagctgagtaatctctctcttacaaggtactcaattactctgtgcctcggttttcttatctataaaatgggaaatctaaaaatacttattgaagaaatttaatacatttttaaaaa

SEQ ID NO: 73647 - DNA, 659 bp, Homo sapiens
gaacatctctcatagcttcttgacctacaactagggcaaaagttgacacatttttttcctaaaggaacacactgtaaatattttatgcttccaagctatatagtctctgtcacaactactcagcactgttgtattgccaaagctgatataagcaaaatgtgcacaaatgggcgtggctgtattctgagaaaattttatttataaaaatgggtttgctcatgggccatagttcatcaacctgtaaccrgcaaaaggttccagctgcacactgcttgtagaaagaagccaaaatcataataaggtgtgataaaaagagagcaagatgttattatttgtgtcagcaagaggaagagcaggtgaaaaaaattccactcctcaatttatggaggaacacagggggttttttaaagggagggtttgaaatgcagaagaggttgggaggggctgtgcctaggaggtgctaggctgtgtgatctgctccaatggctcatcttgaattatttttccatctggtgaaggggctggcaccgtcgtgggtcctaccaggttataaatgtactgcagtcactcttgtagtcagtctctagctgggagtgggttctggacttgaagtaatcttttgttggagagagaattctggaggtgtctggtccctatca

SEQ ID NO: 73648 - DNA, 659 bp, Homo sapiens
gaacatctctcatagcttcttgacctacaactagggcaaaagttgacacatttttttcctaaaggaacacactgtaaatattttatgcttccaagctatatagtctctgtcacaactactcagcactgttgtattgccaaagctgatataagcaaaatgtgcacaaatgggcgtggctgtattctgagaaaattttatttataaaaatgggtttgctcatgggccatagttcatcaacctgtaaccggcaaaaggttccagctgcacactgcttgtagaaagaagccaaaatcataataaggtgtgataaaaagagagcaagatgttattatttgtgtcagcaagaggaagagcaggtgaaaaaaattccactcctcaatttatggaggaacacagggggttttttaaagggagggtytgaaatgcagaagaggttgggaggggctgtgcctaggaggtgctaggctgtgtgatctgctccaatggctcatcttgaattatttttccatctggtgaaggggctggcaccgtcgtgggtcctaccaggttataaatgtactgcagtcactcttgtagtcagtctctagctgggagtgggttctggacttgaagtaatcttttgttggagagagaattctggaggtgtctggtccctatca

SEQ ID NO: 73649 - DNA, 1307 bp, Homo sapiens
aaaaaaaaattgttggattccaagtattgtgagaccaaggaatgaattacaggggagagtgacaacattttttttttctaaagattttggggacagctctgtttctggaatgtccgaagatagtccrtccaataggaccaattaccagaatccagcccccagagcctaccatttctatactcattcttctggctaataaagggggttctgcttcacgccctcagtacaggtctttcagccatgacgaccaaggcagaccattctggtttcagctggagtgtttctgttctcatgagacaccagtccacaggggttctctgtctcacatgtggaagggaaagtgaaagtagcttcttttaaaatgaacagttacctccttctcattggcaaaaggccacttaaatttcccaagggggacagaaaaccatcttgcaaagtttagaagatattcgtagcagctgacccgcagcaatgtcctaaagctgggctttcagaatcactgggtacttggctccattccagtctaattaagtctcaaggcttgggtagtaggacccaggcattgatattttcgaaaaagcttctcagttaacttgaaaatgcttccagggttgagaagcaccattctgagtacagttgatatgcaccatcctctttcagagctttttaggagttcaaatttggctagaccaagggaaggacagtacaaagtgtctacttatatgaactgttccagttgactgccatttgattgatgtgttggaggattagggccccagccatcctattaagaaagcaagtggaccactgcctggctgtgagcctggaggaagccacttcaacggctttgtttcaagagccagggaagacagaacccgagagctgtgtcttgaaggcttcctgcagggagtgggagctatgattttattgctagagaaagagtctccaagctgttgatggattacaagctgctgatccgtctccagccctcagagggcagaatgtggagaattccaaaacacaacataacagttgcctctggtacaaagaagacgcagtaatttgtggaggccgcgtggctaagaatgtaaaggcaaccaagcactggggttaagaattaggaatctggatttgaaccaccctaggttcacatcctaccacttactagctatgtgcctttaggtatattaattaatttgggcttcactctcttatctgtaaaatgaggataataatagtaattacctcatttaattgcgatgattcagtaaaataatggacgctaacacttatttaaatatataatg

SEQ ID NO: 73650 - DNA, 1307 bp, Homo sapiens
aaaaaaaaattgttggattccaagtattgtgagaccaaggaatgaattacaggggagagtgacaacattttttttttctaaagattttggggacagctctgtttctggaatgtccgaagatagtccatccaatagsaccaattaccagaatccagcccccagagcctaccatttctatactcattcttctggctaataaagggggttctgcttcacgccctcagtacaggtctttcagccatgacgaccaaggcagaccattctggtttcagctggagtgtttctgttctcatgagacaccagtccacaggggttctctgtctcacatgtggaagggaaagtgaaagtagcttcttttaaaatgaacagttacctccttctcattggcaaaaggccacttaaatttcccaagggggacagaaaaccatcttgcaaagtttagaagatattcgtagcagctgacccgcagcaatgtcctaaagctgggctttcagaatcactgggtacttggctccattccagtctaattaagtctcaaggcttgggtagtaggacccaggcattgatattttcgaaaaagcttctcagttaacttgaaaatgcttccagggttgagaagcaccattctgagtacagttgatatgcaccatcctctttcagagctttttaggagttcaaatttggctagaccaagggaaggacagtacaaagtgtctacttatatgaactgttccagttgactgccatttgattgatgtgttggaggattagggccccagccatcctattaagaaagcaagtggaccactgcctggctgtgagcctggaggaagccacttcaacggctttgtttcaagagccagggaagacagaacccgagagctgtgtcttgaaggcttcctgcagggagtgggagctatgattttattgctagagaaagagtctccaagctgttgatggattacaagctgctgatccgtctccagccctcagagggcagaatgtggagaattccaaaacacaacataacagttgcctctggtacaaagaagacgcagtaatttgtggaggccgcgtggctaagaatgtaaaggcaaccaagcactggggttaagaattaggaatctggatttgaaccaccctaggttcacatcctaccacttactagctatgtgcctttaggtatattaattaatttgggcttcactctcttatctgtaaaatgaggataataatagtaattacctcatttaattgcgatgattcagtaaaataatggacgctaacacttatttaaatatataatg

SEQ ID NO: 73651 - DNA, 1307 bp, Homo sapiens
aaaaaaaaattgttggattccaagtattgtgagaccaaggaatgaattacaggggagagtgacaacattttttttttctaaagattttggggacagctctgtttctggaatgtccgaagatagtccatccaataggaccaattaccagaatccagcccccagagcctaccatttctatactcattcttctggctaataaagggggttctgcttcacgccctcagtacaggtctttcagccatgacgaccaaggcagaccattctgrtttcagctggagtgtttctgttctcatgagacaccagtccacaggggttctctgtctcacatgtggaagggaaagtgaaagtagcttcttttaaaatgaacagttacctccttctcattggcaaaaggccacttaaatttcccaagggggacagaaaaccatcttgcaaagtttagaagatattcgtagcagctgacccgcagcaatgtcctaaagctgggctttcagaatcactgggtacttggctccattccagtctaattaagtctcaaggcttgggtagtaggacccaggcattgatattttcgaaaaagcttctcagttaacttgaaaatgcttccagggttgagaagcaccattctgagtacagttgatatgcaccatcctctttcagagctttttaggagttcaaatttggctagaccaagggaaggacagtacaaagtgtctacttatatgaactgttccagttgactgccatttgattgatgtgttggaggattagggccccagccatcctattaagaaagcaagtggaccactgcctggctgtgagcctggaggaagccacttcaacggctttgtttcaagagccagggaagacagaacccgagagctgtgtcttgaaggcttcctgcagggagtgggagctatgattttattgctagagaaagagtctccaagctgttgatggattacaagctgctgatccgtctccagccctcagagggcagaatgtggagaattccaaaacacaacataacagttgcctctggtacaaagaagacgcagtaatttgtggaggccgcgtggctaagaatgtaaaggcaaccaagcactggggttaagaattaggaatctggatttgaaccaccctaggttcacatcctaccacttactagctatgtgcctttaggtatattaattaatttgggcttcactctcttatctgtaaaatgaggataataatagtaattacctcatttaattgcgatgattcagtaaaataatggacgctaacacttatttaaatatataatg

SEQ ID NO: 73652 - DNA, 1307 bp, Homo sapiens
aaaaaaaaattgttggattccaagtattgtgagaccaaggaatgaattacaggggagagtgacaacattttttttttctaaagattttggggacagctctgtttctggaatgtccgaagatagtccatccaataggaccaattaccagaatccagcccccagagcctaccatttctatactcattcttctggctaataaagggggttctgcttcacgccctcagtacaggtctttcagccatgacgaccaaggcagaccattctggtttcagctggagtgtttctgttctcatgagacaccagtccacaggggttctctgtctcacatgtggaagggaaagtgaaagtagcttcttttaaaatgaacagttacctccttctcattggcaaaaggccamttaaatttcccaagggggacagaaaaccatcttgcaaagtttagaagatattcgtagcagctgacccgcagcaatgtcctaaagctgggctttcagaatcactgggtacttggctccattccagtctaattaagtctcaaggcttgggtagtaggacccaggcattgatattttcgaaaaagcttctcagttaacttgaaaatgcttccagggttgagaagcaccattctgagtacagttgatatgcaccatcctctttcagagctttttaggagttcaaatttggctagaccaagggaaggacagtacaaagtgtctacttatatgaactgttccagttgactgccatttgattgatgtgttggaggattagggccccagccatcctattaagaaagcaagtggaccactgcctggctgtgagcctggaggaagccacttcaacggctttgtttcaagagccagggaagacagaacccgagagctgtgtcttgaaggcttcctgcagggagtgggagctatgattttattgctagagaaagagtctccaagctgttgatggattacaagctgctgatccgtctccagccctcagagggcagaatgtggagaattccaaaacacaacataacagttgcctctggtacaaagaagacgcagtaatttgtggaggccgcgtggctaagaatgtaaaggcaaccaagcactggggttaagaattaggaatctggatttgaaccaccctaggttcacatcctaccacttactagctatgtgcctttaggtatattaattaatttgggcttcactctcttatctgtaaaatgaggataataatagtaattacctcatttaattgcgatgattcagtaaaataatggacgctaacacttatttaaatatataatg

SEQ ID NO: 73653 - DNA, 634 bp, Homo sapiens
aacctctcttcattacatcacactggactgtactaagaacactaggcaccaagctatttagagtgaatgtttctgatgaactcgttgggccactggctcacaagcatctgtttgcatgaatttattttttagggagaagagaatcttcatgaaaaaggtggatgcacaagtgtccaaaagtagattacaggaagagaaagtstttattccttaacctggccccatggattctattttaatttatagtatgatactttaaactacaaataaaatcttaaaccccccagcagactgaacagaccacctcttggccaaagggattccagaaaagccttaaaaacttagttcccagccatgatgagatgaggtcagacaggcctcattataccccctccctttttagacacgactgaccggcattgatgttaaaacagaaatcataaaactggcagaacagattctttgtggcgatacaataccaaattataaataggacctaaggtcgtgccaggcgagggttaagtcatgtaccctacacgtaaagaataaactatgttctaactgtcacaagatttttctttttctctagcagctaaacaaacactggccttcagataagcaatattaaaacaat

SEQ ID NO: 73654 - DNA, 1582 bp, Homo sapiens
caaaaatatttggaaaaagtaaaacaataaaaaaacacaaaaatttaaaaatactttatatcagctatttacaaagcatttatgttgtattaggtattatagcaatctagagatgatttaaagtatacggaaggatgtgcataggttatatgcaaatactatgccacattatatcaggaacttgagcatctgtgaattttggtatctctggggtcctggaaccagtatcttgaggttactaagcgacgactgtattcaatttcttctttggttattagtttattctttaatgtatttttgttgttgttttgtctttttgtttttgcctcttcaagtcaacgtcggaaacttagttgttctagactacccattagctcaaagctaccagtaatcagactaccactgcaatctaagcaaccgattttttttttacccatcagactggcaaaaattaagataagatctagtgatgttgaagctgtggggagtttttcctgagcatgttaattatgacagccctttttactaggcacctagacgattcatcaaaatgaaataaaatacccatgcacttgaagaagttacctggttatttccttatctgggtgctggttatgtgaggtctacagttgatgaaaacttattaagctttatatttctaataggtacaattttctgtatgtgtaatatatttgaaaagtttttaaaatgttttttgccacagcccgcagctgtgtataatgctattcgcttaacagtggaaaacatggcaatgacctgaatctccctggctcccgggatcctacccccttaagttaacgaaaataaaagtaaaagaaataacttccactgtctttcgtaatgccttaaatccgtcctcagttaaaccggcggttggcgctggttttttccagggcaggattctgggagacggaggagcagacgccagcatttcgcccccggcacctccagcgggctgcggtccgctcccggcctcactcgagcaggtcccgccccgccagaggccgttagtccaagtcacgtgatcgtcgactcagctgacctggcgggaccggaaaaagaaattcccgggccctggcttcctcgcgcgatgtatgaggcaccaggggtgaagcgggcatgggctgctggagcgggaatgagggggcgccagtggctccggaaacgggttgaggttgtctgcactggccgctccgcaaacacagtgtgtgcgggcgtcagggcagcaggtctggtagagaaaagtccaccgccatccctctcccgartggggcgggtaagacagagcaggccggccggcttagagttccctgcttccctggcggaaggaagggcccctgactcctggggcaggaactagggcttgtctggagctgggagtcctttcaggtcttctctagctccaaaaggacctcccaaggacacccccttccccagccctgctgtgggacttggacaggaaagtgctagaatcaggctcactcttgcacactgttaggaagccactccgctcttttcagatccagaaagtagtagttttggggctgatacttatccatcc

SEQ ID NO: 73655 - DNA, 1791 bp, Homo sapiens
gaatatatccaccggcccccaaaatttccttgtgttaggggctgttttaggaagtatgatcaagaagggctggcctgccagggtggagtggctcacgcctgtaatcccagcactttgagaggccaaagtgtgcagatgacctgaggtcaggagttcgagattagcatggccaacacrgtgaaaccctgtctttaccaaaaatacaaaaaagttgggtgtggtgacgcatgcctgtagtcccagctacttgggaggctgaggcaggagaattgcttgaacccgggaggtggaggttgcagtgagccgagattgtgccattgcactccagcctgggcaacagagcgagactccgtctttaaaaaaaaaaaaaaaaagaagggctggtctgatgaggtgtcacttgagcagagagtggaatgaaataaaggatagcaagccacatagagagtgcagcggaagcaaggctggtgtccctgagctgcagcagggaagctggagtggctggagttgtgtgggtatggggaagaagggagagagttcactcgtctctgtgaggcccaggactttgttttatcccatgctgtacccccagcacttagagtgggagctagcacagagaaggtgctcaattgatgtttgctgagcagatgaatgcctggagtagacctcagagcagggtttggtggcagggtgggtcaggtagagtttactcaacagcctggtgataggggagaacaagtggccagagggtatccatctatgtcggggaccaggggtccctgctgggcagcagtgtgggagacacagggatcctggccacacctcagtcttctttccagcctgattacctgcctccctcccttgcagaggtttcggttctgtggtgatctggactgtcctgaccgggtcctggcagagatcagcacgctggccaagatggttgagtgcacagggtctacactgggtggaggaggggtgttgggctggggattgtggctgtagaggatggtgaggtttctctggggctagggcctcagtgctctcagcctgtgctaccatgctttgtgaccttgatcagtggctggcctgctttgagccagtccccaggaagaaggggtgaggtttgccagcctggctgatgtaaggacttcctttccagtcctctgtgaagttgcagctgctctgcagccaggtactaaaggagctgctgggacagggaattgatgtgagtacaagatccagcaccccattgtcccatgaccttatgaccaccactgccctgaaactctgcactaggcccggggagacgggtgagccagcctctcaacctctctgggtacctcccttccttctttccagcctgtctgttccttattgcaggatccaggctgggggtgaggggctggtgagcagggacctggcaccccctgaaggtctcctttccccatagtataagaagatcctgaaactcacagctgatgccaagtttggtgagcaccccgctgagttcacaggccccaggcaaccctgggacctcggcctggtgcctggtacagagcccgccccccacccccccgccaacacacacatcccagcagtatccttaacctgccttccctagtggaggagcatgagggaaagaaagacattgacagtcccaccttcctgtcctctgccagctcctggtggagcagtagcagtgcctatggctccaggaggcctgggggctttgagctgaagttaatagggcaacagggaggtggctgggcccacagtgacaccccctgtccc

SEQ ID NO: 73656 - DNA, 763 bp, Homo sapiens
aagttgagagattccctggtccagtctgggggagggaaaaaatatgcagtgtagcatagatggttgtacttgtccactcagacacatgctcatacttattagatggatgtatcagatgcttcaaaagtcctgatgtgtagtagcacaaaagctgcttgtaaaaaggaagttgcaaaatgataaaaatttctgcagcagttcaggctcctgatgacaaagctggttctgataagtagttcttttgacatgcacagcagstttcactgtaagtcctgtgttccagcggtttcatttagaccacgggaagttgaaagcaaagtttaaatgttctctgctgacaaaatgtggtatatatccatcaatggacttctactcagtaatgaaaggaacaaactaccaaaacctgttatatgtcatggaccaacctcaaaaaccttagctaagtaaaaagccagacatgtgaccacatattgtataattctgttgatttgaaatgtccaaaaaaggcaagttgatagagacagaaatggtctgatttacctcaagaagtagggattcaagctcttagggtacatgtgatacatacattagaagaaataaggaaaagaaaagaaatttatatgtaaataaatgaaaataatacttctccctgattataaagaaaattgcattctttttgtaataatttggaagacaaaatatgaagaaaagtctttaattttgccactgaaagcattctggtttgttgctttttatatttttt

SEQ ID NO: 73657 - DNA, 641 bp, Homo sapiens
catcagcacatctgttggtatttttggtgcctgtctttcctctggacacctgtggctttggaggtggcatgggaatgccagcgggagcttatgtggtgaagccctgtagctcctgaggaagagtgtgccaaagtcaagggccactcaggggtctggcccgcagaagccctggatcacagtgactgggagtgctagaaaggaagatgggtcctgcttgtcagtgtggtgggggattctagcattagagaaatgctaaactcaagacctcccagccccttccgctgctgagatcctgagagcttgagagtgtctgttggggtggctggtttatgatggatgagtttgatctggggcacactcataaaagcygtcctttgattgatggcagagctgcccacgctttgtcctctccaaatctgtactccatccagagcaagaatctgtaaagtcccaagtttttaaaactgaaggaagtttcccagctgacttgcctgagcacaggactggagtctagtggaacctctgcaagtgacctctgcagcgttttctcgggcaagacaataacttatattttcacattttcagtgacctcatatctaatttcctgaccatgcaataaaaatattttgacgagaaataag

SEQ ID NO: 73658 - DNA, 641 bp, Homo sapiens
catcagcacatctgttggtatttttggtgcctgtctttcctctggacacctgtggctttggaggtggcatgggaatgccagcgggagcttatgtggtgaagccctgtagctcctgaggaagagtgtgccaaagtcaagggccactcaggggtctggcccgcagaagccctggatcacagtgactgggagtgctagaaaggaagatgggtcctgcttgtcagtgtggtgggggattctagcattagagaaatgctaaactcaagacctcccagccccttccgctgctgagatcctgagagcttgagagtgtctgttggggtggctggtttatgatggatgagtttgatctggggcacactcataaaagccgtcctttgattgatggcagagctgcccacgctttgtcctctccaaatctgtactccatccagagcaagaatctgtaaagtcccaagtttttaaaactgaaggaagtttcccagctgacttgcctgagcacaggactggagtctagwggaacctctgcaagtgacctctgcagcgttttctcgggcaagacaataacttatattttcacattttcagtgacctcatatctaatttcctgaccatgcaataaaaatattttgacgagaaataag

SEQ ID NO: 73659 - DNA, 532 bp, Homo sapiens
aaaattaatctctctccaccactcaaaaatttcttcagcaaaaagttagtacactctagaaacaagcaattaagctttataaatgttcatcttttgttcccatgtaagtctggatgcaagatttatttcttcatcacactagtgggttcccaaaagaaaacagcaatttaaataaaaatcatgagtgattaccatgcagttaggcaaggcatctgtaaaataatacaaccgctggactaggattaaaggagaactgggttcttttcttggctttgtggcatatgtaattttacacaaggcaaaaatcacaacctctctggstctcatttttctcatctctaaagtgggggttgggctaaaaatcctccaaggcccctttcagcttgtgataagacttcaagtcgccttttcaccctgaaggagtccatttcagtctgcaccaacagtttattttctgagtcacagcttatttctccatgcttatcctaaaaatgttgtgcccaaatagttctaagctctcgagatttattcc

SEQ ID NO: 73660 - DNA, 532 bp, Homo sapiens
aaaattaatctctctccaccactcaaaaatttcttcagcaaaaagttagtacactctagaaacaagcaattaagctttataaatgttcatcttttgttcccatgtaagtctggatgcaagatttatttcttcatcacactagtgggttcccaaaagaaaacagcaatttaaataaaaatcatgagtgattaccatgcagttaggcaaggcatctgtaaaataatacaaccgctggactaggattaaaggagaactgggttcttttcttggctttgtggcatatgtaattttacacaaggcaaaaatcacaacctctctgggtctcatttttctcatctctaaagtgggggttgggctaaaaatcctccaaggcccctttcagcttgtgataagacttcaagtcgccttttcaccctgaaggagtccatttcagtctgcascaacagtttattttctgagtcacagcttatttctccatgcttatcctaaaaatgttgtgcccaaatagttctaagctctcgagatttattcc

SEQ ID NO: 73661 - DNA, 532 bp, Homo sapiens
aaaattaatctctctccaccactcaaaaatttcttcagcaaaaagttagtacactctagaaacaagcaattaagctttataaatgttcatcttttgttcccatgtaagtctggatgcaagatttatttcttcatcacactagtgggttcccaaaagaaaacagcaatttaaataaaaatcatgagtgattaccatgcagttaggcaaggcatctgtaaaataatacaaccgctggactaggattaaaggagaactgggttcttttcttggctttgtggcatatgtaattttacacaaggcaaaaatcacaacctctctgggtctcatttttctcatctctaaagtgggggttgggctaaaaatcctccaaggcccctttcagcttgtgataagacttcaagtcgccttttcaccctgaaggagtccatttcagtctgcaccaacagtttattttctgagtcayagcttatttctccatgcttatcctaaaaatgttgtgcccaaatagttctaagctctcgagatttattcc

SEQ ID NO: 73662 - DNA, 1153 bp, Homo sapiens
tgcatttttaaaatagataatgtcatttccatggctctttcagattatcgatgggacattttcaaataaaacttgtgtgtgcttaagtgctttatttaayaggagacagattttatttccacaagaagcagagattgtaagtattatttggtgtccttccctggcatagcactgtaggaagcaacagagattgtgctcaaaatacagacagctaaaaaacatttgatttccatcgtgtttcttaaaattttactggtagctaaaggctcttatcaatccgtaattttaagtggtccagaacataaattagctgtgagaactgagaaaaacatttctgctggagcaagttcattcttagaaaccaaggcctaccctaccttagaagaggaaaaattatatatgcgttggaaagtttttcagaaaaaaatcaactttttccaattctctatcagaatattggtcaagttagttattcacatctttcaatggatcagaaatgagtgcactatcttccaaaaaggatatctatcctacaagaaaatgcctttcctgaaatgtttcctaagctcaatcttacaaagaccatcacactcaagcccaggctgagaaatgcctatatattgggccagccaagaaggtaactacacaactgattttaggagcttttccccttttaacatttaaaatttattccagctgaaaatgtgatgtgtaaatacacatggaaagaactttggataaaatatatctgtaattatttatactgcaatgctttattttgcaaaacatctgtttatttaaatagctaatatatgcaccagtaaaaacaatgtgaaagttacagaaggacatacagaggttataagtattgtttgatgtccttctaattctaattctcccctaacccctgctgaggcaaaaactgttatcagttttttttaatatatcctcccaaagattatagcatattaaacaaaacacatagttcttgcaccttgctctttttcacttaacaatttatcttggaccccaacctcattctgtttaatggctgaaaagtgttctctcatatggatgttccataatttacttaaccagcccctgacttgcatatgtaccattctttctatagatttaattcctagaagtggga

SEQ ID NO: 73663 - DNA, 1153 bp, Homo sapiens
tgcatttttaaaatagataatgtcatttccatggctctttcagattatcgatgggacattttcaaataaaacttgtgtgtgcttaagtgctttatttaacaggagacagattttatttccacaagaagcagagattgtaagtattatttggtgtccttccctggcatagcactgtaggaagcaacagagattgtgctcaaaatacagacagctaaaaaacatttgatttccatcrtgtttcttaaaattttactggtagctaaaggctcttatcaatccgtaattttaagtggtccagaacataaattagctgtgagaactgagaaaaacatttctgctggagcaagttcattcttagaaaccaaggcctaccctaccttagaagaggaaaaattatatatgcgttggaaagtttttcagaaaaaaatcaactttttccaattctctatcagaatattggtcaagttagttattcacatctttcaatggatcagaaatgagtgcactatcttccaaaaaggatatctatcctacaagaaaatgcctttcctgaaatgtttcctaagctcaatcttacaaagaccatcacactcaagcccaggctgagaaatgcctatatattgggccagccaagaaggtaactacacaactgattttaggagcttttccccttttaacatttaaaatttattccagctgaaaatgtgatgtgtaaatacacatggaaagaactttggataaaatatatctgtaattatttatactgcaatgctttattttgcaaaacatctgtttatttaaatagctaatatatgcaccagtaaaaacaatgtgaaagttacagaaggacatacagaggttataagtattgtttgatgtccttctaattctaattctcccctaacccctgctgaggcaaaaactgttatcagttttttttaatatatcctcccaaagattatagcatattaaacaaaacacatagttcttgcaccttgctctttttcacttaacaatttatcttggaccccaacctcattctgtttaatggctgaaaagtgttctctcatatggatgttccataatttacttaaccagcccctgacttgcatatgtaccattctttctatagatttaattcctagaagtggga

SEQ ID NO: 73664 - DNA, 598 bp, Homo sapiens
gctaattgctctacatcattgcaaaccagggctactatacttattttaatatttttcatgtggttgatagatctcataaaatgcttgatatttgatatcagtagtccctaagaaaatatctttaagatgatttggaactcatttaatggcattaaaaacactatcaatggaggtagaacaaaatgacagaaaaatttttatactttgtttcctgtaaattcagtagctacttaaaataataggtayagaaacattaacttcatctttacaaagggagaatgaaatcacttttaccaatcgcttatcaaaacaaatgtgagttggaatcttagattcttcattagaatcctatgaaaatctcagaaatgaagcaataatttcactaaacaagcaaataataaactacaaaagttgtttttaagtgcataaggcagttaccaattttcagtctttgaacttattagcatttattaagtgcttattatgggccatttattggatgctgagtttaataaaaggaacttggttaatttacattacagaataagagctatcagtaccacatttttagcatcaaattcattacaagagtgttaag

SEQ ID NO: 73665 - DNA, 598 bp, Homo sapiens
gctaattgctctacatcattgcaaaccagggctactatacttattttaatatttttcatgtggttgatagatctcataaaatgcttgatatttgatatcagtagtccctaagaaaatatctttaagatgatttggaactcatttaatggcattaaaaacactatcaatggaggtagaacaaaatgacagaaaaatttttatactttgtttcctgtaaattcagtagctacttaaaataataggtatagaaacattaacttcatctttacaaagggagaatgaaatcacttttaccaatcgcttatcraaacaaatgtgagttggaatcttagattcttcattagaatcctatgaaaatctcagaaatgaagcaataatttcactaaacaagcaaataataaactacaaaagttgtttttaagtgcataaggcagttaccaattttcagtctttgaacttattagcatttattaagtgcttattatgggccatttattggatgctgagtttaataaaaggaacttggttaatttacattacagaataagagctatcagtaccacatttttagcatcaaattcattacaagagtgttaag

SEQ ID NO: 73666 - DNA, 670 bp, Homo sapiens
gcataatctgcctccagcagtttctgggagtgaacccagctatcttgctgaaggtagggtaggggtggatgcaacaatgggctgattgttatcaatatgtatggcaagatattatcttgagatattaatctgtgggtttttctttgctcacttccttgtacagtgaccaaacagcctcacgcaagagtacagttggtaaagagggactgaaaagagccaaaaatgtcaacgttcatatttgtgactctaaaacagcatycaagaatcaaaaaagcaaggcttggggcacaaagcacagagacatgtggaccagggacagggatagacagacagccctatcccagtgcctccagggagaccagagtaaggtgtgctgggccgagggaggggaggagcacacggtgaggagcaggtccacattggaagtcttgggagccccaggagcccctcagctggttgcatattcccagagatgtttgccaagccctgattacatatccacactcccctgaatgaacacaccctccccattccagtgtctaaggactctcatgagccctgcagatctgttaggaacactttcagctctaagcaacaaaagatatgattaacagtgccttaaacactacaggtgtattctttcacacaacaagaaggctgtaagtgggta

SEQ ID NO: 73667 - DNA, 670 bp, Homo sapiens
gcataatctgcctccagcagtttctgggagtgaacccagctatcttgctgaaggtagggtaggggtggatgcaacaatgggctgattgttatcaatatgtatggcaagatattatcttgagatattaatctgtgggtttttctttgctcacttccttgtacagtgaccaaacagcctcacgcaagagtacagttggtaaagagggactgaaaagagccaaaaatgtcaacgttcatatttgtgactctaaaacagcattcaagaatcaaaaaagcaaggcttggggcacaaagcacagagacatgtggaccagggacagggatagacagacagccctatcccagtgcctccagggagaccagagtaaggtgtgctgggccgagggaggggaggagcacayggtgaggagcaggtccacattggaagtcttgggagccccaggagcccctcagctggttgcatattcccagagatgtttgccaagccctgattacatatccacactcccctgaatgaacacaccctccccattccagtgtctaaggactctcatgagccctgcagatctgttaggaacactttcagctctaagcaacaaaagatatgattaacagtgccttaaacactacaggtgtattctttcacacaacaagaaggctgtaagtgggta

SEQ ID NO: 73668 - DNA, 617 bp, Homo sapiens
atgacttccatatcttgaagcaaaataccaccaaaaaccgtgaggctgaaatcgaaaaggcagtaggagacacaaggcacccmttcaaaacaagaatgtattgtatagttattacactaaataccaccatatttattacactaactcttttttctccctctagaaaactaatgatgatacaattgattttgattatactgttctacttcatgaattatcaacacaggtaaaacataacattgtatgtagaattgtttttaccataagtttttgcagattataatattttataactctatttcctaggaaataattccctgtcgcattcacttggtctggtaccctggcaaacctcttaaagtgaagtaccactgtcaagagctacagacaccagaagaagcctccggaactgaagaaggatcagctgtagtaccaacagagcttagtaatttctaaaaagaaaaaatgatctttttccgacttctaaacaagtgactatactagcataaatcattcttctagtaaaacagctaaggtatagacattctaataatttgggaaaacctatgattacaagtaaaaactcagaaatgcaaagatgttggttttttgtttct

SEQ ID NO: 73669 - DNA, 725 bp, Homo sapiens
ctttcctatctagggaaaaaagtttcttttacttttatatcttggctccagttttatatttaaactagattggggctgggcacggtggcacatgcctgtaatcccagctcaagagtttgagaccagcctgcgcaacatggcgaaaccctgcctctgcaaaaaatacataaattagccgggcagagtggcatgtgcctatattcccagctactcaggaggctgagatgggaggatgacttgagcccaggatggggaggctgcagtgagccgagatggcaccactgcactccagcctgggcaacagagccagatcatcaaaaaaaaaaaaaacmaaaaaacaaaaaaaaaacaaaaaaaaaaacaaacaaaaaaaaaaaacagaactagcaatattactgtttttttttttttttactttacagcttgtcaattttaatcaaaagaaacgaaaagccacattcagtattaaagttaaacaagttaggagatgaaagtagactagaccacccaagtgggtaacttagcactggctgaaattacctagctttagttcagagaccactcctgaaaaggaaaagacatttctaacaactttagccaaagatctgggttctttgaagcctcaaagaaccctcctggtaagggtactctgcatagatctgcatattctcccatggccccaaaagactaaaagcccaggcttgtaccccgccctcgctgttgaa

SEQ ID NO: 73670 - DNA, 725 bp, Homo sapiens
ctttcctatctagggaaaaaagtttcttttacttttatatcttggctccagttttatatttaaactagattggggctgggcacggtggcacatgcctgtaatcccagctcaagagtttgagaccagcctgcgcaacatggcgaaaccctgcctctgcaaaaaatacataaattagccgggcagagtggcatgtgcctatattcccagctactcaggaggctgagatgggaggatgacttgagcccaggatggggaggctgcagtgagccgagatggcaccactgcactccagcctgggcaacagagccagatcatcaaaaaaaaaaaaaacaaaaaaacaaaaaaaaaacaaaaaaaaaamcaaacaaaaaaaaaaaacagaactagcaatattactgtttttttttttttttactttacagcttgtcaattttaatcaaaagaaacgaaaagccacattcagtattaaagttaaacaagttaggagatgaaagtagactagaccacccaagtgggtaacttagcactggctgaaattacctagctttagttcagagaccactcctgaaaaggaaaagacatttctaacaactttagccaaagatctgggttctttgaagcctcaaagaaccctcctggtaagggtactctgcatagatctgcatattctcccatggccccaaaagactaaaagcccaggcttgtaccccgccctcgctgttgaa

SEQ ID NO: 73671 - DNA, 531 bp, Homo sapiens
ttttaatgacattagaaatgaaaggagatttagaattaaaactagcaactggattcacaagtcttaaacacacacatatacacaagtacatacacatttaagaatctttaagattttttttaaacactcaaaaatgaaatactgagtttaaagaactaaaagctttaatttctcctttctaaaaaaaagaaaaaagccagaagactggccaggatgcccaagaccttccaattcaatgctcccaaaaactatgaaccacaaaatctgacagatggaaaatggttattccaaggggtttgggattctacaggtacaccagaaattatctgtgcgctaaaaaaatgtgagtaaaagtattttctataatatacagatgccwtatatgtgtgtatgtttatgtatatatttatatatgtgtgtatgtatacatatgtaacaaatataatattacaaagatataatgtataatgacctctataggctagtactattcattatcagattcatagcagttttccaaaaccaagagac

SEQ ID NO: 73672 - DNA, 1012 bp, Homo sapiens
cacaaggcaaatttcgtttttgcagaaaatgcatctgactcactttctcctctgagggttacgagatgtcctgctataggtcacaagttcagctgagtcatgaatgctgaattgcmagctgtgctcatccaatcatatttaacattcagaagtgccatgaaaccccaaacccacaaaaacaacttaactgcagggcccagaccaaatcagtagcagaggggggtttcaatgctgttctgtcagctattttcccctgaaccccaatctttaccccccaaccctctggtcatcatctcctatcatccttccctcctctccatcttctctctgtctctctgtccctgcatttccagtctggttaaatctgagtttcagccgggcgtggtggctcacacctgtaatcccagcactttgggaggccaaggcgggtggataacgaggtcaggagttcaagaccagcctggccaacatggtgaaaccccatttctaataaaaatacaaaaattagccgggcatggtggcgggagcctgtaatcccagctactcgggaggctgatgcaggagaatcgcttgaacccaggaggcggaggttgtagtgagtggagatcgtgccactgcactccagcttgggcgatagtgtgagactccgtgtcaaaaaaaaaattctgagtttcaatgtgcagcgtgatttcttctcttcctcatgattgctgtcaattcctggctgcaggaacaaggatcttgccaacaatcctgagccagagcgttctgagctccccaccctttcttcctgtcaccttccgattcatttcctgtaagctgtgaccctttcttgggaacattaattagccatgatgcttttttatcagaattctaggaaaatgataccggtatgactcacacttctgctgtttaaacagtgtttactatatttgagtgcggcagatgagctttttgcagggtgcttactatatagatttatgaccttctataaccattctgggaaagaaag

SEQ ID NO: 73673 - DNA, 1012 bp, Homo sapiens
cacaaggcaaatttcgtttttgcagaaaatgcatctgactcactttctcctctgagggttacgagatgtcctgctataggtcacaagttcagctgagtcatgaatgctgaattgccagctgtgctcatccaatcatatttaacattcagaagtgccatgaaaccccaaacccacaaaaacaacttaactgcagggcccagaccaaatcagtagcagaggggggtttcaatgctgttctgtcagctattttcccctgaaccccaatctttaccccccaaccctctggtcatcatctcctatcatccttccctcctctccatcttctctctgtctctctgtccctgcatttccagtctggttaaatctgagtttcagccgggcgtggtggctcacacctgtaatcccagcactttgggaggccaaggcgggtggatmacgaggtcaggagttcaagaccagcctggccaacatggtgaaaccccatttctaataaaaatacaaaaattagccgggcatggtggcgggagcctgtaatcccagctactcgggaggctgatgcaggagaatcgcttgaacccaggaggcggaggttgtagtgagtggagatcgtgccactgcactccagcttgggcgatagtgtgagactccgtgtcaaaaaaaaaattctgagtttcaatgtgcagcgtgatttcttctcttcctcatgattgctgtcaattcctggctgcaggaacaaggatcttgccaacaatcctgagccagagcgttctgagctccccaccctttcttcctgtcaccttccgattcatttcctgtaagctgtgaccctttcttgggaacattaattagccatgatgcttttttatcagaattctaggaaaatgataccggtatgactcacacttctgctgtttaaacagtgtttactatatttgagtgcggcagatgagctttttgcagggtgcttactatatagatttatgaccttctataaccattctgggaaagaaag

SEQ ID NO: 73674 - DNA, 1587 bp, Homo sapiens
tttagaattaaggagaagtatcctcaaacatttgatgacatatgcctttactctgaggtttcccatttgctgtcacactgcacattcagacttccgtgtcggaggttcatacaagaattatttcaagatgtacagtttctacaagtaagtatgattagtacttctcaaatttatcttccaagaataattctgtgtttgaattgaattaaaatacagattatagctgggtgtggtgactcatgcctacaatcccagcactttgtggggtcagcgcgggagaattgcttgagcccaggaattcaagaccagcctgggcaacatagtgagaccgtgtcaacacagtttttttttttttttaattagccgaggttggtgtcatctgcctgtattcccagctacttgggaggctgaggtgggaggatcatatgaacccaggactcagaggttgcaatgaacaaagatggcaacattgtgctgcatcctgggaagactgagcaagaccctatctcaaaaaaaaaaaaaaattagatatttatataaatatgttatatcatctgtttttataaaagtaattgatgatacaccattttttccctagatgcatgaagaagcagaggctgtgttggcaacaccaccaaagcaacctatagttgatacatctgctgaatcctgacctcatatttatgatggatatagatacatactatatatattcatatttgtggatttcctaaaagcctcagaaaatacgactgactaggcagcaaagacaggagtatcttctgtacactgttccgcagttactggtacatgaacagttggaactgctgactttcctaaccaaaacaacttccttctctcctttgttgagccttttgaggggttcatgattcattaccacagttttaagagtttcagttaccattgtatgcaagagccaagcactgaatacctacataggttttctattttctttcattttaaaagcrtaatgacagtggaacaataatgggatatgcagaagcacccttcacaagttatttctgaatgatttttagggtaaataatacagatgccttgtttgttaactaacttgtggaaagcaggaatcagtgtctctaaggctgcatcctattaccacaatggggtgtgctataactgctggtattagagagggaactttggccctttcacgtttttcttaatgtttgtaacactacttcagaggtttataacctcaaagcagaagaagagcctcaacaacccgggacttataagttatttttatgttactagacttgcataaagattcttgttttccaactcttcattttgttgcaatgtgttattacaggatatatgaaccaattaaggtttttcactacagttcttgaataaaatttaaaaatcattttttattttaattaaaaatatttcccatttatagaatgcatatatttgcaatggacttccactttcatcaactttccatctcatcgctttaaacaggaacttgaacaagcactgttagtttagacctaaaggataggaaagcattaaataatactttggatctcctgaggaaaa

SEQ ID NO: 73675 - DNA, 618 bp, Homo sapiens
tctacctaggatctcataaggccgcaatcaaggtgttagttggggtggcagtcttaactgtaaaagaacccagttctgagctctttcaggttgctggcagcattcagttccttgcagttacaggactgagggcttccatttcttgttggctgttggtcagagacagactctcagctccttgccacaccgtcctctctatgggcagctcacgatgctgcagctttcttcttcaaaggcagcagaagagggggkctcctcatgaggtaggagtataaattgtggtcacctacatataattacttttgctgtattctgttgattagaagtaagccacagggcccacccacactcaagggaagggataagggcacgaatatcccagtgcgaagatcatgaggccaccttagagactgtccttcacaataggttatggatgcctttctgccactccttctgaatgttttctcttttttttctatctccactctccccagttctcagtcttcgcccaggttgcccccaggtttggaatgcaaaggaaagtgaaatttattccatccccagcccttactctaaggatggggaaagccatttgggtggaaacccttcattgtcagt

SEQ ID NO: 73676 - DNA, 657 bp, Homo sapiens
agttcacaaaagactggagtagtcagagttctccagagaaacagacctattggatggggatctaccgatgggatggagatacttgtacatatataaagagaattactataaggaattggttcacacagttatgcaggctgttatagtgtggactggtaggctagggacccaggagggctgatggtgcagatgaggtccaaaggcggtctgcaggaggattcwcccctgctcggggaggctggtctttttgttctattcaggccttcaattggctaagacccaccctcattatggagggcaatctgctattaatgttcatcaaattaaatgttaaattcatccaaaaatactctccaagttgacacataaaactaaccatcacagtcacctttccaatgcccaggaaggtctctctcccataatctcccttcccttccctgccccatacatatgcacgtgcacacacacacacacacacacacacacacccctaggtgtagaggtttgcacttatggcagtaaaatagagcaagctggctggtttcatcacccctcccatgctctgtaatgctattagactttacagaatccttgggaaaagagcctttttaggcactgcaatattaacttcaggaaaggtaagagaggctgggatcc

SEQ ID NO: 73677 - DNA, 1915 bp, Homo sapiens
gttgctactggagctatctaagaccaaaaattactgcaactttttagattggcaccaactgttcccagtttcccactcactatggtttgggtgttggtcacctccaaatctcatgttgaaacttggtcctcaaccaggcagtgttgggaggtggggcctaatgacaggtgttggggtcgtgaagggctgagtcctcatgaatgaattaatgttatcatgggaatgggttagttattacaagagtgtattgttgtatagtgagcctggccgcttgtgctttctcttttgcattgcttactcgtcctttcttaatggaatcatgcagcacaaaggccctcacaagatgctggtatcttgaccttggacttcctagcctccagaaccatgaggtaaataaaactctattctttataaattacccagtctgtggtattcagttatagcaacagaaaacagactaaaacaccgcctgagtcatttgtgccaaatttctcaagtgctgtagtagatttggtcactgttattacttcactaatttacttttattttttggtttctagtaatgcaggtatagagacacttttcacttgataaaattacgtagtgatctgatgctttaaatgggtaattttatcaagaaagcaatakaaataaagtaaccaaagtataaaataaggaggggagttactgttttaaagtatcagccactgatatttcactgcttgtgctgtgtagttttgaattgtagcaatttgaaaagctgggagggacctggctcttggagtatttttctaacccaacacccagggaagatctcctgctgcagccttctggttatatatagctgagctagattatattctgctctatattattgatcagtcttcttgggtcaactctagttctgtcatctttggaagaggaaggtactttactgttcttggccatgaattccttctttaggctttaggtcttgcagacacatcttgcactgttctggatgctagcatgtcatctcttgttctcccattcgttatatcactagctatttcctcacagtggctctctcctttgtcaaggttatgcttctttatctcgttacatggccttcttccttagaacttttcaatatggtattaacttcctcatccctgatcttgcccttaattcccagtttaaagtctttgtttactttggaaatgacttttcgcctgagtgaaaaaaaaacgtgttctcaacccatttgtagactaactcaggctctgaaaatgattgaagctgtgggctcaggttaccaattttactttcctgtcattgattcaaatgctccctaaagagagaggtagacctttccctgattctgtccattcatattaatttctcattctcactaagtgaacattagagaattagaaaccttcagaacatagaattgggggtataatttgactgtttaaatacaaacataaaagtttaacaacagatttcatttctgatttttctggcttctaactaaagaagtaaaaatataagagaaaaacggagtgtcttgtctaactccaggcctgaatctgaaaagagaacaggaaaggaagtaacaagaaagagaaaggacataaaggtactatgaaattgaagccatcattgtagtttaaatttgaccagtgtttcaaatataaagcaaagatgtttgggtcgtcttttgttctgaccagacagataaacttttctcatttccttctttgtgtatctaccagaggaaagtaatgaaatagaggtcctggaacagttcatgttaagggtaggctctaactgtagctctgacaaaagtaggaagcatgcagaaagctggcttgtttataagagataaaatggcacagtcttattcaattgaaagccaacaatcaaaattaga

SEQ ID NO: 73678 - DNA, 1915 bp, Homo sapiens
gttgctactggagctatctaagaccaaaaattactgcaactttttagattggcaccaactgttcccagtttcccactcactatggtttgggtgttggtcacctccaaatctcatgttgaaacttggtcctcaaccaggcagtgttgggaggtggggcctaatgacaggtgttggggtcgtgaagggctgagtcctcatgaatgaattaatgttatcatgggaatgggttagttattacaagagtgtattgttgtatagtgagcctggccgcttgtgctttctcttttgcattgcttactcgtcctttcttaatggaatcatgcagcacaaaggccctcacaagatgctggtatcttgaccttggacttcctagcctccagaaccatgaggtaaataaaactctattctttataaattacccagtctgtggtattcagttatagcaacagaaaacagactaaaacaccgcctgagtcatttgtgccaaatttctcaagtgctgtagtagatttggtcactgttattacttcactaatttacttttattttttggtttctagtaatgcaggtatagagacacttttcacttgataaaattacgtagtgatctgatgctttaaatgggtaattttatcaagaaagcaatataaataaagtaaccaaagtataaaataaggaggggagttactgttttaaagtatcagccactgatatttcactgcttgtgctgtgtagttttgaattgtagcaatttgaaaagctgggagggacctggctcttggagtatttttctaacccaacacccagggaagatctcctgctgcagccttctggttatatatagctgagctagattatattctgctctatattattgatcagtcttcttgggtcaactctagttctgtcatctttggaagaggaaggtactttactgttcttggccatgaattccttctttaggctttaggtcttgcagacacatcttgcactgttctggatgctagcatgtcatctcttgttctcccattcgttatatcactagctatttcctcacagtggctctctcctttgtcaaggttatgcttctttatctmgttacatggccttcttccttagaacttttcaatatggtattaacttcctcatccctgatcttgcccttaattcccagtttaaagtctttgtttactttggaaatgacttttcgcctgagtgaaaaaaaaacgtgttctcaacccatttgtagactaactcaggctctgaaaatgattgaagctgtgggctcaggttaccaattttactttcctgtcattgattcaaatgctccctaaagagagaggtagacctttccctgattctgtccattcatattaatttctcattctcactaagtgaacattagagaattagaaaccttcagaacatagaattgggggtataatttgactgtttaaatacaaacataaaagtttaacaacagatttcatttctgatttttctggcttctaactaaagaagtaaaaatataagagaaaaacggagtgtcttgtctaactccaggcctgaatctgaaaagagaacaggaaaggaagtaacaagaaagagaaaggacataaaggtactatgaaattgaagccatcattgtagtttaaatttgaccagtgtttcaaatataaagcaaagatgtttgggtcgtcttttgttctgaccagacagataaacttttctcatttccttctttgtgtatctaccagaggaaagtaatgaaatagaggtcctggaacagttcatgttaagggtaggctctaactgtagctctgacaaaagtaggaagcatgcagaaagctggcttgtttataagagataaaatggcacagtcttattcaattgaaagccaacaatcaaaattaga

SEQ ID NO: 73679 - DNA, 624 bp, Homo sapiens
acaagcaccctctttttcctccatttgctctgataaatgctttctcggtctttcttcctgctctagaagattatcttttctattgcttagttttctttatttaaaaaaaaatgttttctatcttaatgttacgtaaaatatgtgcattataattgagatggggattttcaaactgtcttcctgaggttcctcagagatcatcagaggaaagatatgagcacagacctttggctttgaacctcctgtcccactttcaccataggatctaggttgacttttatctattttatatattgggtttctgagtaagatattgtttaaagaaagatttcctattgcttttatttaaaagggttaaaaaaagttaaattacaataacacgtgactcgaaggatttgccaccacstggtggcagcatacccaaatttcaatgtacctaaatttttaaaagggttgagttgaatctgctattctaaaattataaagtggtatcagaaatgtctcagatgatgatgtataattatgaaaaaacattaaaaagtacaatatcactttcaaaatacaatatagtatttcaaagttgagatttttataaatgaattaaattactttattgtagggcat

SEQ ID NO: 73680 - DNA, 1078 bp, Homo sapiens
tcataggggaaatagtatgctgttaagctcctcggtgtcactcgsggcaaatgacttttctcaaacttagctacttgcaaaatgaagttacatggaaaatgaaaggatgacatagatgatgtctgcattcttttgcaactggaaaatttcatgtttcttcaaacttgattcactgaaaatatgttctggagaatatttccactttctattctttaaagatttttttgagttgaaaaggaaatatttatactggtgttctcattttctgtggatctacagacatatttattgctgtttgtgaattatctgagaacattctaaatgttgaattttaatttttatgatggcatagatagttctattttctaaatcacctggaagaaccctcatgagcaggtgagttcatttccatttagaaccttatgttggtgcttacaattgcattagctctaagtggggcttgcttattcatcccaggcaatgagaacctaagtggacttaatataaaaatgatattctgagttggggccacaggccagtccacctcattctctaatttacaaagtattccagcagtagaaggagagtggctaacactgaataattgtagaccacactgggacacaatgaacttaaacgatcagcattgcattagtcaattccatacccgtgtttcaagccactcatttttttttctgaaaaaaaaaaaaaaatagcataaaggcaatgttaccttgaatgtcagtgtttctacagtttggtttctgtagtgcgtaatccacatacaagtcctgtcgtatataatgaccagggtcctggacatctccttggcctggtgtgttgctctgctccttttgagatgctggattccaagtgcacaaaataagtggcaatttcacatcttctcaagtgggtcttgctcaacctagaaggcctttttcttttccatgtctggctaattcctcctaaggattcaagtctcctcttggaagacatcttgcctgggaagcctttcctataaacctccctcatctcctttctcactcccacaacaagttgaagtctctttcaggatttt

SEQ ID NO: 73681 - DNA, 604 bp, Homo sapiens
tcctgcctcagccttctgagtagctgggattacagcrtgtgccaccacatctggctaatttttgtatttttggtagagatgaggtttcaccattttggccaggctggtcttgaactcccgacctcaggtgatccacctgctttggcctctcaaagtgttggtattacaggcatgagccattgcaactggctttttttcttttaagagatggggtctaactatgttgcccatgctggactccaacttctggactcaagtgattctccaacctcagcctcttgagtaggagtagccaggacactggcacactggacagtggcacaggccactgtacctgtttcccctccctactttagcaaccacagcagcagctttgttctgttctgatagatctcctgttgagtgaaacctactccatagttgctattctcactgggctccagtgacatcattttttctctgtgccccaaagccccaggaagtcaagtaacagtatcccactgttgctaatgttctgatgtttgagtgtcttatatttattgttttcctcctttcctccctccttccctccctccctcccttccttccttccttccttccttcc

SEQ ID NO: 73682 - DNA, 604 bp, Homo sapiens
tcctgcctcagccttctgagtagctgggattacagcatgtgccaccacatctggctaatttttgtatttttggtagagatgaggtttcaccattttggccaggctggtcttgaactcccgacctcaggtgatccacctgctttggcctctcaaagtgttggtattacaggcatgagccattgcaactggctttttttcttttaagagatggggtctaactatgttgcccatgctggactccaacttctggactcaagtgattctccaacctcagcctcttgagtaggagtagccaggacactggcacactggacagtggcacaggccactgtacctgtttcccctccctactttagcaaccacagcagcagctttgttctgttctgatagatctcctgttgagtgaaacctactccatagttgctattctcactgggctccagtgacatcattttttctcygtgccccaaagccccaggaagtcaagtaacagtatcccactgttgctaatgttctgatgtttgagtgtcttatatttattgttttcctcctttcctccctccttccctccctccctcccttccttccttccttccttccttcc

SEQ ID NO: 73683 - DNA, 1106 bp, Homo sapiens
cagacagatggcaatcatccattcaaaggaaattctcagggattcattaattgtctggagaaggaagatcgtgtcataatcgggccagaatcttgtttgaaaaagagatacacatacatccaaatcagatctatcaatatcattgtatttcatggcttctattggtaggtgctatttaattgattctttatatgcaacagtcagacttataactcaggaaagtgtctcagtgtttgccttttgactgaatgttcacgttatttgctgccagaagctttgcacattgtcatggggaaaagtcagtcttcacgctatttgacattaacataaactcctaagtgtaagtttcattttccatcaagaaagaatagaccatgaacatttttcacgcaagaggccataccttctactcctttcgtaagtcgcccctggataaaacgcagtcctctatctgcagaggcacttgataaatgtcaccgacgaattcattcgccgtcaggtgacaacagtgagaatagagaccaaatgacaatagggaacaggagatggcagtggggtgagggtgagaagggataaggtttcagatgctcttattctctgacttgctgtaaatatcatctcattgatcataatgccacttagagttgcagaatgaactacttcgaacggcccctgattggctaattgtataattttattccaacggagaccctctggttcaacactgaggcacackggagtattcgttgagagctaaacatcttaaccaccttgaaatgtaaccatttgcctactacttcacagggcgcaactgacaagtccttcatggccagtaacaccagatgcagagccagaaaacaagacgtcaagtcccaacttgctcacttagccgacctttggcaagtcatcgtctcacccagtctctgtttccttttttgtgtaaatgaatgagattgtaattatcctagatcacagcaaagaacgggtgtgaggatcaatgtgtggcactgtcaatatggacacaggccacaaagtgctatgaaatgtacaagcttattgttagcttgctatgtgtgtgcacgcacatacacacatgcacacctaca

SEQ ID NO: 73684 - DNA, 951 bp, Homo sapiens
tgcatttttttcagataaaaaaattaatccctgtgtactttcaggataattgaaaagtttatattgtgtagagattaaatgcagataaagcagtttattttccttatattgtttggaatacagtttgctgcaaaagataatcccacaatttataatctagacattttattattagactttagtaggcttttataaaatgaactggatattttttaattatcttctcttttttaaagctctttaatgcttcccaatccctgcccaagagtgacctttgtagggaagttggctggctgccatgaagaggacatttgagtcagaaatgacagcaccgatgcttgtgtgacctgcaggatcaccccaaatggaatctctcaaatgcgcttctcccagttgcctttgggggtccagtacaaaatgaattctttacatttcaagcaaatggaaaggaaatrgacgaagcatatttttactaagaagttttttttttgagatggggaattttgactgatgttaatatacataaatacatgggagcagggagagggcacagtggtttacgcctgtaataccagcactttgggaggctgaggcgagtggatcacttgaggtcaggagttcaagaccagctggtcaacatggcaaaaccctgtctctactaaaaatatgaaaaattagctcagtgcagcggtaggtgcctataatcccaactacttgggaggatgaggcagaagaatcgcttgaacccaggaggtggaggttgcagtgagcctagatcacaccactgcacttcagcctggggaacagagtgagtgagactctgtctcaaaaaataaattaaaaaacaaacaaatacacacatacatatacatgtatctctttacaagttaaatttggaagagaaccctcacatgagagacttaggtacatcccagatgtgtttgggaagca

SEQ ID NO: 73685 - DNA, 951 bp, Homo sapiens
tgcatttttttcagataaaaaaattaatccctgtgtactttcaggataattgaaaagtttatattgtgtagagattaaatgcagataaagcagtttattttccttatattgtttggaatacagtttgctgcaaaagataatcccacaatttataatctagacattttattattagactttagtaggcttttataaaatgaactggatattttttaattatcttctcttttttaaagctctttaatgcttcccaatccctgcccaagagtgacctttgtagggaagttggctggctgccatgaagaggacatttgagtcagaaatgacagcaccgatgcttgtgtgacctgcaggatcaccccaaatggaatctctcaaatgcgcttctcccagttgcctttgggggtccagtacaaaatgaattctttacatttcaagcaaatggaaaggaaatggacraagcatatttttactaagaagttttttttttgagatggggaattttgactgatgttaatatacataaatacatgggagcagggagagggcacagtggtttacgcctgtaataccagcactttgggaggctgaggcgagtggatcacttgaggtcaggagttcaagaccagctggtcaacatggcaaaaccctgtctctactaaaaatatgaaaaattagctcagtgcagcggtaggtgcctataatcccaactacttgggaggatgaggcagaagaatcgcttgaacccaggaggtggaggttgcagtgagcctagatcacaccactgcacttcagcctggggaacagagtgagtgagactctgtctcaaaaaataaattaaaaaacaaacaaatacacacatacatatacatgtatctctttacaagttaaatttggaagagaaccctcacatgagagacttaggtacatcccagatgtgtttgggaagca

SEQ ID NO: 73686 - DNA, 951 bp, Homo sapiens
tgcatttttttcagataaaaaaattaatccctgtgtactttcaggataattgaaaagtttatattgtgtagagattaaatgcagataaagcagtttattttccttatattgtttggaatacagtttgctgcaaaagataatcccacaatttataatctagacattttattattagactttagtaggcttttataaaatgaactggatattttttaattatcttctcttttttaaagctctttaatgcttcccaatccctgcccaagagtgacctttgtagggaagttggctggctgccatgaagaggacatttgagtcagaaatgacagcaccgatgcttgtgtgacctgcaggatcaccccaaatggaatctctcaaatgcgcttctcccagttgcctttgggggtccagtacaaaatgaattctttacatttcaagcaaatggaaaggaaatggacgaagcatatttttactaagaagttttttttttgagatggggaattttgactgatgttaatatacataaatacatgggagcagggagagggcacagtggtttaygcctgtaataccagcactttgggaggctgaggcgagtggatcacttgaggtcaggagttcaagaccagctggtcaacatggcaaaaccctgtctctactaaaaatatgaaaaattagctcagtgcagcggtaggtgcctataatcccaactacttgggaggatgaggcagaagaatcgcttgaacccaggaggtggaggttgcagtgagcctagatcacaccactgcacttcagcctggggaacagagtgagtgagactctgtctcaaaaaataaattaaaaaacaaacaaatacacacatacatatacatgtatctctttacaagttaaatttggaagagaaccctcacatgagagacttaggtacatcccagatgtgtttgggaagca

SEQ ID NO: 73687 - DNA, 755 bp, Homo sapiens
ttggtaagtgcggctgctctgtcactattatggaaaaagttccatttgccaggaaaataaccatgcccctttgccatttacaagcatcttacactttggggtgttttggtatagaaggctatttaatcaagcacttctgttgcatttaggatgtgaagtaataaacaacaactgtgattatttaactgctgtagtggaactgaatcagtttaattaatcacaaaagacatttmctgcaagtaagcctcaaaagcaaagagattattgtgattatacaaaataggggaaaccagagattgttgctattaacttctttgggagtggtttgaaagccctagttatttaatgtgcatatttcaggaatatactaaaggcaatcagtgatgtaaagctggtagtgatgagtgcagatcataagacttttcatcagggtagagattttcttactcttactccataattcaaaatcaagagtagagatgagtcatcctggggagcatcttgagaaaatgctgatggtttggtaaactgatggagaatgaggacaagggaaaagagaatctctcactgtcaaggtattatttaggaaagtatctcataggaagacagcatgagactggccttagaggtagaattcacagataaacttgaattttggggaaaaaaagcagttatctgttgtttatctgaatttatcagatttaacctggtgtcctgtatttttatttatttatttttttgtcatacctgaaaac

SEQ ID NO: 73688 - DNA, 755 bp, Homo sapiens
ttggtaagtgcggctgctctgtcactattatggaaaaagttccatttgccaggaaaataaccatgcccctttgccatttacaagcatcttacactttggggtgttttggtatagaaggctatttaatcaagcacttctgttgcatttaggatgtgaagtaataaacaacaactgtgattatttaactgctgtagtggaactgaatcagtttaattaatcacaaaagacatttcctgcaagtaagcctcaaaagcaaagagattattgtgattatacaaaataggggaaaccagagattgttgctattaacttctttgggagtggtttgaaagccctagttatttaatgtgcatatttcaggaatatactaaaggcaatcagtgaygtaaagctggtagtgatgagtgcagatcataagacttttcatcagggtagagattttcttactcttactccataattcaaaatcaagagtagagatgagtcatcctggggagcatcttgagaaaatgctgatggtttggtaaactgatggagaatgaggacaagggaaaagagaatctctcactgtcaaggtattatttaggaaagtatctcataggaagacagcatgagactggccttagaggtagaattcacagataaacttgaattttggggaaaaaaagcagttatctgttgtttatctgaatttatcagatttaacctggtgtcctgtatttttatttatttatttttttgtcatacctgaaaac

SEQ ID NO: 73689 - DNA, 852 bp, Homo sapiens
aaagtctggattttccatttattaactccgtaattttggatcaatgacttaacttcttagagcctgtttttttctttgcatttataaaatagtgctgatgaaaactacactatyggattaagaggattaaatgaaagaatgtgcatcagttactatattacttgtgtaaatataaatatacatttgcatatagcatatagtacttaattaaataaattgtgggggttttttagtaagatgctctttctcacctattttttcattatagttgaagccacctctaatgtagtttgtatttgctgaaaattgagactatcccaacctaaaattttagttacatgtatcaggaacgaactccactattctccaggaaaaaaacaaacaaagatcctgagaaggcgtgtgaggcccctcagccagctacctgtgctttattcagcatccgtcatggcacagccctaaatagattttccatcttgatttatttatcatttattttgctaggtcattacagatacctaaagtgtaatgtaacatggtttcacagtatcatcactcaagttagaagaaaaaaataaaaataaaagtggcatttgaaaagccacaatttcatattctttgtctttggcatattttattttcccctaattatattcacttactgactcagaacaaaataattccctaaacaaacagatctttcagtgaactatatctgaatgtaatgagaataaaataaaaagttctctttcaatttattgtattattatcacatgctaattgagaaagatagatttgcatagtttagaaggttgttttaacagtctcctaaattctgaattagcaagtgat

SEQ ID NO: 73690 - DNA, 930 bp, Homo sapiens
  misc_feature (1)...(930): n = A,T,C or G
tnnnnnnnnnnnnnnnnnnnnnnnnnnnnnnnnnnnnnnnnnnnnnnnnnnnnnnnnnnnnnnnnnnnnnnnnnnnnnnnnnnnnnnnnnnnnnnnnnnnngaattctctagtccagggtttctcaatctgttccattgaacttcgggctggttaactccttgatgtgatgctgtcctgggcattggctttgtaggatgttcagcacatcccaggcctctgcccactttataccagtagcaccctgtctggtcgtgacaaccaaatagtctgagaygttgccaaatgtcccctggggggagcagagtggccctcagctgagcatcactaccctgaactttcagactgctagtgacgtttacacctttggaagtggcggattgatatctcactctagtgccagggttggaagttggggcctcagtcaccatgtgcacacagaacctgagagagtgttcgcatggcagcccccaaggtctgggtctgaacacaatccttcaggggacacagaacctgagagggtcctggctcaggaccagccttgcccaagggtctctggtttaaatgatgactgttgtcctcaggggcaccatggcactggggctaatgcaccagccattcttaccaaagcaggaactagtgcactctgcaggagggcctccacccctcccaagaacgtggaaacttgccttggcagtcaggggtggggccctgcttgtcgctgtggtaccataatgttgagggtgcattacaagaacgtgtctaacccacagggaacttttaaagctggaggtacctgttggaatttggtcacttttactgcacatgattccagggccatctgactatcctgacatttgcctggtttatgatacggggacacacgtgcatgagatcgagagtgaggatgctcagagtttaattagcatgc

SEQ ID NO: 73691 - DNA, 859 bp, Homo sapiens
ctgaccataggtccctgcttcccactgagagcccagagtctgtttgtacctctcccacccaccatgccttgagctgttttggttttgcctttgggggacactaaggtagagagttcaatgtttctttgcttaggaggacaagtggcagctccaaagccctcctgggttggatgacatgaggcacccttgacctccgtcctttccaacaaggagccccttaggggaatttctcaaacattacccctctatggtacctcagttccagttatgcattcaacagatatttatgaagcaactgtaatatacctgagactgatctaggtgttggaaatagagtagaagataagccaaatgtactgaattcatggagctgatattgcatcaggtgtttcttttactgctctctagattagaggtagtgattcacacacctttactgccactctccccatgcacctcgctattggattatgctttcccgaggccaggcacatggttattactgacctttggtttcccatttgcatcccagcatacamcaaggagccagctttcctgttgaattaaaatcattgaataatgctccctttcatatggatttcatctttgttctgaaacccaaactgtggctccagggaattaagaatttcttatgctataaagaaagaccttaaaacagggcttctcaaccttggaactgttgacattttggggagataattctttttttgagacagagtcttgctctgtcacccaggctggaatgcagtggcgcaatctcggctcactgcaagctccgcctccctggttcacaccattctcctgcctcagcctcccgagtagctgggactacaggctc

SEQ ID NO: 73692 - DNA, 692 bp, Homo sapiens
ttttccttctttggcagagaatctccttttcctagcaaaaagctctttgtacctacaccaagcattccaaaaatacagatgcactgaatatttgatctgtgctttcattttttaagtttctaccatcattttatcatcaatgaatttttatcagtgtttacagatctgaaataactacagagctgatattaggaagatattatgataatataggtcataagacatagctacaggataaatatagatctgatacgagaaatgtagaatgagacagaaaattccaagtcaataatctcaccaatactgaaagatgcacatacaaccaaataattacatgtaaaagatgacaactgaataagttctataatctagttaacagtattgtatcaatgctaattgycatagttacataaaatgacaacactgagggaagctgggtgatagacaggcacaccctatgtattgtttttgcaacttttgtaagcctataattatttcaaaataaaatgttaaaaacaagcaaagagaaaaaaaaatgccataattcattaacaggatccaaagacctccctaaactgccaaagaagtacatggaacagaaaagattaagaaaccctggcctaatccttcttggtaaccacaagcagaggtgaggctcaatcacaggcctgggtatcttccagaaaactact

SEQ ID NO: 73693 - DNA, 879 bp, Homo sapiens
cagaatttgatgcatgactggtttaggattatatccatcatactgtgactctgggagtaaggattcagcaaaagagcctaaagtgaaggggtgggtggtcatgccatctttctggtcattgtggatcctcccagactaggaattaatggacgcagacatcatagggtccttttctctagagaagggctaatgaggccaacagtagatagtgaagaatccatctcaccatgtaaccaggactctcaattgatgatcttcctaataccccttaaaggaattagaaaattgacgtaccttctctcatatatatgagttgacctctccaatttttcattatgatattaaatgtgcaaatactacatggtttctgtcatctctaatattttaaaatraagttgctatattaattcttaaaatatgtcaaatggaacctgaccataattaccatatacccacaataatgtatttaaataaatgaacaaactctgtttttaacatttcttcattttacccttaatgatttcaacttaaattcatatttccattaccatctcctttggactttctttccaaattatgtacttttatggaaaagttttcttagaccaataaacatgtatagctcatattttagaaggtacttttaaaaatcttttgaccacaaggcactacatgttaaaaaaaaaagtattctgtcttaggggtcattacaattgttattaataaacatttgatccaaacaccatagattaaatagtaaaaaactgttggccaagtatgatttcatacacaaatgagaattttcaagaatgtattttctgtattcagtgatgcatgtgattgactgatagatttcaaaaaataatgtggaatcctatt

SEQ ID NO: 73694 - DNA, 879 bp, Homo sapiens
cagaatttgatgcatgactggtttaggattatatccatcatactgtgactctgggagtaaggattcagcaaaagagcctaaagtgaaggggtgggtggtcatgccatctttctggtcattgtggatcctcccagactaggaattaatggacgcagacatcatagggtccttttctctagagaagggctaatgaggccaacagtagatagtgaagaatccatctcaccatgtaaccaggactctcaattgatgatcttcctaataccccttaaaggaattagaaaattgacgtaccttctctcatatatatgagttgacctctccaatttttcattatgatattaaatgtgcaaatactacatggtttctgtcatctctaatattttaaaataaagttgctatattaattcttaaaatatgtcaaatggaacctgaccataattaccatatacccacaataatgtatttaaataaatgaacaaactctgtttttaacatttcttcattttacccttaatgatttcamcttaaattcatatttccattaccatctcctttggactttctttccaaattatgtacttttatggaaaagttttcttagaccaataaacatgtatagctcatattttagaaggtacttttaaaaatcttttgaccacaaggcactacatgttaaaaaaaaaagtattctgtcttaggggtcattacaattgttattaataaacatttgatccaaacaccatagattaaatagtaaaaaactgttggccaagtatgatttcatacacaaatgagaattttcaagaatgtattttctgtattcagtgatgcatgtgattgactgatagatttcaaaaaataatgtggaatcctatt

SEQ ID NO: 73695 - DNA, 1038 bp, Homo sapiens
tgtctgcacattttccttaaaaacctggtgaaatgaggaagaaaaaaacaatataaataattataggctgaaaatgctaagttttgtaattgaagaacagaagtcatctgggtggagactgaaagcactaaagcattacttctgtccagggagatggggcatgtgtcgtgggaggagggattggagctaaccttggaaaaattgaggtgcatgctaaagtgtgtagacgtgaaaatagatgagtctcggatttccttaagatgtttcaaaaagggaaaagagaacaagaaaaaagttactgagccaaatgtatgacatagtccttcttgactcgaggtgagctgtacatggatgtttactttttcattccaactttcatagatgttggaaaattttcaaattaaaaaattgggaaaataagctgggtgtggtggctcacacctgtaattccagcactttgggaggccaaggcaggaggatcacttagcccaggagtacaagaccagcctgggtaaaatggcgaaaccccatctctacaaaaaacgcaaagattagcagagtatagtggtgtgtgcctggggggctgaggtgggaggttcatgtgagcccaggatgttgaggctgcagtgaaccgtgattgcaccactgcactccagcctgggcgacaaagagagaccctgtctcaaaaagaaataaaaattaaaaatagaaacatcaataggagactttaaacatgtccatccagcctaggcggaggactttccagggatctttaggcgttctcatttaaatggctttacagtccacttcagtgctgcctttctgctcccccaagatttcacattgtgtttttccaaatcgcttttcaggggcagttcattgaactgtgtaagacaatgtataacatgttcagcgaagaccccaatgagcaggagctgtaccaygccacggcagcagtgaccagcctcctgctggagattggggaggtcggcaagttgttcgtggcccagcctgcaaaggagggcgggagcggaggca

SEQ ID NO: 73696 - DNA, 620 bp, Homo sapiens
ctcccacagataccaaaatctaaggatgctcaagttccctatataaaatggcaaaatagtatttgcatataactatgcacatcctcccatataccttaaataatctctatattatttataatacataacacaatgtgaatgctacataaatagttgttatacagcattgttttttattcgtgttactttttatcgctgtattgttattttttgtttccaaatattttccattgaatccatggatgcacaacccatgaatagggagggccaacaataagctgatatttgcctctatgtatagaattgcagagaatcacactgcctcaaagaaagtctgatattggtatctggcattagcatttctttcaatcatgtgatttaccaaaataataaacaattcttggtaaggtgatgcttcaaagtgtaaacgtgccttgatttattcagcaggtttatctctccaaaattcaatagatataayaccatgaaaaaaaaacatactgacatgtaaaaaatattttgcatttagactcagttatttatatacaggtttttctatatacctcaatgtctggtcagaagatcaaaattcataggagtctcaggacaagtcttcatta

SEQ ID NO: 73697 - DNA, 576 bp, Homo sapiens
tggtctagccaggccactgaaaaacttaatcagggagtcttaaacaaagtataaaaataggaaaagggtctctggtcactttatcaggttttccagccttgtctcccatctcatatctgaaatgcagcagcacttggtttctttgcagatcctggcaaaccaaataccagagtccagcctcccccactatcaatgaatgttaccgccaagaaaggtgaatgttactcaatatacctctctgcagaaagacagttatcttataggaattgagcagtaacctaaccccagaacgccttacttaggaaatatgcacttaatatatgttcagataagaaaaatatttaccagaggctcccaaatcccatttggggctatttctcctgagaatctccagaaaagkatattattttccctaaaagattgtgtgattgaatttatttcctccctgattcctctctatttctattacactgaattatttgcttacacaaaatatttggagggaaggaattctctgtaagaaaattacaaccaacactttcttaacttaccatccagtggtctggagatacaccg

SEQ ID NO: 73698 - DNA, 682 bp, Homo sapiens
gcattaacaaaagctaaggacctaagagaaattcagacrgagttcagaggagggaggagtgacttcaagccaatgggaggttgtagcacattagtgagtaaaagaaaaacttttatgctggattcaaatgttctattccttattttatttgtcttattgaaatttacctttctctctgatctccatttttctaatctgtaaaatgggaatactattagtatctatctattcacttgaagttgattagtaggtgtattagtccttttccatgctgctgataaagacataactgagactgggcaatttacaaaataaagaggtttattggacttacagttccacgtggctggggaggcttcacaatcatggtggaaggtgaaaggcacatctcacatggtggcagacaagagaaaacagcttatgcagggaaacccccttttaaaaacatcaaatctcctaagacttgttcattatcatgagaatagcataggaaagacctaccccaaaaattcaattacctcccactgcgtccctcccacaacacgtgggaattcaagttaagatttggatggggacacagccaaaccacatcattctgcttctggcccctctcaaatctcatgtcctcacatatcaaaacagatcatgccttcctaacagtcccccaaagtcttaactcatt

SEQ ID NO: 73699 - DNA, 682 bp, Homo sapiens
gcattaacaaaagctaaggacctaagagaaattcagacagagttcagaggagggaggagtgacttcaagccaatgggaggttgtagcacattagtgagtaaaagaaaaacttttatgctggattcaaatgttctattccttattttatttgtcttattgaaatttacctttctctctgatctccatttttctaatctgtaaaatgggaatactattagtatctatctattcacttgaagttgattagtaggtgtattagtccttttccatgctgctgataaagacataactgagactgggcaatttacaaaataaagaggtttattggacttacagttccacgtggctggggaggcttcacaatcatggtggaaggtgaaaggcacatctcacatggtggcagacaagagaaaacagcttatgcagggaaacccccttttaaaaacatcaaatctyctaagacttgttcattatcatgagaatagcataggaaagacctaccccaaaaattcaattacctcccactgcgtccctcccacaacacgtgggaattcaagttaagatttggatggggacacagccaaaccacatcattctgcttctggcccctctcaaatctcatgtcctcacatatcaaaacagatcatgccttcctaacagtcccccaaagtcttaactcatt

SEQ ID NO: 73700 - DNA, 572 bp, Homo sapiens
tgacgagtaaaattacaaaacggttttaaaaaacaacaaactattgtctaaggctaggcaaaaggttcttaaattgacattagtggcaagaccggtaaaaagaaatgttgatgaattagactccataaatttaaaacttttgctttgtgaaagaccctgtaacgatactgaaaaggtttacctaggagaaaatatttacaagccatatatctggcatacaaccagtatctagaatatgtaaataactcaaaaatcaattatttttaaaaatccaattagaaaatagtcagaagacataaacagacatttcactgaagatatgcagatggcaaataaccatatgaaaacctttaatgtcattagccattagagaaatgggaatacgaggctttcgttgttcttcgcctcccactagggcgggttgagggtctggctccagtagccccgggtgcctctcactccttgggcgcamtgctactatcctggcagaaccctcgccgaaccctcgcaggacgccccatcgagcttcgccagcggctaggaagcccgattgtgtcgttcctttttccctc

SEQ ID NO: 73701 - DNA, 1020 bp, Homo sapiens
tttcctgatgtcttttgataacctcatcttcaaacacctgttctcctctgattccttttctccctctcttactgccttggccctgactctcatcatcctccctgatacagttcaccatgctgtagtccaaatggtgctctgtctytccctccagttttgtcctcactgcagccatttcagtttagcagaagaagtgtggcccgtccagccctccagctccatctcacagctccagccactctaaccagggccagtcactgactgagtcgcactccctcttgccttcagcatttgtttgtgctatttcctccacccagaacatccttccctgctcagtccctccaacttctgccccatgtttctggtgaactgctacctctccatctaccttcatcctctaccttaaacatcatgtctgggcagccagggctgacatgctccagactccctgagttgcttctcctacgtgtgaccatatcatgcacttagcagtctgcttacttgactgttttactctcttagagcagggattcattgctgcacattatgtgtccagagagcctgggatataacaggaattctgcaaatattactggaatcagtgaacaccctgtcaggcgctctgctgggtgctgggtgtttctgaccttgaaaagactccctgctgggaagattatcctaaaaccacaattaatcaggtcatttctctgcttaaaagcatgcatgactggcatcattgaggctaatgtgacatgaaaaacgccccaaacaggctggccgaatgaacgtgccctcctctgggcgtcaggagcatgtcaggtagctttcttacagctttcactccattagcctctgatcttctgttttctgttctttctctgaccacatctcaagttatccctgggttcttcttgctttgcacagggcctggaactgagtgggtgttaaacaagtgttttgcatgagcaaatttccaaagggccagaaggagaagtaaaggggaaaaataatctttgtcct

SEQ ID NO: 73702 - DNA, 697 bp, Homo sapiens
tgctctttgcaggtacttcaagctccaggggaccttctgaaggccttgagcagggttgggctgcaggggcagccttctcgattccatcctcgcagagtgctcctctctctctgctgagctgtcattctctctggagacggggaagatggatcaccgtcttgaagatgcatcactcacatcaccacctgcctgacctattacaagacttaagctgccacttaatttgtyccccatttagtgcagagacatccccaccccctcacctttagcagagcttggaggaggcaccaggaatgaagacaagtcaggagatgatcagcctcccaggctgtcctttctgagttcttctggccctcagaggctgccggaaggaattggattccatcagtggctggggtgtccgagctgagactggggccaggccacagcctcagggagggaactgctgggtttggaggtggtgagcagagctcagctctctgtacttcggaggatttgttttaaagtcatggctttacggaaacccctcaccttctgttagctcccccaaaatgcttatctaaaagctcctggcttgtgcatagaatattgagctgtggtgcacactcccttcttggctcctgggataggatttgatgtaatcagcctttgaatttccagaggcccttaatcttctttgacccacacagagtcactg

SEQ ID NO: 73703 - DNA, 514 bp, Homo sapiens
gaggctgataaaccacagaaatttgttcctcacagttttgatgctggaagtctgagatcagggagccagcatratggggttctggtaaggacccttttctgagttgcatatggaaagctgtcctctcactgtgtcctcaggtggtacaaaagagagcaggcgagctttctggggccccttttatgaggacactaatcccactcaggagggctccaggctcatggcctaatcatccccaaaggccccaccacctaacaccatcatcctgggggctagaagtttgacaaatgaatttgagggggacaccccagattactcttttgggaaataagagtaagaatatttagagattaagtcagataatatatgtaaagtacctaacacatggtaagtgtccattaaatggttattattatattatatacaatattatatattatatatattacatatatattatattgtatataatatatatattatattgtatataatatatatattatattgtata

SEQ ID NO: 73704 - DNA, 514 bp, Homo sapiens
gaggctgataaaccacagaaatttgttcctcacagttttgatgctggaagtctgagatcagggagccagcatgatggggttctggtaaggacccttttctgagttgcatatggaaagctgtcctctcactgtgtcctcaggtggtacaaaagagagcaggcgagctttctggggccccttttatgaggacactaatcccactcaggagggctccaggctcatggcctaatcatccccaaaggccccaccacctaacaccatcatcctgggggctagaagtttgacaaatgaatttgagggggacaccccagattactcttttgggaaataagagtaagaatatttagagattaagtcagataatatatgtaaagyacctaacacatggtaagtgtccattaaatggttattattatattatatacaatattatatattatatatattacatatatattatattgtatataatatatatattatattgtatataatatatatattatattgtata

SEQ ID NO: 73705 - DNA, 756 bp, Homo sapiens
agcaatgtttacttttatctaacagactttaaactagattcttatttrtagtttctactagatctttgccaagagctgcatccaaatggttgaaaatattaagactacaaaattttgttttcttaatcatgtcttttaggtgtgtatatttacattacattatataagttttgaagtttacaaatttttatctttttgctacttactgtatcatcatttcttcatttatttctcacttcctcttctcagttccttttatttggtctggacatataggactcattgaaggaaaaagtcccagacaaagagtgagaggaagagcaaagatcatttgagaaactgagtatgggaacaaggttaaaatgatgtctgcttttaattttaaaattcttccaaggtggtaaaatacgcattcaggcagctccaagtctgaaaaacacctaatgcaccttgacattcaacaggtatttattgcactcctcctaccatctgtgaaacactgtgctgggaacaagacaaatgagtcacagtccatgccctcaaaaggcttaaaaaaatgtgtttgcagcagaaaagcagacactaaactgaaatgtgtaatgcctgtgataagcacaaagacagatctataccagagtgttttagagcacataggaaggaacctgcctagactaaggaagacatagaaggctctggaaagggttgcccaagttgacccagaagagatgaagaagatatactagcaaggagatgggg

SEQ ID NO: 73706 - DNA, 1022 bp, Homo sapiens
gcattgtataaactaacagcagtttaaatatgacagagtaaaaaaaaaaaatcagtgaactgtaaggcatagcaatagaactatgaaaaataaaacacagaaagaaaaagggccccaaataatgaacaggacattaatgatctgtgggacaacttcaggcagcccaagcacatgtggaattagagtcaccaaaggagatgggttgaaggaataattatatgaagaaatgagcgaaatgtttccaacccaagaaagtcaataggcctcaagtttgtcaagaaaattatatcaaggatataatattaaaatgacttaaaattattaataaagaaaacttaaaagaaattagagaaaaagagtttgtacatggcacaaagttaagcaacttttttaaagtattggaaaaataacctctcaccctagaattctgtatcaatatcttccttactactcaagaaaagggatctccatcaagtactactgacacttgaacaacacagatttgaactgcgtgggtccacttatctgtagagtttcttccacctctaccacctctgagatgtcaagaccaacccctcctcttcctcttcctcctactcagcctaatcaacatgaagatgatgaggatgaagacctttataatgatggatttccacttaatatatagtatatatattgtctcttccttatgactttcttactaacattttcttttgtctggcttactttatcagtatatagtacatataacatacaaaactgtgttaatcaactgtttgtgttatcartaaggcttctggacaacagtagctattagtagttgtgttctgggggagtcaaaagttatatgaggattttcaacaggcgagggttcagtgcccttaacccagtgttgtttaagggtcacctgtagtttggaatcaattaggaaagcatggagtcctcccttttctttccttccaagctcttcccttcctttcccttcatttttttttttttttataaatacaaggttgggaaaa

SEQ ID NO: 73707 - DNA, 669 bp, Homo sapiens
ataataagagaacaacattaggccaacaaattcaacaatacagatgaaaaatgcaccaaaatagtgcatttttgaatgcactaaatagtgtacaatgcaccaaaatagtcacaagaaaaaaacagaaaacctgagtaagcctatatctaataaacaaatggagtatgttaagaaaaacctttccgaaaagaaaacttaagggccagatgctttcactggtaaaaacatcaaagttacacaaatgttttccagaaaagagaagaggggagaatatgtttttcagaaaagagaggaagagaaaacaccatccacttcattttatgaggttaatttttatggactgaattgtgcctcctcaaactttgtatgctgaagttccaacctttagtacctctgattgtaatcatatttggagataaggtctttayggagccgattaggttaaaatgaggctgttagggtggggccctagttcaatataactagtgtccttagaaggggaaggacaccaggggcacatatgtacacagagaaaagaccacatgaggacacagcaaaaaggcagccatctgcacaccaaggagagaggcctctggagaaatccaacctgctaagaccttgatcttggactgctagtctcccgaactatgaaaaaattaatttacattg

SEQ ID NO: 73708 - DNA, 1153 bp, Homo sapiens
gtcacatagtgtcctttttctggacttttcaccagtaataacttttgcttttagcaactatttaaaaatggttaatttaaccagcctgggcaatatagtgagaactcgctacacaaaatacaaaaattagctgggcatggtggcgcatgcctgtggttccatctacttgggaggctgaggcaggaggattgcttgagcccaggagttagaagctgcagtgagccatgattgcaccactgtactccagcctgggcaacagagcaagatcctgtctcaaagaaaaaaaaaaaggttaatttaaatgcatttttattccttttagcgttgctgtattttgttaagtacatctctccaatagtctttatctattcaaggtatctactctggtagcccgacttaggttcatcttaattttcctgagctgttaaggacctcacagggccactactctaaagatattgtttctcaaactttagtgggcatcagaatcacagggagggcttgttaaaaaataggttgcagcagggcgcgggggctcacacctgtaatcccagcactttgggaagcctagacgggcggatcacaaggtcaagagattgagaccatcctggccaacatggtgaaaccctgtctctactaaaaatacaaagattagccaggtatggtggcatgcgcctgtagtcccagctactcgggaggctgaggcaggagaatctcttgaacccaggaggggaggttgcagtgagctgagattgggccactgcactctagcgtgagtgacagagcgagactccgtctagtctcaaaaaacaaacaaacaaaaataggttgctagcccaaccctcagaatttctggaatggagttctactcactgagtaggtcttgaatggagccccaaaatttggatttctaattagttgccaggtgatagtaatactactcatccaagaatcacaatatgagaaccactgttctaagtgatatctatttgctwgttttcagaagtaagatagttgagatcacaagaagagttgaggaaaccaagaaagaattttcttattcccatgaaaatctcaggcctagttctgtgtattcatgtattcagcgccatcttttcccttctgcagggttctggtattgggtgtctttttt

SEQ ID NO: 73709 - DNA, 672 bp, Homo sapiens
gaaccctcaaggggttcacaatctaataaggaaaataaattataaagtaaaactatacgggccataatagayatgaaaaacttcaccaatcagtccctaagtaatgagggagcccctatgactgaaggtttgggcagacagatattcttcctctgcactagttgtgtgagcaggatgagaagagaatcttgaaaacagcatgaatccaacatgtgggatcacataccttctccttctgcaagatttctttccagttttactgtggagtcatagaatcttatcacagtgctatggtttcaatgtgtctcccaaagttcatgtgttgacaacttaacccccaatgcaaaagtgttgagaagtgagacctttaagagaaacttctaagagggtagagccctcatgaatggattactctctattgtgtgtgctcacttgccacgggataacacggcaagaaggccctctaaagatgccagtgccatgctcttggacttaccgggctccagaaccatgagccaaataaacttctttataaatcactcagtctatggtattctgttagcagtaggagaaaatgaactaaaacacatgggaatggggccttaaaaatgatctaatcagacttcctacctgacgtttatgtctttgctactaaaaaaatggtcattgggg

SEQ ID NO: 73710 - DNA, 672 bp, Homo sapiens
gaaccctcaaggggttcacaatctaataaggaaaataaattataaagtaaaactatacgggccataatagatatgaaaaacttcaccaatcagtccctaagtaatgagggagcccctatgactgaaggtttgggcagacagatattcttcctctgcactagttgtgtgagcaggatgagaagagaatcttgaaaacagcatgaatccaacatgtgggatcacataccttctccttctgcaagatttctttccagttttactgtggagtcatagaatcttatcacagtgctatggtttcaatgtgtctcccaaagttcatgtgttgacaacttaacccccaatgcaamagtgttgagaagtgagacctttaagagaaacttctaagagggtagagccctcatgaatggattactctctattgtgtgtgctcacttgccacgggataacacggcaagaaggccctctaaagatgccagtgccatgctcttggacttaccgggctccagaaccatgagccaaataaacttctttataaatcactcagtctatggtattctgttagcagtaggagaaaatgaactaaaacacatgggaatggggccttaaaaatgatctaatcagacttcctacctgacgtttatgtctttgctactaaaaaaatggtcattgggg

SEQ ID NO: 73711 - DNA, 778 bp, Homo sapiens
caaatcagtagatagccttaagcttatatatttgatggcatgccctacttgctgtcaaaatttccaaggctttcataacaattactggagatccactatgcagtcagaattccactttcttctttagggtacactcacaaagcaaatggaagaggtaagttaatggcaaagaactttgcaccgctattttcttcactatccccaatctggagataaacagaaggcatctgtctttgaaattgctgtcaccatagtgcttcatgmtttcctaatctgtatattggactgcagcaatctcttctgtggggccagctcagaggacccactggggcagaacagaggccacacacaagccatttgaaatgcgtgaaagcatgccgtgccttgcaagctgcactggttacatatttacttcaaaatgaagtcaagttgatgtggtccaaaaggccctctattacataaattctagtttccttagaaattgaccatcttcatgcagctcagctgttgtgctgctgctaatagtccctgcatttatatttcagggacatgaaggagcagtgagcctgaactgttatttcccacctgtttcaatccatatatttttctggactagttcagagtcttttgtatgaaaatcacatctccacccatattggttaatacaccagtggattaaaatgtactattattatagttttatgactctaattagtttgaatgtttaaaatgagcttaagttataagtcatactattacattgcagtaaaaagtactg

SEQ ID NO: 73712 - DNA, 1657 bp, Homo sapiens
tgcatgtttattactcactttttcactttgttgttaatttgcagaagttttaaatttaatgcaggcaaacctactgacatttttctctattttcgtcagatagatttttagaattttgatatgtttttattatatagaacttaygtaggcaaatggaaattggttaaaacttaaatggattttgtttccagtatactatgtaggtaattttcctaacaccatttactgaataacctgttcctttcccaattttcgtgctggattgggactagataatttgagaaggcttggctcagtgttaactcttgcagtatttgtgtggaagtcacctatcttccctgtcaatttcctccctccattccttctcattcaccctaggttctgtcctggatcttgtaagctagggtatcttcacagtccaaagagatgctgtgtgtgtctgtattctgtctttcctcttaggttctcttaatgtttgatatacgctttatcttagctaaactatctcatagcagaaaaattaacttagaaaaatataacatatattatctttgtgcgccagtgcacagtatgttcacaaaacatatactacccttttattattattttctcttcctgaagaacaggattgaaaaatagctatagaaactattctgttatagcaaatgctcagcagacctagtaaaggaccaaagcaggtaaaaaggtaatttgcttttcctgcttttactttcaatatggcttaaatcaatcaatttaaaatcaaaatatctctgtaataagtatatagacattataaataggcacaatttatgcagccatcttcaggaaatatgctctggtgatatacaggtatgcaaattgaattacacttagtatgacaagattaaaagagaagctgttaaatggatatgcatgaagtaggacctgcctgtaattttctctttccttttccttcattcctaccctgtccctttctctcactgtttttttcttttttgtttttactgagccttagaaataggaaattgaattaatcataattctcaattcatgatacaccgtcattattagtctatgcaagtcactctattgctttattttttgcttttatttccactcttcactgctattaccttctttatatagtcacctactccacttaaattactatgtatccttgaaaaacgtgcattgttgttttatgaatgtctctgttttaaatttataaacatggcattctgctacagatgtgcttattgttatttttaactcaacattgtggctatagactcagctgtatgtagatcattgctcttgaccactgcacagcccagaggctaatctaccacacttttttttttctcttctactggagacgaacacctaggtttctcataattccctggtgccaagacaaagctgcaaagaacctccagatcaacctttggaagaggctcccaggggagagttgccgggtcatagggctgcacattcttgatgtcactaagtgctgccagattgttctccagatttgtgggcttatatttcttaagtattttggcagaattcacattaagttgaaattttgattttgtgccaacattcaggggcatgttagagtaactttataactgtgtgaaaaattaaagaaaaa

SEQ ID NO: 73713 - DNA, 681 bp, Homo sapiens
taactatatatttgcctacatctacagaatatacaacatcaagagtgaaccctaatgtraactatggactcttgatgatgatgtgtcaatgtaggttcatcagttgtagcaaatatcctactcttgtgggggatgttgataatggaagaggctatacatgtatggggcaggtagtatgtgagaaatttctgtaacttccaatcaatttttctgtgaatctaaaactgctctaaaaataaagtctattaaaacaattctggggtaatgtaccaacacacttcaatttctttagaaagtatttattgaatggtgtcaacttcctcatgcttattttacttgtttttattatgagaagggtaatggtattgacctcataggattgctaagaagatgaactaaaatgatacatctaaactgtacagtgtctagcacatagtaaactttaatatataactattgttcttcgtggtaatgctgttataaataatatgttttagacattatgcttgacatctttgatagaatggtatgcaaaaacttacagtctgaaatcacagagatcatgtataacctgaatccacttgcacttagcagtattggagtgggagtaaaacagttgttagggttttccaagtttcggaggttgcctgttggatggggaaatttgagacagtggaggct

SEQ ID NO: 73714 - DNA, 681 bp, Homo sapiens
taactatatatttgcctacatctacagaatatacaacatcaagagtgaaccctaatgtgaactatggactcttgatgatgatgtgtcaatgtaggttcatcagttgtagcaaatatcctactcttgtgggggatgttgataatggaagaggctatacatgtatggggcaggtagtatgtgagaaatttctgtaacttccaatcaatttttctgtgaatctaaaactgctctaaaaataawgtctattaaaacaattctggggtaatgtaccaacacacttcaatttctttagaaagtatttattgaatggtgtcaacttcctcatgcttattttacttgtttttattatgagaagggtaatggtattgacctcataggattgctaagaagatgaactaaaatgatacatctaaactgtacagtgtctagcacatagtaaactttaatatataactattgttcttcgtggtaatgctgttataaataatatgttttagacattatgcttgacatctttgatagaatggtatgcaaaaacttacagtctgaaatcacagagatcatgtataacctgaatccacttgcacttagcagtattggagtgggagtaaaacagttgttagggttttccaagtttcggaggttgcctgttggatggggaaatttgagacagtggaggct

SEQ ID NO: 73715 - DNA, 642 bp, Homo sapiens
ttaggaaattttcagctattatgttattaaataggtttactatactttcttaaattttttttttatttgtactctcttctccttggaactcttataatgcgaatatggtgatccctaagtcccaaaggttttattcattcttttttttttgtctcttcatgatttcttcagctgtaatcaacatcagtggtaactgtaaatgcttcagtgatctagattgtgggtgtttgttgaggcagcagtgtggctttgctaaggaataggactgctgagcaagccagttctttggctctggaagactccctggtcaagggattggggcgaccaatggtggcagatgctgggcagaacagtccttggactctagggggcacatacaacagcttwtctggttgtggaggctgttgtgggtgctgggtggtcagttcttgggttctaggggatgtcttctcagttacttgggtcttggaaatgacctcccagctgtactggaccacttctttttggggatgcagggcactgtgtggccttaagtgctgtggtcacatttgtaccactgatctagctggggtcatggtgttctggcctttggcatgggcatagtgaaataaaaggagggtcttgggaatgtggagatgcagg

SEQ ID NO: 73716 - DNA, 642 bp, Homo sapiens
ttaggaaattttcagctattatgttattaaataggtttactatactttcttaaattttttttttatttgtactctcttctccttggaactcttataatgcgaatatggtgatccctaagtcccaaaggttttattcattcttttttttttgtctcttcatgatttcttcagctgtaatcaacatcagtggtaactgtaaatgcttcagtgatctagattgtgggtgtttgttgaggcagcagtgtggctttgctaaggaataggactgctgagcaagccagttctttggctctggaagactccctggtcaagggattggggcgaccaatggtggcagatgctgggcagaacagtccttggactctagggggcacatacaacagcttatctggttgtggaggctgttgtgggtgctgggtggtcagttcttgggttctaggggatgtcttstcagttacttgggtcttggaaatgacctcccagctgtactggaccacttctttttggggatgcagggcactgtgtggccttaagtgctgtggtcacatttgtaccactgatctagctggggtcatggtgttctggcctttggcatgggcatagtgaaataaaaggagggtcttgggaatgtggagatgcagg

SEQ ID NO: 73717 - DNA, 2340 bp, Homo sapiens
tgcaccccacccatcaggtttgctttggaaatgagtgctcttaagtcctggaaaaccctgtggtctactttctacctgggctttctacccttccttattctcacataggtgtgcagccatgaacacacaaacacaccacacacacacacacacacacacaggcttctaaggtggagatcatggaggtgaggttagagaagaggaaaccagagaagtgacaaaacgggaagaaatagaagaggcagctttgccatgaggcagaggcatccactcccccagctacatgaccaggagctgacagcatgtgatgaaggatcctccaggttccctgggttcttccaggcctggggatcttcccagctgtttcaagaggacaggacaggggttgtgactcccacctctatgggcacctggaactaaaatgagctatgccctcccccaaccaccccatgtgatataaagtgaggctacgggaaagaaaaccttcgttttctctctcataaataggggtactcaaaaggaataataccaagaattctagatactcataagtgtctgctccccttggctcttcattggtaactcactgtgctttgagactctgggaagaggcttttcaggttctagaggtccttcagagaagagagaggcctagagatgtgggcagatgaggacttggaataaagcagaatgtgacaatgcactgggctctggagtgtggggcccagaaaaaatactagatttttgggctgtccttgaggtcctcattcagaagtggaagaaaataatgtctctgaatgctgttaaagtgtttaatgagtgcacagcacactcaaagaggctgaggaaaataggaatcaagggaggtttccgaggttacttttatggcccttggagtcttcagatactgctccttttcccaggggtccttgaatagccactgccttgagaattccccaatgcaggtgcctgttttgtgatgcttccacctgggacttcagggctagtggaggcctctaggtggcggcagaccccgtgtttcttatgcccgctgggctttactggagcagctggagccgggggagagacaggctgaggtcctgcagctcctgttatcattcatgatctccacattattgggtggccaaaagtgggaagaagggctttgtgattttccatgttattttactcagcgactcttcccctagcactcaccatgtggcagctaccttggtaggttcaccttatggtaccaaaaatgattatgttatccctgcctccccgcggggagcccacagtctgaggacggcaggacaaaaacactaaagcaagtacatgtgaaagaaaagagcattttataatggaaataaagtagaatgttgggagggagggctggggagaggttgcctggaggggacatgaatgcctccctgaggtgacattatgttgtgaccagaatgacaacagagagccagtcctgcgcaggtgtgcaaagtgtgtcagggaaaagccactctttgtgaagagactcacaggcacaggtgagttcagcagaggaggttataacgggacaattgtggcggcaggcagcctgagaaagaaaggaaaagaggggagggaggatcctggggactgaaagaggagattagtcatttgcccctctctgacaaaatttccctgaattttagcacatgttgacaacaaatactatctcacaacttttgtgaaccagaatctcgatatagcttagttgggtgcctctgcctcaaggtctcttacgaggctggggctgtgatttcaactgaagctggatttgaggagagatcagccttctatctgcctcatggaaactggcacgattcagtgtgaactgagagcccgagttccttcctctcgattggcctgggcatctcctcagttctctatcatgtggrtctgtgcctagagcatcttaggacactgcagatcacttcctcatcttgaggattacaatacagagatgaaaaatgaaagagatagacagacatatgcagagaaaaagagagaaagggagacagagagattgagagaggacacacaggacagagcaagtaagaggaaaataatagctgttttagaaatataactttggaagttgcagaagactatgtgattccccaccatgttcacataccagaaccttaatccccagtgtaatggccttagcaggtcagaggtaattaagtccgaagcatgaggacctcatgatagcgattacgggctttgtaaaagaaaccgcagaaggctgtctctccctctctctgctaaatgagaaaacaacctgaagtctggagtttgaaa

SEQ ID NO: 73718 - DNA, 2340 bp, Homo sapiens
tgcaccccacccatcaggtttgctttggaaatgagtgctcttaagtcctggaaaaccctgtggtctactttctacctgggctttctacccttccttattctcacataggtgtgcagccatgaacacacaaacacaccacacacacacacacacacacacaggcttctaaggtggagatcatggaggtgaggttagagaagaggaaaccagagaagtgacaaaacgggaagaaatagaagaggcagctttgccatgaggcagaggcatccactcccccagctacatgaccaggagctgacagcatgtgatgaaggatcctccaggttccctgggttcttccaggcctggggatcttcccagctgtttcaagaggacaggacaggggttgtgactcccacctctatgggcacctggaactaaaatgagctatgccctcccccaaccaccccatgtgatataaagtgaggctacgggaaagaaaaccttcgttttctctctcataaataggggtactcaaaaggaataataccaagaattctagatactcataagtgtctgctccccttggctcttcattggtaactcactgtgctttgagactctgggaagaggcttttcaggttctagaggtccttcagagaagagagaggcctagagatgtgggcagatgaggacttggaataaagcagaatgtgacaatgcactgggctctggagtgtggggcccagaaaaaatactagatttttgggctgtccttgaggtcctcattcagaagtggaagaaaataatgtctctgaatgctgttaaagtgtttaatgagtgcacagcacactcaaagaggctgaggaaaataggaatcaagggaggtttccgaggttacttttatggcccttggagtcttcagatactgctccttttcccaggggtccttgaatagccactgccttgagaattccccaatgcaggtgcctgttttgtgatgcttccacctgggacttcagggctagtggaggcctctaggtggcggcagaccccgtgtttcttatgcccgctgggctttactggagcagctggagccgggggagagacaggctgaggtcctgcagctcctgttatcattcatgatctccacattattgggtggccaaaagtgggaagaagggctttgtgattttccatgttattttactcagcgactcttcccctagcactcaccatgtggcagctaccttggtaggttcaccttatggtaccaaaaatgattatgttatccctgcctccccgcggggagcccacagtctgaggacggcaggacaaaaacactaaagcaagtacatgtgaaagaaaagagcattttataatggaaataaagtagaatgttgggagggagggctggggagaggttgcctggaggggacatgaatgcctccctgaggtgacattatgttgtgaccagaatgacaacagagagccagtcctgcgcaggtgtgcaaagtgtgtcagggaaaagccactctttgtgaagagactcacaggcacaggtgagttcagcagaggaggttataacgggacaattgtggcggcaggcagcctgagaaagaaaggaaaagaggggagggaggatcctggggactgaaagaggagattagtcatttgcccctctctgacaaaatttccctgaattttagcacatgttgacaacaaatactatctcacaacttttgtgaaccagaatctcgatatagcttagttgggtgcctctgcctcaaggtctcttacgaggctggggctgtgatttcaactgaagctggatttgaggagagatcagccttctatctgcctcatggaaactggcacgattcagtgtgaactgagagcccgagttccttcctctcgattggcctgggcatctcctcagttctctatcatgtgggtctgtgcctagagcatcttaggacactgyagatcacttcctcatcttgaggattacaatacagagatgaaaaatgaaagagatagacagacatatgcagagaaaaagagagaaagggagacagagagattgagagaggacacacaggacagagcaagtaagaggaaaataatagctgttttagaaatataactttggaagttgcagaagactatgtgattccccaccatgttcacataccagaaccttaatccccagtgtaatggccttagcaggtcagaggtaattaagtccgaagcatgaggacctcatgatagcgattacgggctttgtaaaagaaaccgcagaaggctgtctctccctctctctgctaaatgagaaaacaacctgaagtctggagtttgaaa

SEQ ID NO: 73719 - DNA, 2340 bp, Homo sapiens
tgcaccccacccatcaggtttgctttggaaatgagtgctcttaagtcctggaaaaccctgtggtctactttctacctgggctttctacccttccttattctcacataggtgtgcagccatgaacacacaaacacaccacacacacacacacacacacacaggcttctaaggtggagatcatggaggtgaggttagagaagaggaaaccagagaagtgacaaaacgggaagaaatagaagaggcagctttgccatgaggcagaggcatccactcccccagctacatgaccaggagctgacagcatgtgatgaaggatcctccaggttccctgggttcttccaggcctggggatcttcccagctgtttcaagaggacaggacaggggttgtgactcccacctctatgggcacctggaactaaaatgagctatgccctcccccaaccaccccatgtgatataaagtgaggctacgggaaagaaaaccttcgttttctctctcataaataggggtactcaaaaggaataataccaagaattctagatactcataagtgtctgctccccttggctcttcattggtaactcactgtgctttgagactctgggaagaggcttttcaggttctagaggtccttcagagaagagagaggcctagagatgtgggcagatgaggacttggaataaagcagaatgtgacaatgcactgggctctggagtgtggggcccagaaaaaatactagatttttgggctgtccttgaggtcctcattcagaagtggaagaaaataatgtctctgaatgctgttaaagtgtttaatgagtgcacagcacactcaaagaggctgaggaaaataggaatcaagggaggtttccgaggttacttttatggcccttggagtcttcagatactgctccttttcccaggggtccttgaatagccactgccttgagaattccccaatgcaggtgcctgttttgtgatgcttccacctgggacttcagggctagtggaggcctctaggtggcggcagaccccgtgtttcttatgcccgctgggctttactggagcagctggagccgggggagagacaggctgaggtcctgcagctcctgttatcattcatgatctccacattattgggtggccaaaagtgggaagaagggctttgtgattttccatgttattttactcagcgactcttcccctagcactcaccatgtggcagctaccttggtaggttcaccttatggtaccaaaaatgattatgttatccctgcctccccgcggggagcccacagtctgaggacggcaggacaaaaacactaaagcaagtacatgtgaaagaaaagagcattttataatggaaataaagtagaatgttgggagggagggctggggagaggttgcctggaggggacatgaatgcctccctgaggtgacattatgttgtgaccagaatgacaacagagagccagtcctgcgcaggtgtgcaaagtgtgtcagggaaaagccactctttgtgaagagactcacaggcacaggtgagttcagcagaggaggttataacgggacaattgtggcggcaggcagcctgagaaagaaaggaaaagaggggagggaggatcctggggactgaaagaggagattagtcatttgcccctctctgacaaaatttccctgaattttagcacatgttgacaacaaatactatctcacaacttttgtgaaccagaatctcgatatagcttagttgggtgcctctgcctcaaggtctcttacgaggctggggctgtgatttcaactgaagctggatttgaggagagatcagccttctatctgcctcatggaaactggcacgattcagtgtgaactgagagcccgagttccttcctctcgattggcctgggcatctcctcagttctctatcatgtgggtctgtgcctagagcatcttaggacactgcagatyacttcctcatcttgaggattacaatacagagatgaaaaatgaaagagatagacagacatatgcagagaaaaagagagaaagggagacagagagattgagagaggacacacaggacagagcaagtaagaggaaaataatagctgttttagaaatataactttggaagttgcagaagactatgtgattccccaccatgttcacataccagaaccttaatccccagtgtaatggccttagcaggtcagaggtaattaagtccgaagcatgaggacctcatgatagcgattacgggctttgtaaaagaaaccgcagaaggctgtctctccctctctctgctaaatgagaaaacaacctgaagtctggagtttgaaa

SEQ ID NO: 73720 - DNA, 2340 bp, Homo sapiens
tgcaccccacccatcaggtttgctttggaaatgagtgctcttaagtcctggaaaaccctgtggtctactttctacctgggctttctacccttccttattctcacataggtgtgcagccatgaacacacaaacacaccacacacacacacacacacacacaggcttctaaggtggagatcatggaggtgaggttagagaagaggaaaccagagaagtgacaaaacgggaagaaatagaagaggcagctttgccatgaggcagaggcatccactcccccagctacatgaccaggagctgacagcatgtgatgaaggatcctccaggttccctgggttcttccaggcctggggatcttcccagctgtttcaagaggacaggacaggggttgtgactcccacctctatgggcacctggaactaaaatgagctatgccctcccccaaccaccccatgtgatataaagtgaggctacgggaaagaaaaccttcgttttctctctcataaataggggtactcaaaaggaataataccaagaattctagatactcataagtgtctgctccccttggctcttcattggtaactcactgtgctttgagactctgggaagaggcttttcaggttctagaggtccttcagagaagagagaggcctagagatgtgggcagatgaggacttggaataaagcagaatgtgacaatgcactgggctctggagtgtggggcccagaaaaaatactagatttttgggctgtccttgaggtcctcattcagaagtggaagaaaataatgtctctgaatgctgttaaagtgtttaatgagtgcacagcacactcaaagaggctgaggaaaataggaatcaagggaggtttccgaggttacttttatggcccttggagtcttcagatactgctccttttcccaggggtccttgaatagccactgccttgagaattccccaatgcaggtgcctgttttgtgatgcttccacctgggacttcagggctagtggaggcctctaggtggcggcagaccccgtgtttcttatgcccgctgggctttactggagcagctggagccgggggagagacaggctgaggtcctgcagctcctgttatcattcatgatctccacattattgggtggccaaaagtgggaagaagggctttgtgattttccatgttattttactcagcgactcttcccctagcactcaccatgtggcagctaccttggtaggttcaccttatggtaccaaaaatgattatgttatccctgcctccccgcggggagcccacagtctgaggacggcaggacaaaaacactaaagcaagtacatgtgaaagaaaagagcattttataatggaaataaagtagaatgttgggagggagggctggggagaggttgcctggaggggacatgaatgcctccctgaggtgacattatgttgtgaccagaatgacaacagagagccagtcctgcgcaggtgtgcaaagtgtgtcagggaaaagccactctttgtgaagagactcacaggcacaggtgagttcagcagaggaggttataacgggacaattgtggcggcaggcagcctgagaaagaaaggaaaagaggggagggaggatcctggggactgaaagaggagattagtcatttgcccctctctgacaaaatttccctgaattttagcacatgttgacaacaaatactatctcacaacttttgtgaaccagaatctcgatatagcttagttgggtgcctctgcctcaaggtctcttacgaggctggggctgtgatttcaactgaagctggatttgaggagagatcagccttctatctgcctcatggaaactggcacgattcagtgtgaactgagagcccgagttccttcctctcgattggcctgggcatctcctcagttctctatcatgtgggtctgtgcctagagcatcttaggacactgcagatcacttcctcatcttgaggattacaatacagagatgaaaaatgaaagagatagacagacatatgcagagaaaaagagagaaagggagacagagagattgagagaggacrcacaggacagagcaagtaagaggaaaataatagctgttttagaaatataactttggaagttgcagaagactatgtgattccccaccatgttcacataccagaaccttaatccccagtgtaatggccttagcaggtcagaggtaattaagtccgaagcatgaggacctcatgatagcgattacgggctttgtaaaagaaaccgcagaaggctgtctctccctctctctgctaaatgagaaaacaacctgaagtctggagtttgaaa

SEQ ID NO: 73721 - DNA, 1879 bp, Homo sapiens
aatgaaaaggaaaagaagattttaacccaactctgttctctcaaacctggggccctggctgcatttagaactttttgggaattaagggacataattgtgtttgcataactgtttacaggtaaagagttgacatgggagaggagggtgagcaatcagcagcccagcagggactttgcgtagatttatggaggaaaagggctcaggggataaaaccttgaagaagttaacagacttcccttgtgacaaaacctaacagaatttagaactttgggaaccagaaacccacattctagagacagccctgtatctagctaacttcttgggagatgcttgagagggcactgtgttctcattgtgttatattcccaagctgttgcctgagaaaggctcaaagtgagagccttttctgacagtatacatactggctcagcctacatccttgataccactggccattcgacaagaggcacccacaggtaacacagtktagcccagggcaggtccgtccatgccaggccacctgtgtcatctaatctgggcaacccgaccctgcctaccattaccctgtgttgcaaggggagcaggaaaggagggggcttttcctcacaggggcaggttttaagacacaggaaccctggtgggtctgtcatgttcatacccaggtcacggttggtggaataaaaagttgtgagttgcggaccaagtacgtctactcagatgtgaatcccaaggccttaagctgtcctcgggtttcctcattggctgggggtctatgcagatactcctatgttcctgatctaggaaacagaatttctaatgcagatgtcacctggtggtaaaaacaaagaagacaattaacttttttcgctgctgggaacactctttgtagagctgcattaaaatcagtgagcagatatttgatgggttcaagtcccccatctccttggacaactggcaggttcaccacaccccccaagcatggcatacaatgagttatgttgagagcaggcacatggggttctctacagagagggacctgacaaaaccaggatgggtccaggatccagacccaaatatggaatttctctgcgctttctcctaggggatttccatgagtgaccctcagatctaccccccaaaaatctagccttaactggtcccagtggcaacttggttaagtgtaaagtccctttttacattcttgtagaaatatcagagaaggcctttgtgttgtttttactttacactaggctgcatttattcatgttactacagtttgtatagttttaattattcccctctgatatcatctgtagcaagcaggttcatggtactgccagactttctccaagacttgaaagccaccactatcactaatactctacaaaaatagggaagagtttacatgaaaaaggggttatattgtttcctacatttgtctgcaatgtgtcatctaagagaactcatcccagtagcccatcagggcagaagtggtgccctcacatctctttgtaatgttctataatgggggtcacttcccagagtggtttagcctttcaatggctattatttctgatcaaaatggaataaaactagaaatgaataacagaagaaaacaaaaatagcaacatatatatggaaattaaacaactcacttttgagcatgctcatgtttaagggttgtaagacttaatattatgaataatgcttatgatgtctaaagcgagttacagattcaatgcaatcccttttaaattaagaactttttttttgaaatagaaaaaggaaccaacaaattatatggaatctcaagcgaccataaagagccccaaaatgtttaaaaaaaacaatgttagtgacctcaccttttctgatttca

SEQ ID NO: 73722 - DNA, 1879 bp, Homo sapiens
aatgaaaaggaaaagaagattttaacccaactctgttctctcaaacctggggccctggctgcatttagaactttttgggaattaagggacataattgtgtttgcataactgtttacaggtaaagagttgacatgggagaggagggtgagcaatcagcagcccagcagggactttgcgtagatttatggaggaaaagggctcaggggataaaaccttgaagaagttaacagacttcccttgtgacaaaacctaacagaatttagaactttgggaaccagaaacccacattctagagacagccctgtatctagctaacttcttgggagatgcttgagagggcactgtgttctcattgtgttatattcccaagctgttgcctgagaaaggctcaaagtgagagccttttctgacagtatacatactggctcagcctacatccttgataccactggccattcgacaagaggcacccacaggtaacacagtttagcccagggcaggtccgtccatgccaggccacctgtgtcatctaatctgggcaacccgaccctgcctaccattaccctgtgttgcaaggggagcaggaaaggagggggcttttcctcacaggggcaggttttaagacacaggaaccctggtgggtctgtcatgttcatacccaggtcacggttggtggaataaaaagttgtgagttgcggaccaagtacgtctactcaratgtgaatcccaaggccttaagctgtcctcgggtttcctcattggctgggggtctatgcagatactcctatgttcctgatctaggaaacagaatttctaatgcagatgtcacctggtggtaaaaacaaagaagacaattaacttttttcgctgctgggaacactctttgtagagctgcattaaaatcagtgagcagatatttgatgggttcaagtcccccatctccttggacaactggcaggttcaccacaccccccaagcatggcatacaatgagttatgttgagagcaggcacatggggttctctacagagagggacctgacaaaaccaggatgggtccaggatccagacccaaatatggaatttctctgcgctttctcctaggggatttccatgagtgaccctcagatctaccccccaaaaatctagccttaactggtcccagtggcaacttggttaagtgtaaagtccctttttacattcttgtagaaatatcagagaaggcctttgtgttgtttttactttacactaggctgcatttattcatgttactacagtttgtatagttttaattattcccctctgatatcatctgtagcaagcaggttcatggtactgccagactttctccaagacttgaaagccaccactatcactaatactctacaaaaatagggaagagtttacatgaaaaaggggttatattgtttcctacatttgtctgcaatgtgtcatctaagagaactcatcccagtagcccatcagggcagaagtggtgccctcacatctctttgtaatgttctataatgggggtcacttcccagagtggtttagcctttcaatggctattatttctgatcaaaatggaataaaactagaaatgaataacagaagaaaacaaaaatagcaacatatatatggaaattaaacaactcacttttgagcatgctcatgtttaagggttgtaagacttaatattatgaataatgcttatgatgtctaaagcgagttacagattcaatgcaatcccttttaaattaagaactttttttttgaaatagaaaaaggaaccaacaaattatatggaatctcaagcgaccataaagagccccaaaatgtttaaaaaaaacaatgttagtgacctcaccttttctgatttca

SEQ ID NO: 73723 - DNA, 1879 bp, Homo sapiens
aatgaaaaggaaaagaagattttaacccaactctgttctctcaaacctggggccctggctgcatttagaactttttgggaattaagggacataattgtgtttgcataactgtttacaggtaaagagttgacatgggagaggagggtgagcaatcagcagcccagcagggactttgcgtagatttatggaggaaaagggctcaggggataaaaccttgaagaagttaacagacttcccttgtgacaaaacctaacagaatttagaactttgggaaccagaaacccacattctagagacagccctgtatctagctaacttcttgggagatgcttgagagggcactgtgttctcattgtgttatattcccaagctgttgcctgagaaaggctcaaagtgagagccttttctgacagtatacatactggctcagcctacatccttgataccactggccattcgacaagaggcacccacaggtaacacagtttagcccagggcaggtccgtccatgccaggccacctgtgtcatctaatctgggcaacccgaccctgcctaccattaccctgtgttgcaaggggagcaggaaaggagggggcttttcctcacaggggcaggttttaagacacaggaaccctggtgggtctgtcatgttcatacccaggtcacggttggtggaataaaaagttgtgagttgcggaccaagtacgtctactcagatgtgaatcccaaggccttaagctgtcctsgggtttcctcattggctgggggtctatgcagatactcctatgttcctgatctaggaaacagaatttctaatgcagatgtcacctggtggtaaaaacaaagaagacaattaacttttttcgctgctgggaacactctttgtagagctgcattaaaatcagtgagcagatatttgatgggttcaagtcccccatctccttggacaactggcaggttcaccacaccccccaagcatggcatacaatgagttatgttgagagcaggcacatggggttctctacagagagggacctgacaaaaccaggatgggtccaggatccagacccaaatatggaatttctctgcgctttctcctaggggatttccatgagtgaccctcagatctaccccccaaaaatctagccttaactggtcccagtggcaacttggttaagtgtaaagtccctttttacattcttgtagaaatatcagagaaggcctttgtgttgtttttactttacactaggctgcatttattcatgttactacagtttgtatagttttaattattcccctctgatatcatctgtagcaagcaggttcatggtactgccagactttctccaagacttgaaagccaccactatcactaatactctacaaaaatagggaagagtttacatgaaaaaggggttatattgtttcctacatttgtctgcaatgtgtcatctaagagaactcatcccagtagcccatcagggcagaagtggtgccctcacatctctttgtaatgttctataatgggggtcacttcccagagtggtttagcctttcaatggctattatttctgatcaaaatggaataaaactagaaatgaataacagaagaaaacaaaaatagcaacatatatatggaaattaaacaactcacttttgagcatgctcatgtttaagggttgtaagacttaatattatgaataatgcttatgatgtctaaagcgagttacagattcaatgcaatcccttttaaattaagaactttttttttgaaatagaaaaaggaaccaacaaattatatggaatctcaagcgaccataaagagccccaaaatgtttaaaaaaaacaatgttagtgacctcaccttttctgatttca

SEQ ID NO: 73724 - DNA, 1879 bp, Homo sapiens
aatgaaaaggaaaagaagattttaacccaactctgttctctcaaacctggggccctggctgcatttagaactttttgggaattaagggacataattgtgtttgcataactgtttacaggtaaagagttgacatgggagaggagggtgagcaatcagcagcccagcagggactttgcgtagatttatggaggaaaagggctcaggggataaaaccttgaagaagttaacagacttcccttgtgacaaaacctaacagaatttagaactttgggaaccagaaacccacattctagagacagccctgtatctagctaacttcttgggagatgcttgagagggcactgtgttctcattgtgttatattcccaagctgttgcctgagaaaggctcaaagtgagagccttttctgacagtatacatactggctcagcctacatccttgataccactggccattcgacaagaggcacccacaggtaacacagtttagcccagggcaggtccgtccatgccaggccacctgtgtcatctaatctgggcaacccgaccctgcctaccattaccctgtgttgcaaggggagcaggaaaggagggggcttttcctcacaggggcaggttttaagacacaggaaccctggtgggtctgtcatgttcatacccaggtcacggttggtggaataaaaagttgtgagttgcggaccaagtacgtctactcagatgtgaatcccaaggccttaagctgtcctcgggtttcctcattggctgggggtctatgcagatactcctatgttcctgatctaggaaacagaatttctaatgcagatgtcacctggtggtaaaaacaaaraagacaattaacttttttcgctgctgggaacactctttgtagagctgcattaaaatcagtgagcagatatttgatgggttcaagtcccccatctccttggacaactggcaggttcaccacaccccccaagcatggcatacaatgagttatgttgagagcaggcacatggggttctctacagagagggacctgacaaaaccaggatgggtccaggatccagacccaaatatggaatttctctgcgctttctcctaggggatttccatgagtgaccctcagatctaccccccaaaaatctagccttaactggtcccagtggcaacttggttaagtgtaaagtccctttttacattcttgtagaaatatcagagaaggcctttgtgttgtttttactttacactaggctgcatttattcatgttactacagtttgtatagttttaattattcccctctgatatcatctgtagcaagcaggttcatggtactgccagactttctccaagacttgaaagccaccactatcactaatactctacaaaaatagggaagagtttacatgaaaaaggggttatattgtttcctacatttgtctgcaatgtgtcatctaagagaactcatcccagtagcccatcagggcagaagtggtgccctcacatctctttgtaatgttctataatgggggtcacttcccagagtggtttagcctttcaatggctattatttctgatcaaaatggaataaaactagaaatgaataacagaagaaaacaaaaatagcaacatatatatggaaattaaacaactcacttttgagcatgctcatgtttaagggttgtaagacttaatattatgaataatgcttatgatgtctaaagcgagttacagattcaatgcaatcccttttaaattaagaactttttttttgaaatagaaaaaggaaccaacaaattatatggaatctcaagcgaccataaagagccccaaaatgtttaaaaaaaacaatgttagtgacctcaccttttctgatttca

SEQ ID NO: 73725 - DNA, 1879 bp, Homo sapiens
aatgaaaaggaaaagaagattttaacccaactctgttctctcaaacctggggccctggctgcatttagaactttttgggaattaagggacataattgtgtttgcataactgtttacaggtaaagagttgacatgggagaggagggtgagcaatcagcagcccagcagggactttgcgtagatttatggaggaaaagggctcaggggataaaaccttgaagaagttaacagacttcccttgtgacaaaacctaacagaatttagaactttgggaaccagaaacccacattctagagacagccctgtatctagctaacttcttgggagatgcttgagagggcactgtgttctcattgtgttatattcccaagctgttgcctgagaaaggctcaaagtgagagccttttctgacagtatacatactggctcagcctacatccttgataccactggccattcgacaagaggcacccacaggtaacacagtttagcccagggcaggtccgtccatgccaggccacctgtgtcatctaatctgggcaacccgaccctgcctaccattaccctgtgttgcaaggggagcaggaaaggagggggcttttcctcacaggggcaggttttaagacacaggaaccctggtgggtctgtcatgttcatacccaggtcacggttggtggaataaaaagttgtgagttgcggaccaagtacgtctactcagatgtgaatcccaaggccttaagctgtcctcgggtttcctcattggctgggggtctatgcagatactcctatgttcctgatctaggaaacagaatttctaatgcagatgtcacctggtggtaaaaacaaagaagacaattaacttttttcgctgctgggaacactctttgtagagctgcattaaaatcagtgagcagatatttgatgggttcaagtcccccatctccttggacaactggcaggttcaccacaccccccaagcatggcatacaatgagttatgktgagagcaggcacatggggttctctacagagagggacctgacaaaaccaggatgggtccaggatccagacccaaatatggaatttctctgcgctttctcctaggggatttccatgagtgaccctcagatctaccccccaaaaatctagccttaactggtcccagtggcaacttggttaagtgtaaagtccctttttacattcttgtagaaatatcagagaaggcctttgtgttgtttttactttacactaggctgcatttattcatgttactacagtttgtatagttttaattattcccctctgatatcatctgtagcaagcaggttcatggtactgccagactttctccaagacttgaaagccaccactatcactaatactctacaaaaatagggaagagtttacatgaaaaaggggttatattgtttcctacatttgtctgcaatgtgtcatctaagagaactcatcccagtagcccatcagggcagaagtggtgccctcacatctctttgtaatgttctataatgggggtcacttcccagagtggtttagcctttcaatggctattatttctgatcaaaatggaataaaactagaaatgaataacagaagaaaacaaaaatagcaacatatatatggaaattaaacaactcacttttgagcatgctcatgtttaagggttgtaagacttaatattatgaataatgcttatgatgtctaaagcgagttacagattcaatgcaatcccttttaaattaagaactttttttttgaaatagaaaaaggaaccaacaaattatatggaatctcaagcgaccataaagagccccaaaatgtttaaaaaaaacaatgttagtgacctcaccttttctgatttca

SEQ ID NO: 73726 - DNA, 1879 bp, Homo sapiens
aatgaaaaggaaaagaagattttaacccaactctgttctctcaaacctggggccctggctgcatttagaactttttgggaattaagggacataattgtgtttgcataactgtttacaggtaaagagttgacatgggagaggagggtgagcaatcagcagcccagcagggactttgcgtagatttatggaggaaaagggctcaggggataaaaccttgaagaagttaacagacttcccttgtgacaaaacctaacagaatttagaactttgggaaccagaaacccacattctagagacagccctgtatctagctaacttcttgggagatgcttgagagggcactgtgttctcattgtgttatattcccaagctgttgcctgagaaaggctcaaagtgagagccttttctgacagtatacatactggctcagcctacatccttgataccactggccattcgacaagaggcacccacaggtaacacagtttagcccagggcaggtccgtccatgccaggccacctgtgtcatctaatctgggcaacccgaccctgcctaccattaccctgtgttgcaaggggagcaggaaaggagggggcttttcctcacaggggcaggttttaagacacaggaaccctggtgggtctgtcatgttcatacccaggtcacggttggtggaataaaaagttgtgagttgcggaccaagtacgtctactcagatgtgaatcccaaggccttaagctgtcctcgggtttcctcattggctgggggtctatgcagatactcctatgttcctgatctaggaaacagaatttctaatgcagatgtcacctggtggtaaaaacaaagaagacaattaacttttttcgctgctgggaacactctttgtagagctgcattaaaatcagtgagcagatatttgatgggttcaagtcccccatctccttggacaactggcaggttcaccacaccccccaagcatggcatacaatgagttatgttgagagcaggcacatggggttctctacagagagggacctgacaaaaccaggatgggyccaggatccagacccaaatatggaatttctctgcgctttctcctaggggatttccatgagtgaccctcagatctaccccccaaaaatctagccttaactggtcccagtggcaacttggttaagtgtaaagtccctttttacattcttgtagaaatatcagagaaggcctttgtgttgtttttactttacactaggctgcatttattcatgttactacagtttgtatagttttaattattcccctctgatatcatctgtagcaagcaggttcatggtactgccagactttctccaagacttgaaagccaccactatcactaatactctacaaaaatagggaagagtttacatgaaaaaggggttatattgtttcctacatttgtctgcaatgtgtcatctaagagaactcatcccagtagcccatcagggcagaagtggtgccctcacatctctttgtaatgttctataatgggggtcacttcccagagtggtttagcctttcaatggctattatttctgatcaaaatggaataaaactagaaatgaataacagaagaaaacaaaaatagcaacatatatatggaaattaaacaactcacttttgagcatgctcatgtttaagggttgtaagacttaatattatgaataatgcttatgatgtctaaagcgagttacagattcaatgcaatcccttttaaattaagaactttttttttgaaatagaaaaaggaaccaacaaattatatggaatctcaagcgaccataaagagccccaaaatgtttaaaaaaaacaatgttagtgacctcaccttttctgatttca

SEQ ID NO: 73727 - DNA, 1313 bp, Homo sapiens
ggatcctgaagctcctgctgggggatttggggctgggggcaccctggggagctgctgccaaggccatccaccgtccatacaggccgcctcccttcccggcctgtgatggaaaggagaaggggtatgtgaacagctgtggaagtcagactctcgggaactgaatcaggccccagcccatgccccccagcccagtccagccaacgtgcccgctgtcttcccacccagccagccgagccctcaggattgttagatggaaccaggctccatcaccacccaggcatggagggaagatgccctggtccttagcaagcaaggcctggtttccaaagtgctctccgaagaggcctcatgtttgtgacatcttagaaggtacctttctgctgttcttgcacccagcatgttggcaagtcaagttcccccactgagttctccacacataaggagggagtcaacaccattgctaagtcggatcagctcaagggtctccagtatcagttttatcagatcccagggacctgcctgctcccagaggtgacagagaaaaatcaaggaacgatctgtatggtcactgacatggatgaaacccttgtgcatagctccattaagccaatcagcaatgctgactgcctagtgactgtaaagattgaggggaccatgaggccttatatggatgagttcctgagatgactggaggaactgtttaaatgtgttttcttcattgctctcttcattccagactgaacaagtatgcagatcctgttgagaggtgacagcgtgctggcagtcctcacaacccttgctcactctccgggcctcctctgcctgggctccaactttggcggcactttaagagcccttcagcctgtcgctgcactgtgggagcccctttctgggctggccaaggtcggagccggctccctcagcttgcgacgaggtgtggagggagaggtgcgtgtgggaaccagggcggcrtgcagtgcttgaaggccagcgcgagctcggcggaccccacactcggagccggcggctggccccaccggccccaggcagtgaggggcttaacacctcggccagcagctgctgtgctcaatttctcgctgggccttagctgccatcccacagggcagggcttgggtcctgcagcccgccatgcctgagcctcccccccatcggtgggctcctgtgtgcccaagcctcctggatgagtgccgccccctgctccacagcacccagtcccatcaaccacccaagggctgagaagtgcgggtgcacagtgccagactggcaggcagctacacctgcagaccctgtgg

SEQ ID NO: 73728 - DNA, 1313 bp, Homo sapiens
ggatcctgaagctcctgctgggggatttggggctgggggcaccctggggagctgctgccaaggccatccaccgtccatacaggccgcctcccttcccggcctgtgatggaaaggagaaggggtatgtgaacagctgtggaagtcagactctcgggaactgaatcaggccccagcccatgccccccagcccagtccagccaacgtgcccgctgtcttcccacccagccagccgagccctcaggattgttagatggaaccaggctccatcaccacccaggcatggagggaagatgccctggtccttagcaagcaaggcctggtttccaaagtgctctccgaagaggcctcatgtttgtgacatcttagaaggtacctttctgctgttcttgcacccagcatgttggcaagtcaagttcccccactgagttctccacacataaggagggagtcaacaccattgctaagtcggatcagctcaagggtctccagtatcagttttatcagatcccagggacctgcctgctcccagaggtgacagagaaaaatcaaggaacgatctgtatggtcactgacatggatgaaacccttgtgcatagctccattaagccaatcagcaatgctgactgcctagtgactgtaaagattgaggggaccatgaggccttatatggatgagttcctgagatgactggaggaactgtttaaatgtgttttcttcattgctctcttcattccagactgaacaagtatgcagatcctgttgagaggtgacagcgtgctggcagtcctcacaacccttgctcactctccgggcctcctctgcctgggctccaactttggcggcactttaagagcccttcagcctgtcgctgcactgtgggagcccctttctgggctggccaaggtcggagccggctccctcagcttgcgacgaggtgtggagggagaggtgcgtgtgggaaccagggcggcgtgcagtgcttgaaggccagcgcgagctcggcggaccccacactcggagccggcggctggccccaccggccccaggcagtgaggggcttaacacctcggccagcagctgctgtgctcaatttctcgctgggccttagctgccatcccacagggcagggcttgggtcctgcagcccgccatrcctgagcctcccccccatcggtgggctcctgtgtgcccaagcctcctggatgagtgccgccccctgctccacagcacccagtcccatcaaccacccaagggctgagaagtgcgggtgcacagtgccagactggcaggcagctacacctgcagaccctgtgg

SEQ ID NO: 73729 - DNA, 1313 bp, Homo sapiens
ggatcctgaagctcctgctgggggatttggggctgggggcaccctggggagctgctgccaaggccatccaccgtccatacaggccgcctcccttcccggcctgtgatggaaaggagaaggggtatgtgaacagctgtggaagtcagactctcgggaactgaatcaggccccagcccatgccccccagcccagtccagccaacgtgcccgctgtcttcccacccagccagccgagccctcaggattgttagatggaaccaggctccatcaccacccaggcatggagggaagatgccctggtccttagcaagcaaggcctggtttccaaagtgctctccgaagaggcctcatgtttgtgacatcttagaaggtacctttctgctgttcttgcacccagcatgttggcaagtcaagttcccccactgagttctccacacataaggagggagtcaacaccattgctaagtcggatcagctcaagggtctccagtatcagttttatcagatcccagggacctgcctgctcccagaggtgacagagaaaaatcaaggaacgatctgtatggtcactgacatggatgaaacccttgtgcatagctccattaagccaatcagcaatgctgactgcctagtgactgtaaagattgaggggaccatgaggccttatatggatgagttcctgagatgactggaggaactgtttaaatgtgttttcttcattgctctcttcattccagactgaacaagtatgcagatcctgttgagaggtgacagcgtgctggcagtcctcacaacccttgctcactctccgggcctcctctgcctgggctccaactttggcggcactttaagagcccttcagcctgtcgctgcactgtgggagcccctttctgggctggccaaggtcggagccggctccctcagcttgcgacgaggtgtggagggagaggtgcgtgtgggaaccagggcggcgtgcagtgcttgaaggccagcgcgagctcggcggaccccacactcggagccggcggctggccccaccggccccaggcagtgaggggcttaacacctcggccagcagctgctgtgctcaatttctcgctgggccttagctgccatcccacagggcagggcttgggtcctgcagcccgccatgcctgagcctcccccccatcggtgggctcctgtgtgcccaagcctcctggatgagtgccrccccctgctccacagcacccagtcccatcaaccacccaagggctgagaagtgcgggtgcacagtgccagactggcaggcagctacacctgcagaccctgtgg

SEQ ID NO: 73730 - DNA, 1313 bp, Homo sapiens
ggatcctgaagctcctgctgggggatttggggctgggggcaccctggggagctgctgccaaggccatccaccgtccatacaggccgcctcccttcccggcctgtgatggaaaggagaaggggtatgtgaacagctgtggaagtcagactctcgggaactgaatcaggccccagcccatgccccccagcccagtccagccaacgtgcccgctgtcttcccacccagccagccgagccctcaggattgttagatggaaccaggctccatcaccacccaggcatggagggaagatgccctggtccttagcaagcaaggcctggtttccaaagtgctctccgaagaggcctcatgtttgtgacatcttagaaggtacctttctgctgttcttgcacccagcatgttggcaagtcaagttcccccactgagttctccacacataaggagggagtcaacaccattgctaagtcggatcagctcaagggtctccagtatcagttttatcagatcccagggacctgcctgctcccagaggtgacagagaaaaatcaaggaacgatctgtatggtcactgacatggatgaaacccttgtgcatagctccattaagccaatcagcaatgctgactgcctagtgactgtaaagattgaggggaccatgaggccttatatggatgagttcctgagatgactggaggaactgtttaaatgtgttttcttcattgctctcttcattccagactgaacaagtatgcagatcctgttgagaggtgacagcgtgctggcagtcctcacaacccttgctcactctccgggcctcctctgcctgggctccaactttggcggcactttaagagcccttcagcctgtcgctgcactgtgggagcccctttctgggctggccaaggtcggagccggctccctcagcttgcgacgaggtgtggagggagaggtgcgtgtgggaaccagggcggcgtgcagtgcttgaaggccagcgcgagctcggcggaccccacactcggagccggcggctggccccaccggccccaggcagtgaggggcttaacacctcggccagcagctgctgtgctcaatttctcgctgggccttagctgccatcccacagggcagggcttgggtcctgcagcccgccatgcctgagcctcccccccatcggtgggctcctgtgtgcccaagcctcctggatgagtgccgccccctgctccacrgcacccagtcccatcaaccacccaagggctgagaagtgcgggtgcacagtgccagactggcaggcagctacacctgcagaccctgtgg

SEQ ID NO: 73731 - DNA, 1313 bp, Homo sapiens
ggatcctgaagctcctgctgggggatttggggctgggggcaccctggggagctgctgccaaggccatccaccgtccatacaggccgcctcccttcccggcctgtgatggaaaggagaaggggtatgtgaacagctgtggaagtcagactctcgggaactgaatcaggccccagcccatgccccccagcccagtccagccaacgtgcccgctgtcttcccacccagccagccgagccctcaggattgttagatggaaccaggctccatcaccacccaggcatggagggaagatgccctggtccttagcaagcaaggcctggtttccaaagtgctctccgaagaggcctcatgtttgtgacatcttagaaggtacctttctgctgttcttgcacccagcatgttggcaagtcaagttcccccactgagttctccacacataaggagggagtcaacaccattgctaagtcggatcagctcaagggtctccagtatcagttttatcagatcccagggacctgcctgctcccagaggtgacagagaaaaatcaaggaacgatctgtatggtcactgacatggatgaaacccttgtgcatagctccattaagccaatcagcaatgctgactgcctagtgactgtaaagattgaggggaccatgaggccttatatggatgagttcctgagatgactggaggaactgtttaaatgtgttttcttcattgctctcttcattccagactgaacaagtatgcagatcctgttgagaggtgacagcgtgctggcagtcctcacaacccttgctcactctccgggcctcctctgcctgggctccaactttggcggcactttaagagcccttcagcctgtcgctgcactgtgggagcccctttctgggctggccaaggtcggagccggctccctcagcttgcgacgaggtgtggagggagaggtgcgtgtgggaaccagggcggcgtgcagtgcttgaaggccagcgcgagctcggcggaccccacactcggagccggcggctggccccaccggccccaggcagtgaggggcttaacacctcggccagcagctgctgtgctcaatttctcgctgggccttagctgccatcccacagggcagggcttgggtcctgcagcccgccatgcctgagcctcccccccatcggtgggctcctgtgtgcccaagcctcctggatgagtgccgccccctgctccacagcacccagtcccatcaaccacccragggctgagaagtgcgggtgcacagtgccagactggcaggcagctacacctgcagaccctgtgg

SEQ ID NO: 73732 - DNA, 2127 bp, Homo sapiens
caaaatggtgaatgagatcaaatcatgttatacttggaaaggaagaaaacaggaatacaaagttagggtcagattctatgactcttccataaaacattcactgagccaaacatttggatgcctaatcaagtcatttatgaattctgttgacatttaggaagaatttagaatgctttaaggttaaaacttagatgtaggcccttctgcctcaaataaaatagaataataaaataggtaaactttcttatgtttttagaggatgatgatatcgagataaagcttcttaggagatgaagaagaacgcaatacttgttgtggggccacttggtttaatgcaaaaacaaaaacaaaaacaaaacaatgtagaaaagcccctttgttcttctgggtctccttgcaatttctctctcagcaacagtgtaggcctctatgatgagtcttttaatactggcacactggctgaattccatacagccaactgggtataagaatgagattcaaaaggcaaaaggccacaattgctgcccctgttccaaatgacattgtgcaaagccagggattaccttgcaggatgtgggcaaaaactttctccattgttcaagattgaatcatctcacaaacaaatcacttacagcagtttctttagcctggggtcttgcatctcctaaaattgtatgcacacacctgggactgtgtacagcagtgcttttctttgggggcagggcccagagcttcccaaagacttgcagtctcttarctgttccccaccaccactgccatacttaaaaacctacttggaaatttttatttgttgttttttgaagtcaattacaatgattcaaatagtgttttcggattatgcataaatttagaactgtattattcaatatggtagccactagccatatatggttactgagtacttgaaaaatggctaatctgaattgaattatgctgtatatgtaaaatacgtagcaatttcaaagacagcacaaaaatggtaaaatatctcattatatggattttcatagggattacatgttgaaatgatcattttggttatattaagttcagtataatattaaaattaattttacctgtgaatactagaaaacaatattacaagtgatttttgaattatatttctactagctagtgctggcctacaatgtacaattctacatattacacagatttaagaaaactaaataatttttcaataaggcacctatccttagagggaagggaagagaacaaaaatgggccaggcactgagagaaatgtttcagccatattttctcactagattcttacaactcccctgtgaggaagttaatattggctaagagaatacctgataaaatggaaaatctcacaatcatttcctttgactttaattcctaaatcaacaatgacagtccattattttaacagtagcgattgctcatgcctataatcccagcattttgggaggctgaggcaggaggatcacttgaatgtaggagtttgagaccagcctgggcaacatggtgagaaccccatctccacaaaaataaacaaacaaacaaataaataaataatttagacaggtgtggtggtacacacctgtggttctagctacttgtgaggctagtttgacacccaggagtttgaacccaggagtttgagactgcagtgagccatgttcacaccactgcactccagtctgggtgacagagtgagaccctgtctcaaaaatcaatagataaataaataaataaataaatagaaatgaaaaaaccccattaaactaaattagtataaaattagtaattagtaatagattaatatataaatgagtaattagtaataaaattagaatagaattattctagtttaatataacatactaataatatagtagtatactgctaataatataatattagtactataatgctaaaaatgattgaatacactaaaaatggggtgcagtgcttatattcctaggctcaagagtcagacacacctgaactgaaatccggactccatcaatgactaccagtgtgatctgggagagttgcttaggctctctaaagtacactttcataatcttcaatacggacgagaggataaattgagataaat

SEQ ID NO: 73733 - DNA, 2127 bp, Homo sapiens
caaaatggtgaatgagatcaaatcatgttatacttggaaaggaagaaaacaggaatacaaagttagggtcagattctatgactcttccataaaacattcactgagccaaacatttggatgcctaatcaagtcatttatgaattctgttgacatttaggaagaatttagaatgctttaaggttaaaacttagatgtaggcccttctgcctcaaataaaatagaataataaaataggtaaactttcttatgtttttagaggatgatgatatcgagataaagcttcttaggagatgaagaagaacgcaatacttgttgtggggccacttggtttaatgcaaaaacaaaaacaaaaacaaaacaatgtagaaaagcccctttgttcttctgggtctccttgcaatttctctctcagcaacagtgtaggcctctatgatgagtcttttaatactggcacactggctgaattccatacagccaactgggtataagaatgagattcaaaaggcaaaaggccacaattgctgcccctgttccaaatgacattgtgcaaagccagggattaccttgcaggatgtgggcaaaaactttctccattgttcaagattgaatcatctcacaaacaaatcacttacagcagtttctttagcctggggtcttgcatctcctaaaattgtatgcacacacctgggactgtgtacagcagtgcttttctttgggggcagggcccagagcttcccaaagacttgcagtctcttaactgttccccaccaccactgccatacttaaaaacctacttggaaatttttatttgttgttttttgaagtcaattacaatgattcaaatagtgttttcggattatgcataaatttagaactgtattattcaatatggtagccactagccatatatggttactgagtacttgaaaaatggctaatctgaattgaattatgctgtatatgtaaaatacgtagcaatttcaaagacagcacaaaaatggtaaaatatctcattatatggattttcatagggattacatgttgaaatgatcattttggttatattaagttcagtataatattaaaattaattttacctgtgaatactagaaaacaatattacaagtgatttttgaattatatttctactagctagtgctggcctacaatgtacaattctacatattacacagatttaagaaaactaaataatttttcaataaggcacctatccttagagggaagggaagagaacaaaaatgggccaggcactgagagaaatgtttcagccatattttctcactagattcttacaactcccctgtgaggaagttaatattggctaagagaatacctgataaaatggaaaatctcacaatcatttcctttgactttaattcctaaatcaacaatgacagtccattattttaacagtagcgattgytcatgcctataatcccagcattttgggaggctgaggcaggaggatcacttgaatgtaggagtttgagaccagcctgggcaacatggtgagaaccccatctccacaaaaataaacaaacaaacaaataaataaataatttagacaggtgtggtggtacacacctgtggttctagctacttgtgaggctagtttgacacccaggagtttgaacccaggagtttgagactgcagtgagccatgttcacaccactgcactccagtctgggtgacagagtgagaccctgtctcaaaaatcaatagataaataaataaataaataaatagaaatgaaaaaaccccattaaactaaattagtataaaattagtaattagtaatagattaatatataaatgagtaattagtaataaaattagaatagaattattctagtttaatataacatactaataatatagtagtatactgctaataatataatattagtactataatgctaaaaatgattgaatacactaaaaatggggtgcagtgcttatattcctaggctcaagagtcagacacacctgaactgaaatccggactccatcaatgactaccagtgtgatctgggagagttgcttaggctctctaaagtacactttcataatcttcaatacggacgagaggataaattgagataaat

SEQ ID NO: 73734 - DNA, 1197 bp, Homo sapiens
atggactgaaaaattgaaataatagcatagcaattttataacagggctaacattgggaaattgtgttgtttgaataatatgccatctcttactagaagttctaaaaattagaaatagaacataagaattacaaagcttgaggacacttagcattcaggatagaaacctgcagagataatcaactttcaacaactgaattttttacagctatgaaaagcattgctagttacaccgtactacccttacaataaaggtatacttagaagcatctaggacacacacacacacacacacacacacacacacacattgagattgaactttatgatcctgacaaacatagcaggaaacacagaattcgtctcatccaaactggttgggttttattttattttatttatttatttattttatttatttttttttttgagatggagttacactcttgttgcccagactggagtgcaatggcgtgatctctgctcactgcaacctccacctcccgggttcaagtgattctcctgcctcagcctcaccagtagctgggattacaggcatgcaccaccacacctggctaattttttgtatttttagtagagacgaggtttcgccattttggccaggctggtctcgaactcctgacctcaggtgatccrctctccttggcctcccaaagtgctgagattacaggcgtgagccaccgcacccggccatactgcttattttacagaagaaataactgaggtctggagggtggtatggctaaggtcctccaactagttaaggagatgatcccaggtgaattgtgtgttgtctaactcctcattatgtgctcctttcactatgcgtgttgtcatctttagttcactttattgtgagtgattaaggctgttatataactttgtaaaagataattaacattaaaaacaatgtttaacatttacaacaataatacccatattattacttactgaactcaaatcattcactatgctaaaagctatatgtgtgttttccattttaatctttatgacagtttttatttatgtatccccattttatggatgagggcatggaagtaaacaaagaggcctggtttttcatggtcaaccagctaataagtaatggaatgaaaattcaaacctaatactgcctgaatagaaaacctatattcttacctcttaaactgtaaataat

SEQ ID NO: 73735 - DNA, 1101 bp, Homo sapiens
acccgctcaccctcccaaagttctaggattacaggagtgagccaccatccccagctatgagtctaataagtgatctgaatctccatgtacatactgaaaaagagagaacaattgtgcttagtatgtctaccaagtgtaaatcacttgataagcctggagaacttaattatactaatgattacrtaagtaatagtttttgacaatttttctttatcacatttgaggatttccagtgatcgcttaaattattcccacatagccaataccttaatatcgatgccaagcagcaattaattaatataatcagttatacactcaacacaccaggagtgaaaccccctgaatggttattattcatctttggaagtgattattatcagttttattcatcctcatctgtaggtagcagctaagtttattagcatcttttgtgctttctcattgacttcaagcgtcagcagattacaaagattctttcttcttaggttctttagtagatgatacagctggaggctccaaattatattgtgttttaggaagttaaatgaaagcattcaggcattcttttcttattaatggtataaggcatcttattttctatatgagacctattttgccactgcccagtagttcagacttcatttcccattccctcagcaagccaccaaaagctgtcgctgttacgggaacatttttgtaaaacaacctagctttcataggcaaccctggcaatgatttttattaaaagtacttaacacatgacctttgacttttgaaaaatcagttctagtagctgtgacttgacttttggtccttttattacttgagagggagaaattaatccttatcacttgcagtgttctatccgaatcaatgaataatttcagttttcttcatatttgggaaaaaataagaactataaaatttagcttcctctaattcctccatcccctctttgatcaccataaaaattatttatttgccaagtaaacctgatggaaaagagttaattgatttaaaacaaagggtgtcactggccagtctccaaactgcctgggatagtcatgtccaattcaatgatgtggtgttagccttttcctg

SEQ ID NO: 73736 - DNA, 942 bp, Homo sapiens
atgaggccctgagggttttcattaaagtgtgcccatcagtactttgaaagaatttattttcactgagtcccttttctgccyagttatgtatatttcctctgacactaccctaattctgaccttgatttgtctattgcccagaatactgccatagctaactggcgccccagcctctactctcacactgctcacacccatctcagttacctttctggtcagtgtgtgaccctgaatttgcaacataagccttcagagactgagttttctcatcagcagtatgagctaatagcagtccctccctcgtaggattatggtacaaatgaaaggaaacaatgagaacgtgtgaaagttccatcagagtgctggcgcataatatttatgtagtaaatcagaactactttaagggaaactgggaggaaaagggaaagagaaaaagagagagtgacagtgaggtccagcgatccagagattgagagactgaaagattgtgagggtgccaggtagaaagaataaagaaaagcagaagtggaaaacagcaggaaggaaggaagcaagaccacgtacagtaccaatgccaagaatatggacctacttatttgtgcactgacccaacaattgaacatttgtttctactgtgaactgaaaggagcactgagagagagaaattgtctagcaacacttttgtaacttctattctatgaatacttattgagaaacttcctctgtgcagggtaccattcacatttcttactgtaccaaatagaacctccgggcatgggtagtgaagaaaccttgggatacagcaaaataaaaaatcccatatatatttttggaggtagacttgacaggatttggtgaattattgaatgtcaaatgcaaaggaggacaagtcatcaagaatgacaggtttctgacataggcaacacggtagataataatgca

SEQ ID NO: 73737 - DNA, 942 bp, Homo sapiens
atgaggccctgagggttttcattaaagtgtgcccatcagtactttgaaagaatttattttcactgagtcccttttctgcctagttatgtatatttcctctgacactaccctaattctgaccttgatttgtctattgcccagaataytgccatagctaactggcgccccagcctctactctcacactgctcacacccatctcagttacctttctggtcagtgtgtgaccctgaatttgcaacataagccttcagagactgagttttctcatcagcagtatgagctaatagcagtccctccctcgtaggattatggtacaaatgaaaggaaacaatgagaacgtgtgaaagttccatcagagtgctggcgcataatatttatgtagtaaatcagaactactttaagggaaactgggaggaaaagggaaagagaaaaagagagagtgacagtgaggtccagcgatccagagattgagagactgaaagattgtgagggtgccaggtagaaagaataaagaaaagcagaagtggaaaacagcaggaaggaaggaagcaagaccacgtacagtaccaatgccaagaatatggacctacttatttgtgcactgacccaacaattgaacatttgtttctactgtgaactgaaaggagcactgagagagagaaattgtctagcaacacttttgtaacttctattctatgaatacttattgagaaacttcctctgtgcagggtaccattcacatttcttactgtaccaaatagaacctccgggcatgggtagtgaagaaaccttgggatacagcaaaataaaaaatcccatatatatttttggaggtagacttgacaggatttggtgaattattgaatgtcaaatgcaaaggaggacaagtcatcaagaatgacaggtttctgacataggcaacacggtagataataatgca

SEQ ID NO: 73738 - DNA, 942 bp, Homo sapiens
atgaggccctgagggttttcattaaagtgtgcccatcagtactttgaaagaatttattttcactgagtcccttttctgcctagttatgtatatttcctctgacactaccctaattctgaccttgatttgtctattgcccagaatactgccatagctaactggcgccccagcctctactctcacactgctcacacccatctcagttacctttctggtcagtgtgtgaccctgaatttgcaacataagccttcagagactgagttttctcatcagcagtatgagctaatagcagtccctccctcgtaggattatggtacaaatgaaaggaaacaatgagaacgtgtgaaagttccatcagagtgctggcrcataatatttatgtagtaaatcagaactactttaagggaaactgggaggaaaagggaaagagaaaaagagagagtgacagtgaggtccagcgatccagagattgagagactgaaagattgtgagggtgccaggtagaaagaataaagaaaagcagaagtggaaaacagcaggaaggaaggaagcaagaccacgtacagtaccaatgccaagaatatggacctacttatttgtgcactgacccaacaattgaacatttgtttctactgtgaactgaaaggagcactgagagagagaaattgtctagcaacacttttgtaacttctattctatgaatacttattgagaaacttcctctgtgcagggtaccattcacatttcttactgtaccaaatagaacctccgggcatgggtagtgaagaaaccttgggatacagcaaaataaaaaatcccatatatatttttggaggtagacttgacaggatttggtgaattattgaatgtcaaatgcaaaggaggacaagtcatcaagaatgacaggtttctgacataggcaacacggtagataataatgca

SEQ ID NO: 73739 - DNA, 623 bp, Homo sapiens
tcccttgaggccaggtgttcaagaccagcccagccaacatagtgaaaccccatctctactaaaaatataaaaaaaaaattagccaggtgtggtggtgggtgcctgtaatcccagctacttgggaggctgaggcaggagaattgcatgaacccaggagttggaggttgcagtgagtcgagaccgtgtcattgcactccagcctgggcaataagagcaaaactccttcycaaaaaaagaaaaaaaaaaaagctcctcatctttttttttttttttttttctggttaagccatctttcactttgcctctctctatctccgcctatcatctggtgccagttgcatgccacagacctaggcagaagatgaaagcagagagctacgagggattctatggtagttaaagtttgagcaaccaacaaacaaaatgaagaaatagaaaaaatagaaaatatcagaagtatatcagtgaggctccttgcgggaaacaaatgcacgttaggcacattgaggggagtttaataacaggaccatttataatgggaaaccccagggccagaggagagaattgctgtcacaatttggaagcttagtgcaaatggcagcctaagtaagagaagtcaacag

SEQ ID NO: 73740 - DNA, 605 bp, Homo sapiens
tagtttattaatttgcatgtggctagtcagttgtcccagcaccatttgttgaagagactgttctttccatcacccattgattttgaaactttctagtggatagcattttagttaattattatatattgctttttgttgtgatttgatacatgtatgtcttatttctacaagtagagaggactccattcaagggaggggactggcttctgtcatgtttctggtattttatgtaagggctaaaatggttcccagagtgagcaaaaaggaatcaaagaggacgcaagcccttgacccaagaaaatcagagtattttatttaaagaacaacttttagttggttggtttttttttgttgttgttttttttttgaaatggagtctcactctgtcactcargccggcgtgcagtggcgtgatctcggctcaccgcaatctctgcctcccaggttcaagcaattctcctgcctcagcctcccaagtagctgggactacaggtgcccaccaccacgcccggctaattttttttttgtatttttagtagagacagagtttcaccatgttagccaggatggtctcgatctcctgacctcataatccgccctcctca

SEQ ID NO: 73741 - DNA, 1049 bp, Homo sapiens
atatctctttctcaaaatttgtttaataaacttgtattaattttaaaaatatacaacacaactatctaacactgaaagctagaggtaaacattcttaacctctctatacacttcccttagtaaacctaaaccttcccttccctctaaggttcatcacctcttgtctaaactataaaattaatccttttaaccagttagcatatctggattctcaccttcttcaaattcaacctaaaactgacatcagtatactctatgtactctatgtattctgtacagcaacaagtcaaaaataatatttttgataaaacttttcaacatttgtctgttgcctggcaaagtaattacaaacttcttagacaactgtgttgtacaaacatgttcacacacagtttctttcccccgaatttaggtgtatttctggtcacctgaatttatacatattctatctgttatcttgaataatctttccttcctgaaaatgctttaatttctcatagttccctatctatgttcatgctgcttccagttactggaatctctgtcataatcctcctgataaaatacattttattatttttaccttttttctagtacttaatacattgtactttagtgatttttaggtgactagatcatattaattgtacataacccacagtatgagacagagtatagtaaatttatcagttccaaagygtatttttattatcatctgctgatggcaaacacagttattaataatacaaaaaagttatttgcagagagctcttgttttcttttacttatattacaagaatatttttgataatgcaatttgcattatcaattatatcaatttgtgtcatcaattatatcaaaggttagacctcagatatttttgtgactacttaaaaattcttcatatttagatgaattaattattaggcttttgaggggattgagagctgaggaataattttctagtttcagtgggaaatcatcctgttttacaaaactgtaaaaatagtggataaaatttataatttaaataagtgaaatagagaaac

SEQ ID NO: 73742 - DNA, 1049 bp, Homo sapiens
atatctctttctcaaaatttgtttaataaacttgtattaattttaaaaatatacaacacaactatctaacactgaaagctagaggtaaacattcttaacctctctatacacttcccttagtaaacctaaaccttcccttccctctaaggttcatcacctcttgtctaaactataaaattaatccttttaaccagttagcatatctggattctcaccttcttcaaattcaacctaaaactgacatcagtatactctatgtactctatgtattctgtacagcaacaagtcaaaaataatatttttgataaaacttttcaacatttgtctgttgcctggcaaagtaattacaaacttcttagacaactgtgttgtacaaacatgttcacacacagtttctttcccccgaatttaggtgtatttctggtcacctgaatttatacatattctatctgttatcttgaataatctttccttcctgaaaatgctttaatttctcatagttccctatctatgttcatgctgcttccagttactggaatctctgtcataatcctcctgataaaatacattttattatttttaccttttttctagtacttaatacattgtactttagtgatttttaggtgactagatcatattaattgtacataacccacagtatgagacagagtatagtaaatttatcagttccaaagtgtatttttattatcatctgctgatggcaaacacagttattaataatacaaaaaagttatttgcagagagctcttgttttcttttacttatattacaagaatatttttgataatgcaatttgcattatcaattatatcaatttgtgtcatcaattatatcaaaggttagacctcagatatttttgtgactacttaaaaattcttcatatttagatgaattaattattaggcttttgaggggattgagagctgaggaataattttctagtttcagtgggaaatcatcctgttytacaaaactgtaaaaatagtggataaaatttataatttaaataagtgaaatagagaaac

SEQ ID NO: 73743 - DNA, 725 bp, Homo sapiens
ttaacctataatttatatgtgtctaattattgctataagattttactaaatatgtgaccatttgcagattttacaaaagagaaacaatctaggtattgctttatttcagaaactttccagtcaagtaaagttgtgatctgatagttctgtgaatattatgttacaaatcaggatattgttccttttgttttgtttttacaaacaattgagtaagttcaataaacaagtcttgttttctttccttagcagtaaagcaattaagatatgtcctctttcccrtgagtgtgaacatgttgcattacaaagctagtcagcatcaggggtagaaagaaatagtgacacaggtttcacctgccataaaatgaaatgctcttttgggacaaaataaagctgtaaaatattgcaatgcagtacaatggaattgtaacagtgccaaactgaacaatacttgttttccttcagcatttataggctaaaagtgcattcaaaaattcaaagcagtgatgttgggaatacttgaaacacatttaaaatgcaattattagttttatacaaattattagtttattttttaaaatcttttttttattatttttaaaaggtttctgagtacacagtaggtgttatgtttatggggtacataagatgttttgatacaggtgtgcaatgtgaaataagcacatcatggagaatggggtgcccatcccctcaagaatttacccttt

SEQ ID NO: 73744 - DNA, 1722 bp, Homo sapiens
tgcattatttttaatgttttatgtttatctcacatcaatattaatatatgagcatatgatctgataagagatgggttggtattgtagaatttatttgattgaatataagatttctaatttactggcaaaatgattgatactagtcttagcagacatctgtggctgcatttccatcctattcatcatagtcacttgtttttattacttcttggacttcacaagcacgtgcacttgcacatgtgcaaacamagcagtgctagagttctctgaaaatattggcaaagactgttttaggacttgtttgccaggaactctaggcattttaatggctttctaatggcttccaaactgttcacataacagtcttttcaagttgtaaataatatacatttaaaattcacgtctgtgcatggtattggcctaggagttttttatgttttatttttagcacattactcaatgttgtcaatattgatccatagcactggccattatatttctatttaaatatactgttttactgctaagcttcatttctagacattggtatctataataagaaagctatcagattgtaatgaaaatggcccagagccacctagttcctaagcactcttcccattctgtgatggggtctgctctatttctttcacattgtacatatttagtacatctttcagaccccccattttcctgtgccttttactttatcataaaatacaaattccatactgttatgaattaattcctatctccgtgaattgttgaatgttcattatctatcggctattgttcagagtttgtggtataaggttgggctgttctttgacttcacagtgaatgaaatgctcttgtctaatgagctgtgtgcatatactcctatctttccaggagatcaactgtcaaatagttgttataggattccatgtgtttggtttcttcctctataggtctctgcattagaaaccttactgcttaccttacctacagagttgaacttcctgtgtaccgctttgcagctctgtgactctccttaataaaagtgcagtttgttttctgtggttttaaacaaaatacacattttctcctaaacctgaataaagttattttttaagtgccttttgcaaaaagagaccatttctcactgggatctgtactagaactcattcctccaattttatactaccattaaatatgcatataattatctttctgcccaaagtagataatatagtattttttctaaaaatatgctgaattctcctttatgctgcatcagttttttgcctaatccatacttcttgtttataacatttctaaaattatgcagaaaaaaagagcttttaacaaatttgaaaggcttacagtagtatgacaatatttatgaaataaatttctaagtgttttttctcagtaaactatcacaaggacaaaaaagcaaacaccgcatgttctcactcataggtgggaattgaacaatgagaacacatggacacaggaaggggaacatcacacaccggggcctgttgtggggtggggggaggggggagggatagcattaggagatatacctaatgctaaatgacgagttaatgggtgcagcacaccagcatggtacatgtatacatatgtaactaacctgcacattgtgcacatgtaccctaaaacttaaagtataataataaaacttaaaaaagaaataaatttctaagtgtttctaat

SEQ ID NO: 73745 - DNA, 1106 bp, Homo sapiens
caaatcctttctgtcaagggcttatagtaaatattttaagttttgcagctacacagtctctgatgaaactttaactctgctgttatagtacagaagcagccacagacaataactaaaaaaatgggtatggctatgttacaataaaactgtatttatgtacactgaattttaaattttacataattttcatatgacgcaaaatatacwtctgatttctgctcacccttgtaaaaatgtaaaaattattctcagctcatgggctatacaaaagcagatgatgggtcagatgtggcctgtggaccgtagtttgcaaactcctaaaacatattgagatgtgtttaatttttattctgtgttgcagaggtattcattcaaaatttattcttattctgatccaggtggcctgcagaaatacccttgacaaatcctggtccaaaggtttaaactttgaaatcacacccaaagctcttcacaaaccttgaccacatctctcctttccttctcctcctctttttaaacccaatacattagacactcagaaaggcaggattgcagagcagctaagaggctgagcattggcatcacctgtatctgggttgacacttaggttcttctgtttacgatgtgaaccttagtcacgatacttaacctctgcacagcttagtctcctcatcattaatttggagataattatataatggctggctgacagttttgtgctatttgtaaaataacgatcaagtatgcagggttcttagcacaatgtttggcacatgacaaattctctataaggcttcatgattcctgatccatgctgtgaatatttagctctcgatttcttggcttacgatccttttgcccagtttacctttccctcgtttgtcccttctatttccatattcttctaggttcaggatataagtccctcctcttctaaaatctttcctaactcatcccactgtgccaatccctacttaggcaaaagtaatgattccatgcttttgctttgtgaatcacatcactacatttgctgtcacattttagcatggtcatgtgtatatttgcctcactggctggacgttgggatctgtctgatttggttttaa

SEQ ID NO: 73746 - DNA, 685 bp, Homo sapiens
ccccaaaagccttatagccatctaacttcaaaaagaycaaagtcaaactcattctctttctttcaaaacacaaaacaacaacaaaaaccttcctcctgcttttgcaccttccagtttcatttaatagtattgccatccatgtgtttgcccaagccagggagctgacttcttatattttttaagggatgcagtctcactatgttgcccagactggactcaaactctgtgctcaagcaatcttctacagatgtgcaccaccacacctggcatgcttacatgcatggatatgtgcatttatttattatttctattttttgtttgtttatttacgtggggagataagatctcactatgttgaccaggctagactcaaactcctgggctcaatggagtggatttcttttcctccagttcccacatccaagcagtcacgaagtcctttccttcccttggagctagcccctcatcccactgccactgcccttgcacagccctttatcaactctcattagccctgctaatgagtagcctcctaatgggtctcctgcctccagctctgccctaatgatccttcgccaccactgccaccatcaaagttcccttgctgactctgccagctccctgcaaaaaaatcgtgaaaagctcaccactgcttgtaaaatgaagttcaaacctcatcctgggt

SEQ ID NO: 73747 - DNA, 685 bp, Homo sapiens
ccccaaaagccttatagccatctaacttcaaaaagaccaaagtcaaactcattctctttctttcaaaacacaaaacaacaacaaaaaccttcctcctgcttttgcaccttccagtttcatttaatagtattgccatccatgtgtttgcccaagccagggagctgacttcttatattttttaagggatgcagtctcaytatgttgcccagactggactcaaactctgtgctcaagcaatcttctacagatgtgcaccaccacacctggcatgcttacatgcatggatatgtgcatttatttattatttctattttttgtttgtttatttacgtggggagataagatctcactatgttgaccaggctagactcaaactcctgggctcaatggagtggatttcttttcctccagttcccacatccaagcagtcacgaagtcctttccttcccttggagctagcccctcatcccactgccactgcccttgcacagccctttatcaactctcattagccctgctaatgagtagcctcctaatgggtctcctgcctccagctctgccctaatgatccttcgccaccactgccaccatcaaagttcccttgctgactctgccagctccctgcaaaaaaatcgtgaaaagctcaccactgcttgtaaaatgaagttcaaacctcatcctgggt

SEQ ID NO: 73748 - DNA, 396 bp, Homo sapiens
aagcagtctctttttgctaccttaaaaaggatccaccaaattataggctgacacctccctgtttcctcccacccaaagcataattcatcttttcagttctactgggatattacattactttgggactttagaggtaagctgtgaatgaactctagtgcatctgtgctatggcctattaataaattctttaacaatgattcaccatgggctttgaaacaagttaatatctattaatttgccttgccttaaatacaaattcttcctttcccaatagaacgtccctttgaaaatgattactactaaaacggtgagattgttaatgtgcttctcactttattsttaatgaaaagtagacaaaatatatgaatctcagatcacaaaagataattttttgtt

SEQ ID NO: 73749 - DNA, 396 bp, Homo sapiens
aagcagtctctttttgctaccttaaaaaggatccaccaaattataggctgacacctccctgtttcctcccacccaaagcataattcatcttttcagttctactgggatattacattactttgggactttagaggtaagctgtgaatgaactctagtgcatctgtgctatggcctattaataaattctttaacaatgattcaccatgggctttgaaacaagttaatatctattaatttgccttgccttaaatacaaattcttcctttcccaatagaacgtccctttgaaaatgattactactaaaacggtgagattgttaatgtgcttctcactttattcttaatgraaagtagacaaaatatatgaatctcagatcacaaaagataattttttgtt

SEQ ID NO: 73750 - DNA, 396 bp, Homo sapiens
aagcagtctctttttgctaccttaaaaaggatccaccaaattataggctgacacctccctgtttcctcccacccaaagcataattcatcttttcagttctactgggatattacattactttgggactttagaggtaagctgtgaatgaactctagtgcatctgtgctatggcctattaataaattctttaacaatgattcaccatgggctttgaaacaagttaatatctattaatttgccttgccttaaatacaaattcttcctttcccaatagaacgtccctttgaaaatgattactactaaaacggtgagattgttaatgtgcttctcactttattcttaatgaaragtagacaaaatatatgaatctcagatcacaaaagataattttttgtt

SEQ ID NO: 73751 - DNA, 396 bp, Homo sapiens
aagcagtctctttttgctaccttaaaaaggatccaccaaattataggctgacacctccctgtttcctcccacccaaagcataattcatcttttcagttctactgggatattacattactttgggactttagaggtaagctgtgaatgaactctagtgcatctgtgctatggcctattaataaattctttaacaatgattcaccatgggctttgaaacaagttaatatctattaatttgccttgccttaaatacaaattcttcctttcccaatagaacgtccctttgaaaatgattactactaaaacggtgagattgttaatgtgcttctcactttattcttaatgaaargtagacaaaatatatgaatctcagatcacaaaagataattttttgtt

SEQ ID NO: 73752 - DNA, 846 bp, Homo sapiens
gctaagcaagctacaatggagataaacctacacctacgtatctcctagagtaatagtaaacaatcaggaagggaaaaatatttcacttagcactagaaaaatcaaattacctttaatcatattgaaatctgaaagaatgaaaggtaaaataatagtatttgttaaaaataataatgccattctgaaattctcaagcaagaaaaatattcatcaacctatggctaaataacatatttagagacaaaaaacaaaacgccaccagcagaattccactaaagaaactaaagagaaactctgaaaacatgcttcagaaaggctgaagttctgaaatcagagaatgaacacagagcaaaatatactgtaaacatacagatagatctaaataaaaaattaggtgttgaaacaaaaagatattcaaaattagataagcactgcaatatgtatgttaggaagcaaattattagggctgaagtattcaaagaccccttaattgtccgacaagagcagaaaggtgagtatgactttgcaactctttttttttgtttttttgagaaggagtctcactcactctttcgtccaggctggagtgcagtggcgccatctcggctcactgcaacctctgcctcccaggttcaagcaattctcctgcctcagcctcctgagtagcggggattacagccgcgtgccaccatgcctggctgatttctgtatttttagtagtgacggggtttcaccatgttggtcaggctagtctccaactcctgacctcatgatccacaygcctcggcctcccgaagtgttgagattacaggcgtgagccacggcgcgcgaccgactttggaactt

SEQ ID NO: 73753 - DNA, 640 bp, Homo sapiens
cctcccccaggacggctccctgtcatctgccaatggctgcagctttcccctcattttcccttcaatccctgcttttttatatttactaccttcacactagtaaaaaccatcacttattattttgacagacaaatagtcaaaaaggctaagtactggcctttttacatcctcactttaatgcaacactgctatttgatgcatayattaaactgagaatgtcatttctcctgttcagaacctctgactctgtcatatagagtcttcctctatatagccacaatctacaattctagcttagtctctgcatggaaatccgatgatttcaaatgaaacacacacgcacacacatgcacacacacgcacaactggaccatcagagtttcattaaatacatttcttgcctatctttgttcatgctatgggcttgttttttgatagtgcttccaaacttccctggtaaaactgctaccaagtgtcttcagggcgatgactacgcatttctcagttctgtctctgcagcagccagcacaatgccttgtctattggatgcaatcaataatcatttagtgaaatggatagcaagttttggttatactgtaactaaatacagcataacattgtgctgtcatttttatttaat

SEQ ID NO: 73754 - DNA, 684 bp, Homo sapiens
gtgtggtgatgtaaatattctatattttcactgcattaatgtcaatatcctggttgtgatagttttgcaggatgttactattgaaagaaattaagtaaagagtacacaagatttatctgtatcatttcttacaactgtatacaaatctaaacttatttcaaaattaaaactttaaaaatatttaatggtaatagaaacaggatacatgtagacacaataaagggcataaatggacatcatttatttcgattttcaaattgcctttttttttttttccgagactagagtgtcactctgttgcccaggctggagtgcagtggtggcgtgatctcggctcactgcaatctccacctcctgggttcaagcgattctcctgcctcagcctcccgagtagctgggattgcaggcgtataccaccacacctggctagtttttgtatttttagtagagacaggttttgccatgttgaccaggctgatctcgaactcttgacctcaagtgatccacccgcctcggcctccaaaagtgttgagattacaggcatgagccactgggctgggccctcaaattgcctttgacaaggccaatgtgaaayttcactgatcaaggaaagtatcacggttaaaagacctaatttggaatcgagtagtattttatctttaaatggaaaagaaaagtatttgt

SEQ ID NO: 73755 - DNA, 633 bp, Homo sapiens
tgtcaaaggagcatcgctgcaccttcgcagctagagcaaaggcagtttgaaaacagtttattaggctattccgcagatccacacagtttacagtataccgagttttgctcacgtgccaattctcagcgagacattccctggctactagattttaaattctcactatcctcgaccttcgtactgcatcttctcatcctcttctctgctttgttctcctccatggtgcctgggaccttctgttacgcttcagattgcagtccttaacatgctgttcaccacctttcctccatagcgtgggaactccatcacgagggctttgtgtctgcagcttactgckgcatccccagcatagaagccagagaaagacacaggacagacactctgtgcctggatgctgggccaagaaatgagtttctgtaaataagaaactaccaaacaatacagtacacttgatgtggatgcaaagacatgtaagaatttttacaggctgggcgcagtggctcacgcctataatcccagcactttgagaggctgaggcgagtgtatcacctgggatcaggagttcaagaccagtctggccaacatggtgaaaccctgtctctactaaaaatacaaaaaaatagccagggatgg

SEQ ID NO: 73756 - DNA, 633 bp, Homo sapiens
tgtcaaaggagcatcgctgcaccttcgcagctagagcaaaggcagtttgaaaacagtttattaggctattccgcagatccacacagtttacagtataccgagttttgctcacgtgccaattctcagcgagacattccctggctactagattttaaattctcactatcctcgaccttcgtactgcatcttctcatcctcttctctgctttgttctcctccatggtgcctgggaccttctgttacgcttcagattgcagtccttaacatgctgttcaccacctttcctccatagcgtgggaactccatcacgagggctttgtgtctgcagcttactgcggcatccccagcatagaagccagagaaagacacaggacagacactctgtgcctggatgctgggccaagaaatgagtttctgtaaataagaaactaccaaacaatacagtacacttgatgtggatgcaaagacatgtaagaatttttacaggctgggcgcagtggctcaygcctataatcccagcactttgagaggctgaggcgagtgtatcacctgggatcaggagttcaagaccagtctggccaacatggtgaaaccctgtctctactaaaaatacaaaaaaatagccagggatgg

SEQ ID NO: 73757 - DNA, 1383 bp, Homo sapiens
accagaattgaactacctaaagataactactgaaaatatttggtgcgtattcattcactttgtttttaaaaatgatattacatgtatttgatccttactcagtgtgtctttctctctttccacacttaacttcctgaggacaggtgtyatgtcgccgtgttcttttgtatttttacatgtgtgcacatgtgtgtgtttcactatgacatctcttacagggtctggcacatagtgtgtatgaaacttgtgtttgttgaatgaatgaatgaataaatgaacctcctactgatgaccacatcttccctttgcaaatgaaggtatctgcagtgcgtttgggtgatatgtgtgatagtttctgcctttagagtaattttacattttttcactcagcttcattatgcatgaagagtaatatcttagagtactatctggcacctactaattgctgattaaaactgactaggcctatgcctaatccaactttgattgcttagaaatccatctgttttcctctacttcaagtttattgattgactgattcaacaagcatttactgatcaccatatgagttcccccaaattaggcaaggcaattgcgatggctcacagtctgctgggggagaaacagtcagctttaaactaataaataatcacaggttaggatccaggtgcaaagagagcaaatgggacactgcagtagtgaactggagggttcctgacctagacagggcagttgtcatgcagggcatttctgggagggtcacatgcaggcccagatctgaagggtgagaaggagctggggacgtgctgaggcaggaccaaggggcccagggtgaggggcccgagtgtgctgagcccccgaggtgaggacatcctgggagaactgacaggagagtaggagggctggggacagaaccagatgagaacgggagacagggatgctacaaagccatgtttctcaacctttatgttttcattattgccccactaaggagaaaaactgagagaattaataaagaattgagttctggggaggcaaaaataactttgctattacaacagtttctgaccttcaaagctcagtcctgctggataatatgaggcccctaacaactactgaaagaggggtgtttgtgtctgttcctactgagagatccaactccatatcttctatgtcaatataaatttccccaacttcaagattatttagtcattcgataagcatttactgagcacgtattatatgccagaagccttgtaattactaacacgtttttcttctcaagaaccagttgtacccactggacaggatcaccacaaggagaaggtgtgtttagagctaaatgggtcggaaccagtgggactttatgtgtcaaagtgcagc

SEQ ID NO: 73758 - DNA, 1749 bp, Homo sapiens
  misc_feature (1)...(1749): n = A,T,C or G
catctacaagccaaggaacaccaaggattgctggaaaacaccagaagatgcaaggaaggatttctctctacagatttcatggaaagcatgtcccttgtgacaccttcattttggacatctactctccagaactgtgagacaataaatttctgttgttttaagccacccagtttgtggaatttaagccacccagtttgtggaattttactacagtagccctacaacaataatacaattatgaaacattaaacaaaattttaactgtgttcagaaccagacagttgagtgttcttttgaaaaagtttctactgcctactgtagccttcagaaatgttcatctgactcagaagcctcaaaagagagaaggatgagagcagatgttttgctgattgaatgtctgtgtcctacaataatcagagaaaatcttggttttgtgggaatcaattcaattacttagttacttcttctgaaccatgtaaatttctcagatatttcacctatgcaaatagaggtttttctagaaatgggtagcatagagaaatatatattttgttagtttttttttaagttggtcaaggataaaatttgataaaatatttgtactaggacatgacatttgcaaagagatattgtgctatttattctaaacatggaaatcatatatgtgtataaataaaatatacatacctggcttctcttccttttttccttgtagttctaaaaatatagatgaacattagtaacaatgattatagaaagatattcatttcctatatacttgtgcatatttatttttatataattattttctatgttattcattggtttcaatctcctattaacttcgaaaagttcatgtcatattaaccatattcttatgattgtggcaaactagtacgtaacaacagattcctcactattattccagtaagaaatattttgagagccaggcatggtggctcatgcctgtaatcnnnnnnnnnnnnnnnnnnnnnnnnnnnnnnnnnnnnnnnnnnnnnnnnnnnnnnnnnnnnnnnnnnnnnnnnnnnnnnnnnnnnnnnnnnnnnnnnnnnnttagctatgcattacattgctaaatttttacactaaattcgagagactggcctggaatatactgtcagtaattccattttaaagaagctgagacttagaagttaaatcatgatgtcaaatcacttagaagttaaatgatgatgtaaaccactccatatcaattgtcccagagctccttcctctacatctttctgtcttcattggccttttacacacagaaaactgcctgtgcatgtggtatatatcataaagtcaagaaacatgtcaaaaacagattttaaaaaaattattaaccaatgatttcctttccataaagataatgttgttggacctactgtggctatagtggcttttgaaatatttttttctgccttagatattaaagacataactcacagaacagataatataggagctaagacacaaggttagaataaatctatgcaacaaacgacatgaataccacatgatacattagaagaaaacatgtgcaaacagaccaaggataaagacatgtttaccgctagaaagtcatgggcaggtgggatagtttgttgatgarattcgaggttagatgaataaataggatgttttcagtgagggactgagtgaaaggggaagattcaaaagacattgagaagagaaaaattcacagaactggtaatggtttttaaa

SEQ ID NO: 73759 - DNA, 990 bp, Homo sapiens
tatgggagtgtgcagcttaggaggagagatagaaacatgtctctgaacagcaaaagcaagcatagaaagggacagatgccttaagaaagtcctggtgaagcactatgttggccccaaggagggagaaaacaattgcactacgaggatcagaaaagtttccaagaaatgatagtatttactytggagggtaaaaagtggttgactgtgaagaaaaagagaaaagtagaacaagacaagtaagggcatggggaagagccctgactctgtttctgtatgcacagagttaataaaacatgtttcgttcggtttggttggtataagcagaaagcaactttattctttctgtaactaccaatgcaaacccactctgtagacttgcttctcttcaccccttgggtgaaatcaggaacagacactatagcttgcccggtcatgctcaactcagataataaaacaatggtgtcttttttcaagacatccaatccagtatattatcaaagctcccaactttcattcaaataaaaatttcccccaccccacccccacctaagcttgggccctctcagcaagcaccctgagcttggagcctgaaggtgggaaggtattgtgggtttcttttctctttttcctactctactgaagcccctgaaattgattaccctaccagccaacccaccaggcttggagcaaggggagagcacagagataaagacgacaatttttgtttttgaatcagtaaaccttgaaacccttctatgttggacttcctgttatgtgaaataatactttctcttcttaagtaaaacaatataggattttctataaatttgctgtatagaaattagctgttataattgccattgttgttattttattttaaaggcagagacatttatgtaaaagattttcctatgtttatatatggctatcacaatgagtcacagcaaaaccttttagaaattatattggcttttcattttatatacatgc

SEQ ID NO: 73760 - DNA, 591 bp, Homo sapiens
  misc_feature (1)...(591): n = A,T,C or G
taggaacagacttgggagtcattagttccttcctaggtttgtgacaccctgtacttccagagttcaaggtcaaccaactcttaggacagtaaatagactttctgcaggagtcctgtttggattctctcctgccttaaagtataaaagtcacacagatgggaccaggaagacagagaagccaccatctaaaattagatatgctctggaaggcatgtcggagcgcctgagtcattcatcacctcttttgaattacaaacctgcggtcgcgcacagtggcacacacctgtaatcccagyactttgggaggccaaggcaggcggatcacctgaagtcaagagttcgagaccagcctggtcaacatagtgaaaccccgtctctactaaaaatacaaaaattagccaggcatggtggcgcacacctgtgatcccagctactcaggaggctgaggcaggagaatcacttgaacccaggaggcagaggttgtnnnnnnnnnnnnnnnnnnnnnnnnnnnnnnnnnnnnnnnnnnnnnnnnnnnnnnnnnnnnnnnnnnnnnnnnnnnnnnnnnnnnnnnnnnnnnnnnnnnnatttgac

SEQ ID NO: 73761 - DNA, 2042 bp, Homo sapiens
tgcattccaacacatgagctatttttgcgttcttagattatgcacagaagaagaaagtggattaataaaataataagaaagctggtggaagattctcttgatccaaaggggatatttgtaatgtgctaaaataattaagaaaatgaccctaattgcagaaaaagaaaagcagccctctgttgatagcaaactgagtttaatagagtgttaaggaggccactgtagttacaagatatctcaattgttctcttgacaagaatttgggtctccagttacattcatgtgtagtgtgctgaatcctgttcctscaagtcttctgaaatgtttattaatgattttttttcatgaagaaaagtttctaaagacacaagctaggtacttggttctttgctgctttcagttgttaagacaaagataaaatggttatattttaggagtatacttggtgagcattttcgtatttcttcttctggaatcgtggtaaacgagaagtagtttctttaaaaaccagtggaggccgggcatggtgtctcacacctgtaatcccagcacttggggaggccaaggcaggtggatcacctgaggtcaggagtttgagacaagtctggctaacatagtgaaaccccgactctactaaaaatacaaaaattagccaggtgttgtggtgtgaacctatagtcccagctactcgggaagctgaggcaggagaattgcttgaacctaggagatggaggttgcagtgagcagagatcgtgccactgcaatacagcctgggagtcagagcaacattccaactcataaaaaaaaaaaaacaaaaaaaacagtggaggttgggagagggattgtctatggagttcttcagctatattgtccgaggtttctgtcacgaccatctctactggtcaacagcaacccttcctcagatgcagccggagccagttttattcatgctttctgtaatgccccatgtcagccttgtcccataagtgtactcatatcctctttctcctctgaactagtctgcatttctctacaccagaagttgatggaaccaacctcagaggcaggacaatggctggaaataggtgttacaggaggtaaatattatgaatccagtaagttgaatgccttgtgagttatattgggtatgtgtttgtttcacccaccaagtaacacatgcctctaggatccatagtgcccattctttactgtcactgaacacagctaagggcttatactggtcagccctcattcagaatctcaagtctaaattacattacccttggcccttttggtctaagcatgtgacatacaacataggacagaatgcattatgatcacaattattcctccatctaggttcaccgtgtccctggaacattgctgaatttgtctcaaactgtttagaaactcatttctgatattctggcaaaaattcctttgagtttggggatttaccagatttagaagtggcagagatgtttatttctttgtgtgccttttttattcacttatgagaattctaaaaccactgaagcagccccgatttattttgctgcactgggaccaagagtaacctgcaaataaccagctaaacctggtgtagacgagtcagtcttccaacaaagatacattagcctcaacatcagagttaacctgttgttcaatattgaacatcaaccactataagagattaaatagtcaagcctaaggaacagaacattcactcagagtgttacctgaacaattcagaactgggaacctattttgtctttcacacatcagtactcaaaatctttaggcagaaacttaatttacatacctttttagggaaacatgactatttcttactaatgagtaacctggaaattcccttgaccttaaacctggtaggcagagttatcaacaatgtaaacttccccacaatctctggcccacaactctccattttaaaatcacaggatgtgccagtttcaaaagcaggaacacccatccacccctgctatgttcatttccatcactcagcgtccagctttttcaat

SEQ ID NO: 73762 - DNA, 2042 bp, Homo sapiens
tgcattccaacacatgagctatttttgcgttcttagattatgcacagaagaagaaagtggattaataaaataataagaaagctggtggaagattctcttgatccaaaggggatatttgtaatgtgctaaaataattaagaaaatgaccctaattgcagaaaaagaaaagcagccctctgttgatagcaaactgagtttaatagagtgttaaggaggccactgtagttacaagatatctcaattgttctcttgacaagaatttgggtctccagttacattcatgtgtagtgtgctgaatcctgttcctgcaagtcttctgaaatgtttattaatgattttttttcatgaagaaaagtttctaaagacacaagctagrtacttggttctttgctgctttcagttgttaagacaaagataaaatggttatattttaggagtatacttggtgagcattttcgtatttcttcttctggaatcgtggtaaacgagaagtagtttctttaaaaaccagtggaggccgggcatggtgtctcacacctgtaatcccagcacttggggaggccaaggcaggtggatcacctgaggtcaggagtttgagacaagtctggctaacatagtgaaaccccgactctactaaaaatacaaaaattagccaggtgttgtggtgtgaacctatagtcccagctactcgggaagctgaggcaggagaattgcttgaacctaggagatggaggttgcagtgagcagagatcgtgccactgcaatacagcctgggagtcagagcaacattccaactcataaaaaaaaaaaaacaaaaaaaacagtggaggttgggagagggattgtctatggagttcttcagctatattgtccgaggtttctgtcacgaccatctctactggtcaacagcaacccttcctcagatgcagccggagccagttttattcatgctttctgtaatgccccatgtcagccttgtcccataagtgtactcatatcctctttctcctctgaactagtctgcatttctctacaccagaagttgatggaaccaacctcagaggcaggacaatggctggaaataggtgttacaggaggtaaatattatgaatccagtaagttgaatgccttgtgagttatattgggtatgtgtttgtttcacccaccaagtaacacatgcctctaggatccatagtgcccattctttactgtcactgaacacagctaagggcttatactggtcagccctcattcagaatctcaagtctaaattacattacccttggcccttttggtctaagcatgtgacatacaacataggacagaatgcattatgatcacaattattcctccatctaggttcaccgtgtccctggaacattgctgaatttgtctcaaactgtttagaaactcatttctgatattctggcaaaaattcctttgagtttggggatttaccagatttagaagtggcagagatgtttatttctttgtgtgccttttttattcacttatgagaattctaaaaccactgaagcagccccgatttattttgctgcactgggaccaagagtaacctgcaaataaccagctaaacctggtgtagacgagtcagtcttccaacaaagatacattagcctcaacatcagagttaacctgttgttcaatattgaacatcaaccactataagagattaaatagtcaagcctaaggaacagaacattcactcagagtgttacctgaacaattcagaactgggaacctattttgtctttcacacatcagtactcaaaatctttaggcagaaacttaatttacatacctttttagggaaacatgactatttcttactaatgagtaacctggaaattcccttgaccttaaacctggtaggcagagttatcaacaatgtaaacttccccacaatctctggcccacaactctccattttaaaatcacaggatgtgccagtttcaaaagcaggaacacccatccacccctgctatgttcatttccatcactcagcgtccagctttttcaat

SEQ ID NO: 73763 - DNA, 2042 bp, Homo sapiens
tgcattccaacacatgagctatttttgcgttcttagattatgcacagaagaagaaagtggattaataaaataataagaaagctggtggaagattctcttgatccaaaggggatatttgtaatgtgctaaaataattaagaaaatgaccctaattgcagaaaaagaaaagcagccctctgttgatagcaaactgagtttaatagagtgttaaggaggccactgtagttacaagatatctcaattgttctcttgacaagaatttgggtctccagttacattcatgtgtagtgtgctgaatcctgttcctgcaagtcttctgaaatgtttattaatgattttttttcatgaagaaaagtttctaaagacacaagctaggtacttggttctttgctgctttcagttgttaagacaaagataaaatggttatattttaggagtatacttggtgagcattttcgtatttcttcttctggaatcgtggtaaacgagaagtagtttctttaaaaaccagtggaggccgggcatggtgtctcacacctgtaatcccagcacttggggaggccaaggcaggtggatcacctgaggtcaggagtttgagacaagtctggctaacatagtgaaaccccgactctactaaaaatacaaaaattagccaggtgttgtggtgtgaacctatagtcccagctactcgggaagctgaggcaggagaattgcttgaacctaggagatggaggttgcagtgagcagagatcgtgccactgcaatacagcctgggagtcagagcaacattccaactcataaaaaaaaaaaaacaaaaaaaacagtggaggttgggagagggattgtctatggagttcttcagctatattgtccgaggtttctgtcacgaccatctctactggtcaacagcaacccttcctcagatgcagccggagccagttttattcatgctttctgtaatgccccatgtcagccttgtcccataagtgtactcatatccyctttctcctctgaactagtctgcatttctctacaccagaagttgatggaaccaacctcagaggcaggacaatggctggaaataggtgttacaggaggtaaatattatgaatccagtaagttgaatgccttgtgagttatattgggtatgtgtttgtttcacccaccaagtaacacatgcctctaggatccatagtgcccattctttactgtcactgaacacagctaagggcttatactggtcagccctcattcagaatctcaagtctaaattacattacccttggcccttttggtctaagcatgtgacatacaacataggacagaatgcattatgatcacaattattcctccatctaggttcaccgtgtccctggaacattgctgaatttgtctcaaactgtttagaaactcatttctgatattctggcaaaaattcctttgagtttggggatttaccagatttagaagtggcagagatgtttatttctttgtgtgccttttttattcacttatgagaattctaaaaccactgaagcagccccgatttattttgctgcactgggaccaagagtaacctgcaaataaccagctaaacctggtgtagacgagtcagtcttccaacaaagatacattagcctcaacatcagagttaacctgttgttcaatattgaacatcaaccactataagagattaaatagtcaagcctaaggaacagaacattcactcagagtgttacctgaacaattcagaactgggaacctattttgtctttcacacatcagtactcaaaatctttaggcagaaacttaatttacatacctttttagggaaacatgactatttcttactaatgagtaacctggaaattcccttgaccttaaacctggtaggcagagttatcaacaatgtaaacttccccacaatctctggcccacaactctccattttaaaatcacaggatgtgccagtttcaaaagcaggaacacccatccacccctgctatgttcatttccatcactcagcgtccagctttttcaat

SEQ ID NO: 73764 - DNA, 1317 bp, Homo sapiens
ctctagctgcaaaaagatgagggtgacttttgtatctctggttctcagctggagttgcctgtaataaacagcaccaaatccaatatgatttaacctctcagttgtcaatgttgaatgtgttcaaagaacacagtctgggcacggaaaagcatgagttgcattttacccatcctctcagcctggggaaaataacgaggtatttcaacattgacacctgttttgaactatgggaaagttttttcttttcctttcttttctttttttttaaattaagccctgaaatttgctatctgtgaacactggatagattgaagttgaaaggagacaggtaagaatgattttgctgtaaagcacttttgcagtgagcatcaggttgtcttagtataagacagtgctgtatacctttgggtaatggtcgttactaatgctaaataatgtgctgagcaaaagtgtgtctggtcataaagttgcctgtatcctggttatctggagacacaggatccccctccctgccctgcttctttctttccttaaaggctttgatgtttctcagcatgtcatgctgaatgtctagatatttgggaatctgcagtaaatgcatactagttcatctccaagagagggggaaagggggagaacgaaggagcacgggaggagcactctgcttatccttagagctggctttgagcagctgtgtgtaatgagggttgaagagtctgaggcactctgcactgggacttggccaggagtggcgtggttggctggatgcttgggtgcacaactgaatgctgttatgtgggagtcagggccccagctcccaagttgctatgggacataaaatgaaatatgaaccaggggatgggaactggggagaggaaagagccatctgtcttctacaagrtatcctttcactgaagcagttctccccacgcttcccctccctgcccccaccatgacacatgggggtaaacggagaaagctgttcaaatcaggtgataagtagcaagagggctcaggtggccatccaagtggacagggctcaatgctaggggtcagcaccatatctggacccttccatgacacagtggtgtgccttggcagacaggttgagaagacctaatttaagcaacccaggaaaagccaacaaaatagggcaatatgaataatctgatgcctgtgactctttattttttcccgttactattaatgcattgcagaaacgttacagtgtttttaaaggatcttctcctaatctcacccctttagcacctctgatttttccctgtgccatctcccaatctttgtccatgtatacat

SEQ ID NO: 73765 - DNA, 1317 bp, Homo sapiens
ctctagctgcaaaaagatgagggtgacttttgtatctctggttctcagctggagttgcctgtaataaacagcaccaaatccaatatgatttaacctctcagttgtcaatgttgaatgtgttcaaagaacacagtctgggcacggaaaagcatgagttgcattttacccatcctctcagcctggggaaaataacgaggtatttcaacattgacacctgttttgaactatgggaaagttttttcttttcctttcttttctttttttttaaattaagccctgaaatttgctatctgtgaacactggatagattgaagttgaaaggagacaggtaagaatgattttgctgtaaagcacttttgcagtgagcatcaggttgtcttagtataagacagtgctgtatacctttgggtaatggtcgttactaatgctaaataatgtgctgagcaaaagtgtgtctggtcataaagttgcctgtatcctggttatctggagacacaggatccccctccctgccctgcttctttctttccttaaaggctttgatgtttctcagcatgtcatgctgaatgtctagatatttgggaatctgcagtaaatgcatactagttcatctccaagagagggggaaagggggagaacgaaggagcacgggaggagcactctgcttatccttagagctggctttgagcagctgtgtgtaatgagggttgaagagtctgaggcactctgcactgggacttggccaggagtggcgtggttggctggatgcttgggtgcacaactgaatgctgttatgtgggagtcagggccccagctcccaagttgctatgggacataaaatgaaatatgaaccaggggatgggaactggggagaggaaagagccatctgtcttctacaaggtatcctttcactgaagcagttctccccaygcttcccctccctgcccccaccatgacacatgggggtaaacggagaaagctgttcaaatcaggtgataagtagcaagagggctcaggtggccatccaagtggacagggctcaatgctaggggtcagcaccatatctggacccttccatgacacagtggtgtgccttggcagacaggttgagaagacctaatttaagcaacccaggaaaagccaacaaaatagggcaatatgaataatctgatgcctgtgactctttattttttcccgttactattaatgcattgcagaaacgttacagtgtttttaaaggatcttctcctaatctcacccctttagcacctctgatttttccctgtgccatctcccaatctttgtccatgtatacat

SEQ ID NO: 73766 - DNA, 1623 bp, Homo sapiens
aagtgccaccacacccagctaatttttgtatttttagtagatatggtgtttcactatgttggccaggctggtcttcagctcctgacctcaggtgatctgcccgccttggcctcccagtgtgctgggattacaggcatgagccaccgtgtctggcctgaagaaatgtctacttaaatcctttgcttggccaggtgtggtggctcatatctttagtctcaggaggctgaggtgggaggattgtttgagcccaggagtttgaggttacaatgagctatgattgtgccatcgcactctagcctggagagcagagtgagactctgtccaaaaaaaaaaaaaaaaaaagaggaagaagcaaagtgtagaagtgtgtaaatgctactctttttctgtgggttttttttgttttagacaaggtctcactctgtcacccaggctgagtgcagtggcatggtcacagctcaatgcaacctctgcctcctgagctcaagtsatcctcccaccccagcctctggagtagctgggactacaggcatgtgccaccatgcctggctaaattttgtatttttagaagagacagggtttcgccatgttgcccaggctagtctcagactcctgggctcaagtgatctgctcgcctcagcatcccaaagtgcagggattacaggcgtgagccactgtgcctgttcccctttgtgttttatgtgtcgtatatgcataaatatttctggaagtatacactctgtagtgttagtggtgatgcttttagaggaggagactgggaaagtggtgtgtgttagccacagtgatgtatccacacccatttctcttttccagggactatggaaagactacatttctcaaccttcctagtagatgtgatgtcaccagtcggaattgggcagaagaatgtatcacttcagtccaaggcaattaagtgttagtgtcaatcttttccctctcccctaccccaatctgagcagttggaatcaaataactgagattatggtgatgtcagaaggatttaagtccctgctgggggagaacagcacaccatcattgtctaatgtgggatgagtaagaaataagcctttgttgttttaagcgactgagatttggagttttatttagtatccacatgtggtggattaaagatggccagacttttttgacattccttttttaatttttttttgagacagtctcattctgtcacccaggctggaatgcaatggcacaatctcggctcactgcaaactccacctcctgggttcaagcgattctcctgcctcagcctcctgaatagctgggattacaggcgtgcgccaccacatccggctaatttttgtatttttagtagagacggggtttcaccacgttagtcaggctggtctcaaactcctgacctcagatgatccgcccgccttgacctcccaaagtgctgggattacaggtgtgagccatcgtgcctggcttgacattcctttcattgaaggctggggcctatgtcccctctccttcaatctgggctggtccgtgactgctttggttaatagaatgcagaggaagtgatgtgttctaattcagggtcaaaccgtaagagactggcagctttcatactgttgg

SEQ ID NO: 73767 - DNA, 673 bp, Homo sapiens
tgccctgtattcatggccttcctcagctctatctgtcagggcttttaacacaaatgactccattttgatcctgacaactttcacaatggcaaatcatgagaccaattcacaggtcgactcctyaaaaaaaaccaatccctgatcccacgaggcaggactggtcctaatcttattctgtatattaatgcgtgatagcacttgtaatctgttagtgaattgtctataagtcattgtccacagttagactctgaattcttggaagccaagcactgtttctgattcatttttctaattctagcatttaacatagagttcagtaaatattaaacacgagtttggataaacataatcatagttttaaaaagtgcacagcgcaatgaattatccagagagaatatacctgtgtaactatcacccacgtcaagagttagaaaactagcagcaccccagaagcgccaccttgacccatcttccaatccctgcatgcttccatctcttcaaggtagctgctattttgtcttctaccactaccaggtattagttttactattttaagcattatataaaggaaaccatatagtatatttaattttacattcaacttctttcactcaatattatgttatatattatctatctatatatatatatttatattattgtaggcagctga

SEQ ID NO: 73768 - DNA, 745 bp, Homo sapiens
atacctgagctaaaaggagtaaaggaaagactttagaggcaagatttattgtattaatagctcagttaaacatgccggtttttaggaagcaacattttaactcgagcaagtaaagtcagcacctggtagctggagtcagggccctggcttgacatttggtggtggtgggaggggggttagcctggctgtcggtgactgggacccagaccagttcacatgccagcttagaatttactctcatgctgaagcttagagggttttaaaatcaacagggagcaagaartgaattttaaacaggagtagttggtatataataaaggtaagactgcaaagatgtcaagattataatccgtccttaattttataaacttaatttaccaacaagcacagctcttcaagctttttctttcatttaaatctcataaagctgctgcttgcccaacattttcatgaaacatcttgttctaagtcattgctttcttttttattttctaccagcactaaaataggcaggactaagttgttattcactatgtcagcaaacgggggtaaaaatactatttcaacacctaagacccgtcagagagcagctaaggtgcggaactgaagtacaagaggcctcagcccaaggtcgggagaggacaagcatttttaagggtccagtgtaacccagccacatgtgccagggatgaagggcttcagcgtggtcacctgggcttgtgtctgctcacgcctaggtctgcta

SEQ ID NO: 73769 - DNA, 503 bp, Homo sapiens
aaatctaaacacatgatccaacatgggcctttttaaatttgtgactttttacatttgtgactttttaaatytgtgatggtttttggtgaataccaactatggagtagctgatattgcagctgacagctgttatggccaggctgaggtggaagccttcacttccttctctgaagccccataacacataccactctcagctccattacaggtcctgtgtcaccttccctgtggcatggtgtgtgatgcacatagtctcaggccacagatggtcagcaggttaagaggaaagacaccacagccagctcacccctgctgcccctgaactttgaaagcaacagtctctcaacaggtaagcattcacctcctcgccctcatctctgctcactacctgcttctttgggatgctcttgatccatactttcaatgcaatactataaagcatagaatagttaatgcttttacgtagatacagataagcaattttatctccattgatctgattt

SEQ ID NO: 73770 - DNA, 499 bp, Homo sapiens
atcttaaagtaattaatattgatatgaaataatcaaaattagtatacaacttttagttgttatttaggcaatcactattcctgaacatactgatctacctaatttgtttatctttgaatctatttttgagccaaacaaatctaagcaaaagaagaggctaacaaatctatcatttgaattggatataaccaccaccaatgaacattctattgttctggagaaaatcctgggtttcttttcagtcatatttattgttgatgctgctgctaatccttgcttaaggatacagtattatgaaatatataaattccataaatgcaactacaagtgccagaaaaaatgaagtaatgaaagaargtaagtttggggtatgtggcccatttccatttgtaaccacctcaaaatttcaaagacacagctgccaggccaacagtaataaatatcatggcctactctacaaataatgtggatgatatggcgccatatgagttgattgctg

SEQ ID NO: 73771 - DNA, 591 bp, Homo sapiens
aaaaagatccaaaacaagacaaaaaattaatagaaacagaccaagaaaagacaaattatggaattagaaaatattaagcagcttaacaacacacataattgaaatcccaggaaatggggggagggcaaaaactatttataaaggtagtggttgagatatttttaaaacttggtaaaactataaaccaacaggtaacagaagtgcagtggactcaaatcaaaatgaataaaaggattaagttgaagaaagctatttttaaaaagaaaacttaaaaacagttggagaaaaagagatgtattattgacaatggaaccaatgtaataactactttttatgataagcatgtatatcagaagaccatagcrcaacattctattacttaaagcaagagaaacaagtcaacctggaaattcattcaagtgaaaattctaaaaaaatcaagaaatttacaaaaatgaaagcaaataaagctattttgacaataagtagctgatagattttatcaacagcatactgggactgaaagaaatggtagacaaaaagaaagtaacaggatgataatttactttctttattattatactttaagtt

SEQ ID NO: 73772 - DNA, 686 bp, Homo sapiens
cctgcagctgggaagtaagtccttcactcctgaagagagatctggacagagcgtcacattgtcttccacactaacgcacaataaagttgtatagggcaaccgtgagatgtgaaaacaaatgcatcccagccactgaactgcctggtgatgcttgactagatctttgagatgatccttaatatgtacacaatctattattttattctcacaaaaatataaatataaatgtttaaattcccacagagaactaagaagactctaacaacatatttacaggcccctagaggtcttcagaacctactccaagaaagakgaaggttaggaagcttccaccccagttacctctgctgggaattgctgcatatacctgtgatatctccgtggtgtgacaatcacaaagttttacgaatacttctttgggtggcagtaatcatgatggacagatcctctcacaattcacatgtaatatttgggaataaaaacttgattgaacattcattcaacatatttgatcaggcacatactatgacgtgggtactttgctagacacctggtggggaagatacctttatacgagtgaacaaataatcatggacaaagaggatctgagagtcttgggtcatcagtaagccttttcagaagaggagtggcttgaggggacaagggcaggagcattccagacagaa

SEQ ID NO: 73773 - DNA, 796 bp, Homo sapiens
ggatccttatttgatactaatgtgctgaacaccttaaagcacacttacttctcccccattcgggtcacttggagcttcattacttaataatttgaaagctttttatggaaatcagttgataaagggagatgatgaagtgaaatgttattacatttaaagacccagcaaactaggctgccagaataacacctgcgtcagacatttctaagtaaagaaagagaaggagaaggagatattggtgtgtggatgaattctcatttcttttgaaactgccgttactttaaagatactccttgcctaacaaagcctaacactctttaaaattgtcaagtgaagaactcatcagctatcttatgaattctacccctgccatggcgctctgtccccctgcccaccttcccagccgctgccttggcttcaagcccattgggtctagaggtccgccctactctcctccacaggcagggtcagcctcacacagtgcccacctcaaaagccttcatgactaaccagttgagaaaaccctgggaaacaggcttggatgcgaccttttctttttactttccatttttctttctctctctctttccttccttccttccttccttcattttttcgtggkggtggtgagacagggtctcactctgtcacccagactagggtgcagtggcacaatcacagctcactgcagccttgacttcctgagctcaagcgatcctcccacctcagcctcctgagtagctgagtagctgggactacaggcatgtgccaccacacccagctaatttatttttta

SEQ ID NO: 73774 - DNA, 888 bp, Homo sapiens
ataagaaagaactgtcctgtgtcatgcaggactttcaaatccttgctggacactcaccacaggacaaaaacctgtttataactatcagaggttaatgcagttttaaatatagatatacaatgtacttttttgctcagctttattaaacatttattgaaaaaattcattgagcataactgatgaacaataaactgcacatgtattaaatgtacgacctgatgagttttgacgtttgtattcacacatgaaaccatcatgacagtcgaggacacatacacctccatcagttacaaaagtcttctcacacccatttgtaattctatcccttcctctacgtccatctccaggtaaccatgatttgctttctgaatctacaaattaatttgcactttaaaccaggcacagtggttcacatctgtaatcccagcactttgggaggccgaggcaggtggagcacctgaagtcaggagttcgagaccagcctggccaacatggtgaaacctcgtctactaaaaatacaaaaattagccgggcatggtggtgggtgcctgtaatctcagctactcaggaggctgaggcaggagaatccagcctgggtgacagagtgagactccatctcaaaaaacaaacaaacaaacaaacaaaaaaaamccacaaattaaaaaaaaaagaaaaaaactggcactttatagaattctaaataaatggaatcatacaataaggactcataaaatatgtttttatacatggaactttacagcaatacaaccatagtgtaatttgagggaaaactatactttgttttgttcaaatactcaccattctggaaattcaagtcatctgcggcaccacaagcaatacagctcatgtagacccctctccatttgt

SEQ ID NO: 73775 - DNA, 702 bp, Homo sapiens
tccacttygggggatacaagaaaggaagaaagaagccaccagaacagaagggtatcccagtgctccagctagaacccagcagaacatctgagcttgccatatctgaatgcttaaaagtggaaagaaggagagttgctcttcatttattttgaaagaaaatccattagaaagatgaatttcgaatgaacatgaatgatcatgacaagtcaaatgcacatcataagtcaaatgaacaggaatgatcatcataagtcaaaggtattaatcaattagaccttcagcctaggaaacaaagttttcctttttctaatataccaccctgaaacaaatttgtcaataaatctcgaagatttagtacaaatagtacaattcatatttgctttcctctttcctttcttcaaacaccaaataaaatgcaagtgaagggggaggctgacttagaaacttgcactaactcttaatctaaaaaaattatggccgggcgcagtggctcacgcctgtaatcccagcactttgggaggccgaggcaggcggatcacgaggtcaggaaatcgagaccatcctggctaacagggtgaaaccctgtctctactacaaatagaaaaacaaaattagccaggcgtggtggctggcgcctatagtcccagttactcgggaggctgaggggggagaatggcgtgaacccgggaggcggagcttgca

SEQ ID NO: 73776 - DNA, 877 bp, Homo sapiens
ggatcctttatcttccaccrcagcttgtggcacccatgtgcccaacagtcacccctgcatggcagcctcaactctgcctccctcctcccctcttcatgcgcatctctgagacctgtgaatttcatcatgtgaatggttgtaaaatctttctgctcccctcctgtcttacagtctctcagtacagaaactcattgttatcttctgtactgctgaagtagcctcctaagtgatctccagactttagctttattcccttcaaattcatccctcccagagcctcaagtcattgatttaaaatacaagtctcgcttacagcctgcggtggttctccaactttctagttaacctggaagctcctgacatggtcagaccccttgtcggcctctgtagctggctttaacacccccagcattttgtacaagcagcagcacaggactgcgtgtggttccatgcacacaccaccagaacttggaggaggatgattgtatgattgagttgccaaaggagaggatggtaggcatgccttcctttctaggtgtttccatggcagctccatggccacaattttatttctggtaagactgctggtcatatttttctatttctttattcttagctgcgaatttcttcgcatcgttggttcattcagtcattcattcagcaaattcttactgagcacatattgtctacaaataggctttttgcaagtttgagggtataagagaaagaaaagggtcttgtgtggcagttatagagctgtccagggtaagttaatcacccagattttatttttattttcattttgtttttttctgaaggcaggttgaatgccagtaatgacataaataaaagtttcagcagtattgggtctaaaaaa

SEQ ID NO: 73777 - DNA, 931 bp, Homo sapiens
cactaaagtaatcaaccgattcaagaatttctgtcaaatctctagaggatagttaatgaaaaatctcaataatcctattgcttgatcttgttattgactaaactgacattttaataccatcaaattgatcaaaaccttagccacagagtcaaatttaacactgaggaagccatctcacacacacacacatacacacacacacacacacacacacacacacacacccctgcatctaatctaaatctacatagatataatttgtttaatgtgcctcaaggattcaaaaataaaaatacaagaaataaatattatatataactttcactcatgagctttcatataaaaataaaatattggtttagtagcgataatgaaatggataatgccaccaggcacacctaaaatgatgaatgatcataaaattagggattaacttttcataggatctgcagttgaaaaataaacttcagtgtacatgtatcattcctcatgtaatagataaattcattttatggtctgttaaataagrgtaccttataagcctttcccctgcctcataaaagatctaggatttatctcatagagtaaataaagaaaatttagtctaagcaatataatttaactgcaaaagtaaagtgtggctcattcagtatttgaaggaaatattttatactattttacaattggagagtaggaaaaaaatccttactattacattacataacatatagtaataattcattctgtattttcctctaatttcctctaatttcctgtaatttcctgtaaattcctctaaatgtgaattctcaaagatttgtttctactgctaacaattctacaaaatagagactggaagtaataaatggcaaaaataaatttattaaacattgcataactaaatttcattaaataaaatggaagagcaaat

SEQ ID NO: 73778 - DNA, 2591 bp, Homo sapiens
ttttttttcaaggagaaaatttagagaaagatatttcagatcaagggaataataccaaaaaagtacacacctgtcagagtacatttcgcccatgagaagaaattagatatgtgtttggatatagtgagagatgagattgcaaaggtaattaaatcgtgtcctggagatttgcttgatcacagtgctaaagatttgggacttattgccacaaaaagtgggcaatcatagcagttttggggagaaggagtaaccatttattcattcattcttaatagaaaacatttccaaactgctaagcatacataagcactatagtggtctctctaatagtttaagaggagatgcaaggggtctgagacggtataatctcaggaaaggaaagaacatctcttgagaatcactgaaaaggtgaaatctaagagatcttgtggttaattagatttagttttctgaaagaaaataagggtctgttgttagcccgaatgtgaagagttgggaagctaacattgccttaaccagaacaggaaacctaaaagatagtcaagttaaaaccagaaagctggaagcagaaagtgtttttgaagacacacgtcttatgaaacacagcagttctgctaggataccaagtacctcgtaaaagagcttctaattgtgagagtttgtgttccaggttttacataagaaaataaaacttatttaaactgttctgcaataaacacagggctattttaattctaagttgatatgccatagtccagttacagttataaggatctgtcagataatttcttagaatagttttgtttgttgtaggaaagaaatacagccaagaagatcatatttcctttgaaaataacaatattcaatgatttaaaattggatttcaagccaagtgcagtggctcacccctgtagtcccagcactttgggaggccaagataggcagatctcatgagcccaggagtttgagaccagtctgagaaatgtggcaaaacaccaactctactaaatataaaaattagccagtcctggtgatgtgtgcctgtagtctcagctatttgggggcttgaggcaggaggatcacgtgagcccaggaggtgaaggctacagtgaagtgagatcatgcaactgtacttcagcctgggcaacagagcargattctctttctaaataaataaataatttaaaatatatatatatatatatatatatatataatagatttcagagcttttaaaatgtattaatgtgcattttaaaaggattctgaatcacttttccaaagtgcgtgctagaatccaacctcagtatatcatgttagaaaggtctaatctatctttctagagcttgatctgtttcttatgcccatagtgcttggactgaattcttttccaacctcaaaagtggatccacatgtctcaaatattgctcatggcaaggatttcctgcttgaaaacctacttggccaaaatattacctctgaaaagagttttggtttttttgtgtgtatactacatgccagataagcccttggatgttgactttattctgattaaggaaaggtccttagaggtctcaatcaagtatcaagaaaaacattaaagttcatggagctaccatcttttcatctttttctatatacaattacataccacataacaacatttcagtcaaggatggattaaatatatgatggtcttcccataagattataatgaatcagaaaatttctaccacctgatgacattatagccatcatagggtcataatgtgatgcattattcatgttttcagtgatgctggcttaaacaaatctgtgctgccaattgtataaaagtgtgctgtaaggtcataggccttcatattcatttaccactcactcactaatgcatcccagagcaacttcccatactgcaaactccattcatggtaactgtcctataaaagcatatattttctttaaaaaatcatttatactctatttttacagcacctttcctatgtttagatatgttcaggtatacaaacttaccattatgtacaattacctggaatattcagtacagtaacatgctgtacagttttgtagcctaggagcaataggctataccacagagattatatgtgtagtatggtacatctaggttggtgtaagtacactctttgaggttcacagaatgacaaaatcacctaatgataagtttttcgtaatgtatccccattgttaagcaacatatgattatatagtatattagcgaattctatcagctatttcataaaacatttctcatattgatccatttcaaattattctttctgtttctaccattgtctcaacaaacattttacttatgaaacagctctcatcgctgagctgtaatctctgtgagctatcatttctaactttgaacatcccaaacacagctagacattttatttgaacatttggctgctctcttcagtatgttagtcttgctaaccttgaatctacacagtcttgacaggcagacaacactgctgaagaccacagactcagaagcctcttttattgggatcgaagctcaactctgccatgtgctatctgtatagctt

SEQ ID NO: 73779 - DNA, 644 bp, Homo sapiens
gcatattgttaccataaattcaattacaaggacatatgtagatgtatactcaacactgaaattcctctgcactatccatactagaagacctacgagttctttaaaaacaaaacaaaactccagtgcatatccttggttcagttttctacacaatgcaacaggaacgaacaagtcagaaacataaggaacaccattttatgttttttttcaagtcctctgatttttttcccccaaaatctccttgtttctttgaacaaaaacagcctctgtggctctgccagttcttttatgtgctgcagaacacctggtkgccaattgctgggtggaggataattagcccctcaattatcaccagtttattttcacctgttccactagcatttccctataacttgaagcttgtctaattagtcttttctgacccattctccaccatcagactcaagaaatagcccctccactaagtaattaacccatggtaggccaatcttccagcttttgtttcaactcctgctggaatcattaaaatcaaatgaacaaagaaacatcatgggacagggtaacaagaattgaaaaagttctgtctctcttctccctttgccagcttccaaatccaaattatagaacctcaagcacagtgacat

SEQ ID NO: 73780 - DNA, 985 bp, Homo sapiens
gcattctgtcagattattatttttaagcactgcatcatgttttataataagttcatgtactacaagataaaatgaatgatctctttttatgaatttttaagctatttcctgtgtctcattactacaaaaaagtattgtatttaacattagttgaagaacatttgtgtaaatgtgcgcatgtgttttgaaggctactctagagaaaaatattccattacatcattatatccctctgaatggctcccactgtcaaatatgcaaggattcatttccttgcaaccacaaaacactacatatgaacaactttatgatatgtctttaataataagtgaaagccaatgtctttttatttgttgtaaaatcacacttccctgtttactagtgagttcagcatatttttatacatttcctggagatgcgtaacctgtcctatgaaaagaacactcaaagatgtgcctttctttctattgaattgyctttttattttttatttttattttttttttgagatggagtttcacttttgtcgcccaatatggagtgcaatggtgcaatctcgactcactgcaacctcctcctcctgggttcaagggattctcctgcctcagcctcccaagtaagctgggattacaggtgcctgccaccacgcctggctaatttttgtatttttagtagagacagggtttcaccatgttggccaggctggtctcatactgttgacctcaggtgatccattctccttggcctcccaaagtgctgggattacaggtgtgagccaccttgccgggcgagatgtcttttaataatactttaaaactctttgcatattacagcaatcttcgcatttaaatttgcatcatttaaaaaaattttgtcaaggtaataccaacactgcataaatataataaaatatgtataaaaattactaaaacccatcatctgattataatatccatggatatttagaacaggaaactttcatgca

SEQ ID NO: 73781 - DNA, 843 bp, Homo sapiens
catcagactgattttgatctgtgcatctaatgcagttcgtaatagagaaagaatgaattctaaacctccatacatacaaaccaaaattacacacacgccacacacagacacacacacattgatgtgagtgtgtgaacttagcagttcacctatttcggccaccattttccatcaaatcttcatgtttaaatctggttgtgtgaagatctaattgggtttacacctatatgcttacaaatcctactagtaatatgtttaattcatttatttagctttcaggaacctctattttatgctaaatatcctcagcatttatattcaatggtggtgtaacactactttgaatttactgtcatatttcagcatcgatttctggttgctttctttcatctctgcaactgcatagttagtccagttgggtcaccaggtcttgcctactattaagtgttatgcctataattgaaaagtcattaaagcaagttacttaaatgatttgccaaggatatgtatccaatcattagtccaatgacagataatcttttattggaaacagttcatgggttggcattatccactgtatacagaacagaattgggaatttatttagtaatttgtttagtaaacctagataaatatttgaaaacttatattgagctttcctctgttttgtggtcattttggtagctctatcaaaagctgtgggtattattyttctcattcactggtgaaaaaaggagaaaaatagaataaacatccaaatttctggcataatagcaattctgcaattattatactgaagaacacaccaagaacattagagttagaatggatttcaactgaaaa

SEQ ID NO: 73782 - DNA, 1102 bp, Homo sapiens
cccctatgcccctatacgtgtattttgatttattaaaaaagcttaaatttttttcaattagtttttaatcacaaaaaacagcaactcttgtttttatttaaaacaaataattgtagtaatattgaccygttttggctttcttgaaataaaccctattgggtcaatagatttttgtccttagacatactacttgaatttatttcctattatttttgtctgctattgttgcatttatattcacatgtaaattttattttggaagctatggttatgaggtattgatattgaggttttcaatctatgtaaaatgaattggagaaactttcccttttaatctgcattctgaaattttgttaaaatataaaaactacttgtgctcttaagagtaaatggaattgccaccaagtttagtagttctcttactacctttctacattttccccctttggctaactgaaagcagtggttctcaaaataggatactggacaagcaacattaggatcacctggaagcttgttggaaatgcaaattctcagcccccgtccccaatctcagacctaccaaacagaaaacccaggtgtagagaccagtaatctgcattttaacaagccccttaggtgattcgaattcatgcttaaatttaagaaccactatcttagatgtgctaccgcttgctcttcagcaaattttagctatttatatttggatgcaaaatgttccatttcttctatataaaaaattattgccatataaacacagatgatatacttatttaaatattttccatagctgtggctatgtctttaaatttattatgctgtgtatttatttctttctgttaaaaaaatatttgtgccggtctatgtgtattctatttgtcatttttttaggggagaaaaaagctttgggctttgtctgtcattatacttccgctctttttttccaagttgttttctttttgtcaattgcatcttaactttctatttgtcttgtagctttttcctagttctttcttaatttgactattgcttatttttatctttttaaaaaaataacatcttcatggctataattttgtcctccatatacagttttgcccat

SEQ ID NO: 73783 - DNA, 1102 bp, Homo sapiens
cccctatgcccctatacgtgtattttgatttattaaaaaagcttaaatttttttcaattagtttttaatcacaaaaaacagcaactcttgtttttatttaaaacaaataattgtagtaatattgacccgttttggctttcttgaaataaaccctattgggtcaatagatttttgtccttagacatactacttgaatttatttcctattatttttgtctgctattgttgcatttatattcacatgtaaattttattttggaagctatggttatgaggtattgatattgaggttttcaatctatgtaaaatgaattggaraaactttcccttttaatctgcattctgaaattttgttaaaatataaaaactacttgtgctcttaagagtaaatggaattgccaccaagtttagtagttctcttactacctttctacattttccccctttggctaactgaaagcagtggttctcaaaataggatactggacaagcaacattaggatcacctggaagcttgttggaaatgcaaattctcagcccccgtccccaatctcagacctaccaaacagaaaacccaggtgtagagaccagtaatctgcattttaacaagccccttaggtgattcgaattcatgcttaaatttaagaaccactatcttagatgtgctaccgcttgctcttcagcaaattttagctatttatatttggatgcaaaatgttccatttcttctatataaaaaattattgccatataaacacagatgatatacttatttaaatattttccatagctgtggctatgtctttaaatttattatgctgtgtatttatttctttctgttaaaaaaatatttgtgccggtctatgtgtattctatttgtcatttttttaggggagaaaaaagctttgggctttgtctgtcattatacttccgctctttttttccaagttgttttctttttgtcaattgcatcttaactttctatttgtcttgtagctttttcctagttctttcttaatttgactattgcttatttttatctttttaaaaaaataacatcttcatggctataattttgtcctccatatacagttttgcccat

SEQ ID NO: 73784 - DNA, 1102 bp, Homo sapiens
cccctatgcccctatacgtgtattttgatttattaaaaaagcttaaatttttttcaattagtttttaatcacaaaaaacagcaactcttgtttttatttaaaacaaataattgtagtaatattgacccgttttggctttcttgaaataaaccctattgggtcaatagatttttgtccttagacatactacttgaatttatttcctattatttttgtctgctattgttgcatttatattcacatgtaaattttattttggaagctatggttatgaggtattgatattgaggttttcaatctatgtaaaatgaattggagaaactytcccttttaatctgcattctgaaattttgttaaaatataaaaactacttgtgctcttaagagtaaatggaattgccaccaagtttagtagttctcttactacctttctacattttccccctttggctaactgaaagcagtggttctcaaaataggatactggacaagcaacattaggatcacctggaagcttgttggaaatgcaaattctcagcccccgtccccaatctcagacctaccaaacagaaaacccaggtgtagagaccagtaatctgcattttaacaagccccttaggtgattcgaattcatgcttaaatttaagaaccactatcttagatgtgctaccgcttgctcttcagcaaattttagctatttatatttggatgcaaaatgttccatttcttctatataaaaaattattgccatataaacacagatgatatacttatttaaatattttccatagctgtggctatgtctttaaatttattatgctgtgtatttatttctttctgttaaaaaaatatttgtgccggtctatgtgtattctatttgtcatttttttaggggagaaaaaagctttgggctttgtctgtcattatacttccgctctttttttccaagttgttttctttttgtcaattgcatcttaactttctatttgtcttgtagctttttcctagttctttcttaatttgactattgcttatttttatctttttaaaaaaataacatcttcatggctataattttgtcctccatatacagttttgcccat

SEQ ID NO: 73785 - DNA, 1102 bp, Homo sapiens
cccctatgcccctatacgtgtattttgatttattaaaaaagcttaaatttttttcaattagtttttaatcacaaaaaacagcaactcttgtttttatttaaaacaaataattgtagtaatattgacccgttttggctttcttgaaataaaccctattgggtcaatagatttttgtccttagacatactacttgaatttatttcctattatttttgtctgctattgttgcatttatattcacatgtaaattttattttggaagctatggttatgaggtattgatattgaggttttcaatctatgtaaaatgaattggagaaactttcccttttaatctgcattctgaaattttgttaaaatataaaaactacttgtgctcttaagagtaaatggaattgccaccaagtttagtagttctcttactacctttctacattttccccctttggctaactgaaagcagtggttctcaaaataggatactggacaagcaacattaggatcacctggaagcttgttggaaatgcaaattctcagcccccgtccccaatctcagacctaccaaacagaaaacccaggtgtagagaccagtaatctgcattttaacaagccccttaggtgattcgaattcatgcttaaatttaagaaccactatcttagatgtgctaccgcttgctcttcagcaaattttagctatttatatttggatgcaaaatgttccatttcttctatataaaaaattattgccatataaacacagatgatatacttatttaaatattttccatagctgtggctatgtctttaaatttattatgctgtgtatttatttctttctgttaaaaaaatatttgtgccggtctatgtgtattctatttgtcatttttttaggggagaaaaaagctttgggctttgtctgtcattatacttccgctctttttttccaagttgttttctttttgtcaattrcatcttaactttctatttgtcttgtagctttttcctagttctttcttaatttgactattgcttatttttatctttttaaaaaaataacatcttcatggctataattttgtcctccatatacagttttgcccat

SEQ ID NO: 73786 - DNA, 1422 bp, Homo sapiens
ataataataatgataataataataaagtttttttttaaataaaaatttattgatcagtcagtggtagtcagaggacagagaaccattgaccaaaaccttgatgagcctaagagtttaaaacaagaaaatactgaagtaagtaacaggaaagaaatcaagctcttaaggaccagcaagtactacttctgagtaaagattcccaaattccaatggaattagctgttttaggaaccatgttttgaaataatactttctacatttttatttctgaaggaaatgtactccacacaatttgtaatcagacaaattaaaatgtaataattgaaaaataatcacaatctggttaatagaataattctatgtgataaaataatgaaaatataataacacactgaaagggaactatcaatatagagtcttgaaaagagagatttgactttaatgattttttaaatcaagcatggtacaaagaaagaggcatgggatgtgtcagaagagtccagtctcttctgatacatctgacggggaagcagcgggctgtctgaaaaccctaagacctcaagaccatacaactcccttggccctcatttcatgcttattaagaatctttggattttggctttttatgtatctaaatcctgggaggaacttggaagatgagggataattaactgtcgttggaaagataaaatttttattgtggttaaacattgctgatgaaactgtaaatagctcatcttctggtgagtaatttggaaatgtctatcaaaataaataatgtaattactctttgacctagcaattccatgcctaggaatttatcctactgctatgcaggtataggtatacaaagaacacttatccaaaaaaatacagtgtgaaaagattcaaaacaaactaagtatcccccaatgggggcggtgttggttggttaaaaatttataaaacatccaaagaaatattatacaattaaaaatgaggcacctctgtatgtattataataatattaataactaagatacataagtgaaaaaggcgctgaaaagtatgttatattaaaataaacggcacatacacgttatctatctgtaaatatacagaattccctgggagaatacagaagaaactggcaatcagatttgcctttagagaggaaaactggggggggtcacaggagagtagagacttttcactctatactctttttctactacttgaatttgaattttttactatgtgtatagcttacttatttaataaaattaaaagaaatttcattatgaacaaatgaatggacagcggacacaactccacttcatgtgagtttgtgagctcattagytcagaaatggttatcaccaggtgagctgacccaaagagctgatgtctatacccaggagccacataacacagccttggcgca

SEQ ID NO: 73787 - DNA, 1355 bp, Homo sapiens
gcattctgccagagtaattacttttcataccaattcttggatgcagagaaatctctggtagtctaaggggatttcgatccaagtaaagctactatctcctattccatccagacttttccgtctgcctccattctctcagtcacatacctagaagcaagccagaaagcctgtccaaccaaaatcactctccaaagcccaagcactttattgttctccctgtctgttatcgagccaaggtgtatttggcctcattttatgccattagttgtctggctttcatggctctgcaccacattacagtcagagcaggaaggccagcagtggagatagaattatggcagaaacccagagtagaggcctctgctggtgagggagcctgcagcactctccacgctggtgggtcctagcatgcccaacagacccccatcccttcccatcagccttgggccttgagtctcattccaactcatcccctcccctttcccttctttccagtcccaggtgacacttgatgcctctgactcctttgaagagggcatcaagaagtgaaagaacaaagtccttttctgttcgggatctgggcccatcctgggagaggtttttggcagaaatggctgcagtggaaccctctgactgccagggtgaaatagtgctccagcaggctgcggtagactcrctgccagagtgggtcaggactggcccagaggacagggtcgtctcttgagagtcctcccagctccagggcctgattttaaagcagtaacacgaggatataggttatatacaggctcctggaaggcaggtgccgcagctcctgtgacaccccatatgcctgagcaagcttctccagcacaagagatgatgcaagtatgaatgggtacggggggagcttaaaacctgccaacactgagacttgatgccaggggccgtgcacccgctctgccacctgctaggtctgtgcaatggtcagagcagaggtgtgtgatgagttcagctcccaagcacatccacacttaggaagtgttctgtgtgtttttaaataatccttaccatgtaaagattgtattacatttgtatacaaaatttttttgcattttacttttgtaatatttggggttttatagatttttattttatggccaagtatacttttgtaaggaaatgttgaagtcttgagtatttttattcttttaaaaaactatagttagtgtcaactgtgagcactgataaatattattcatgtgtggttttccttctttttaatccagactttttaagaaactgttttggcatagagctttacttaaaatgctgcttcattttacacattgtgaatactgaagattctaaaaaat

SEQ ID NO: 73788 - DNA, 1379 bp, Homo sapiens
  misc_feature (1)...(1379): n = A,T,C or G
tgattagaatatcttgactagcaaaatatagacattatcggtaaaaatttcaaattagatacgcagcttttgttctattacccaaatcacagggccaaacctgtcttgcaattgagccttctttgcaaacaaagtcattgctttactcttagggtaattgcttcccacccatcccctatgtgtgggctcacataccatacactgtgcacatgcgcgtggacacacacacacacacacacacagagttacttagtccattattggaaaatatagaagctaccagaacacagtgcttgccaaagaggctgaagctcttctgggcacatccacagctcctmaacccatcctgcctcagtgttcatatttggtgacaaacaccagccatccaagcctcctcatttacctgtcagtaatgggtcttttccggagtaggacagcagctacctgtcgtcactcctctacctcagtgccaatctgattagctctgaaagtttatcaggaaggcaggcaacactggaaagacaaggggttgggagacaattgctgacaaatgtagtcctttctacccttccccacccacagcatcatccccagaaggcccaatctctggctcatactacaagttcctgagacctgtattttttttaaaagccttgccagaacattcctgctggacaaactaaaatttgggatccagaatnnnnnnnnnnnnnnnnnnnnnnnnnnnnnnnnnnnnnnnnnnnnnnnnnnnnnnnnnnnnnnnnnnnnnnnnnnnnnnnnnnnnnnnnnnnnnnnnnnnnttattgtttacaaaggatatttctattatttagatactcatatgacattgatttttgttataaactactattcaaaacagtaaaataaattcaaagcaaataattcatgatttgagataggatggacataattctcatcattgctagtgaatatagttaacttcagtaatagaaatggctattcttttatgttacagtaattttgttggcaatgcattatacacgaaataaaaatcacatttctttagaggcatgttagcattcaccaaacaatatctgtacttctttttcttcttgccagcaccatgcaggatactgagactaccaggcacccactcactctctacagtactcttactaaagagaccaaaaaaaaaaaaaaaagatgactgcatagcaatgcattataataaagactttagaatgcaatgagacaacagaggaaagacttgtaattaagggggaatggtttagggatgggaaagtgcaaggaaggcttcccatagaagaaaatgctgagttgtgttgagattattagcaatgcaagaaagagtagagagggtattttagtttcctaga

SEQ ID NO: 73789 - DNA, 331 bp, Homo sapiens
atcctttgcctgttgctcttgtctctgtcccatcctgcgctstaggaggggcagtctttctcgcaggtgatgaatttctctgcaaggtcattgctctctttggctctggctttgaaggtaaatgggagaagacgcctgctgatcgtgggcagggaaatttataatcaatcgggtctgcacactgcgaatatccgaatatgaggggtgtgtgtgtgtgtgtgtgtgtgtgtgtgacatttgtctcattttcctatgcttatcccctttaaggtcaaaacatagaaatatatattacatatggatgtatgtatgtgtgtgtatatacacacac

SEQ ID NO: 73790 - DNA, 331 bp, Homo sapiens
atcctttgcctgttgctcttgtctctgtcccatcctgcgctctaggaggggcagtctttctcgcaggtgatgaatttctctgcaaggtcattgctctctttggctctggctttgaaggtaaatgggagaagacgcctgctgatcgtgggcagggraatttataatcaatcgggtctgcacactgcgaatatccgaatatgaggggtgtgtgtgtgtgtgtgtgtgtgtgtgtgacatttgtctcattttcctatgcttatcccctttaaggtcaaaacatagaaatatatattacatatggatgtatgtatgtgtgtgtatatacacacac

SEQ ID NO: 73791 - DNA, 1182 bp, Homo sapiens
taaaatgttgggctcagagaaggaggacacatgattctagccacagctcttatttgagctctttcattggcagctgctcctgccctttatgcactcattcattcactttttcatgaatatatgttgatatattcaacatatatttaatcctggactggacatggtcctagattgtggaatagaagaataaacaagacatagtctcagcctgcaaaacttgggagggacactgccagcaaccgctggtggagtgccctgacagggtgctgtggaggccagggtagaggtggagagaataaggagagtttcccatggacctgaaagatgagaggacctagcccagtgaagaagagagggaaggacattcctggcacggggaccaaaataagcagagaccaaggaaaatacatagctccaggtggttgaaaaacagtgtgagtacataaagatggtaagacgagaatggagagggcagcaggatccacctacaaactgaagtccaaaaggcctgccaactcatctggtcagtaaaccattttatctgggtgatttaggtgaatgcattcattttgaggatctatggtattcagattacccaaatttatattcttcaaatatctagaaattatatttaccttaatttacaataggctgcttaaagggggaaaagtcttaattatttttggctcaaatatttcatctacaaatgtctaccacctactttgcatattagaaaaataagagagagaatgagggaatagaggtttgaattatgtagaaatgagttataaaaattcaaggattcttatttttatgagaatagggctcaggggaaaagaatgacaaagagtgtatattctaagtatttatttgtcctagatgactccaaaaggcaaacatatgatagtgtaaaaaacrgactgaacaaacaagtaactcaggaacacaggctaaacagaccccaaaggccacatacatttttaaaaattattttttaaatgagagaaatagttacagtaatcccatagtaatcattaagtgcccttcaagaatggtgcttttcaaactagcacactgtgaagtcagtttagtgagtctgatcagcatttttatttttgaaaaataaaatactaaaacagaagagtaagtattgttcatgaaattccttaaatatatatatac

SEQ ID NO: 73792 - DNA, 1604 bp, Homo sapiens
tttggggtcatggctggcttctcaaaatagtttagaaagtttagatccaggcccaaatggtaaccatagtggccagtattcccttcatttgtgggctaaattcgcgagaaaactgacagaatttgtccaggtgcgaggcatgagtgaygtgcaggagtggaatgtccgtccccaaggaggggtctgcagtccacagactgggcatgacagggaagggaccaggacccccaaggaaagcaggactgaatgtttcctgttcactatccctggctgctgaccctcgttccgcccaccaggtctacagcttggctttgccccttttgtcacaggaccttatatggtcagtggacaatgctgaccttcaggctacttgtctgcaacaaggagactgccatgtcttccccgtctgccaactgctgagtcacctgatgtggacatcttagtaattccaaactcctttttcatcctctgcctttgggtgtctgagccttctgggcccactgtcttgtcaccagttgcccattgtttgactcagaaagctcagccttcgtcactggagtccatctagtttcacgctgtggtcactgatgaccttgatgtggagggatccaaaggactttctgccctcatcttagttgacctcttagcaacatgtgcaggtttcttccttgaaatatgcggttctattggcagccatgatccacacagcctgttcgttttcttccgtctttctgcctggttcatcttgggtagttcctgctcctcagctcagatctataccttgttgtttttcaccaccccgtattttccttgggtgatctctcccaatcccacagctttataaatccatgtatcagttagctattgctgcaatattgctgtgtaacagactaccctgaaactcagtgtcagacagaagttggcattttctgagtgaggaaagtgaggctcagtgagaaaaatgaacctctcggggacatgagtgacatgagttccaaatcagatttccagttcactgtattttctactgtgttctgaacttaaagaaaggatcgatcattatgtctcatttctatgaacagctaatgagctaccatatttcaaaaaattttcaaaaatctctcccttattttcgttctccaaaattctgtaaaaacatgccattagtgtctctcattaacttcctttatctgattcttaaatgagagctttcgttcatttgccacagcgataatgacatatttaaattctccttctttttccaaattgtcaaaaataatcagtttctataaaattattaattatgtctatatttccaagttcagtacaataaaatgttactaatttggaataaaggaggcatccattattccattggcggcacacagaagcaaatgatcctggctagcatacagacaagaagaatttattagaataacaataaccagcacctatagcacttactttgattagccacctttctaagcactggactcattaatgtctagattaatgcctatatagtaggtactgctattagccccactttacagatgaggaagccaaggcacatagaagttaagtaacttgctccaggttgtgca

SEQ ID NO: 73793 - DNA, 544 bp, Homo sapiens
tactcctgacaggcttgcccgctatggcactgaccatatggctaggctcatctgcacgctctcccttaataattccctctccctcactttccacctcattctattttcacagagggcatttatttacagactcttcccccaaactacacatcctsacaaatgtatccctgattccagccacatgagagatgcctttaactcacacactcactgaggtatatcttgctgaccatggctgtgtgttgcttatttctgaagggaattaatttgaaacttagctacatactattgcctttcattcacagctcaaattccattccattaattccttatactgtagcatataatttgtttcacactcctaattgtccaatgctatcaatcttgattatggcatatgttatcataagttgagtctttcccaaatattttgaagaaattttaaatatcattttaaaacttttccttttacttcatatttaccctaagagaaatagagtcatgtaccacatgatgatgtttcagccaaaaatggaccacacat

SEQ ID NO: 73794 - DNA, 611 bp, Homo sapiens
aaccccgtgtctattaaaaatacaaaaaaaattagctgggcatggtgttgggtgcctctaatcccagctactcaggaggctgaggcaggagaatcatttgaacctgggaggcagaggttgtagtgagcggagatcgcaccactgtactccagcctgggcgacagagcgaaactcagtctcaaaaacaaaaaacaaaacaaaacaaaacaaaatgccttacaagttggttcattgagctagtgtatctttttctcactaaaagttactattttgataatggtactattaagcatgacttggaatcaaagaggcatggtttagcagagcctgtgatggtgctagtaaaagaaacccacatatttttccatctgctcctaataatatttaaaatatgattttaccagttactcacatyactcacattagtccttattttataaattgtgagactgacactcaaagaggttaattaacaagcccaaagtcacacagctattaacagtcaaagctagaattcaaacccaggtccactgagcccctaagatcacattcttagtcacaacaatttcttggttcccattctagcattatagtgtatgaggctttccaca

SEQ ID NO: 73795 - DNA, 611 bp, Homo sapiens
aaccccgtgtctattaaaaatacaaaaaaaattagctgggcatggtgttgggtgcctctaatcccagctactcaggaggctgaggcaggagaatcatttgaacctgggaggcagaggttgtagtgagcggagatcgcaccactgtactccagcctgggcgacagagcgaaactcagtctcaaaaacaaaaaacaaaacaaaacaaaacaaaatgccttacaagttggttcattgagctagtgtatctttttctcactaaaagttactattttgataatggtactattaagcatgacttggaatcaaagaggcatggtttagcagagcctgtgatggtgctagtaaaagaaacccacatatttttccatctgctcctaataatatttaaaatatgattttaccagttactcacattmctcacattagtccttattttataaattgtgagactgacactcaaagaggttaattaacaagcccaaagtcacacagctattaacagtcaaagctagaattcaaacccaggtccactgagcccctaagatcacattcttagtcacaacaatttcttggttcccattctagcattatagtgtatgaggctttccaca

SEQ ID NO: 73796 - DNA, 1083 bp, Homo sapiens
gtttaccaaataaacaaaaccaatctcatactttatcagtttgtagttagaatatttttccttcatgttctcccattcaatatttgcaatcactgtaatttcaatatgtgtgtagtccattgattgtggtcgttgtgtagaggccccaaaccacagcatcagtgaaatgagaasctgaaaatcctggcctatatcagtatttctgggtacatggtctcaagatgctaagatccaagaaggtgatgataggttgaaaaatctgaggaaaaacatctctgagttcaaaatgcagctttttatctttcttatgttctccctaccttattgtatgatgtggctattgtgatagtgaaaggagattaaaactaaaaggaagtggttaaacattatggtggaaatagttattattacaagtcatgttctgaatgctcattttgaagtttagttgaaaaaaaatccattgacttaaattccatgaagtccagggaggcaacatgaaagtaaaaaaaaaaaagattaagcttaagccagactgatctttatgatcttgtccttgttgaagttaatctgagtcccacaagaggtaaaggtagccctggagtggatgacagcttacataaagagggccctgagatgtcagatgggctctgccttctcagtcatggtggcctgcattctgatgttggcttccagtttagaagacagaactatccctcaattttgccccactgccccttttcttgtccagtctgggctgatgatgtggagacattactgccagggaatcgagtggtaatcacacatagtgaaataaatgaatgaaataaatttccacatcttttgggtttaagttcttccccccttgacctttgagatctaccaaatgagacaaagattgtggctacttgacattcactacatatttattggtacctcttatggatcagacatttttctagggaaccgagagcattaagatgataagtggaggtaatggattaccatatataatgtacacagactgctgattttaaggacaaatgatggtagttaagaaaaaaatatttttcctctggggataag

SEQ ID NO: 73797 - DNA, 1083 bp, Homo sapiens
gtttaccaaataaacaaaaccaatctcatactttatcagtttgtagttagaatatttttccttcatgttctcccattcaatatttgcaatcactgtaatttcaatatgtgtgtagtccattgattgtggtcgttgtgtagaggccccaaaccacagcatcagtgaaatgagaagctgaaaatcctggcctatatcagtatttctgggtacatggtctcaagatgytaagatccaagaaggtgatgataggttgaaaaatctgaggaaaaacatctctgagttcaaaatgcagctttttatctttcttatgttctccctaccttattgtatgatgtggctattgtgatagtgaaaggagattaaaactaaaaggaagtggttaaacattatggtggaaatagttattattacaagtcatgttctgaatgctcattttgaagtttagttgaaaaaaaatccattgacttaaattccatgaagtccagggaggcaacatgaaagtaaaaaaaaaaaagattaagcttaagccagactgatctttatgatcttgtccttgttgaagttaatctgagtcccacaagaggtaaaggtagccctggagtggatgacagcttacataaagagggccctgagatgtcagatgggctctgccttctcagtcatggtggcctgcattctgatgttggcttccagtttagaagacagaactatccctcaattttgccccactgccccttttcttgtccagtctgggctgatgatgtggagacattactgccagggaatcgagtggtaatcacacatagtgaaataaatgaatgaaataaatttccacatcttttgggtttaagttcttccccccttgacctttgagatctaccaaatgagacaaagattgtggctacttgacattcactacatatttattggtacctcttatggatcagacatttttctagggaaccgagagcattaagatgataagtggaggtaatggattaccatatataatgtacacagactgctgattttaaggacaaatgatggtagttaagaaaaaaatatttttcctctggggataag

SEQ ID NO: 73798 - DNA, 1083 bp, Homo sapiens
gtttaccaaataaacaaaaccaatctcatactttatcagtttgtagttagaatatttttccttcatgttctcccattcaatatttgcaatcactgtaatttcaatatgtgtgtagtccattgattgtggtcgttgtgtagaggccccaaaccacagcatcagtgaaatgagaagctgaaaatcctggcctatatcagtatttctgggtacatggtctcaagatgctaagatccaagaaggtgatgataggttgaaaaatctgaggaaaaacatctctgagttcaaaatgcagctttttatctttcttatgttctccctaccttattgtatgatgtggctattgtgatagtgaaaggagattaaaactaaaaggaagtggttaaacattatggtggaaatagttattattacragtcatgttctgaatgctcattttgaagtttagttgaaaaaaaatccattgacttaaattccatgaagtccagggaggcaacatgaaagtaaaaaaaaaaaagattaagcttaagccagactgatctttatgatcttgtccttgttgaagttaatctgagtcccacaagaggtaaaggtagccctggagtggatgacagcttacataaagagggccctgagatgtcagatgggctctgccttctcagtcatggtggcctgcattctgatgttggcttccagtttagaagacagaactatccctcaattttgccccactgccccttttcttgtccagtctgggctgatgatgtggagacattactgccagggaatcgagtggtaatcacacatagtgaaataaatgaatgaaataaatttccacatcttttgggtttaagttcttccccccttgacctttgagatctaccaaatgagacaaagattgtggctacttgacattcactacatatttattggtacctcttatggatcagacatttttctagggaaccgagagcattaagatgataagtggaggtaatggattaccatatataatgtacacagactgctgattttaaggacaaatgatggtagttaagaaaaaaatatttttcctctggggataag

SEQ ID NO: 73799 - DNA, 1083 bp, Homo sapiens
gtttaccaaataaacaaaaccaatctcatactttatcagtttgtagttagaatatttttccttcatgttctcccattcaatatttgcaatcactgtaatttcaatatgtgtgtagtccattgattgtggtcgttgtgtagaggccccaaaccacagcatcagtgaaatgagaagctgaaaatcctggcctatatcagtatttctgggtacatggtctcaagatgctaagatccaagaaggtgatgataggttgaaaaatctgaggaaaaacatctctgagttcaaaatgcagctttttatctttcttatgttctccctaccttattgtatgatgtggctattgtgatagtgaaaggagattaaaactaaaaggaagtggttaaacattatggtggaaatagttattattacaagtcatgttctgaatgctcattttgaagtttagttgaaaaaaaatccattgacttaamttccatgaagtccagggaggcaacatgaaagtaaaaaaaaaaaagattaagcttaagccagactgatctttatgatcttgtccttgttgaagttaatctgagtcccacaagaggtaaaggtagccctggagtggatgacagcttacataaagagggccctgagatgtcagatgggctctgccttctcagtcatggtggcctgcattctgatgttggcttccagtttagaagacagaactatccctcaattttgccccactgccccttttcttgtccagtctgggctgatgatgtggagacattactgccagggaatcgagtggtaatcacacatagtgaaataaatgaatgaaataaatttccacatcttttgggtttaagttcttccccccttgacctttgagatctaccaaatgagacaaagattgtggctacttgacattcactacatatttattggtacctcttatggatcagacatttttctagggaaccgagagcattaagatgataagtggaggtaatggattaccatatataatgtacacagactgctgattttaaggacaaatgatggtagttaagaaaaaaatatttttcctctggggataag

SEQ ID NO: 73800 - DNA, 818 bp, Homo sapiens
aaacttaaaactcacaataatttttccttgaaataccaaagctgatttgcataattaattttatgatagaaatttttacattgcttttattaaattttcaatagacatatacaagtattttaatatatatttacagagtaaagaatataaacataattaactccaagatacctaccagtttatctaagatagagaataaagctaatgcttttgaaattcgctgcttcctggttcccaactccttgcctcttctcttagaactatcacttaaaagttgggtttatgattttcttgcatgtgtatgtgtgtatgtgcatttatcatatatgtatgcktgatcagaaaattgtttggcagaatgtttttaaaggcctaaatggaaaaaggcatttttactgacactaatgatttgcttttttcacttaactttctctggctgcaatttatctgtgttgacgcacatagctgtaactcattcacttcccttgctgtatagtatagtatttcattgaataaatataacacaatttacatattattctcttgttaatggacatttgaattgtttatagatttttttgctatttaaattattgatatctcctttgcatgtgtataaagcttttaccagctaccccttgtcccttccgttatttctttaggcttaccaaccactcccacttcccaaactcttattttatctccttttttctgaacatgctattctcttagacttaaaaagcccttttctacccaatcttccttgtgaactctggtctcttaagtttggattattgaatttgaccaccttaaactcc

SEQ ID NO: 73801 - DNA, 736 bp, Homo sapiens
agcagggagatgggttcccagagtggatttagccatagtatagaaacagctcaattttattgagagcttatcatgtgttggacactattttaagtattgyatgtgagttatctcccttaattctaacaaccccatgaggtaaatatgactattcttcctgttttgtggatgaggttaggacacagaaagactgagtcatttgcccaagtttacgtaactaggaaaggatatattcaaagtttttgttttataattccaactttcattttcgattcagggggtacacatgcagaatgttacatggatatatcacatgacgctgaggtttcgggtaccattgatcttgtccaccagctggtgagcatagtacccaacagttttccaacccttgcccccctccctgtctctcccctctggtagcccccagtgtctgttgttgctgtctttatgtccatgtgtacccaatgtttacctcctacttataagtgagaacacgtggtatttggttttccgtttctgtgttgattcacttaggataatgacctccaggtacatccatgttgctgttgctgcaaaatacacgatttcactctttttgtagctgggtagtattccacggtgtatatgtaccacattttcttgatttaacccacggtccatgggcacctaggttgattccatgtctttgctgttgtgaatagtgctgtgatgagcatgcaagtgtatgtgatttttg

SEQ ID NO: 73802 - DNA, 736 bp, Homo sapiens
agcagggagatgggttcccagagtggatttagccatagtatagaaacagctcaattttattgagagcttatcatgtgttggacactattttaagtattgtatgtgagttatctcccttaattctaacaaccccatgaggtaaatatgactattcttcctgttttgtggatgaggttaggacacagaaagactgagtcatttgcccaagtttacgtaactaggaaaggatatattcaaagtttttgttttataattccaactttcattttcgattcagggggtacacrtgcagaatgttacatggatatatcacatgacgctgaggtttcgggtaccattgatcttgtccaccagctggtgagcatagtacccaacagttttccaacccttgcccccctccctgtctctcccctctggtagcccccagtgtctgttgttgctgtctttatgtccatgtgtacccaatgtttacctcctacttataagtgagaacacgtggtatttggttttccgtttctgtgttgattcacttaggataatgacctccaggtacatccatgttgctgttgctgcaaaatacacgatttcactctttttgtagctgggtagtattccacggtgtatatgtaccacattttcttgatttaacccacggtccatgggcacctaggttgattccatgtctttgctgttgtgaatagtgctgtgatgagcatgcaagtgtatgtgatttttg

SEQ ID NO: 73803 - DNA, 736 bp, Homo sapiens
agcagggagatgggttcccagagtggatttagccatagtatagaaacagctcaattttattgagagcttatcatgtgttggacactattttaagtattgtatgtgagttatctcccttaattctaacaaccccatgaggtaaatatgactattcttcctgttttgtggatgaggttaggacacagaaagactgagtcatttgcccaagtttacgtaactaggaaaggatatattcaaagtttttgttttataattccaactttcattttcgattcagggggtacacatgcagaatgttacatggatatatcacatgacgctgaggtttcgggtaccattgatcttgtccaccagctggtgagcatagtacccaacagttttccaacccttgcccccctccctstctctcccctctggtagcccccagtgtctgttgttgctgtctttatgtccatgtgtacccaatgtttacctcctacttataagtgagaacacgtggtatttggttttccgtttctgtgttgattcacttaggataatgacctccaggtacatccatgttgctgttgctgcaaaatacacgatttcactctttttgtagctgggtagtattccacggtgtatatgtaccacattttcttgatttaacccacggtccatgggcacctaggttgattccatgtctttgctgttgtgaatagtgctgtgatgagcatgcaagtgtatgtgatttttg

SEQ ID NO: 73804 - DNA, 1151 bp, Homo sapiens
tacatctatatgtaaatttcatgtggtaggttctttttgctctacatcccctaaaagctgttatgaaattaatgattcattttaaaatcaatcatgtcttgaaatccaggaaatatggcattattctacatttaacaatcaaatttatagtaacagatatgacaaaacaaatgtaatataaataaggctattaaaaaaacaactgtgcaaactgccttactaaacataaacatcaaaatggatcttaatataaattttggagttatccccaaatatcttgtgagtttaccttcccctgtttttctgctccacggttggcagagcttctaagaggttcatttgtttggatgccactataatttgcagcaaacctattgcttgggaaaactatttctggcttgttcttatgtttcaggcttggagtctttctattagcttgtttatttggccttaactaggatcagagttgctccaataccttgggcatttgtgatcacagatccagctgaagcttcccttcatgctctaatgagaacaaaaacagctgtgtgtcctacttcattccaaatgcaactcctcctacttcttcagtgtagtagcattggccttgtgatgctttaagacaaaattactggcctggcatggtggcttacgtctgtaatctcagtactttgggaggccgaggtgggaggatcacgaggtcaagatatcaaggtcaccctggccaacatggtgaaaccccgtctctactaaaaatacaaaaattagctgggcatggtggcaggtrcctgtggtctcagctactcaggaggctgaggcaggataatcgcttgaatccgggaagcagaggttacagtgagccgagattgcactgctgcactccagcctggtgaaagagcgagactccatttcagaaaaaaagaaaaaaaagaaaaattgtaaaggatgttttgtcttcagtgtgaccagtctctgactcttttttttcctgagactgaccccaccccttcccttatatatgaatcacatttatattaaataacttttgagtataaatcccttcaataggtagttgcatttgaagttttttaaccttaattatagaaatggaaaatagaattaaaaactatttccttcttaatggaactcca

SEQ ID NO: 73805 - DNA, 1151 bp, Homo sapiens
tacatctatatgtaaatttcatgtggtaggttctttttgctctacatcccctaaaagctgttatgaaattaatgattcattttaaaatcaatcatgtcttgaaatccaggaaatatggcattattctacatttaacaatcaaatttatagtaacagatatgacaaaacaaatgtaatataaataaggctattaaaaaaacaactgtgcaaactgccttactaaacataaacatcaaaatggatcttaatataaattttggagttatccccaaatatcttgtgagtttaccttcccctgtttttctgctccacggttggcagagcttctaagaggttcatttgtttggatgccactataatttgcagcaaacctattgcttgggaaaactatttctggcttgttcttatgtttcaggcttggagtctttctattagcttgtttatttggccttaactaggatcagagttgctccaataccttgggcatttgtgatcacagatccagctgaagcttcccttcatgctctaatgagaacaaaaacagctgtgtgtcctacttcattccaaatgcaactcctcctacttcttcagtgtagtagcattggccttgtgatgctttaagacaaaattactggcctggcatggtggcttacgtctgtaatctcagtactttgggaggccgaggtgggaggatcacgaggtcaagatatcaaggtcaccctggccaacatggtgaaaccccgtctctactaaaaatacaaaaattagctgggcatggtggcaggtacctgtggtctcagctactcaggaggctgaggcaggataatcgcttgaatccgggaagcagaggttacagtgagccgagattgcactgctgcactccagcctggtgaaagagcgagactccatttcagaaaaaaagaaaaaaaagaaaaattrtaaaggatgttttgtcttcagtgtgaccagtctctgactcttttttttcctgagactgaccccaccccttcccttatatatgaatcacatttatattaaataacttttgagtataaatcccttcaataggtagttgcatttgaagttttttaaccttaattatagaaatggaaaatagaattaaaaactatttccttcttaatggaactcca

SEQ ID NO: 73806 - DNA, 2007 bp, Homo sapiens
ttacattattttgcttccagggaagggaattggaccactgaaggtaggagcggggatggattactcatcggacattttaaataccttaaaagtgtgtgaatatattaccattctaaaagcaaaaacaaagaaaacaacaaacaaaaagtaggtaagaatatccaataaaattgaaaaaaaaaacaatattgagggagatttcctctatcgaatagtacaacatataaaactgtaataattaaaatagtgagattctgcttcaaaactagatagattactagagcagcaaagagtccagaaacttgcctgagactagcatggcagatggaagtaaacagataggctggcttacgagcaaagggagagttttatccagaaggcgtcgtagtctcggaagatagaacaccaggaccagagggcagggaaagcagaagcactgcaaagcctatgagtgtccctgaaggattaatttccttctgatgtggtttacctgctcaggcaattctgtctcttccaacttccaaatgaaaaagaggtatgtattagtctgttctcatgttgctaataaagacatatctgagactggataatttataaaggaaagatgtttgatggactcatccacatggctagggaggcctcacaatcatggtgaaaggcaaaggagaagcagaggcacatcttacatggtggcaggcaagagagcttgtgcaggggaactcccatttataagaccatcagatcttgtgagtcttattcactaccacaagaacagtatgggggaaaccacccccatgattcaattatctccacctggccctgctcttgacacatggggattattacaattcaaagtgagatttgggtgggggcacagccaaacaatatcagggtgctctgccacgaattcattagagaggaagtgaaggcttggagtgtgggatgttcacttgacctggggagaccagtcatccatgtgaccttaggtgagtcatttataataatcactagcacttactaagtgattctgtgggcccggcgtggtgccaggtactttgtatgcattacttcattaaatctttataacagtcctctgaggatggttgtaatcatctttacaacgatcctataacccacaccaacagtttcaaacaatcttttgtagtataatcatcttaacttacaaggtaaggaaagcaagggataaatatatcaccagctggagcacacagtaagcagcagcactgggatctgagtgtccaatcagctccagtggccatgggatttactccactgtaccactgctaatccctttatgtttcagtcttcacatataaacagtgaaggtgctgggttatatattcactaagattccttctaattctaaagggactgctattctaagatgaaacacttccaggatccatccttaaattggttcctgctgtggccacctgaaaccaaccaacctatctcaactccactgtatattcagtggtccctgctgggccggcccagttgtggccagaactctaggatgccattttaaaaataatattaagtgatcagatggataaaagtgtcaatctgggtgaatttcaggtgcacctcttacagttttttaaaatagcagactgtgtgctgatttactgtggtgaattgaagatcccaggagtggtctaagggtaaagtcgatgggcccacaaccaaagagcaagatgccaaggctgaaagaattctttttttttttaatcaactgttgtttttgtgtgaccttgtttacagggttagagatytctgaactctcttggagaaaggtccacttgttgctgcatagaacaaatgggctgagtaggtaaataacaacccatcttcagaagcttccgtgataaaagccaagccctggccttggcaatatctagttcgcatcacatcagttcctccggttatatttcacccttttaacctctttctcctcctcctgggatgctggggccattctttgct

SEQ ID NO: 73807 - DNA, 1225 bp, Homo sapiens
tgtgctcttttaaactttactgcactgctgatgctcaagtttcttttgctttttactttttgtggagacagggtctcgctattttgcccaggctggtcttgaattcctgggctgaagtgatcttctcgcttcagcctcgtgaagtgctggggttacaggcacaagccaccatgtctggtcatgagttggtttctttaaacagaatcaatagcctaactggcaaaaatccacacaagtttttatttagacatccttttatcttatatgtaatcacacagttattagaacagaattattagaagattttactctatattgtacacatttgattctatacattatgcctcttttgaaatattaatgtagaacaagattggacttgataactagactgattaatatcatttaaaaaattttaattttaggccaagcatggtagctcacgcctgtaataccagcactttgggaggctgaggcgggcagatcacctgaggtcgggagtttgagaccagcctgaccaatatggagaaaccccgtctctactaaaaatacaaaattasctgggcgtggtggcgcatgcctgtaatcccagctactcgggaggcggaggcaggagaattgcttgaacccaggaggcggaggttgcagtgagctgagatcatgccattgcactccagcctgggcaacaagagcaaaactttgtctccaaaaacaaacaaacaaacaaacaaacaaacaaacagacagacaaaatatttaattttaaaaatagagacagggtctcattctgttgcccaggctggtcttgaactcctggcctcaagtgatcctccttccttggcttcccaaagtgctaggattataggtgcccatcaccagtcccggccaagactaattattgatagtttttttttaaaggacaatttttgttctcaaagtttgccatttcttctaacactgtaagaagatacttgatctgactattaatttacagaaagtgagttcatgtaatctgaaccaagagagaatgtgacactgaagtgcttcagtgagtgtatgttgctactggatgaattttcaggcaggaaataactgctttgtttagtatcagatagtctagttaatatattccacttgattgcctttagaaaataaacttaaatgaagagccaggaagctgacaaagattgctttaatcttaaaagtagtacatgtttttctttga

SEQ ID NO: 73808 - DNA, 736 bp, Homo sapiens
gatcctctgtaccctttacccagtttcccccagtgggaagatcttgtaaaaccatagtataatatcccaagcaggacaatgacactgatactgtcaaggtaaagagtgttcccatcagcacaaagatctctcatgatgccattttatagccacatctgtcctcccctcaccatccctctgcctaatccctcacccctgagagccactaatctgtcccccatttctataattttgtcattttaagagtgttttatgagtagaatcacatacataacaagttgaacaatttatataacactttgttaccttttgtaaccttctgggattggcttttctcacttagmataattttctcaagaatcatccaaggtgctgtatcaatgggtcatttacttttatggctgaatagtactccatcatatggatatacaatggtttacttaaccattcaagcaccaaaggacatcaagggttgtttctacttgtggctattgttccagtttgtggctcttacaaataaagcttttataaacatttgtgtctaattttttgtgtaaacctttcatttctctaggaaaatacatcaagagtgcaattgctaggtcatacaacagtagcatgtttagtttcataagaaactgtaaaactcttttcagagtggttgtaccatgttacatttccactagcaatgcatgagagcaatttccttacatcctcaacagcatttggtgatgcc

SEQ ID NO: 73809 - DNA, 574 bp, Homo sapiens
aaacgtgtcaggcattatggtaaagggaataaaacaagcataatgaccttagagaagaagaacatgaattacattctaatgaagaatctgaacccctggaaagctgaaaatggtcattatctttgtactgtcagcacccagctaatatctggcacattactaaatatagcagaaaatgacacatttgttgaatgaattgatcaattccaggtacatggcttatgagaaaagattatgttggcaatctcatgggtagagaacatgggttcagggaaccttatactctttagcagcactgcagtttgatccatagcttcccacaggctttaatcacatctgataagatcctctcagattaacagttgaatccctactcttttgaagtcaaatgcacttatgagtaaagcaaaaagattaactgtggtttggagtaagggatagagggtctcacctccagtttagcagtgccaactctgaaaggatatcttctttccattgctacttaactctgtctaaatgactttataaycttaatcaatcaatagcttaagacaaataacaaaataagaaaact

SEQ ID NO: 73810 - DNA, 1564 bp, Homo sapiens
tgaaaaataaggtcatttaatactagttacaaatatataaaagaaatttgcaaatgttgtaatctggtaagttacttactaatacttcaattcccagggtaaaggctaacaggtacccaacaaaatggctcagaggataggtcaacactgatacaacaaggtcctgaataacttgaaatctgtttcaaataaaaagactgattgaattttaaagttaggtcatacatagtataacaatacaaactttgcacaaagctaaaacactasataattttccatttatagattattcaaaaactaaaataagctctaacggatttgtttcaagggctttatttacctatttttttttaatctagaagtattttagggaaaatgtaatttctgaattaatttgaaaacgatcagccaggtgcagtggctcaggcctgtaatcccagcactttgggaggctgaagagggcggatcacctgaggtcacaagtttgagaccagcctggccaacatggtgaaaccccatctcactaaaaatacaaaattagccaggcgtgatggcacatgcctgtaatcccagctactcaggaggctgagacaggagaatagcttgaacctgggaggtggaggttgcagtcagctgagatcatgccattgcactccagcccggacaacaagagcgaaacgctgtctcaaaaaaaaaaaaaagaaaatgatcacaaaagtttgcttggtttttataagcattaatgacaataaatgaatcttgtttgatcttagtttaaacacggattcatacaattacagatacaacatcaatataaaacacaatgaatccaaatgcatataaactgaaaaattttttaaaattcacccaagtaatcctatatttaaatcttaatgaaataaaggtagggtttcctaatctagttagagaaaaatcttaattacattttctaactgagctaaataaccttttccaaacccaatttaagatgtcactaattgtacactaacggtaatcaagtgaactcataaccatcaaaaatgtattacatacttgagtactttttacatttcatcactaggaaaaaaagttaacatttgtagtgcattattaagtaggtaattttagaaggtcagtatcatttggtttatgacctttctctgactgaaagcaacagctgcagaatttcatcaaaatgaggaaggtgccatgtaggaaagaaaagctaacaccagtcaaaaggggaatgtttcttttattcttaacaatgaataagcacagaggatcaacagatgattttgtaaaatcatttagaagactgtgaatttttatgtctttttcctatacaatctatcaaaaagataaagataggacacaacatactttcaaaatcatgttttcccttaaaatttaaatatatatgttttcttcataattaggacatttaataattcaggaggggttctgtactagatacaattttctgcaaagacaaaaccttttgttctaaaagtttaaaaaccagactaaatgacatttttaaaaatctgagttaaatatgcgt

SEQ ID NO: 73811 - DNA, 1564 bp, Homo sapiens
tgaaaaataaggtcatttaatactagttacaaatatataaaagaaatttgcaaatgttgtaatctggtaagttacttactaatacttcaattcccagggtaaaggctaacaggtacccaacaaaatggctcagaggataggtcaacactgatacaacaaggtcctgaataacttgaaatctgtttcaaataaaaagactgattgaattttaaagttaggtcatacatagtataacaatacaaactttgcacaaagctaaaacactacakaattttccatttatagattattcaaaaactaaaataagctctaacggatttgtttcaagggctttatttacctatttttttttaatctagaagtattttagggaaaatgtaatttctgaattaatttgaaaacgatcagccaggtgcagtggctcaggcctgtaatcccagcactttgggaggctgaagagggcggatcacctgaggtcacaagtttgagaccagcctggccaacatggtgaaaccccatctcactaaaaatacaaaattagccaggcgtgatggcacatgcctgtaatcccagctactcaggaggctgagacaggagaatagcttgaacctgggaggtggaggttgcagtcagctgagatcatgccattgcactccagcccggacaacaagagcgaaacgctgtctcaaaaaaaaaaaaaagaaaatgatcacaaaagtttgcttggtttttataagcattaatgacaataaatgaatcttgtttgatcttagtttaaacacggattcatacaattacagatacaacatcaatataaaacacaatgaatccaaatgcatataaactgaaaaattttttaaaattcacccaagtaatcctatatttaaatcttaatgaaataaaggtagggtttcctaatctagttagagaaaaatcttaattacattttctaactgagctaaataaccttttccaaacccaatttaagatgtcactaattgtacactaacggtaatcaagtgaactcataaccatcaaaaatgtattacatacttgagtactttttacatttcatcactaggaaaaaaagttaacatttgtagtgcattattaagtaggtaattttagaaggtcagtatcatttggtttatgacctttctctgactgaaagcaacagctgcagaatttcatcaaaatgaggaaggtgccatgtaggaaagaaaagctaacaccagtcaaaaggggaatgtttcttttattcttaacaatgaataagcacagaggatcaacagatgattttgtaaaatcatttagaagactgtgaatttttatgtctttttcctatacaatctatcaaaaagataaagataggacacaacatactttcaaaatcatgttttcccttaaaatttaaatatatatgttttcttcataattaggacatttaataattcaggaggggttctgtactagatacaattttctgcaaagacaaaaccttttgttctaaaagtttaaaaaccagactaaatgacatttttaaaaatctgagttaaatatgcgt

SEQ ID NO: 73812 - DNA, 630 bp, Homo sapiens
tcttcactatattccatatgttaaatgggacaaacgttattctcatactttgcaagtgtcaaataaaaacaaatctggacttaggtaaggaaagaatttattccaaagtctgttgcgatagggagaatgcttcaaccacagtatctgtaagtttctccaaagtcaatcagtaagagaggaacaaacaagggtagcaagaattgagtgtagggaagtgggtgaacaggtagaatgattagagtgttgaccatgaaacatccttctctgtggtcaattgtcaggagggtcctgaaagaggggccattccacattccaatgttcatttagattcaagggtaggtcaagggccaggggcctgtgcagagagaaacctgactaaagtttggtcaaataaagttgwtgtttatcttgtccagattggtcaatggagataaacacttcagctaattacttttaagacaaagaatgggaatttggacaggctgtgtctagccttgtcataggtaaacaagggtgttttttttatcttatccaagtcatatggagaagggtgggcctctgcagtaaccctaggaacacaaaaggatggagcgattttcttttttctttttcatttttatctgtggtaaa

SEQ ID NO: 73813 - DNA, 683 bp, Homo sapiens
catggaaggcaaggtcctcagtgatagacttaccaagaatggaatagtgagcttcttttaactgtttcttgtaatgaagctyaacaaaaagccaaagtaatgacaccaagacacaattttgtaagagcagttacatgaaagactgaaagactgtggtcttattacacagctctctgacagctaagagcccagaattagactgtctttaggtcaatggttctcaaactttttagcagtagacatttttatccgtatgaaactgtgtgtggagctgatctgtttgactcctgactggggagtccggagaacccactcatcaacagacctgtcacaccacttaccctctgtctaccatggcagtccctgtggaacaccaggcctctgacagtttttttaaagaaaagaatatattctgcaccataagacagggtgaaaaaaaattttacataaaaagaatatattaatgtcaattcagaaatagtccataaattgtatttttccacatttgagctatccgaatttcaaagcagaaaactcaatttcaaattatctaacattgaggaagggcaggacctatatgcgttagtgatcaactaagtgaacaataggatttcatccttcaatcctttcataccccaggaaaataaatgaattccatcaagatatgttcctgaatatcagac

SEQ ID NO: 73814 - DNA, 1029 bp, Homo sapiens
tgcatcttgtattgaagtcagtttcaagcagctagtatgatcactgccatagtgttttcaacagaaacatttcctgaaacatgtgtcttttaaacattttcttctctaggctgactcagtaaaatattggttaggatgctcttcccaccaagaagctgaggtgaaattgaaatgttacctgtttgttcatcctctcatgcctcagaatccagataaggctctctgctgatgacataaccatcatcccagtgttcccaagtacatcatcctctggctggctggcccatcctcagccatactcaccatgtccacctcccacctcattcccatatccatggctatgtcactcgatatccttattgccatttcccttacttaataaaagctgctatcttcctcaactaccttcagaatattacacaataatttgcctgtaagaggtgtttagtaaacatttattgctaccacaaaacgttgttgacactgttgcagataagaactatttgactaatcagattctgtatcccctagcatgaaagatgcagattcataagaggcacttctggaagagtaacaatagctaacatgttttaatattcactacatattaggcataatgctaagcattttcacgtgttacctcacttatcctcatcaaaatccgtatttgttattattactctcattttacatatgaggaaactgaacctttgcaaaaataaataacttgcctgaggacctacgcaaaccgcccatgtactgcaagaattccaagatgtatatcagggcctatggcatgcaaaaccaaaacarattttaattgatctcacatgtcacattgaagtgaattatttaagtccttgtcaatataaatttgagcttgtggttatttggttagtatttgtcttcccccaaagactgtatgtaagctttgtgaagttagggactgttttgctacatatacagatggtccccaacttatgatggttccacttgcaatttactgactttaccatgtatgaaagtgac

SEQ ID NO: 73815 - DNA, 556 bp, Homo sapiens
tgaatcagaatatagtctcattatccttaccagtattaatccttccagagtgctgtattaatggactaagttataagtatactggttttctcctatgtatcttgtaccaaagacatccatctacctgaggcaagagtacacacagaagcagcacagaactcctggaytgcctcgcctctgccatgtttccacattctctggtactactgatggcagttcctgtgcaaatcacagcattcccagaatgacttccagtaaaatgctgggtggcccaaagataagtaattatacagagaatatcaagaagtggtccctgaaggaggtcatctaagcagacagtatctgatgtggcttcttcagatgcatttgcacatattttttcatacatatttagatgcaacttgctcatattgacaaaatcagagtcagtatacacacacaatagagagtataaatctatgtgtcaaaataacatgggcagagaaattaacccacaaggtaaaagaaagaagttggcaacaccagagtggaacaaataggatgcctagggaagaaa

SEQ ID NO: 73816 - DNA, 556 bp, Homo sapiens
tgaatcagaatatagtctcattatccttaccagtattaatccttccagagtgctgtattaatggactaagttataagtatactggttttctcctatgtatcttgtaccaaagacatccatctacctgaggcaagagtacacacagaagcagcacagaactcctggactgcctcgcctctgccatgtttccacattctctggtactactgatggcagttcctgtgcaaatcacagcattcccagaatgacttccagtaaaatgctgggtggcccaaagataagtrattatacagagaatatcaagaagtggtccctgaaggaggtcatctaagcagacagtatctgatgtggcttcttcagatgcatttgcacatattttttcatacatatttagatgcaacttgctcatattgacaaaatcagagtcagtatacacacacaatagagagtataaatctatgtgtcaaaataacatgggcagagaaattaacccacaaggtaaaagaaagaagttggcaacaccagagtggaacaaataggatgcctagggaagaaa

SEQ ID NO: 73817 - DNA, 556 bp, Homo sapiens
tgaatcagaatatagtctcattatccttaccagtattaatccttccagagtgctgtattaatggactaagttataagtatactggttttctcctatgtatcttgtaccaaagacatccatctacctgaggcaagagtacacacagaagcagcacagaactcctggactgcctcgcctctgccatgtttccacattctctggtactactgatggcagttcctgtgcaaatcacagcattcccagaatgacttccagtaaaatgctgggtggcccaaagataagtaattatacagagaatatcaagaagtggtccctgaaggaggtcatctaagcagacagtatctgatgtggcttcttcagatgcatttgcacatattttttcatacatatttagatgcaacttgctcatattgacaaaatcrgagtcagtatacacacacaatagagagtataaatctatgtgtcaaaataacatgggcagagaaattaacccacaaggtaaaagaaagaagttggcaacaccagagtggaacaaataggatgcctagggaagaaa

SEQ ID NO: 73818 - DNA, 605 bp, Homo sapiens
agaccagcctggctaacatggtgaaaccccatctctactaaaaatacaaaaattaggcaggagtgatagtggacacctgtagtcccagctacttgggaggctgaggcaggagaattacttgaaccscaggtcttgccactgcacaccagcctgggcaacagagtgagattccatctcaaaaaaaaaaaaaaaaaaaaaaaaaaaagaaaagaaaagaaaaagaaaatgagaattcttaaattagtcttaactagggatgcctattgataggcaaaagcttctaaaaagattttaatatctttactgttttttaaaagagactttttacaaatggcaaataaaaagtttaagtgactaattgataagaaaatatctgttaacattttggtttagttattattctgccccaaaggcaaaaagaaagctatcctaaagtgtttacaaaagataagacctccggtaaagtaggcttgcttctttctcacagcaatccatgctgaatccagtcatggaaaatgctttctttgctctattccttaatgggctccatgctgaactcagtaattttagctaagaaatagtagctaagttaaaaagaacaccca

SEQ ID NO: 73819 - DNA, 605 bp, Homo sapiens
agaccagcctggctaacatggtgaaaccccatctctactaaaaatacaaaaattaggcaggagtgatagtggacacctgtagtcccagctacttgggaggctgaggcaggagaattacttgaaccgcaggtcttgccactgcacaccagcctgggcaacagagtgagattccatctcaaaaaaaaaaaaaaaaaaaaaaaaaaaagaaaagaaaagaaaaagaaaatgagaattcttaaattagtcttamctagggatgcctattgataggcaaaagcttctaaaaagattttaatatctttactgttttttaaaagagactttttacaaatggcaaataaaaagtttaagtgactaattgataagaaaatatctgttaacattttggtttagttattattctgccccaaaggcaaaaagaaagctatcctaaagtgtttacaaaagataagacctccggtaaagtaggcttgcttctttctcacagcaatccatgctgaatccagtcatggaaaatgctttctttgctctattccttaatgggctccatgctgaactcagtaattttagctaagaaatagtagctaagttaaaaagaacaccca

SEQ ID NO: 73820 - DNA, 653 bp, Homo sapiens
ctagtgtctattgtcagcctgtatagcatggacctttggcataaattaatgccatttagattctatggggaagaagtttcatccttttttagggtgaactgataatgatggctagcccagatggggatgcatacacaaggactaaagaaagcactctattgcatatgcactataatgtgacttatggagatgataaaaactaagtagaacagaaatgaaaacaaggtttcaatctgtgtaaaataaattcttactgtgaaaacaaatgtcttcgtgtggagttaattgcactgtcaactctctgtacagcatcaagaatggaagattcaacaaagtcatcgccagcttgtctaccctgtatagctttgaaaatcaattccatgattaaaaatatcaaacagaccttgaagttaggcatgatatkatatgaatggcattacatttttaaatgtaatgccattacatttaaaacctctaagacaatgaaaatgttatacaatatctacatgataatgcccattgcagagaggtaggtaattatcttgaagcaaggcttcatctaacaataataatgttatttagggaattaaagtattccaaaatctagtaaagctatgtaaaatatttccttttgaacaatgctgattcacaca

SEQ ID NO: 73821 - DNA, 686 bp, Homo sapiens
caagtcacttcccaaagcagatctggttactcatttgtcctgctcagcatatttgtgttcccattacacctcaggcaatcttcaaaggtcaggacccagatactgacaagtctttttttgaattcaatcaaggaatacaaatgtttttttctgatcagaagaattttacagatgactgattcccactgaccatgtcatcctaccctaatttcaggctatttctggagctgaacatttgctgataaatatgccgagaacctgcgtggttcttaccctgcttgctcccagttgtttctttaaacaggaccaygtgcaggtagtttttctagactatgttggcaacctttcataaatgacttgtattagttctttccttccttactctttttaaaaaatgttcttcctttcttacgtcttttctgtgtttagtaaagtgctaccaaaggcaaatacttttgttagatgtagacattgaataaatcatatatctgtggcttacagtctaaaaggaatctatttataatacaccttgattcatggtatgcacaggatgccagggaaagaaagaggaaggtgcacagccaatttttcacaggttgttagggaaaacttatctgagaaattggcctttgagttgagtcttgaagaaggagttgcaatttgtgagtttagcaagctggggaaat

SEQ ID NO: 73822 - DNA, 686 bp, Homo sapiens
caagtcacttcccaaagcagatctggttactcatttgtcctgctcagcatatttgtgttcccattacacctcaggcaatcttcaaaggtcaggacccagatactgacaagtctttttttgaattcaatcaaggaatacaaatgtttttttctgatcagaagaattttacagatgactgattcccactgaccatgtcatcctaccctaatttcaggctatttctggagctgaacatttgctgataaatatgccgagaacctgcgtggttcttaccctgcttgctcccagttgtttctttaaacaggaccacgtgcaggtagtttttctagactatgttggcaacctttcataaatgacttgtattagttctttccttccttactctttttaaaaaatgttcttcctttcttacktcttttctgtgtttagtaaagtgctaccaaaggcaaatacttttgttagatgtagacattgaataaatcatatatctgtggcttacagtctaaaaggaatctatttataatacaccttgattcatggtatgcacaggatgccagggaaagaaagaggaaggtgcacagccaatttttcacaggttgttagggaaaacttatctgagaaattggcctttgagttgagtcttgaagaaggagttgcaatttgtgagtttagcaagctggggaaat

SEQ ID NO: 73823 - DNA, 1632 bp, Homo sapiens
gcccccgctctggtgcttaagggtcactctcttctgctagcactgctgggccgcgcagtccctcatttctcctttggaaatgggagtgcaaggaagacagatgaagtaatgaatgggcacagtcctgcctgcctgagcaagtcactgcttcccacttgttcactgtctcagtttccggaggggaggctgctgattcaatgaccacaaacttgatagcttaaaacaacagcagtctattcctgcacagctctggagggtggaagtctgaaatcctggtgtcggcaggcccacagtccctccagcagccccggggcagtgtctgttccttgcccctcctggcttctgccgggaacccttagcattcttgggtttctggccatatctctctagtctctgtctccatctgcccatggccttctctgtgtgtctctgtctctcctaaggacacttgtcattagatatagggctcacccaggtaatccaggataatcacatctcaggatctttaacttaattatatctgcaaagacgctttttccaaacagycatgttcacgggttctggggggatatatttttggggagcccccattcaacccagttcaccctgagtgatggagaacaagggcgcgcctactcaatgctcataccgatctcactggctttgtgcagattttggatcccagcacattgttccaaaggaggcgatccacatgcaacgagggccaatgaggtgctgggctctgcgttgcctgctttatccctctccatgtgaggagacattgttatcctcattttgtagatgagaacacaggttgcacattcactctccctccctccctctcttcctctctcttctttcttctttctctctcttcctccttctcttctttctctccttcactctctccctccctctctcttctctctttctcttctctctccctatcttctttcttttcctccctccttctctgtcttcctccccccattctctagctctgatttattcaagaattcttaacgcattgatgcctgaggttgcagttttttgaatttttgcaatcagaccttggcaatgaccttgagcagtaggatataaataactcccacatgcttagtgtcccaataatggaacactaggcataaatgggttttaatatgtagccatagcttgtactactttcctaccagatcttcccaatcccaactcctgcagacttctcaatatttcttgggcaaggctaccattctatggctagataagtttcatatatgtatgtgtgtatatatttgagatggtgtctctctttgtcacccaggctggagtgcagtggtgccatctcagctcaactgcaatctccacctcccaggttgaagcgattctcctgcctcagcctcccgagtagctgggactacgggtgtgcaccaccacacccggccaatttttatatttttagtagagacggggtttcaccatgttggccaggctggtctcaaactcctgacctcaggtgatccacctgccttggcctcccaaagtgctgagattacaggtgtgagccactgcgcccagccaagtttcttatattaaagcaaaatatgtttccttggaacttctaccatggatcca

SEQ ID NO: 73824 - DNA, 2109 bp, Homo sapiens
tttttcacttaaaatcacattatgaacatctttctatgaggtacatgtcattcagcctcgtgttaccatctgcctctcatcactgggctctccactcctgccccatcaggtcttcgctaagatgcgagtcctcagcatttgtattcattagaagtcttggttggttgtaagaggaaccggctttatttcattttttaaaaagagagggcatttattataaagaccctggggttctgatggaactggagaacagagacggaattaagcctcagagacaactaggatcagggttctccaatcttcctcctctctgtatgcctgttcgattcttctccctccaaacttgtttcctctgcttccccaaccactcccaaggcttacatattacaggctcatctaccgagagagagcctgatttgtctctatcctaattcccatattcctaaggaaggggattatggttatgccaccacttgtggctggccatgttagaaaaattggctacacctgtaacaaacatggaagtgagagatgaagaaaatcaccttacgatgggtgggaccagatagacagggcaaatgatgctcaggacaccttccttaatcactccaagttggagttaggagcccttctctgtaagctcagagcattctgtatatatactatgagagcactgaacacaatgaaatgtgaatgctcatttgtttgtagttctagctaaatggtaagctccatgaagataggcactgttgtgtttatcaatgcttactgggctatgactgtgccactgaggttttgggattgcttatcacagcagttactcatctctaaccaaacataccctcccacgtgatgaccctatgtcccttcccaaaaatgacctgctttgagccactctcacctttgtttattgatgtattatttactgctggaggaatatgcatatctataatcacttgacttgactttcgggacacaagggaactgtggatatatttggacctctgtgtttcttatggtaaaatactggccttttgctcctcctattctgcagggctctggttgctttaggtctaatcctcatccaggtacttatgctgggctgcttttccactcaaaccatttgggctctcggggcaaggaggagtagtagctcgatgtatttttgctaaagctgcactgatggacagtgggccagagctgggctctctcagaagagctttcaaggtggcctggggtcaaggtgcattttaatttctccacgcttaactttcatacctttgcttaatacctgtgatattccctgcccttatagtcaaaaatcaagttttcctttattcttccatttcatccttccccgcttccttctctttgttattttccttccacaaatatctcctgctgaactctaagttctgtaacaacacaaatcaaggcttttattcatcactatgtcccattacccagcttggtacttagcacatagtagaggcttaatatatataggttgaatagagttggatatgagacctgaaccatattagatgctgaggaggaaggagtgagaaaagataatttatgcccttatgcaactcacaatcaaactctaaagattcttcaggaagcagtggtcrtaataaaaaccataataaccatagcgattgtttatacgatgctcaccatgcgcctggcactgttttaagcctgactgatttttgagggcaggaggtggagggcacagcaccaggggtctttgctgcagctgatgtggcctctgcagaggttcagagaccttatacagctgctgtgactggtaggtagctcaggagtgtgggggaaatgttgggttcgaagcacttcagagaatcccaaactagttcacaccaccagagctgaagtaaatgacacgagacccagccccgctgagcttttctggctgccatgaaagccatgcaattcctgacttgagtctgagactccagaactattctgtctggctccaagtgttcatggaactctcatgcaacaaaggaaatgcctgagataataggacactttagaactgttttgagcaagagatattttgacgtggtctgaaaaaaaaataaa

SEQ ID NO: 73825 - DNA, 1237 bp, Homo sapiens
aaaaaagtaaaagggaagaggaattatttgaagaaagaaggccaaaaacttctcaattttgaggaaagttacayaaaaatgggaaaagctaaaaaatgaaactctaagataaacccaagcagactcataccaagacaaattataatcaagcagtcaaaaatcacagataaagagagaatcttataggtagcaggagaatagctactcactgtgcagaaagaagtttccataagactatcaccatatttcccagcagaaaccttacagtacagaaaggactggaatgatatattcaaagggctgagaaaaaaaaaaaaacaccctgaaaaataaaaacactatgttcagcaaaactgttcttcaaaactgaaggaaaaattaagaccttccaagataaacataaactgaggtttttcatcccctttacacctgccatcaagaattgccaaaaggagtccttcaagttgaaatcaaaagacacttgttagcaacataaaaccataaataacaaagatctctggtagaggtaaatacgcagacagatattaaatcctgtgatactataatattggtttataaatcacttctaattctggtatggagattaaaggacaaaaacatgaaaataactatgaatctatgataccagatgcacaatataattttgacatcaataacataaagaggggcagatatgtacaagaataaagttttcatatgtggttgaagttaatttgttgtcagctaaaatatatattatttgggacaggtgcagtggccaggcctaaataatgtacaaaacatgatttccaatctattggaataaaactagaaatcaatagcggaagggaaactagaaaatccatgaagactggaaatttaacaatatactcaaacaaccaacaagtgaaagaagaaatcagaatgaaaattagaaaataccttaagacaaattaaattacaacatacctaaacatatgggatgcagcaaaagctatataaacaggttggtatgtagcagtaagcatttacattaaagaagaaggaagatctcttaggagtaaaatcatggttacccaaaggctggtaagggtagtgaaggatgaggggagggaggattgttaatgggtacaaatacatagttagatagaataaataagatctagtgtatgatagcacaacagtgtgactacagtcagtcaacagtaatatattgtacatttaaacataaccgaaa

SEQ ID NO: 73826 - DNA, 557 bp, Homo sapiens
gttcatgagtccctggggagtaaggcaggggaggcagcaaaggggaagaaaaaaagagaaagcagagacagcagcatgatctctgcccttagttcaattacatgacctgatgcccaagtgtagttagtaaagttactgatttcacacgaggaaacagcagtcctatagaggtcaagataagaaatgttgatgaagtgtggtagagaggggtgatatcttcattctggaaaacagcctagatggaaaagtatacagtttagtggctttggaagtggcaggagatcctaccaccccagatatggcactgtcttggttggccatgggagtgayggcaaggctaaggccccgtcaaatgttcttcagacagaagacatgagtcagtgaagcagaataagagagacaggaagaacgtggcagatgacatacagtgcagtcacagactgagaagaccagaccagtgacatatcctggcgagaacacagatgtaactcaggagacaccttcagggggctggagttggggagatttttggcatacctattctgatgacttctttc

SEQ ID NO: 73827 - DNA, 1095 bp, Homo sapiens
gtaaaatgctatgtagccttgaaaagggatataaaaaattaacacaaagataaaagaggcaaatagtgtgttcaaaatatttaatatacacgtttgaaaaaaaaaactggagagatacaccaaaatgttaacaatagttatttctcagtagtaagatgacataatttttttttcctaatttgcttttttttttttttttttttacagkgaacacattgtaacaagaaaaaaaatgcaagctattaaactgggtaaggtgacaacatcccctaaataaacttgagtagtttttgcagataaaagcccatattagatttcaaatttgacatcaggagttcaatgacaaaatgatattaggatcataaatttaaataagccacaaaacattaaaaataagagtgactttggagggcatttagcggaagccctttatttcacagtaggaagaccctccccccagtactaattccagaagccttaagtgctgatctctgcatagttccctctacccccataaatgtactcatttattctccagacaaaatgatgcaacatatctacgtttggaaactagaccacattctccaaagtggaagtaatacagactgtgatcaagacacaaccaacagttaagctttcagcggcaaagtctggacattccagcagatgggggtggtaccatgcagaataagactttcaaaatttaaatgaaacatcacattctcacttttcaagggagaaaaagagcagaaaacttatttttgaagtccaggaagaactaggcaacttacaactatcaccacattcctcaaaacaaccccatggagaagacaggcattatatcccttttacaagcattaaagccatggcacaaaacaggtgaagcaatttgaccaagctaagcactcatctcattcaaaacccgagcccttcccccaccatgccctttatacaattatattgtaaaattccattttgttttttaaaatagcatgcaagtaataagtaaaagatgatcactttcacatctcggcagcgttccttgtcctcaatcctactctcttctctgaatgaacagtttgagatattcctttt

SEQ ID NO: 73828 - DNA, 1095 bp, Homo sapiens
gtaaaatgctatgtagccttgaaaagggatataaaaaattaacacaaagataaaagaggcaaatagtgtgttcaaaatatttaatatacacgtttgaaaaaaaaaactggagagatacaccaaaatgttaacaatagttatttctcagtagtaagatgacataatttttttttcctaatttgcttttttttttttttttttttacagtgaacacattgtaacaagaaaaaaaatgcaagctattaaactgggtaaggtgacaacatcccctaaataaacttgagtagtttttgcagataaaagcccatattagatttcaaatttgacatcaggagttcaatgacaaaatgatattaggatcataaatttaaataagccacaaaacattaaaaataagagtgactttggagggcatttagcggaagccctttatttcacagtaggaagaccctccccccagtactaattccagaagccttaagtgctgatctctgcatagttccctctacccccataaatgtactcatttattctccagacaaaatgatgcaacatatctacgtttggaaactagaccacattctccaaagtggaagtaatmcagactgtgatcaagacacaaccaacagttaagctttcagcggcaaagtctggacattccagcagatgggggtggtaccatgcagaataagactttcaaaatttaaatgaaacatcacattctcacttttcaagggagaaaaagagcagaaaacttatttttgaagtccaggaagaactaggcaacttacaactatcaccacattcctcaaaacaaccccatggagaagacaggcattatatcccttttacaagcattaaagccatggcacaaaacaggtgaagcaatttgaccaagctaagcactcatctcattcaaaacccgagcccttcccccaccatgccctttatacaattatattgtaaaattccattttgttttttaaaatagcatgcaagtaataagtaaaagatgatcactttcacatctcggcagcgttccttgtcctcaatcctactctcttctctgaatgaacagtttgagatattcctttt

SEQ ID NO: 73829 - DNA, 1513 bp, Homo sapiens
acaaataaacacgaagagccaagaaggaccttgcttcatctcacagattgacagactacagaacattggaggcaggacagtgttataaagtttctgaagtgacaaccaagccaactttgaataamataattttttctaggaagacagtcaatttagttgtcaactatgtagcagaagagcattcattgcacaacttcatctgtcagtgattttaattatataatatgcatggaatgtcaagaaacagcagacagaatggcataaagggaaagaaccctgggacacaattctagaaacttactctgggttgatgccagatcatatatgctacacgtattattttaacttcagaaaatattttataatataaagaaaacaaaatcaagttggatttacagctatatcaactggaattttgaagtatgacaacatctagagtctacatggaatgtgactgaaaactcatgaaatcctagcaggattataaactggtaaatgcactttgaaaaagtacccagcaacttgaagtgtgaagacaatataccaaactctgcaattaacttctaggtacatactcaaggaagctcttgtgatgtgggcacaggagacttaaacaaggatgttcaccaaaatactgtttataatagcaaaaaatatatatttacctaaatacagcaaaaaatatacacctaaacatttaccaagaggaatattgtatatatttatgtaaaatattactacaaagcaattaaaatgtattgattttacttacaaataactatcaatatgtacacattataaatatgacacatggagaaaagcaaatgccaggaagataatgtcatattctttgcataaagatttaaaacatatgacaatcaggaggcggcatgaggggtcttcttagttgcttatatcattctatttcttgatttgagcttgagagcatgagtgtatttgttttgtgacaatttacccagttatatactttaaactgtgcattttcctcagtgtatgttttatttacataaaaatgtaaaacgatgtttatggacatacacagagaagtataaaaacacggatgggaaggaaatataccaacttcaggagagttatctctaggaaaatgaggaaaagagtacacttaagtgcaaaacttttatttgatgtttatattgtctgaataaaggtctgaatcaaacatatcaaaatcttaacatttgttaaagatcggtggtaaatacattattttacattcctctttttaaatttttttttttttttttttgagacggagtttcgttcttgtcatcgcccagactggagtgcagtggcatgatctcagctcactgcagcctccacctcccgggttcaagtgattatcctgcctcagcctcccaagtagctgggattacaggtgcatggcaccacgcctggctaatttttgtatttttagtagagacagggtttcaccatgttggccaggctggttaaaatttttaaaagcaaaaaa

SEQ ID NO: 73830 - DNA, 740 bp, Homo sapiens
aatacacacctctctgacattaaagtccctgccatcagctacagtgatttagggcttcctgaagtaggtacagccagggctaggaccactgtctctctcctgtccaggacttggtctacaagatggcactgttttccataaagtagctgagataaagcaggttgatgcaattgggcagcccctggtgtttccaaagagtgtctttaaaaattacagaagtgtgcctcataggaatctggacagtgattcctttattgtttctttcatgataacaataagcagattagctgtgttttctgtttagtaactaagccatggttctaggctcatagaaaatcaatactttctcacaaatatgtacttttcctgccaagcagccatcagaattaaaggaaaatgatatctataatcagctgttacaaattgcattactaggtgaatagttaatgtgtttcattccttacataaaaagaattttaaaaggatagcatcaggagagttatgaagaatgaattctctacttctgtgcattttgacccaactttcwagaagctttccagaagcttctagaactttctagaagcttttgtagcatttccccacacatatgataccattactttcatgtttgtgatgccagatatgcactgagctcatcctgggacaaggacagacatgcctactgcctacggacatacccagtgaccaagagcagcttcaggattagcgacagtcccagt

SEQ ID NO: 73831 - DNA, 925 bp, Homo sapiens
tgaggacatgctttgagaaactttccaacatccatcacgaggtacatccaatcacgagtgacagcacgrccctgtgaactggtcattgtcaaggcttagtgttattgggtgtaggaacacaaactagagcagaagctcatttagcaacaccctggcctttacccactagattccagtagcactttcccacccttgccaaagttctgacaacaaaaaatgtctccagacattgccaaatgtcctctgtggggcgaaattgcctcctgttgggaaccccttattaagtaacatgcaatatataacattacttttcccctgctcacattttatgaaagatattttattcagattctccacattcaacttccaacaatgatgtcttcactattctgggaagcacttctggagccatctacaggcatcttccaggcttccaccatctttgtttttatctaagttgttttgagatacagccacttgtctctggggaccactgagtattcaattctcagccatggtttttacgttcattctgtatgtatttgtgatcttcaatcttaatggcagattctattgcttctaaagagcttctggaaacagcttcacattacctgcagtgctagtgactaccactttctggtaccagggaaacatctgctgctcttggccatctcaggggtctgagagactcttggagattctcttaaacttcctgcagacacagcaaaacggatgtgccttttgctcccacagtacgctgggtacagggaaccctagggtctttctgcccacttgagctttagccatggacagagcataagttccccttgcattcagatcctcaaagctaggctggtcttccattatttcctcctctctgccctgacttggccttgtcaagggcacaggcctgctcagggaccca

SEQ ID NO: 73832 - DNA, 533 bp, Homo sapiens
gaataatcattgaatatctagatcatttccaaataagatataatgctaagayattaattactaaatatgagtttaagctcatatgcttttggcttttttcttaaaaacaaaagttatgtaggtctgctagtaaatatgtcctgttccatatagaaaaattgttctatagaaagcttatgcttttaaaacttatacgatatgtatttataaattgttagtacatgactgacagttaaaattacttatttcctaggttttcactgaaaattagggttatgggagtcaacactgattaatatgtatgattaaaactactagatacaagagaaacaattctgtatgcaaagtgtataagaaaagtgagatgtattttcggtaagaaatgttataagaaagcatgagaatgtggttttcattaagggaatagtaattctggctaaaggtttttaaaagttgttgtaaattgtatttaagaaataaagaatagatgaaactggatgaatataaaaagggaaagaaagaaaataggaaaa

SEQ ID NO: 73833 - DNA, 533 bp, Homo sapiens
gaataatcattgaatatctagatcatttccaaataagatataatgctaagacattaattactaaatatgagtttaagctcatatgcttttggcttwtttcttaaaaacaaaagttatgtaggtctgctagtaaatatgtcctgttccatatagaaaaattgttctatagaaagcttatgcttttaaaacttatacgatatgtatttataaattgttagtacatgactgacagttaaaattacttatttcctaggttttcactgaaaattagggttatgggagtcaacactgattaatatgtatgattaaaactactagatacaagagaaacaattctgtatgcaaagtgtataagaaaagtgagatgtattttcggtaagaaatgttataagaaagcatgagaatgtggttttcattaagggaatagtaattctggctaaaggtttttaaaagttgttgtaaattgtatttaagaaataaagaatagatgaaactggatgaatataaaaagggaaagaaagaaaataggaaaa

SEQ ID NO: 73834 - DNA, 738 bp, Homo sapiens
cagaagagcatatgtagagaaaacctgcattgatggagccaggctttctctagtccagatttagaaaagattaactgaatatctgatacctttaaaggtcttaaagaaacattcaccatctatttgatctcatctgcaaaacaagaccttttgctatccaggcctcctcttccctggtcccctcatgtgttttaccactatagcctattttgccatgatccaagcacccattcttgctgtaacctcaagattgtatacgagcttctgaatcctactggggaatagaagcaatccctctgtggtcctccgcatgtgtatgttcataaatatgtatgcctttttttcaatgaatcttctttttgtcagttgatttctcagtgaaacttcagaaggtgaagagaaagtcttcccctggcctctacaggatcaatccaccattagtcctcaacaaagcatcagataacaggattagcaagtcaagctctcataacaactagttttgtgatcttagggacagccacattaccactatgggccattattttaaattataattttawttttttttttgcagagacagggtctatgttgcccaggctgttctcaaactcctgggttcaagtaattgtcatcttggcctcccaaagtgctgggatggcaggcatgagccaatgggccatttttttaacatcactaatatatgaaaagtaagattatatttgccctattttactggtt

SEQ ID NO: 73835 - DNA, 1472 bp, Homo sapiens
tctgcttgatgcaaggatcagacctgccttgagctttcaccaggttctgcttctctagcatccaaatataggtaggtatagatgtcatcttctggaagaaggcttctctacttagcaggtaacaaaggtaaaaaaattattcatatacccttaaagctaaatcatccttgaattctttagtaattagcaaaatcttgttaatcctttgcataaacacagtctagttgtatttttaatacatttaactaataatttgtttcaaatatatgcaaaaaaagatasaagttcttgctatacacttttctttctctaggacctcttcctaaatcttactatccatacagtaaaggctgtaacatttataactcaaatcctgaccttacacatgaataccagacttcatctgattagctacttgacattcccactgggaaatctaaaaagcacctaaattagtaaccaagttcaaaatagaatgatcgatttctccgaacttgcttctcttcaagtttttctcatctcagctagtgaaactaagccagatgctaaagacaaaaacctaggaattaccctcaattatttttttccttcattcctggatcctaggttgcaggtccctgttaggaaagcatgaaaggagatttttgttcaaataacttattagggaccactctatttcaatggttctcaacttgagcatgcatcaaaatcacctggagggcttgttagaacacaaagtcctggaccccatcatctccagaatttctgattaagtaagagtgatggttaattttatgtgtcagctcaactaggccatgtgatgcacacaaacttggttaaacattatttcagggtgtctatgagggtgtttccagaagagcttagcatttgaattggagagagtgagcagatgaccctccccaattgggctagcatcatctaatccattaagggccttaatagaacaaaaagaagtaagaaggttgaagattctttctacctgactgacaagttggtacatcaatctcctacctcaatgttcctgattctcaggccttcagactaaatgaatagctttccaggtctccaacttgaagacagtgtgtcatgggacttctcagcctccataatcaagtgaacaataccttatagtaaagctctgtctctgctctcctactatgtatatatgtttctaaaaataatcatgtgagatttactttcccttactaaactcatgactaaaggaaaaacaagaaattatgtttgaaaggaagcaatggtatttaaggcattaacagttactgtacacattcaatgataagttttgataatttgattgtataaaactaaattttctttacaatgcaatactttttatggtcattaaaatagtttcattgatatatatgtatatatatatatatatgcgcaaaaattgtcatttctggaatatcctcaaactttaatctttg

SEQ ID NO: 73836 - DNA, 1472 bp, Homo sapiens
tctgcttgatgcaaggatcagacctgccttgagctttcaccaggttctgcttctctagcatccaaatataggtaggtatagatgtcatcttctggaagaaggcttctctacttagcaggtaacaaaggtaaaaaaattattcatatacccttaaagctaaatcatccttgaattctttagtaattagcaaaatcttgttaatcctttgcataaacacagtctagttgtatttttaatacatttaactaataatttgtttcaaatatatgcaaaaaaagatacaagttcttgctatacacttttctttctctaggacctcttcctaaatcttactatccatacagtaaaggctgtaacatttataactcaaatcctgaccttacacatgaataccagacttcatctgattagctacttgacattcccactgggaaatctaaaaagcacctaaattagtaaccaagttcaaaatagaatgatcgatttctccgaacttgcttctctycaagtttttctcatctcagctagtgaaactaagccagatgctaaagacaaaaacctaggaattaccctcaattatttttttccttcattcctggatcctaggttgcaggtccctgttaggaaagcatgaaaggagatttttgttcaaataacttattagggaccactctatttcaatggttctcaacttgagcatgcatcaaaatcacctggagggcttgttagaacacaaagtcctggaccccatcatctccagaatttctgattaagtaagagtgatggttaattttatgtgtcagctcaactaggccatgtgatgcacacaaacttggttaaacattatttcagggtgtctatgagggtgtttccagaagagcttagcatttgaattggagagagtgagcagatgaccctccccaattgggctagcatcatctaatccattaagggccttaatagaacaaaaagaagtaagaaggttgaagattctttctacctgactgacaagttggtacatcaatctcctacctcaatgttcctgattctcaggccttcagactaaatgaatagctttccaggtctccaacttgaagacagtgtgtcatgggacttctcagcctccataatcaagtgaacaataccttatagtaaagctctgtctctgctctcctactatgtatatatgtttctaaaaataatcatgtgagatttactttcccttactaaactcatgactaaaggaaaaacaagaaattatgtttgaaaggaagcaatggtatttaaggcattaacagttactgtacacattcaatgataagttttgataatttgattgtataaaactaaattttctttacaatgcaatactttttatggtcattaaaatagtttcattgatatatatgtatatatatatatatatgcgcaaaaattgtcatttctggaatatcctcaaactttaatctttg

SEQ ID NO: 73837 - DNA, 672 bp, Homo sapiens
gcattagtcagagtgttgttttttttttaagcagaaaacaagttatgtcacctctgattctccatgtacttagaagaaaatcaaaccatgattccacagccaacaaggtcccagatttttctggctgaaggcatttgcaactttctatttcttcttcttaaaagcttttcctccaccatcactccaagtcttaccattacctttcctactctgagatacagatgaatgactacttctcctcattcaagtctcaacctgaatgcctttttcacggagacctgcagagatcattctacctaaatcagcttccacacccagtcattgtatcatattttcctgcttttttttttcatcatagcatctaacctttcagaaggtagcaggtttwtttatgtttccctgtttatcatttctccttcctgagaatatgagttctacaaattcagacttcattttgtagttcactgctgtgtttcctgcacctggaagaatgtgtttggcacattgcagatgttggacaagaacttttgaataaatatgttaatgatgttcatggtttaaataagaataatattttactttttagcctccaattgttctacttgcgatagccagatagccagatttttagtcattttattttaggccctgcgtgagcagtttggactagaa

SEQ ID NO: 73838 - DNA, 672 bp, Homo sapiens
gcattagtcagagtgttgttttttttttaagcagaaaacaagttatgtcacctctgattctccatgtacttagaagaaaatcaaaccatgattccacagccaacaaggtcccagatttttctggctgaaggcatttgcaactttctatttcttcttcttaaaagcttttcctccaccatcactccaagtcttaccattacctttcctactctgagatacagatgaatgactacttctcctcattcaagtctcaacctgaatgcctttttcacggagacctgcagagatcattctacctaaatcagcttccacacccagtcattgtatcatattttcctgcttttttttttcatcatagcatctaacctttcagaaggtagcaggtttatttatgtttccctgtttatcatttctccttcctgagaatatgagttctacaaattcagacttcattttgtagttcactgctgtgtttcctgcacctggaagaatgtgtttggcacattgcagatgttggacaagaacttttgaataaatatgttaatgatgtwcatggtttaaataagaataatattttactttttagcctccaattgttctacttgcgatagccagatagccagatttttagtcattttattttaggccctgcgtgagcagtttggactagaa

SEQ ID NO: 73839 - DNA, 548 bp, Homo sapiens
atatgcattaaaatgttggcaactgtttaaaaacacttcagatgccaatctactcaggagggagtaaattttttttttctttttttggagacagtctcgttttgtcacccaggctggattgcagtggtgcgatctcggctcactgcaatcgctgggttccagcgagtcttccacctcagcctcctaagtagctgggattacaggcacacgccaccacacttggctaatttttgtatttttttaatagagacggtgtttcaccatgttggccaggctggtcttcaacttctgacctcaggtgatctgcccgccttggcctcccaaagtactgggattacagacatgagccgttgcgcccagctgggagtaattttttaaaagcccatcatattgagctttgtttatatcgttagtaataataattattgtaaaatwacacctataaattagtaatactcctataaattagtaatactaatttaataaatttaataaattagtaatactaattaacacctatattactaattattgtaataatacaacac

SEQ ID NO: 73840 - DNA, 1771 bp, Homo sapiens
atgaaggtgaaaagtcagagaccacagtggtttgaaagccttttggaccttggcttattagtggaggtgtttcttctattcttctcacttgccaggcaaacagaagagcaatgactggtaaccaggaacacacacatcctgagaggtcagggtactgctccaggctcactcctgggggtgcacctggcacccccctctagcccagtttccacacagaggccccactctctgctccatgacagaagcccaggtgtcagaaccgcagtccctgcttttgagaatttgcccacctcctccatgaagatgcagcctggcctttgcaggggagtcaaaggctggtgtactggtcagtgtcagaaggcctggggtstagttccagctcttcctgagtggtcccagggaattcatttaacctcatagactctcatttcctttggtttaaaattgggctaatgaggccgggcgcggtggctcatgcctgtaatcccagcattttgggaggccgaggcaggcggatcacctgaggtcaggagttcgagaccagcctgaccaaaaagaagaagccccgtctctactaaaaatacaaaattagccaggtgtggtggcacatgcctgtaatctcagctactcaggaggctgaggcaggagaattgcttgaacccgggaggtggaggttgcggtgagccaagatcgcgcgtgccattgcactccagcctgggcatcaagagcaaaactccatctcaaaataaataaaataaaataaatttgggctaatgatgcctctaccttttccagggtccttgtgaataacagtgtaggaaaggtgcattgtgttgtttgcaaatcggcaaataactttatacatgcatgtttctagtacaaatattattttatattatcaatagcaacatattttaaagcttcacaccagaagatgtggaagggaaaccaagtgagggcttttgctcagtgaatgctcaaagatgagctaaactagtggttctcaattggggataattttgtctctcaggggatatttgacatttgactttttttttttttctgagaccgagtttcgctcttgttgccaaggccggaatgcaatggcgcgatctcggctcactgcaacctccgcctctcgggttcaagtgattctcctgcctcggcctccctagtagctgggattacaggcatgcaccaccacgtctggctaattttgtatttttagtagagacggggtttctccatgttggtcaggctggtctcgaactcgcgacctcaggtgatctgctcacctcggcctcccaaagtgctgggattacaggtgtgagtcaccgcacccagtacacattttttttttttttgagacggagtctcactctgtcgcccaggccggagtgaagtagtgtaatcttggctcactgcagtctctgcctcccaggttcaagcaattctcctgcttcagcctcccgagcagctgggattacaagcgtgtgccaccacacttggctaatttttgtatttttagtagagatggggtttcaccatgttggtcaggctagtcttaaactcctgacctcaggtgatccacccacctcagcctcccaaagtgctgggattacaggtgtgaggcactgtgcccggccgactggtttttttgagacagggttaggacaggttagctggaaacagattctatggtctgaaagactggcccacacaatccaactgagtaattctgaaaagaaaggtcaagattttagagaccatg

SEQ ID NO: 73841 - DNA, 537 bp, Homo sapiens
atataggcagtgtgtttatttatgctcactggattatttctataaacttgtgaacmattttgttgtggttgcagctccattgtaccattcagggaaatgaaatataactctatttacccaaattgcctactcatccaatttttaacaactctttcttgctggcttcctctaaatccttctacccagaagcgccttagaagaattttgcttccatacatttattttttttgaaaattctattaaagaaaatatttaaatacagataacattaaatgaaaccatcaattcttccctttatttctagctatgattgtcaacattcactcatgttttgaaaatcaggtgtaaaattggcctatgaagaaggcctgccttccattaaaatgcctcttttatcaatcctgaagccatataccaagagctgactaaacacatcataaaggctgttaattgctgtaggaaagttgctctgtcatttgtaaagctttcttttattagccccagatttctctttagtgaaactcaggtcactgtctt

SEQ ID NO: 73842 - DNA, 2294 bp, Homo sapiens
atcagcaaataagcttttggccttcaaaattaacatttaataggaaggaaggaacacacaacactcaccactccaacgagcatttatcaggcaattggaattagtaaagtgtgaccacataaaaatgggcatttttcaattaataatacaaaaacaaacaatatctgaatccaagaaaagggttggcctgtcctctcctatctggtcctacataatagggaagacacatcaaaagcaccatgttctgtcctgggagctaccgttaaacgggacattaacaaacagaagcttgtctgaaggatagaaaagcttctataccctgacaaagagctgaaagcagcctgtgacaaagagttggaaacctggagacaatttagtttaaagaaaagaggacagatttaaggagttaaggctaaaggaacagctcattagccttcttcaaatattccaaggactgtgataagaatgcagttttccaagttgtgatgggaaaataacaaaaacaaaaaactgtgacaaaacattttagttcttgcatgttttgtggctttttgttatttgtaatacctgctgccttctaagaagggtagattctggtacctggaggcttctttgtttgctgaacaccgggtggctctggggataaaaagaaatgactaaactcactgaataagaatgggagagagttgtaatgactcagagacaggactgagcccaaagagaacaggatccatggagatgtgtagcccattcctatctggggcaaacatttgaagaaagaaaagacccagtacatggcagccgaagggaaactttaagaactacaaaaatataataattttttttcaaaataaattatatggttaaaaaatagtacaaaaatgtttacaataaaatacagttttctaccacactactccttatcctataatgaacctccatttcaggggcaataacttttcaatatttctggttttgttttcttcttttgttttcatgcacaatagttacattttaaatattatacttttatattatctgttaatttataagctttaaaaattgcctattactcttgtgactgtatttaataggtttaaaattcttcattttcctgtaccagtattaacgaaggaattaatgaaatcaactataacctaatagtagtagtaatagaaattttaatattcttttaaagttgctgcaaagtgtgaccccctcccttacactcaagttaaaagagaatatcaacagcctgtcttctctctgtggacagtggaccttatctatactccccaactccacattccttaaagtttattacaggcccagcaagttcctgcacggctgcagggtcacaagactgttaagtttaggttgtaagacatgtttctctcaagatataagaaatattgtaatgctgcctttgtttcttgcttctgcaacttgcttcccacctcacgtagttcctgccttaagatgtttaaaagtaggaaaagccctttgtttggggctcagactttctggacgtatgtccggctgagccagtgatcaccttaatttaataaactctcctgaacctttttcagtctctcctgtgtttgattgttccacaacatttctgggggctcatctgggattggagatggcagattttctgtctcctttgcctgtaggctagagccccaggacgtgggagaccggggtccttggcaccaccgagagtttcagcccggaaggagaattaccttccgtgttccggagccctccctgacagcagaaatggaactggtagaaggagttgcaggacagtcacagaagcagcactcagacatatgaaccatggtaaggtttgggccctaaggcaagacccgtcccataaggacggaaggggactctgatcacctcccagggcatgatgactagtccaacccaagggggttgggacaatgggagaggcccattgattcggacaaaactcacaccctgacacccgacatgggtggggctcatgagtcagtcagaaaggcaaaccgttkcggggacgggggaggtgtgtgaaagtgtgtgaaagagatggtctcgggagagaccaacgcggggcgtgacgtggggaggcacagatctcttagcatggactgtgtgctctgaggagagtgtaggaaaaagcagacctaggacactgcatacagcccataggacaagttccacagctgcagctagctgtgacaggaattaatgcacacttctggctaagcagtgtctgaacctcccgtaataggactcgttctggt

SEQ ID NO: 73843 - DNA, 994 bp, Homo sapiens
cttagccgcttgaatggactatcaccagctagtagcctgcatgaccattgattactataaatagtgataatacaagcaaataaagccaaaatcagtagcagtaggaactacatcttcatttgtaatcatgatcactaataagctttatgagaaaatgatagtagaatatgtagaaatatataaactgagtttaaacagatattttgagcaccagcaacaattatttaaaggcctctttgtataatagcaatgcaaacagttccttccccttaaaatctgctgataagttgttttgaataatgggctgagaatctctgacacactaaattattctttaaatgttctaaacatttcaaaggttcataattttttagtcctcctacgcttatcaagctactcagtcatcaatatgaatctaaccctaaagcaaacaaacaaatgagtaaacaaaaacctagcaagcctgccagcctccctggataccactgcagttttctgggatcttttcttaaggaggtctttcagatgctcattcagtgaccatccatgaggtcaacagtcaaaacagatggatcaattccaatagaggaaattgtataggtactctacaaatgtcttctccaattgtcttttaatcttctatctcagttttcttagctctaaaatggggataaagatagaacctcctttactttgaagaatagatgagttaatacaggtacaacacttaaaagagtgtctgacacatggtagacattygatacatttaatctattttgttacctaattttgtaaccataagttgttctaaatctccagtgatttagccatatgaatacttcagtatgtaaaagtcttttcatgaggtctacctagttgctcttgaaaatattcaaatattctgtaagtaaccgcaagttaagagatagaggtctgtaagtaacacaagaaatctctttattactttatggtcacactatagatacaagcatat

SEQ ID NO: 73844 - DNA, 994 bp, Homo sapiens
cttagccgcttgaatggactatcaccagctagtagcctgcatgaccattgattactataaatagtgataatacaagcaaataaagccaaaatcagtagcagtaggaactacatcttcatttgtaatcatgatcactaataagctttatgagaaaatgatagtagaatatgtagaaatatataaactgagtttaaacagatattttgagcaccagcaacaattatttaaaggcctctttgtataatagcaatgcaaacagttccttccccttaaaatctgctgataagttgttttgaataatgggctgagaatctctgacacactaaattattctttaaatgttctaaacatttcaaaggttcataattttttagtcctcctacgcttatcaagctactcagtcatcaatatgaatctaaccctaaagcaaacaaacaaatgagtaaacaaaaacctagcaagcctgccagcctccctggataccactgcagttttctgggatcttttcttaaggaggtctttcagatgctcattcagtgaccatccatgaggtcaacagtcaaaacagatggatcaattccaatagaggaaattgtataggtactctacaaatgtcttctccaattgtcttttaatcttctatctcagttttcttagctctaaaatggggataaagatagaacctcctttactttgaagaatagatgagttaatacaggtacaacacttaaaagagtgtctgacacatggtagacatttratacatttaatctattttgttacctaattttgtaaccataagttgttctaaatctccagtgatttagccatatgaatacttcagtatgtaaaagtcttttcatgaggtctacctagttgctcttgaaaatattcaaatattctgtaagtaaccgcaagttaagagatagaggtctgtaagtaacacaagaaatctctttattactttatggtcacactatagatacaagcatat

SEQ ID NO: 73845 - DNA, 965 bp, Homo sapiens
atccattgctgggatcctcatcaactcttgcttagatctctttgcctacagatgcaaccacctctcaaatattttctgcactgcctccttctaaatcatgaatctttattacatcatcctccagtttaaaatccatcaataatccccattgcattcaggataaaatcaaaatccttaccatttaaaaaaaaaaaaaagaaaaaaaggagccgttgacgttctttctcttgctgaactgtcttcatctttcattactgctcctcagacccagtctaatactcgcctgtgcacacttacctcacatttcattcctgaagtgtggctcttgctctcatttctgagcttctgcacatgyggctctctcttcttagagccctcccaccttaggcttgcccacatcacctagtaaattgtttatcctttaaaggagcttgcttttgtattatcaagaaaacattctgtaattcaacaactatttattgagtgagttctcatggccacagttcctgcacaatcatctatcaaagtttttatttcagtgcatttcatagtgcgcttccacaactagaaacaaatcttgagatcaggaactgttatgactcactttttatagttttctacccaatagaatgattaggtgaaacatacatcgtgaaggaatgagtgagtggatggatgaatgaatgaatgagtgaaaagggtgtgagtacttgagaatacttaatgtgctaatttaatatctttggttccaaaaagctacatgccctttaataaaaaatatactttattaaaaacctaaaagagctcacttttaaggctagaaattctgcatcaggaagaggcctataaaagagaaattttggagggcaggggacagaaatattttcccagagcacaacatgtgaggcaactgcacactccagcaatggttctgagcaccaccgtgatacctatgtatgtatgca

SEQ ID NO: 73846 - DNA, 1236 bp, Homo sapiens
tctgttctgcagttaatgtttattccaccaattagcactgactgttcttagaatacaacaaccaagcatgttaaagttctgagaaattaaaagaaatggagggaaaggtgaaaaagagttgaaggagggactgatgcccttcctcatttaatgctactctatctgcaggcactaaataaaaagatcccattattggaaacagaatgtgagaaggcctggggaaatrcatgttgaatctcaggccagccaagaatatcagacacacacagaagaagaggacccatctacctttttgtttcctttcaatgagtcgcccatctctcatggtagggcaggtacaaccagaagcaactcattgttccccatgtaatgttgattgaagtgataagctatgggacacttcagttattttttaaaataacagaaatatttcagattcattctctagttggttacacactggaggattttacctgggggccttgaccactaaaccagtacttttcctactgcattagttcaattgctgcataacaaatcaccatagacctagcagctttaaacaacacatgttttatctcacaatttctgtatgttgagaatccaggcatggcttaacgggatcctctcctctggtcttccaaggctacaatcaaattgccagccaggctacattcccatctgaaacttttgattgttcttccaggcttctgtgtttgttggaagggttcagttacttgtggttgtaggactgaggcccttagctcctggaggccagctgcagttccctgaaatgtggtcctcctcttaggcagttcacacaatggctatttgcttcttcaaggccagcaaaggaagtgttctccagcctgctttaggtggagttttacataatatcacataattatgggagtgacctcctatcacctttgccatatcctattggttaaaaagcaggtcacaggttccatctgtactcaaggggagggaattatacaaaagcatgactcattggaggccaccttaggttgtatctgtcatacctactaatttttaattatgaaggaaagggaacctctttccttttaaacattcatgtgaggaaatcaagagctcagagtgaaaggaacaacagtaagattattttgaagacaacagctgttcaactgtcttccagcacttcaggctttgaaaacatcaatgagtgtggaagaatcaagaaaccaatacaaatac

SEQ ID NO: 73847 - DNA, 907 bp, Homo sapiens
tgcaagataaggagcaaagtatattcattctgtgagtaaattagcccccaacagaaactcaaacctacatccagaatgaactaatatttcccttgatggaattggtaaaattgaagttggatgaatcacaaaacagtctcaattcacaaacatttttggtgtttgaatttggaaatagatttggccccagaagttggcacccctaccactgttctgtgagctacatccatcaaagcgaataaaggaaagatgaggaggagacagtggttaacctgtrgactagaatttccagaaaatgtattcatactacaattttaatgaaacctagaaaattagaaaataagatttaaattttaaaacttcatcttatcctttcttcccttgcaataatctttctcttccatatcatctattttctatggtttttcctttctttcctaccataccctatgtgatcatccattgagatgattcttttccttttcatatatctttttctaattgaagtttaattaaccaaaggtaaatttcatagatcttaggtattctgtttgataacttttaagtattgtatatacctatacatcaactacctgaaacaaaagtatttacaacatcccagaaagttatcctgtgttcctcttccagtcaattcctgcacctaccttccataaaccactttatattttctatcacaacagattaatattttgtctaattttgtatctcatataaatgggaatcataacagtatttatgagtggggtctgtttttgcttaacaatgtttttaaggttcatccatgatattgtgtttcagtaattcatttcttttcattactgaggagtattccattgtgtaaagagaccatagtttagttacccattctcctgctgatagacatgca

SEQ ID NO: 73848 - DNA, 814 bp, Homo sapiens
cttctgcatgctgaagcctgttctggaggctgagatatcggtgcagaacacgactgttcatgggtctcggagtctagtggggacacaggtgagtggaagagtgggggtgaagcgtgcatggtggggaaaggggcttaccgccaggccttattagcttttggtgagaggaccagtttcgacattatatccacaaacataaattggaagtgttagaattggaaggacccgaagccgagataatcaatgtacctattccttgtaggacactcctgcagcatcccagtgtgctcctgacttcagggtgacaggcgcatctgatgtccctggtggagaggggaggtatacccatcccttatatttacaggacttggtgcttccatctggagggttagggctctttgaacagttaattctccgtttcctttgggatgtcagcccccttggtaccacctagcagacatctctgaggatgcggcatcctgctgatcatttaagtgaacgcctcctccactagatcacagattccgcaacttaggaactgaggctgatgattctctgctttcccaattcgtaacccagtgtgtgctacaaagcacaagctcaacgaatatgtaaggaattcgcaagtggctgagcgaatgaatgaagcgctcttacacaggactgtatttggtgttcacagctcgtcttttgttttcsacatcctgagctggagtagattgacttctcttcttgagatgacagacggaggcttctatcacattctccctttggataagcccaatagtgtattaaatgcactcctgctctaggg

SEQ ID NO: 73849 - DNA, 1149 bp, Homo sapiens
atgcatgaaacaaaacattattcagtggtaacatatgaagcatatgggtaagattaaaactgaattcagtgagatccagaatacaatattggatgatagagcaaatactcccttggagaaggaatacagtgactttttatagacaacttttagaaaaatctcagtacagtattaatctgagtctacttaaagcacctgacaactatttacattgtaatatgactggttccaggatattttttacttgggtaaagtaagccataaagaaagccagtttacttcggaattcatatataacattccaccttgaccacccaccactctactttttatcactttccctttttattcttagcggtaaacttcctgtgtaagatcttgaagttactacggtttgcatgcaacattcaaggatttcatatgcggactgctttaaggcagctccctcagatctcttcaggatgacttcccagttagtttcaatttctctccctgccttcacactgtgaaagagcatggcatctctcgggaagtctctgtaatgctaccccttcttcagctcttagttaytggtcctgggtgaagatgacttgttccatttttgacccagatacaggctgttggaccctgcatggaaaactaaagcaagctatgccgaaactgtcattatctgaggcaaccagtgctctctggacccaaaagtaaagccttgactaactttgcttttctgttaatgagaaaattctcccagttacctggacattttctttctcctaagatttcatctagggtagggtctgtcttctggcctgtggctacctacttctggctataagtaactactaggaactttcctcctttcattcattcatcatgaatagtgaagtacttaagattgtggatccagtgtcagactgcctagttttgaatccaggttcttccacatattagtcaaatggctttaggcaattttctgggcacaaatgtctctgtctgccaaacggagataagatcctacctacctgatacaaatatcacgagacgaaatagatcgatagattaaaaatgcttaaaatattgggcttacctgtccccaacctcattgtcaagccacaagcaattcatcacttatgctgtgtccgtaacaaa

SEQ ID NO: 73850 - DNA, 681 bp, Homo sapiens
gatcctcagcctgtggtgatgccccagaccctacgttcagatttcttacgcaggggtctgaggagccctcctaggatttggcttcagagggccggagaatcacctaagtgccatcatctggatggtgctacactgcctcctctgtctaaatttctgtgcaagtaccagtaccacaaaaatttgcacctgctagacagccgtgccttcctaacatttagaagctccttggggaacagctgtgtgactttggatgcacaccttaacctctttaagcctgtttcctgctttaccratcctgggcccggcctgctggttatgatatacagcaggtgctcagccatggggtcagggctcggcccacccttctcgtgagtcttgagagccaaggagctacttctgagatcatatctcagtgggcagcgtggatttgattcagggaagccatgcctcaccgagccccgcgctctatgtggaggctggaagtcactcggctgggaaatcgcttgtcctcaagcctcaagcccgagcccactcacggagctgagctaccgcgagggaaattgccctaaatgtgaatccacctacgagcccggggaaagtgactatgatgctcatgagcgaattgcggtagcccttccgtgcacaatgtttcagcttgtctgccttccaatcactcctaaa

SEQ ID NO: 73851 - DNA, 615 bp, Homo sapiens
cctttcttcgcatggcagcccctccttctgttgcagagctgctttctcccacttgaggtgtgtgttgctgctgaacatggatctgctgcacacgtcaccagccagaggtgggcatttgatcaactggagccaatctgtgaatcttgtctccctctcccaccttgacactagcccaagggggcagaaacggctgcagaggagccaagagggaccctgggaaggaaagccactgttgttttgtctggatggtagtgcaaggacactgtgagcctcrcactgctgtctcctgcctgggaatgacgccatcatggaggaaaacagagccaagacatggggtgagggaggagaagagaggaagcaatgcaggttcataatagggtcagttaactcttcagtctactcaatgaatacctttaaaagaatatgcggggctgggtgcagtggctcaaagctgtaatcccagcactttgggaggccaaggtgggaagattgcttgagcccgggagttagagaccagtttgaacaacatggtgaaaccctgtctctacaaaaattacaaaaattagctgggcatgtgtgcctagagtcctagctactcgggaggctggggtggga

SEQ ID NO: 73852 - DNA, 740 bp, Homo sapiens
tggctcatgcctgtaattccagcatgttgagaggccgaggtgggcagatcacaaggtcaggagttcaaggccagcctgaccaacatagtgaaaycccgtttctactaaaaatacaaaaattagctgggtgtggtggcatgcacctgcagtcccagctacttgggaggctgaggcaggagaatcatttgaatctgagaggtggaggttgcagtgagccagactgcatcactgcactccagcctgggcgacagagcaagactccatctcaaaataaataaataaataaataaataaataaataaataaataaataaagcataatccaaatatatgttgttcacaagataaaacatgagctcacccaaaacgtttaaaatttaagagctagaaaacgatacaccagataaatattaagagaatggaagctagcagttgtagctagaaagtagcaatactaataataataataataaaaaaatctctgattgtatcactggactccagcctgggaaatagagtgagaccctgtctcataaagaaaaaaaaaaggaaagaaaataaaataaaaactgatataattcaaggttgcatttatttctctcttttaattctctgcatagcacctatcatttatattttctctccccctctactccacgctagactataaattttgtgagaacagagatcttgtttgttctgttcagtgctgaatttttactgtctggaacatttctttg

SEQ ID NO: 73853 - DNA, 868 bp, Homo sapiens
aaataataaatagagtgaagatccagctctttgaaaagattaacaaaatagagttgttttggggaaatgtgatcaagggaaaaaaagaaagaaattaaaacatataacatttggaattagagagtatcaccacagatagacagcaaactaaaacttttcaaataaagaacttttttttttttttgagacaaggtctcactcactcccatcacccaggctggagtgcagtggcatgatcacagctcactgcagcttcaacttcctaggctgaggtgattctcccacctcagtctcccgagtagctgggattacaggcaagagccactaagcccagctaatttttgtgtttttcgtagaakggggttttgccatgttgcctagggtggtctcgaactctggggctcaaatgataagtgatcctcccaccctggcctcccaaagtgctgggattacaggtgtgagccactatgcttggccaagaataagtttttcatagtggtagtattctttttttttgtagctcatattttatttttattttttattttttattatacgttaagttctagggtacatgtgcacaacgtgcaggtttgttgcataggtatacatgtgccatgtgggtttgctgcatgatagtggtagtattcttaatagcaaaaaaacaaaaaaacccaagtacatattcatcgatagataaaccaaatgtattacatccaatctgtggaacagatggtgctgtgaaaaagtatcagatagacctttatgtactaatatggaaaaattagaattacatatatagaatgctttaacttgtgggcaaaaggatgggtatgttgttcatctttgcttccatgtacatttaaaa

SEQ ID NO: 73854 - DNA, 868 bp, Homo sapiens
aaataataaatagagtgaagatccagctctttgaaaagattaacaaaatagagttgttttggggaaatgtgatcaagggaaaaaaagaaagaaattaaaacatataacatttggaattagagagtatcaccacagatagacagcaaactaaaacttttcaaataaagaacttttttttttttttgagacaaggtctcactcactcccatcacccaggctggagtgcagtggcatgatcacagctcactgcagcttcaacttcctaggctgaggtgattctcccacctcagtctcccgagtagctgggattacaggcaagagccactaagcccagctaatttttgtgtttttcgtagaatggggttttgccatgttgcctagggtggtctcgaactctggggctcaaatgataagtgatcctcccaccctggcctcccaaagtgctgggattacaggtgtgagccactatgcttggccaagaataagtttttcatagtggtagwattctttttttttgtagctcatattttatttttattttttattttttattatacgttaagttctagggtacatgtgcacaacgtgcaggtttgttgcataggtatacatgtgccatgtgggtttgctgcatgatagtggtagtattcttaatagcaaaaaaacaaaaaaacccaagtacatattcatcgatagataaaccaaatgtattacatccaatctgtggaacagatggtgctgtgaaaaagtatcagatagacctttatgtactaatatggaaaaattagaattacatatatagaatgctttaacttgtgggcaaaaggatgggtatgttgttcatctttgcttccatgtacatttaaaa

SEQ ID NO: 73855 - DNA, 869 bp, Homo sapiens
tacttgatttcagttagtagaaaagagatagtttagaaggaaagaaatcaaattttcattaagcttctcagtcgcaacacaaaatgaaaggccagtgatttttacaaggttctaaagaaaaaatggtgaccttggaattttattcccaatctaattattctttacatggaagacccagttattttcaaatatttaagagctcagaaaatattccacagttattctcattaagaaaagattattcaaggaggtagtagagcagaatgaaaaataaatcagaatgaaaacctcacaaaaggggagacagaatataaaagaaacaggataaacaaggaaacccatctaattgttaaataagtaacttctgataatgtagtgataacatttaatgcaatttttaaggaaagtttcttaataaagaaaggtcagtcttgaagggaaaatcagagcatttccatggaacctgggcgtagggcaagcaaggagtatggtaggtggagaaaacgagaaagtaaaagcrtgacaaagacctcatctggaaaaaagaggaggctattgctatttggttcttgatatcaaaacagaaagatggaatttatatatacacttgtaaaaaaattaaattatgaaaatagatagaggacctagtgctttcataaaactgtagataaaacaagtcaagttccatatcaaaaaacttaagcaattcatgaaaagtcagaaaaggaaaaaaaggcaatttttcaaaacccagaaaataggaagcacacacaaaaatacatccatagtaaatgcaaactggataaattgccttgttggaagatagaatttcacactgggttaaaaagaataaaaattcagctctattt

SEQ ID NO: 73856 - DNA, 1551 bp, Homo sapiens
gggtttagaatttcagtgctgatggccaaggttgaccacatagtttgcaggacccaatgccaaatgaaaatccagggcctcttattcaaaaagcaagggaggccaggcacggtggctcatgcctataatcccagaactttgggaggctgaggtgggagaattgctggagcccaggagtctgagagcagcctgggcaacatagtgaaatcccatctctataaaataaaaataaatattagttgagcttggtggcatgcacctggagtcccagctacttgggaggctgaggtgggaggattgcttgagaccaaaaatttgaggctgctgtgagccatgatcatgccactgcactccagcctaggcaacagcatgagacctgtctctccctcttttttttttttttttttttaaagggcaaaggaaaagtttttgtttcttcggtggtctctctccatctgcaatggtgttttaatttgctatttaatgtcgtgcccccttggagatagggacactcatgaaggaagtatagacactccaggtgcccctgactcagtgtgggaagtgcacctgcccagtccttcctgtgcctgtgcccaggtgcttggttgcagttgctgggtggaggtgggagagaaaatgctgagaataggtgatggggggatgtagagaggtggcggaaggcagggcagcctgtgggcccaggctcttaagctatggtcacaccttccattgtccctagacttcactcataaaacataaattaaaagagaacattattaagaattttaagatgatgaccacagaggattaaacctcagggcgggatccccttctgagggcatgactctgtgtgactgcactggttgggtgcccacaaagccagacctgcttatggcctccaaagtggaggatggcaagagcgaaagaygtggggaacagaggggagctctgcccgcccacagtttctgccgaagtgtcagatggatgaaaggcattttatcactctggattttcagcaggaaccacagctgccaaacggggcagcacagcaagctcctgagtttgttgactctggtgctaactcagagagcttaaagatctgaggcatctgggccatgtctgcaaagacggtgttagcaatgccttaacactatcctgatattttcagcctaacttgttttacttggaagtaaaaaggagaggtaggtggaaagctaattttgcatagaatatttaacaggaaataaggatacaagcctagtaaacctgtattagtccatgttcacactgctgtaaagaactacccaagactaggtaatttatgaaggaaagaggtttaattgacttacagttcagcgtggctggggaggcctcaggaaacttacaatcatggcagaaggcaaaagggaaacaaggcatgtcttacttgttggcagaagagcgagagggaggggaaactgccaaatatgtttaaagcatcagatctcgtgagaactcactcatcatcatgagaacagcatgggggaaaccgatgccctgatccagtcacct

SEQ ID NO: 73857 - DNA, 585 bp, Homo sapiens
aaggttcaccatctgcagcaagttgtgtaatctctacaagcctcagtttccttgtaggtagaatggaactacctcataagttctcacataaatgaggtaaggcyttcacagagtgcctgccacagtgcaagagtttaataataggaaagtcgtcatcgctattgctatctggatgagacaggcctattaaggaaccaagaaaaggactaacaaatatagttttttgtttgtttttgttttgcctactgttgctacctttgaagaacaaatatagattttgacactattaacagaaggcaatttggaagatcaaatgtaagtcttttagtcatccattcctaccaaaagcttgtttcatacaaaattttagtttgtatgaagtgttcttctggtacaactttttagtcaccatgggaattttatttcaacaaagtattaaaccatgaggcatttattttgaatatagttagcaaaaagagtgattgggagctgaagagagataaggaaagtggaatgaaaggcagagagaagaaaagatttgagcaatgcagcttcaggcaagatggggaaggaagaagagttgaa

SEQ ID NO: 73858 - DNA, 1007 bp, Homo sapiens
ccataagttcgacaatatggttataataaaggcagactctccgtccccttggagacaggctggataaatattattcctaatgattattaaaactcattaagtgtgtttggaaggcctgggaattcccagcatctgccactgtctccacattgtagggagccctaacctcaaacacagagcccagtgggagagccggcttcaggaaggagagagagaggccaccacacggtggtcatctccaaggcgggagaacagagcagagccctgagccttctggaaacgccatcccatcattccccacccggaggaattggcctccagctgtgggaaggtcgttgcccctagagacggtcccaggcaagccggaggcatcgaccctgagaccatcctgcaaatcgtgttctttcttctcccttcctcttccttctggcccacgctgaccttctgcaccccaaactcctaccgggggttacaaatcaaacccctgcaggtgccaggcaggcaggtaacataaacgggtgaaaggactggtcggaagactcagtcaggagaagtggggaccagcacagacaggagtggacttgtcctaacggggtggcycaagcaccatcgcatctcccactttccaagagaagttggttgctgagtctttttataagaaatctctcacatttttaaaatgttagtaagttattggatttttaaaaaagaacactgcacgtgccaaacaaaacatatccagagctccccatgtgtgacctttgtctgcaactctcagacaagctgatgggccagaaggacccctgctccatgagctgggagaacggggctttggaagctgcttactcactgcatgatctggagccagtcagctacgggccttccttaagctgttcgagctttgcagctgggttagcaaagaacgggcttggacctgggccaaccaaagcccagggatgctcttcacctgggggtagccaccagacttgagtctgtcccagcggatc

SEQ ID NO: 73859 - DNA, 650 bp, Homo sapiens
cttgctcttggccagtcctcacaagaggaacccgtgggaccacccagaccggcctcctttgtgcccagttggggatacctaagcagataggaaggactcaaccaaggccacagagctagcctgcacaggaccaagcttttcccaccctctccacataccccccactcccacccccagcagctcagctcagggcccaaggagtggcacaggtctcagtcagctctagggacgacctggctggattgaatctctgagctgasctgagaacaggtttccaagcatctggtaaaacactggggcacctgcctctctaatgccaaagttaatcctaggccagcatgattgtttaaccctctcctggtctggcttatgagaacagcagagatgtctgtgaatgtgcagggatggggcaatcacttattctgtaccagtctccatgctgggcaccagggcagaggaaccccatgcagcccctgacccttcccagctcacagtgtgtctggggagatggataagtacaacccagcagcgtgtagggcctttagggggagtacagaggcctgtaggagccagtgggggtggggaggaggtgagggtattccaggcaaagcaaacaggagtcaggatggccagggtggggtggggagatg

SEQ ID NO: 73860 - DNA, 975 bp, Homo sapiens
caacagcagaatgaaagttactctttacttagtgtgtttgaaaccatttcaaaagacttaaaatatcttataacaaactgttattcaagcaaggcagtaaaaattcctacttaaaagtccaaacataatctaaagataaatcacagtacaaaactattccttccggataccacagatggctttctaacactgtctagcttggctgtttggctatttgctttatatttctctgataaccaagtaattttttaaaaggtgtggctttattaaggctaaaaacaaatatactcctatatataactttactaattattttcttcatgatggacaaaacataattacttccttagagtttttctctaatcttctctagattattgatcatttaaaataatcacgagcatctgcttatgtgccagccgcacaccctgaggataaaatggtgaacagggacagttaatatctgcccttaactgtttaactagaaaagactaaagaactatcaagaaataattatccattggttagaattttcataggttaaactattttttatctttgttatgtaggcagagaaacagagaaccgatgaaggtttctgagaatgtattctaaatgtcacctcctttcttaacctgtaaaatcatatagtataactgatctcagaatacacagcagccatttatgtaaaacattccatttccttatattaacatacacagctgagaaatrctgtggggtgctggggaaagcccgagaaccacgatgaataaacctgagttttggtacttgctctgccagtatgtcactatttgaccttaggttaattctctacctttcccaagccagtcactacttctactgtagaatgaagaatctagctaagtaatctctaaggctatttctacttcaaatagtctatgattctgaaaccaccttttgatatttaatatcagattttatttgtacatactc

SEQ ID NO: 73861 - DNA, 919 bp, Homo sapiens
gaaaccaacattaggataatcggtctatctcggtgatactcagcatcacttttcagattcacattctgaggtttggtccttgggaaacagcgttccccttcgatgccaccccctcaattcacttcagtccacagagatggctgactgttcctcctgggataaacagtaagagtgaacacaaggacagacgatgaaggctcacatacacatacttatctactttatttttatcttatttttgtcattaaaaatagaactcaatgcagctaaatgtattgacaagaatactacaattctgaatgagtgaaataaaatactactatctggttttttaaaatatcttcctcactaacaatacttttattaatttgtgtttatctaaatgtgatccttcttccagctttgtactttgtacctaagcataaaacaaacttagaattaacagttatcttacttaaatgaaagtaactgtttggaaaacacacagataccaggaggcttccaggccctgagggtccctgcctttggatactctcttagagaaaaggtatccaggtgctttggaagccaattaggcaagtccaaatcctggctctgccccttctaagcaaagtgaatacagcwgttattaccccactacgggtctcagtgtctcagctgcttcatgtgtaaaagagattcagtttttttcatatggatggaatgggctaatacatgtgaaacacaatagtgcctcgcacatggagaggcctacagaggatctgccttactgttactacctttgttcttactattaatatcagagtactgtgctgtcttactgctatctttactcaacataaaaaggaggaaggaaaaaatcctatcagagagtgtgatccagggacttaggaaaacaaccctgagtgactcacaagtc

SEQ ID NO: 73862 - DNA, 1089 bp, Homo sapiens
tgttcacctcttgcttctctattgttgaatgtaagtcacagtgtaaaatattggcaaagtatcattcctgagataatacatgtggaagcactttagaaaagctaaatcgggtggatcacttgaggtcaggagttcaagaccagcctggccaaaatgatgaaamcctgtctctactaaaaatacaaaaattagccgggcatggtggtgcatgcctgtaatcccagctacctgggaggctgaggcacgagaactgcatgaacccgggaggcggaggttgcggtaagcagagattgaaccactgccctccagcctgggcaacacagtgagattccatctcaaaaaaagaaaagaaaaggtaaatcattttatctacctaaggtaaatgtagttatttttggagcctaattcacatctttattgatagaacatactatcagctcaaactaggcatggcactctgaagcaaccaaactatcctaccttcactataagatatatcgctctaaaagtctacgacagtcctccagatctcagtcttgatcaactacagcacacacactaacacatattgtggccttcttgcatatattcaaatgcttatatacactgctttagctctaattgtccaagggctatttttctaagacaaggtggtaaattctttagggataaggatttaatgtaatatttgtatttcccacaacagagtataaggcttcgcacatcagcagcaatcagtaactagttgttgaattgattaactatcagacattcatgatagtttttcagatattggacctctggaatgacatatgatttgagtagactggtaaaaacgttatctgaaagcatgtacgtttgcctaaaggaaaagaaatgcgtatttatttacttatttatttttatttctttctttaggcaaaaaatacacacacacatatactgtacatacacaaacacagacacattgcatacatatatatatatatacatatatatatatatatatgggcagcaaggctactagttccacttggctctggaaaacaagaacgacacaccattttggaagagaaaagggacgtctaa

SEQ ID NO: 73863 - DNA, 1089 bp, Homo sapiens
tgttcacctcttgcttctctattgttgaatgtaagtcacagtgtaaaatattggcaaagtatcattcctgagataatacatgtggaagcactttagaaaagctaaatcgggtggatcacttgaggtcaggagttcaagaccagcctggccaaaatgatgaaaacctgtctctactaaaaatacaaaaattagccgggcatggtggtgcatgcctgtaatcccagctacctgggaggctgaggcacgagaactgcatgaacccgggaggcggaggttgcggtaagcagagattgaaccactgccctccagcctgggcaacacagtgagattccatctcaaaaaaagaaaagaaaaggtaaatcattttatctacctaaggtaaatgtagttatttttggagcctaattcacatctttattgatagaacatactatcagctcaaactaggcatggcactctgaagcaaccaaactatcctaccttcactataagatatatcgctctaaaagtctacgacagtcctccagatctcagtcttgatcaactacagcacacacactaacacatattgtggccttcttgcatatattcaaatgcttatatacactgctttagctctaattgtccaagggctatttttctaagacaaggtggtaaattctttarggataaggatttaatgtaatatttgtatttcccacaacagagtataaggcttcgcacatcagcagcaatcagtaactagttgttgaattgattaactatcagacattcatgatagtttttcagatattggacctctggaatgacatatgatttgagtagactggtaaaaacgttatctgaaagcatgtacgtttgcctaaaggaaaagaaatgcgtatttatttacttatttatttttatttctttctttaggcaaaaaatacacacacacatatactgtacatacacaaacacagacacattgcatacatatatatatatatacatatatatatatatatatgggcagcaaggctactagttccacttggctctggaaaacaagaacgacacaccattttggaagagaaaagggacgtctaa

SEQ ID NO: 73864 - DNA, 757 bp, Homo sapiens
cccaatccccacaaatgcaaataatattttgggtgttgctgaattacctgtgccttgaaaggatcagctcgctataagaaagcaggatattaaattcagacacagcctccactaacctcaaccacaaagacaaagaagcagcctgaggcatacaagatcaaggaatgaggcccagatgctcagagcaaataattatgaaagaattggaggtcaaaatgaaaaactagccctatgctccctggctgatccctgattttcttctctttactcatttcacttttcctagctgtacaacataccttaatgcccttagggctagcaaatcaacataaccaaaatatttgcaggcatataataattccttcgttcttcattcttagatttgagcacagattcaacacactgatccaataaaagtttttcagaaaaaaagaaagatactttctacattagatttaattattaattayaggacaccttaatttcagagatacacaattgtagaaaacaagtgcgcttttcaggatcaaggaactatggtagtcaattgaaaattagtttccggactgtgagaaccactcttctcaccaattcgctctctcctttactattttctgatggtatttagattggtttataaaaatcctgtatgtcagataggccagacaatgtgtccagaaagtgagctaagacacagatcagaagttcagttaaggaagtgagagaacaaagactcagagccaagtaagatttggac

SEQ ID NO: 73865 - DNA, 667 bp, Homo sapiens
atacctggcatgcagtaagtgctcaaggcgtgggagctactcgtctatcacaggggtagacaaatgttttctttgamgtgccagatagtaaatatttgaggctttgtgagccacacagtctctgtcacaactactcaactgcccaagtacttcatttatagacaatgaaatatgaatgtaataaaagtttcacatatcacaaaagattcttcttttttttaactatataaaaatacaaaaaacattcttagctcacagtctgagagccatagtttgctgaccccatgccagcattcagaaaacctttgcctccactccacaatagccacaaggcaggcttctcaggccatagaccttgtccccagaagaataccctttcccctctaatatctcattttctctcttcagctacaaaatgaaaaaaaaaaatctttgctaagtgtccctactgtgctgaatcttgcaaggaaaatagactacccctttggcattttcaaccctggtaaggggcaaagaacaaaccgatggaaagttgatggccagagcctgcagaatcacgctggctcccaccctccacacacatccatcagaacctggctgcctcctcactagggcatctgcacactctgttgttttcttcccagtgctgcaagattctctccccaat

SEQ ID NO: 73866 - DNA, 667 bp, Homo sapiens
atacctggcatgcagtaagtgctcaaggcgtgggagctactcgtctatcacaggggtagacaaatgttttctttgaagtgccagatagtaaatatttgaggctttgtgagccacacagtctctgtcacaactactcaactgcccaagtacttcatttatagacaatgaaatatgaatgtaataaaagtttcacatatcacaaaagattcttcttttttttaactatataaaaatacaaaaaacattcttagctcacagtctgagagccatagtttgctgaccccatgccagcattcagaaaacctttgcctccactccacaatagccacaaggcaggcttctcaggccatagaccttgtccccagaagaataccctttccyctctaatatctcattttctctcttcagctacaaaatgaaaaaaaaaaatctttgctaagtgtccctactgtgctgaatcttgcaaggaaaatagactacccctttggcattttcaaccctggtaaggggcaaagaacaaaccgatggaaagttgatggccagagcctgcagaatcacgctggctcccaccctccacacacatccatcagaacctggctgcctcctcactagggcatctgcacactctgttgttttcttcccagtgctgcaagattctctccccaat

SEQ ID NO: 73867 - DNA, 897 bp, Homo sapiens
attgatttccctggcatgctccctgcaccatgctcttgctgcaggctggctgcatccttcactggcagccccagttcctttctggtggccttctaagcacagccctccctgtctctgtgctcccatgtcctctgcaaacccctgtctctgcaggctgagaaaagggcacagtgccctactagaaccagtccttggtgttgacctgcacgttcctttgcacatagtcttatttgttaatttttcccctgattttcccaactcatgtatgtcgtctgtttcctaccagggtcctggactatgaatcaactgttcttaaccgcgatgataggagggtggakgaacccagatactgctccccaggcaggggctgtgtatcaggtgtttgacctttgtgctggctgaacccatcagaatactgttagtgacctggacatcttaggccagctactgcatgctgctgacaaagtggggcactaataatgtcaccagcgatgtcactgtagcagacaggaatctcaggccacacaatcaggtgccagaaatgcacgtttctactttcctaagtgaatgtatttctacttcaaatccccattgtgctgagtggtaggaacttggtttcatctgattctaggtcatctcgtctcaggcagttcagcgatttctctgccatttttcgaggccatatcaattccaaggtccaggaagaagggcctctggtcctctggttgcacctgtttctgttgcgccttctgagataaacgtgatctccccagcccttggtaattaattcatggtgatcgatgctgctttgtttctttgactcttagctccagggccagctccggctgagctgctcccaggtcactctggagccccaggaaaatcctgtagtataaa

SEQ ID NO: 73868 - DNA, 897 bp, Homo sapiens
attgatttccctggcatgctccctgcaccatgctcttgctgcaggctggctgcatccttcactggcagccccagttcctttctggtggccttctaagcacagccctccctgtctctgtgctcccatgtcctctgcaaacccctgtctctgcaggctgagaaaagggcacagtgccctactagaaccagtccttggtgttgacctgcacgttcctttgcacatagtcttatttgttaatttttcccctgattttcccaactcatgtatgtcgtctgtttcctaccagggtcctggactatgaatcaactgttcttaaccgcgatgataggagggtggaggaacccagatactgctccccaggcaggggctgtgtatcaggtgtttgacctttgtgctggctgaacccatcagaatactgttagtgacctggacatcttaggccagctactgcatgctgctgacaaagtggggcactaataatgtcaccagcgatgtcactgtagcagacaggaatctcaggccacacaatcaggtgccagaaatgcacgtttctactttcctaagtgaatgtatttctacttcaaatccccattgtgctgagtggtaggaacttggtttcatctgattctaggtcatctcgtctcaggcagttcagygatttctctgccatttttcgaggccatatcaattccaaggtccaggaagaagggcctctggtcctctggttgcacctgtttctgttgcgccttctgagataaacgtgatctccccagcccttggtaattaattcatggtgatcgatgctgctttgtttctttgactcttagctccagggccagctccggctgagctgctcccaggtcactctggagccccaggaaaatcctgtagtataaa

SEQ ID NO: 73869 - DNA, 589 bp, Homo sapiens
ataaagaaattaaaaagaaacttgaaaactgagccagtaacatgagagtatttaaaaaaaagcatatttttaaaaaaatcaaatagacgttttagaaattaaamaactcagtgaacagattaaataaaatagatacagttgaagagacaattggtaaactagaagatagatccaaagaaactatcctgaattcagctaatgaaataaaagagaaaaatatcaaaaagagtttaagagacctgaagaataaagcagaaaggtctaccatattttcaaccagagttccaaaaaggagagtagttgaagaggcaatgttaaagagataatgacagagcaccttctaaatggtgacctccatgggcaaagtatattgcagcatcttagtgcttggttcctttggagaataccaggatgatgatcagattcattaaaagttatttgtaataaagaagagatggttcctcaattcagtggctgaactggtctcagaggacctcccaggaaccccagcagggcagcaggtatggatgtcatgaggtagaaaagcttaagttaagtggcttcagaggtcatacctataccatatagc

SEQ ID NO: 73870 - DNA, 589 bp, Homo sapiens
ataaagaaattaaaaagaaacttgaaaactgagccagtaacatgagagtatttaaaaaaaagcatatttttaaaaaaatcaaatagacgttttagaaattaaaaaactcagtgaacagattaaataaaatagatacagttgaagagacaattggtaaactagaagatagatccaaagaaactatcctgaattcagctaatgaaataaaagagaaaaatatcaaaaagagtttaagagacctgaagaataaagcagaaaggtctaccatattttcaaccagagttccaaaaaggagagtagttgaagaggcaatgttaaagagataatgacagagcaccttctaaatggtgacctccatgggcaaagtatattgcagcatcttagtgcttggttcctttggagaayaccaggatgatgatcagattcattaaaagttatttgtaataaagaagagatggttcctcaattcagtggctgaactggtctcagaggacctcccaggaaccccagcagggcagcaggtatggatgtcatgaggtagaaaagcttaagttaagtggcttcagaggtcatacctataccatatagc

SEQ ID NO: 73871 - DNA, 536 bp, Homo sapiens
agtcagaaaggctaaagaatagcacaaaagactgcagctaaaagaattaaataaattttaacatttcttatacttgtattctcattttgatttcaatgattttactaataattagttttgcctccaaaattatttaacagtgattagtatcccttattttccaggctgcacaaattttataaaactttttcttttcaaatttttctcccccaggcctccacagctggatgtgttctgcctgcatggaatcacattagtgcttccgtcatctggtgctatcattcaacccaaatatttttcattcaaaattaaccctgcaccagattcctcattaattatagcaggacgttttggaaaagctgatgctgttctggtatgagatttggactccaagaatagaattagaaaaaawatatatataaagattattattccctacaacattaagccataaatcattccccaagaaagttaaagaatataattaagtaaagtacatatttattatttattttagtaagttttcattttgatat

SEQ ID NO: 73872 - DNA, 796 bp, Homo sapiens
atgaaagtcgacatagaaaaacagcaaaagatgtcaacagactgaactcacacagaggggaaaaaaggaaaaaaacttagacaatgaagggttggctttgaagtggtccattctttattaagctaagggacagcctgaatccctagcatagtttacttaatccaggtccttaaaaagttttggattcgattcagatatggtgagctcctaagcygaacatttccacagctgacatgacttcctggctagtgagctcggcattagaaatgtctgcaggatacagtccacagtggcacagcacagaaaaccggcgctcctccctcctattcccaggctcctgagtgatacaatcaagagggaactgggatttgtaagaaagaaacagaatcgacctcccattgtgaatttagcctctcagtcagattttgagcaaaagtaaagcaacaaaaacaaaagtgccaaggaagaatccagccctttgtgcagtttctctttcagtaaccccttcccagcaggcttggttatcacaatgagaagttagagacaacaaaattagctatctttgaaggctacgtatgttatgatatatgagccaactgaaaactaattaacagttaaaaacgattaggctgtggccaggcacagtggctcacgcctgtaatctcaacactttgggaagctgagacgaggggaaggactacttgaggccaggagtttgaggccgcagtgagctaggagcactccatcctgggtcacaaagcaagaccctgtctctaaaataataataataattaag

SEQ ID NO: 73873 - DNA, 543 bp, Homo sapiens
acattaaacagcaagcacctgacagatggagtgtttataatgcacattatgttggaagaacaggcaaagtctcttgttttacacatgggtgcctttccaccgtaataattaaagtagttttagtaaccaatatgaaaatatttttagccaatttaaataatatgtattttcaaatagtacaaatcatttgctgaaacagacttccgaaaccaaattatgggattagtagtttataactttgaatgtataatcttttacaaatatccattcacgtcaaatattcattctggtacaaatttaagaaccagatatgatatgtaaaatggccatctatggccgcccccagaaattgtcttatactttaagctacttttctcacctttttgctctaaacaacgctggcaaatgaacttccagctttagatgtggcgaagatgggctttttggtcagacacagcagactccaagaaagtggacygggggcctgtaaccccagctactccggaggctgaggcaggagaatggtgtgaacccgggaggcgg

SEQ ID NO: 73874 - DNA, 462 bp, Homo sapiens
ccaaagaaatatgcacaacttcccttcttcatccccccgggggattacatttgcatgaagtctgaaggctctccctgcttctcccacttgctgcttttccattttctctcagaggtctgtttcccctaatttcttgtacacttaatcccattttggcatcagtgtttcagaaaacccaaactaacagagatatttaggttgttttcagattcttattctgtataaccagactaagcytcagattgctccattttgagcactgttttcttctgttaagagcctttgaagaccttgcttttgtcccctgaattaagcccaaacccttctcacctctgtactctgccgcagctcatctttccaatcaccactcagtgttctagtctattccaatgctggactctcccactcctcacttccatgcctaaagaaaacatctacctgactagatgcctcctctattct

SEQ ID NO: 73875 - DNA, 1068 bp, Homo sapiens
ccaatacgctgttttcaggcatgaattacaatgttgttgaccatgagtttaatgttaacaaatcagtaatacagtaaattcagaaaagaggaaatgtgccaatctatatatcaggctgacccaggaagtacgcaagtaacttctattgtattaggattcaagctatatggtaacaactttgttgttgttgtttttgttttgttttgttttgagacggagtttcgctcttgttgcccaggctagagtgcagtggtgtgatctctgctcactgcaacctccgcctcctgggttcaagcaattctcctgcctcagcctcccaaatagctggaattacaggtgcctgccactgccactacacctggctaatttttgtatttttagtagagactaggtttcaccatgttggccaggctggtctcaaactcctgaccttaggtgatccacctgtctcagcctcccaaagtgctgggattacaggtgtgagccactgccaggtcagtaacatcttaaaatatgcagaagatgaaaaaatggctagacttgtggattcactagatgatgaacaataaagatggggtgaaacattgttatgaggttgaaaactaaagaaatttttagtcatgttacccaaggtgaagaaaatgctaaactgttcttggctagtgttttattataaaaaaaataagcactgcatataattatttgtaagaaatatatattcattaagatatctttaaacagaaagacctgttaaaaaagtattaatggttgaattgattggtaaatagtctaaatgttgtgaccagaggttaatagaaaccyagtagtgcatttctcctcagagcaatgacagtatttgatgaacaatcttcatcattcatggaaactttgtataacataactactgtgaatgtcgagaatttcctatagcttgcatttgtccttaaagccccaaagtgagacatataatttcttcttacattttattgtccaaagcaagtcacatgtccattataggcttcaatgcactaaggaagaataattttactaccggtaagggaactggct

SEQ ID NO: 73876 - DNA, 1068 bp, Homo sapiens
ccaatacgctgttttcaggcatgaattacaatgttgttgaccatgagtttaatgttaacaaatcagtaatacagtaaattcagaaaagaggaaatgtgccaatctatatatcaggctgacccaggaagtacgcaagtaacttctattgtattaggattcaagctatatggtaacaactttgttgttgttgtttttgttttgttttgttttgagacggagtttcgctcttgttgcccaggctagagtgcagtggtgtgatctctgctcactgcaacctccgcctcctgggttcaagcaattctcctgcctcagcctcccaaatagctggaattacaggtgcctgccactgccactacacctggctaatttttgtatttttagtagagactaggtttcaccatgttggccaggctggtctcaaactcctgaccttaggtgatccacctgtctcagcctcccaaagtgctgggattacaggtgtgagccactgccaggtcagtaacatcttaaaatatgcagaagatgaaaaaatggctagacttgtggattcactagatgatgaacaataaagatggggtgaaacattgttatgaggttgaaaactaaagaaatttttagtcatgttacccaaggtgaagaaaatgctaaactgttcttggctagtgttttattataaaaaaaataagcactgcatataattatttgtaagaaatatatattcattaagatatctttaaacagaaagacctgttaaaaaagtattaatggttgaattgattggtaaatagtctaaatgttgtgaccagaggttaatagaaacccagtagtgcatttctcctcagagcaatgacagtatttgatgaacaatcttcatcattcatggaaactttgtataacataactactgtgaatgtygagaatttcctatagcttgcatttgtccttaaagccccaaagtgagacatataatttcttcttacattttattgtccaaagcaagtcacatgtccattataggcttcaatgcactaaggaagaataattttactaccggtaagggaactggct

SEQ ID NO: 73877 - DNA, 1018 bp, Homo sapiens
catgcaaaaccaagcacttactctgtgccaggcattgtacttgtttttttatatcaagcaattgaatcttcacaacaaacatacaaagtactatgattatctcaaccattgcagagagacatgaaaagctataactagcccaatattaaacaaactaagagaaggacacaaatcaccaacatatacaagagctacacaatatcagcatttgcagaagaaaaaggagagaggagcaataaggagtctgactggaaatagccaagagttattgactagaatgagcttcagccaactgkagaattgaatctcaaccaccagggattttacccactccattacctggtgaatgcaagagtcactataaaaatggaaggaactgatgcagtctactcacaggaaacctcaacagagttttctttctgggcagggaccaacatggagaaaaaggaaagtgctgggaataaaaccaaaattgcagggattaccacactagctgatgtagctcttaatgtttcttaatgttatattgatatgaagtggcagctccactgacctcacaagtgatcaagcattagtgaaccaagataatttagatttgtgtgtccaaaggatattttgcgtgaaactattagaagcattttgaatacaattgcaagtttggttctatcaaacgtatttactaacattcctatgaaagttcctagtcaaatatgggagactagaagaacaagagcactatattgttcctcaccttgtctctcttctcaaaaaaaaaaaaaaatctgaaagttctcaaagtgtaagtcacttatctgtgtgtcagagttctgagaattcctcattaacagctgcatcaaagaatttctgtcattagtcagctctcagaactggatgtatctacactgaaagaaaattgctcattttcaaagccgttggggctgcacataggagagcacacatattttaaattgaaattatgtaaaatttcctctgaatattatagtttacttctatctgc

SEQ ID NO: 73878 - DNA, 516 bp, Homo sapiens
gcaactamtatattctttatttctataattttgttattttaagaatgttaaattaattgaatcatatagtaagtaaacttgaggttgattttaatcactaagtagagttagattgagatccattcaaattgcagtgtatattggtaactgtctgtttttattgctgagtgatattacatagtatgaatgtaacacaacttgttaaatcattaattttattctttacatattaaaatattgtattattttgggtaaatttcatgttctaatgttatttttattgtttgagtagaaattatctactttattccatcttctaaactctgtctcaaaggagatcactaactcattaaattttcgcattttgactttgagcttatttgttaaaagtgttggttgccatgggatgcccatgtgctttaggcttggaagcatacttacatggtagttttgatagtttcatgcttgttatgtccaataatcttagttttatggttttcatggtatgttgataaa

SEQ ID NO: 73879 - DNA, 1744 bp, Homo sapiens
tataatagaattgtgaacaacagaaggcaatgaaaataaaccaaatatcaagatattgattaacggggagcaggacaaaagataggattggggaagcccacagggaactttaagggttttaggcatttctatttcttcagtcaaatggtggattcatggggtttattaaataatttacatgtatattacatattttaagtgtacccagcattcaagataaagttttaagactctcccaccatccttttaaaattagtttattggggaacmcttcccttcccacccctggattaaaatgctggcaggcccatgactttgctggtcatttctacatggtagatattcctacagtcatcttatttgactgaaatcagaaattagggcatcttcaacgttcatccaatgttgagatctgtttccctcacttcctcccaccaggcacgtcacagtatgccacctaggttctactcctcttctctacacttccctccacagccaacccctgcagctcctaacaaatcctcctctgagttggagcatgaggaggggggagaggaaagaaacagaatgacctcacttgatggagaaaatcataagctgattttgagcttactggacatggcaaattctagacctgactccctcaaggatccctttgggggtctctgcaagaactcaacagtgacagccatgtggtacgccatgcatttccctccattgcctcaatgccccctcttcccagtttcccagtggtccactgcacagggattctgctggaccactgatagaccatagccctctggcctgtgcaatccacatctgctccacaggaaacattcatgtctccttgtcccaacttcattctctcttgtcctgtccagaacagctcactggcccagcctgctttccttcttgatttcggagctggaggatggagttcaggcttgcatgtgctagaaggtcctcaccctgggagttagcacccagggccattggacaggtctgtcctgtttagccctgtacctcatgctgcttctcctcaatggcattataccagcacagcaactatcatgagtacgcaacaacttttgacctcatttatgaaatggggagaatattacctgcttcactgaggcaagcatcatctggatacaggggtgaaagcaccacacgaatacaacttgcctttactgttaggattatagttcctccttgactaccttggagattatgttccagaaaataaccgtaggagacaggatcaaggtctcttagaaaataacacagaattaaagagaaaataaaatataattgaaaggtcacaggaattcatagaaggtgattgctactaaaacattaataaatgttatatttgggtaatgtttttcaaatgccaacttgaaaaaaaaaagtaacccatttcctgaataatcttctttagctattcagaaaatattgctactacgtatggtctagggtagagttaccccataaaatacaagaaaccagttaatttgaacttcagataaaccatgaatattgctttagtataagtatgttctttgcaatatttggaaaatgtttgtgcagaaaactattcgttgcttgactgaaattcagatgtcactgggtgtcctgtatttttatttgctaaatctggcaaccttagtctaaggaggaagtttcttttacaacttttatgttatgcaaattgagtctcctaggttttcaagtcagacttcac

SEQ ID NO: 73880 - DNA, 1744 bp, Homo sapiens
tataatagaattgtgaacaacagaaggcaatgaaaataaaccaaatatcaagatattgattaacggggagcaggacaaaagataggattggggaagcccacagggaactttaagggttttaggcatttctatttcttcagtcaaatggtggattcatggggtttattaaataatttacatgtatattacatattttaagtgtacccagcattcaagataaagttttaagactctcccaccatccttttaaaattagtttattggggaacacttcccttcccacccctggattaaaatgctggcaggcccatgactttgctggtcatttctacatgrtagatattcctacagtcatcttatttgactgaaatcagaaattagggcatcttcaacgttcatccaatgttgagatctgtttccctcacttcctcccaccaggcacgtcacagtatgccacctaggttctactcctcttctctacacttccctccacagccaacccctgcagctcctaacaaatcctcctctgagttggagcatgaggaggggggagaggaaagaaacagaatgacctcacttgatggagaaaatcataagctgattttgagcttactggacatggcaaattctagacctgactccctcaaggatccctttgggggtctctgcaagaactcaacagtgacagccatgtggtacgccatgcatttccctccattgcctcaatgccccctcttcccagtttcccagtggtccactgcacagggattctgctggaccactgatagaccatagccctctggcctgtgcaatccacatctgctccacaggaaacattcatgtctccttgtcccaacttcattctctcttgtcctgtccagaacagctcactggcccagcctgctttccttcttgatttcggagctggaggatggagttcaggcttgcatgtgctagaaggtcctcaccctgggagttagcacccagggccattggacaggtctgtcctgtttagccctgtacctcatgctgcttctcctcaatggcattataccagcacagcaactatcatgagtacgcaacaacttttgacctcatttatgaaatggggagaatattacctgcttcactgaggcaagcatcatctggatacaggggtgaaagcaccacacgaatacaacttgcctttactgttaggattatagttcctccttgactaccttggagattatgttccagaaaataaccgtaggagacaggatcaaggtctcttagaaaataacacagaattaaagagaaaataaaatataattgaaaggtcacaggaattcatagaaggtgattgctactaaaacattaataaatgttatatttgggtaatgtttttcaaatgccaacttgaaaaaaaaaagtaacccatttcctgaataatcttctttagctattcagaaaatattgctactacgtatggtctagggtagagttaccccataaaatacaagaaaccagttaatttgaacttcagataaaccatgaatattgctttagtataagtatgttctttgcaatatttggaaaatgtttgtgcagaaaactattcgttgcttgactgaaattcagatgtcactgggtgtcctgtatttttatttgctaaatctggcaaccttagtctaaggaggaagtttcttttacaacttttatgttatgcaaattgagtctcctaggttttcaagtcagacttcac

SEQ ID NO: 73881 - DNA, 2249 bp, Homo sapiens
cattccacgtgtaaatgaaatcatgcagaagttttaccaattctctcaggatcttgcttatgtaatttggtgaacttccacttcagcactattgcaaaagccaggaacaactttgagtaaaactctgagtgagattttattttacttgcaatggcggtgaaaatggtatccagtattttccaagggaatgccaatacagtgtttacaagaaggaagcagaggacttgaaaacagagagagattacagggatccagaaaatcaggatacatcagatcaaactataataaacaactttcccgtgtttccagatgttctggatcatagatacagtctcctttctcagattcacaactggggcctaatcctttaagtttaatcaatacttcatcagaaaagcgtccttgagggtgaagaaaaacattgagtatattacttgaatatctgtattattcaaaaattagcttatcatatgttttttgatatcctgaaatttgtgtttagggttcaaaatagaggtgcaaattgtatcaagcaaaataaaacttgagattgctgctctttcatttttctttcttttcttttcttttcttttttcttttttttttttttgagatctgcagcttctagttttctaccctgacctcaatacaattatggggagggtttgaggggagagtctgaaatttctcattcactaaagctacatcattcctgagagctcaaaaatcattttccagtctgatgttctatgttattttctttttgtttttgttttcacaaagtcgactggtaaaatgatgagaagacaccaaagagtaactttaggattttgcagcctcaaaggccgagagagattgccagcaatttgaatctgatcctaaagagtagatgtgcaatgggctgggttcttgtggccggccccgggcgtctgacgtgtctcaccgttacagagagctggtctgcattgtccgggcatggccaggattcagagaggggaaaaaggaagctctgtttagtgtaatctaaacaccagcacaaagctgcaggtgtctgcccagagaaacacaagtaccatttctcttaggcacaggaagtcttcttcagacttgtttaaagaagaaagaccaggcagacacctcaacaatgatgatacgttatgtcttaaagggagtaaagtgctagtgaatgtaaatcttcccctcctcaaatcctttctttttcctcttcaaattgctgtttctaaacattatcctgacatacaaactggtttaacttgacatccataataaaaacatatttatctgaataaatttcaaatcaatgacacttttgcgtgcacctgatgcattttgctctgggtaggttgatactgttcaggcacagcctccacagactttctttcctatagcttctttctccacttccctcctcatttcccactcctgccaccacggcctccaccacaatctacaccacacttacattctggctttgctcctgtagcattaaagcatttgtattggcattgtaggttgtcttaccactttaaatgtaaaggagacagtgaactagagcaaaggagaatgggagagttgatttcgttcccctacctaccaaggaaagagaaagaatagccagaggaaatgaggtcttctgaaactcaaaaatgggattcgagaacaatgcagccttctggaaactgtggagtgttaagggaagttatgctctgtcacaggaagggtgagtgaggcactgtgccttgtgagacctctggccaggctctgtggcagctgyaggtggggcagcaacctgggaaacaagaggtgacttcacttggtagcactcagacttggattgaggaagatcggaggcccaccactgagttgtttgtattaaaaggtgtgcattaaagggggccaaatcgttgactatggcttgacttttaaattttaagaagctgaacttgaagcttattgtcctctcctccccctcctcttccctctccctccttccttccagagaactggtagagtttattggttaagaacatgagatctggtttgcatgcctgtgctgacaagttctagctatgtgcttttaagcaagacacggatccctctatgtctcaattatctttcctgtaaaatgtgggcaatggtagtagccaccttgctaacgtttgccattaagattatgatatgactttttaatctttgggagtgaaactcttctttcagaagtacaagat

SEQ ID NO: 73882 - DNA, 700 bp, Homo sapiens
tactaaaaaatacaaaaattagccaggcatggtggcacatgcctgtagtcccagctactcgggtggctgaggcagtagaatcacttgaactcaggaggcagaggttgtggtgagccaagattgtgccactgcactccagcctgggtgacagagtgagactctgtctcaaagcaaaaaacacaaaaacaaatggacctaagcacagggatagggtgttttgaagtttgaactactggttgtttgggaatcaaagtccttgtagtacattcttagtaaaacagattatgaaragaggactgaaatttagcagaggtccaggattacacaaaccagtgggtatacattgctttgacatacagaagacaggagagaaataattagccaaagatttaagaaataaagatcagaatatccttccagttgtatgaggaaaaaaagaaacatgtaataacaatgatagttacctcctgcatttatttatttatttacttttgcagccattttcatgatttttattagaggttgacagaccttcacaatacaattaggaataacttgggaaacaatgcttttcaaatgcttttagtagcaaagcattttttggacaaatggatgattgccctcccttagagctttagtattttcatatttttctactttattacatctatgtccatatgtcaatcacaaacaactataa

SEQ ID NO: 73883 - DNA, 657 bp, Homo sapiens
ccactctcatccttaatctctctgccaaccttggagttgaaataacctgaaatttgaaattcatgacatataatccctttctatttccaagcaaaaaaaaccctgctggaaaagtttgctcctaaactagccatgttggagccctatcgttttctactgaatttttcttattaattcagaattatgtcctcatgtaaaatagaatttgcctttcttgggcaaaggcagccacatagatacaggttggatatcactctctctgtaggacatgtggtcaagttttaaatacttggtacttggatttaaatgcttgtccttttgggaaagctgagaattattttcatactatgaarttttgacagtgtaaccccagggtctcaacactcctcaaacatcacactaggtaaaaatattgaaatgctactggtaagaatgtccccttttcatgtccagtgtttatatttactacaaatactaggtctctaagacctgggctcctgtactatgcagcgtccccaagaccatgactaaaaccgagcgtgagagtcagtggatgtcggacaggaagggatcccagagtttacctcttcctatctatgtggtttacatgaaaaacatctaaaagccggaaatggaagtaattggcacaaggctgcc

SEQ ID NO: 73884 - DNA, 1270 bp, Homo sapiens
cagcacggtctgtcatggtagtattcatttcaactccactgacttcttccttcctcttccgtggctgttcttcctctctcattgctctctctggggacttccatgcaggacatccccggattaggtgacgacggttatggaacaaagactctgagtaagtttccaggaatggtcactgtaacttttcttttcttttcctttccttttgagtttggcttttgttccttttcctgagggcctttcactcctagcatgcacaagatacgagttttatttgttacctagctgtgaatgctcctacaaagtaactttcgatcgttttgttctgcatgtcagcatttaaaagcaaaatgtatcaggcacyctaacttctgttgcagttaacaccatccctttctgaccatgtgatattatcaacatggtcctgatgcccaccatagcatcacttgctctgccgcttaatacctccatagagcaagaaaccatgttgaaagaaagggtgagctaagtgttctagaacagcaaaacagaaatgtactttatgttctttcttctgccttttcacatggaaatatttaatgaccttgtcaaatctcataattgggttgcactttgctgttagtaaaggagctgtttcgtagtcaaaaggaacatgcattctctaaaagcaaattttaagctactggagattccatgagtatttatttatttgttattaactttgatttttttttctgacttgcggtgatcctgcttgaaatgtttaaagtttggatatgtaataatatgcctatcagtgatttattagctacattataaaatcaggtcttcactttatagcatagagtgaaaaagaaaatatattaagcctttacattttctaattgttcatgtatttagtctgtatctgattgcactaagcaactaaaaaataattatcctgtgtcttaatatactacattatgatttttcctctttaataactaaccccattgtgtaggcaccaatgaaatgagaacagagttttgtgtcttttgcaactgtatcacatgtttaattttttttgttttgttgttttaaattaacagctatgggcaatatttttagaagctgtttatttgtataaaacaaaattgcattgaactggactttgttttcaagggctctttctataaccctgagtattgatactcctcataattcaaattgttcatttggagagtttttaaaagatatttatatttttaaaaatctgatcaagagtactgat

SEQ ID NO: 73885 - DNA, 793 bp, Homo sapiens
attattatgtgtttgagtaaagtaggggaaaaatttgtaatgcaagaatgttggcgtccttcagttccacaggaaggaaaccagcaaagaattcaacagatattaaaatgattgcagaggaagaaagagttagtacctatgaaaggacactggactacaaatcaagaggtttcatgttataatcatatctgtcaacaggctaagtgtccttgtataagtcagttaaacagcttggatctcaattttcttgtctaaatacagaaagcctctctctctctctctctctctctgcatgtgtgtgtgtgtggggggsagggttgtgagttgtgcagggtgtgtgtgtgtgtgtgtgtgtgtgttggagcagtagatatcaccaatgtaatcatctcttctttccgtaattattcattgacagtttacttcatcagtgtgctagagagattaaacaaatccctaactttaggaagtccgctgtgtaatgaaagagatagacaagtgacatatcaaaagacaattataatgctaaaagtaaggacaggactaatcacaatatttcacttgggttttcatgcatgaatcctttctatgacccacttaagcttcctgtccacctttgtacccccagtgctgctatctagacatcgaatgataattcattttgtggtataaaaagtgataccatgctggtatatagtcttccaggggattgacagttttataggtacaaaatcttaagcgtatgaagccatggtaatagaattcatacattttcagctagtgtagtcagata

SEQ ID NO: 73886 - DNA, 946 bp, Homo sapiens
aataaaagtataacaatgtgctatttttgaaaaaaaaaattgtcttggtgcacctgctacaaatctgaaggagaggtrtcttaaacaaaacaaacataaaactggcctatcaaaagaggtgagattaaaattaatggtctctctagatcacattttattaaaatttaagagaagattcttagttatttgtttacattccttgccacagcagattcataaccaagtactatctgccctacatttgaaatgtgctcgaaaccctcctcctctctccacttcccatgccgccacctcggtagaaccctcctcaattctcactgaactctcaatagcctgctgacttggctttttccactttgggtgcctcacattcctcataagagttagagtgactcgtttcatctgaagtaataccaaattactcttctacttaaaacgtttcataagagatcacagcacctagaataaaaacctaaaagttatcccttaggacactcaaagccctttgctgaggagcagccccttgcctgcatcctccagcttgtctcctataactttccaggaatgaactagcatccagccacactccggcttcctttctgctccttgaatatcctctgctagttcttgactcatggtcttctccgtagttccttgtgccccagtgcttcctggttctctttgggtgaacttgcatcttctcatctttcagatcaggatgaaacacccactccttgcaggaggatttcttctagaattgtcccatctcctcagtagagatgggacaattcccactcataaaatcctgtttattctttctacataaggtttcatgcccttaaattgcatgagtaggaagtaatacctcaagactattctccattgtttttgtatgatcttatttttaatttaatgtatttgtaattttcttttatacttttggtat

SEQ ID NO: 73887 - DNA, 946 bp, Homo sapiens
aataaaagtataacaatgtgctatttttgaaaaaaaaaattgtcttggtgcacctgctacaaatctgaaggagaggtgtcttaaacaaaacaaacataaaactggcctatcaaaagaggtgagattaaaattaatggtctctctagatcacattttattaaaatttaagagaagattcttagttatttgtttacattccttgccacagcagattcataaccaagtactatctgccctacatttgaaatgtgctcgaaaccctcctcctctctccacttcccatgcckccacctcggtagaaccctcctcaattctcactgaactctcaatagcctgctgacttggctttttccactttgggtgcctcacattcctcataagagttagagtgactcgtttcatctgaagtaataccaaattactcttctacttaaaacgtttcataagagatcacagcacctagaataaaaacctaaaagttatcccttaggacactcaaagccctttgctgaggagcagccccttgcctgcatcctccagcttgtctcctataactttccaggaatgaactagcatccagccacactccggcttcctttctgctccttgaatatcctctgctagttcttgactcatggtcttctccgtagttccttgtgccccagtgcttcctggttctctttgggtgaacttgcatcttctcatctttcagatcaggatgaaacacccactccttgcaggaggatttcttctagaattgtcccatctcctcagtagagatgggacaattcccactcataaaatcctgtttattctttctacataaggtttcatgcccttaaattgcatgagtaggaagtaatacctcaagactattctccattgtttttgtatgatcttatttttaatttaatgtatttgtaattttcttttatacttttggtat

SEQ ID NO: 73888 - DNA, 687 bp, Homo sapiens
gatccagatagtgccaagtgtatccaaattctagggtatcatctcctgaaacctttaaatgcctgggaaggaaatgctctggtctctggcctcctggtatcyagttcaggctataaacattcagccctacctcgaaaaaaatagttttattgtcttttcctctcagggtcagagatattaactacacaaatggccaccgatgtagaccttttagtatctgaggagcctcagcaggctaaagattgtacaggaacactggaaaacacagggaagtgttatttccccatagtatttctcaatattaattaattccacttaatggatctaattatattattaaaaataagagtaataactctttatttaaatatttcatatataaacaacaatgcaaattgttaaatatgagaagcattcaatctttatgcagaaaactgtgatcagttcacacattttttaacacttagcaaacatatttttaaaatcatattaatgtcaaatcaagagctagattctaaatcttgctctaacttttcccgagtgaaataactgttccctttttcctcatttgttcattcattacaagtctgtaatttttaaagaaagaacaaaaacaattatgtaggcagtacaaattaagtagagtgtgtttgcttggctttctatattaatgagaaaaaatagggg

SEQ ID NO: 73889 - DNA, 662 bp, Homo sapiens
ttttgctcttgttgcccaggctggagtgcattgatatgatctcagctcaccacaacttctgcctcccttgttcaagccattctcccgcctcagcctcccgagtagctgggattacaggcatgtgccaccacacccagctaattttgtattttcagyagagactgatgttggtcaggctggtctcaaactcctgacctcaggtgatccgcccgcctcggcctcccaaagtgctgggatcacaggcatgagccatagtgcccaaccagatatggaaatattttgaatgtctttggagctcattgaaatgcttagtacactctctttttatccattagacaattggcttaaatgcttcaggaagagattatgaattgtgacagaggacaacatgataagacaagatccattgcagacccgggcatgacaccagtttatctgtcattagattctgaagttttctatacaatatctcacatgttaaccgtgatagctttcattttatccacatcaactttttaaaggttagcggggattattttaactaaatgtacttgtagaggtctggagatgaaacatttgttgtttctagtttaccaattacttcatgaaaattttctcattaattttaagaaaaggaaaatcatgaccattggctctcactg

SEQ ID NO: 73890 - DNA, 748 bp, Homo sapiens
cagccaggccatatcaatcattttggtcaacatagcaagawactgtctctataaattttttttttttaattagctggtcatggttacttgcacctgtagccttaactagttgggaggctgaggtgaaaggattgcttgagcccaggagttggaggctacagtgagctaagatggcaccactgcactccagcctgggtgacagagagaaactcggtctcaaaaaaaaaaaaaatcaataataagcaaacacttcctcaaaattcattggctatttacagctcttttttttttttttttgccaattttaagtgtgttttgagtagaatttccctacagagtagtatttccactctcacttataatgtcttaaaagcaattgatattaattgcttcactctattagaatgggggcaaaacagtcactgcgaagtgctgatgaagatctacacaactggaactcttaatcgttactggtaagaatgcaaaattgtgcagctacttcggtggccagtttgacaatttcttataaagttaaccaaaccctgaagaagacagtcagcaatcttactcctaggtacttactcaaatgtaatgatgacctgtgttcaaacaaaacctgcatataacatttatagtggctatatttgtaacagtcaagaaatagaacacaataatatactattaatactcagcaattaaaagtaatgaacactgatacacacaataaaacagataaatattaaaatgc

SEQ ID NO: 73891 - DNA, 662 bp, Homo sapiens
ttttcataaaacaattgtaatctgtcttcttcttctttctacctagaagtcactaggccattgctttttatttttattttttttaattaatgaactgcctttttttcatcttctttgttttctttatcttaattcctttactcttataaaggatactaatactatatataagtttgggagttttagtttctaggacatgcttttaaatttttgattgtgtttgtgtgcttcttcaatattctctctggttttataaagcaaaccaagcagaacaattgtcttgcacttcaaattctgctatgttgttagtatagttgaaacacttaagcactttttttaattaatcaacaacaaaaatgratttcattattcttaaaagaagaccagtggactctttaaatttctacctgtaaatatagcagatggttgggaagtcctcgcttctttgtctgggactggaacagcttagtttagtaaggtaaatggggtcattttgtttggtctacaaggcatatttaatagggtcaaggtcatagattccattccacttcaatcagctttgccccttttcatttccatgggctgaatttctaagtacagatatccatccaacaaataaatctatgcacaggccaaaggggaaataatgagaatatggagat

SEQ ID NO: 73892 - DNA, 765 bp, Homo sapiens
atgtcccaaaacaatgtttcttcttccagtgtgacccagggaagtcaaaagattggacacccctggtttgcatggcctgggtatacattttcagcattatcatatgaaacatggcttcaattggtacatgtaggctagctaatttggacactcagcatattaaatctattaacccttcttagagaaaaacactttaaataaatactacagttataatctgcttaatatccacaaaattatgttttcacaggaaaaacaaaggaagttttttcacckgttaaacaataaaattgaaataaagatactgaatagatgtgaaaattgattaaatgatctgtaattaaaaattctttcaatgaggcatggtgctcctttgcttattatcattccatttcagtctaatatttgcatgattttataaacaaaattattgttgattcaaagaaacatcaaaatacattactgtcaaaattagaagctagtaaatgttctttcattaactagatcaatgtgttttaattgtgaaatattaactcaccctcccataattgcctttaattttacaaagatagtttaacaagtactttcttccataaaatacattacagaaattaatagttattatccctatatagtatataaacagaaataatactctttatctttgcttattaattcacgttagataagtaaaaatagatatttgccaacttttcactttcaatattaaacacaatttgaatatttctctcaatagcttgtttc

SEQ ID NO: 73893 - DNA, 1089 bp, Homo sapiens
tcatagctccaccctcagtcttaaacaatatgtcttctactgagaagatttagaatactttgattccaacaactcctgcaaattatcttcagtgacatctgaattgtttaaggtcttcatttaaagcarcagcatcaagtaaaacaaaacaacaactccaagactttcctagtgcttttagttgttgtttaccagccattaacaaacaaatattataaagctgattccagcctaaaagaaatttgtaaaagcatttgaatcctaaaagcataaaaacacgtttgttacttgaactttattatttaaacttcacattatcttagcctttgggagatacaccaatagggatacagatatctttatcacttgctttgaaaaagtagtgaattagttattcctactatgggaaaaatattaatttatgaacttcttcaaattaagtgctaagggaatattgttgacagattgtcatttttatttttgccaggaaataaaaataaaatcccttctttggaacaggaataatttaacctatttgacttaaaaaaaggaaaaaaaaacttcattatatgaaagttgtttattttttaatatataatagaatctttactttcaaaatgataataatcgctacagtgatgttacttgccctagaccagtaattattaaactttttgtactcagaaatttgttataatctttaaaattattgaaaatgtcaaagaaattttaatgtgggtatatctagctatatttaccacattagaagttgcaacaattatttgctatatttatttttaagtcattaaaaataagaataagccaattatgtaacatatttaatatgttttataaaacttgaaatttttataatatgtgacttaatagaagccagctagattctcatgcctgattctgcattcagtttgttgtgctatcactcatagtgtcgtttctgaaaaactccactatacactcatgagaagatgggagtataaaaggaaaataatacaatgtgacttatacatatatgtatcttctttaaaagcaaaggctcctatgcctttgtattttctcttggtcccgctt

SEQ ID NO: 73894 - DNA, 1131 bp, Homo sapiens
ttgatgataattgaactttaaaacatattcaaagcacattgtcatatacaaaacactgacaataaaaataaataccccattagttatacagttttcttatataaacatagtttataatccaagaamattgcagtttgctctgcagattcaggagaaagtcacatggaaattatcatgtccttgtgtaagtgaatgtaacataaaaatcacgttattttaccttgttgtataaatagacttcataaccatgtccagtttgttggcctccttagtcatatctttgctcaaaaatgctttcctatgttgaaacttatattttaaatttaccaggtttattatcttctgccaacttttctaatcttttgaaatcctgtttcatctagaattatatttttaatctaaataacagcaatgtgttgtggcaagatttgcaaaaaaaagtttttctttcaatcttatcagtttaaaaagttgagttgatcctattttttgcagtaattgcaacaggtattttggtatactttttgaagctgagtggaacatttaaatttttttactataaaaattcctttttattgaaaatgagcaagaagcaatgttgggaactaaaattacacagttctgatgctatctgtttataatagagctggagaacatataagagtgtatgtgtgtgtgtggaggtgatattagacagttatcaaataagtaacaacacagacaaaggcatatgccacaagaaaggaacagagtttcactgggtttaccacccaaattttaacctcgtaaaatggtttttgcatttgttttatcctcattttgacatgtcagtctagattagattttctgacctcttttcttatgcacggtaatattaatcattgctgaaaatattttgccaaatcagtggaaggagaatttcaataaaattagtaaggaaaataatagactgaatggagccaaattagttgcttttagtgaaatgacaggtaagacatctttcttcaattagttctatttcttggaatcattcagaacagtgtactggcgaagcaggtccaacaatgtacagcatggcagtgccacttacttgatacagtccaatatgctgctttgtcttagggtagatat

SEQ ID NO: 73895 - DNA, 1131 bp, Homo sapiens
ttgatgataattgaactttaaaacatattcaaagcacattgtcatatacaaaacactgacaataaaaataaataccccattagttatacagttttcttatataaacatagtttataatccaagaaaattgcagtttgctctgcagattcaggagaaagtcacatggaaattatcatgtccttgtgtaagtgaatgtaacataaaaatcacgttattttaccttgttgtataaatagacttcataaccatgtccagtttgttggcctccttagtcatatctttgctcaaaaatgctttcctatgttgaaacttatattttaaatttaccaggtttattatcttctgccaacttttctaatcttttgaaatcctgtttcatctagaattatatttttaatctaaataacagcaatgtgttgtggcaagatttgcaaaaaaaagtttttctttcaatcktatcagtttaaaaagttgagttgatcctattttttgcagtaattgcaacaggtattttggtatactttttgaagctgagtggaacatttaaatttttttactataaaaattcctttttattgaaaatgagcaagaagcaatgttgggaactaaaattacacagttctgatgctatctgtttataatagagctggagaacatataagagtgtatgtgtgtgtgtggaggtgatattagacagttatcaaataagtaacaacacagacaaaggcatatgccacaagaaaggaacagagtttcactgggtttaccacccaaattttaacctcgtaaaatggtttttgcatttgttttatcctcattttgacatgtcagtctagattagattttctgacctcttttcttatgcacggtaatattaatcattgctgaaaatattttgccaaatcagtggaaggagaatttcaataaaattagtaaggaaaataatagactgaatggagccaaattagttgcttttagtgaaatgacaggtaagacatctttcttcaattagttctatttcttggaatcattcagaacagtgtactggcgaagcaggtccaacaatgtacagcatggcagtgccacttacttgatacagtccaatatgctgctttgtcttagggtagatat

SEQ ID NO: 73896 - DNA, 1131 bp, Homo sapiens
ttgatgataattgaactttaaaacatattcaaagcacattgtcatatacaaaacactgacaataaaaataaataccccattagttatacagttttcttatataaacatagtttataatccaagaaaattgcagtttgctctgcagattcaggagaaagtcacatggaaattatcatgtccttgtgtaagtgaatgtaacataaaaatcacgttattttaccttgttgtataaatagacttcataaccatgtccagtttgttggcctccttagtcatatctttgctcaaaaatgctttcctatgttgaaacttatattttaaatttaccaggtttattatcttctgccaacttttctaatcttttgaaatcctgtttcatctagaattatatttttaatctaaataacagcaatgtgttgtggcaagatttgcaaaaaaaagtttttctttcaatcttatcagtttaaaaagttgagttgatcctattttttgcagtaattgcaasaggtattttggtatactttttgaagctgagtggaacatttaaatttttttactataaaaattcctttttattgaaaatgagcaagaagcaatgttgggaactaaaattacacagttctgatgctatctgtttataatagagctggagaacatataagagtgtatgtgtgtgtgtggaggtgatattagacagttatcaaataagtaacaacacagacaaaggcatatgccacaagaaaggaacagagtttcactgggtttaccacccaaattttaacctcgtaaaatggtttttgcatttgttttatcctcattttgacatgtcagtctagattagattttctgacctcttttcttatgcacggtaatattaatcattgctgaaaatattttgccaaatcagtggaaggagaatttcaataaaattagtaaggaaaataatagactgaatggagccaaattagttgcttttagtgaaatgacaggtaagacatctttcttcaattagttctatttcttggaatcattcagaacagtgtactggcgaagcaggtccaacaatgtacagcatggcagtgccacttacttgatacagtccaatatgctgctttgtcttagggtagatat

SEQ ID NO: 73897 - DNA, 1131 bp, Homo sapiens
ttgatgataattgaactttaaaacatattcaaagcacattgtcatatacaaaacactgacaataaaaataaataccccattagttatacagttttcttatataaacatagtttataatccaagaaaattgcagtttgctctgcagattcaggagaaagtcacatggaaattatcatgtccttgtgtaagtgaatgtaacataaaaatcacgttattttaccttgttgtataaatagacttcataaccatgtccagtttgttggcctccttagtcatatctttgctcaaaaatgctttcctatgttgaaacttatattttaaatttaccaggtttattatcttctgccaacttttctaatcttttgaaatcctgtttcatctagaattatatttttaatctaaataacagcaatgtgttgtggcaagatttgcaaaaaaaagtttttctttcaatcttatcagtttaaaaagttgagttgatcctattttttgcagtaattgcaacaggtattttgktatactttttgaagctgagtggaacatttaaatttttttactataaaaattcctttttattgaaaatgagcaagaagcaatgttgggaactaaaattacacagttctgatgctatctgtttataatagagctggagaacatataagagtgtatgtgtgtgtgtggaggtgatattagacagttatcaaataagtaacaacacagacaaaggcatatgccacaagaaaggaacagagtttcactgggtttaccacccaaattttaacctcgtaaaatggtttttgcatttgttttatcctcattttgacatgtcagtctagattagattttctgacctcttttcttatgcacggtaatattaatcattgctgaaaatattttgccaaatcagtggaaggagaatttcaataaaattagtaaggaaaataatagactgaatggagccaaattagttgcttttagtgaaatgacaggtaagacatctttcttcaattagttctatttcttggaatcattcagaacagtgtactggcgaagcaggtccaacaatgtacagcatggcagtgccacttacttgatacagtccaatatgctgctttgtcttagggtagatat

SEQ ID NO: 73898 - DNA, 1131 bp, Homo sapiens
ttgatgataattgaactttaaaacatattcaaagcacattgtcatatacaaaacactgacaataaaaataaataccccattagttatacagttttcttatataaacatagtttataatccaagaaaattgcagtttgctctgcagattcaggagaaagtcacatggaaattatcatgtccttgtgtaagtgaatgtaacataaaaatcacgttattttaccttgttgtataaatagacttcataaccatgtccagtttgttggcctccttagtcatatctttgctcaaaaatgctttcctatgttgaaacttatattttaaatttaccaggtttattatcttctgccaacttttctaatcttttgaaatcctgtttcatctagaattatatttttaatctaaataacagcaatgtgttgtggcaagatttgcaaaaaaaagtttttctttcaatcttatcagtttaaaaagttgagttgatcctattttttgcagtaattgcaacaggtattttggtatactttttgaagctgagtggaacatttaaatttttttactataaaaattcctttttattgaaaatgagcaagaagcaatgttgggaactaaaattacacagttctgatgctatctgtttataatagagctggagaacatataagagtgtatgtgtgtgtgtggaggtgatattagacagttatcaaataagtaacaacacagacaaaggcatatgccacaagaraggaacagagtttcactgggtttaccacccaaattttaacctcgtaaaatggtttttgcatttgttttatcctcattttgacatgtcagtctagattagattttctgacctcttttcttatgcacggtaatattaatcattgctgaaaatattttgccaaatcagtggaaggagaatttcaataaaattagtaaggaaaataatagactgaatggagccaaattagttgcttttagtgaaatgacaggtaagacatctttcttcaattagttctatttcttggaatcattcagaacagtgtactggcgaagcaggtccaacaatgtacagcatggcagtgccacttacttgatacagtccaatatgctgctttgtcttagggtagatat

SEQ ID NO: 73899 - DNA, 566 bp, Homo sapiens
  misc_feature (1)...(566): n = A,T,C or G
cnnnnnnnnnnnnnnnnnnnnnnnnnnnnnnnnnnnnnnnnnnnnnnnnnnnnnnnnnnnnnnnnnnnnnnnnnnnnnnnnnnnnnnnnnnnnnnnnnnnnagaatgtgtcatatttattcactcagttaatatttactgagggcacgtgttatatgcccataaatatgctgggcaatgagaattttatattggttgctacagtcataactaagcacatgtagaattatgccagaaggctggcctaatccagctccatttttcacttcattttccttgcactgcacagatatttgccacctgggggcaatatgtccttcctcttctcattgagagctgtgggagtcaattgaaattcatcagcttttaaagaatgctatttattttgtaacagtctccagaacttattttatgacttgaaaacaaacatcaattatatagaaatataatacttaagaaatgagtaaatatgtcttgaacacctaaatgcactagaactatsaggtgtactgagaggtacaaattcagcaaacatttattaagtagcttctgtgtggcaggcacagg

SEQ ID NO: 73900 - DNA, 1204 bp, Homo sapiens
aagggctgatctagccagtgattaggctggtggacaaatcagtattcatgagatcattgraacagattctggaggactttttgttgttgtttttcaaacaaatctattaggggaaaaccaatgactatatttattacatgctgatacttacattatacatttagtcatctggacacaatgagcagtagaaaataattagtaataaatagagacagcattgtgggaaaaagacaatgtagtggtagaatatttgtgagactaattatgtttataagtaaaatgtattttccatctttttttcagcccattagaaaacgtttgacattgaaaaagcattttcaaatgtaactcatttttgcttgggacactttttattcccaactcatataaattattatttccttcctctccctgttcccttctgcctttattttggcattgttaggagagcagttaaatgtttggtcatgaatatgtgctttgtggctggagtcaatttctgttactttttcatttaatagtgttgtgtcttttcctttcagttttctgtgactttaccaaagaatttttagttgtaattcactttgtgaaaacacttactacttgggtgactctaggttttgcattttatgatcaaaatctgcaagtcaggtctcataaccattccttttttcttgagtgaagcagtcattagatggttcttggccaaaccaaaatactttagaaaatacatttttaaattcttattacagattattcatttgttatgtttcccaatattgcttgccctctttctatatgaaaatgggtaaaaactataaatgtataatagcaattctacaatgatgtttacttatgtttaccaatcagctgctattatcttgaaaatgagtctactgcctagagaactaaagctattcagtgtttacctttgattctgtgtgtgtgtgtgtgtgtatgtgtatatatatatatattcatttatatattccttttatattctaaaaatggtttttaagttgttctgcttcaattaactgtgctctttgattattgaaaaacaaggaaataaacactatagtagtcttttcagaaggttttaattaaaaagttctattttaaattctatgcacctccctcctctctctttcatatcactgttcactaacaaaattctacataaggatgttttatattaatatgc

SEQ ID NO: 73901 - DNA, 1204 bp, Homo sapiens
aagggctgatctagccagtgattaggctggtggacaaatcagtattcatgagatcattggaacagattctggaggactttttgttgttgtttttcaaacaaatctattaggggaaaaccaatgactatatttattacatgctgatacttacattatacatttagtcatctggacacaatgagcagtagaaaataattagtaataaatagagacagcattgtgggaaaaagacaatgtagtggtagaatatttgtgagactaattatgtttataagtaaaatgtattttccatctttttttcagcccattagaaaacgtttgacattgaaaaagcattttcaaatgtaactcatttttgcttggracactttttattcccaactcatataaattattatttccttcctctccctgttcccttctgcctttattttggcattgttaggagagcagttaaatgtttggtcatgaatatgtgctttgtggctggagtcaatttctgttactttttcatttaatagtgttgtgtcttttcctttcagttttctgtgactttaccaaagaatttttagttgtaattcactttgtgaaaacacttactacttgggtgactctaggttttgcattttatgatcaaaatctgcaagtcaggtctcataaccattccttttttcttgagtgaagcagtcattagatggttcttggccaaaccaaaatactttagaaaatacatttttaaattcttattacagattattcatttgttatgtttcccaatattgcttgccctctttctatatgaaaatgggtaaaaactataaatgtataatagcaattctacaatgatgtttacttatgtttaccaatcagctgctattatcttgaaaatgagtctactgcctagagaactaaagctattcagtgtttacctttgattctgtgtgtgtgtgtgtgtgtatgtgtatatatatatatattcatttatatattccttttatattctaaaaatggtttttaagttgttctgcttcaattaactgtgctctttgattattgaaaaacaaggaaataaacactatagtagtcttttcagaaggttttaattaaaaagttctattttaaattctatgcacctccctcctctctctttcatatcactgttcactaacaaaattctacataaggatgttttatattaatatgc

SEQ ID NO: 73902 - DNA, 472 bp, Homo sapiens
gggactataggcatgcgccatcacgcctggctaattttttgtatttttagtaaagacggggtttcaccatgttggccaagctggtctccaactcctaacctctggtgatccgcctgcctcagcctcccaaagtgctgggtttacaggcgtgagccaccatgcccagcctaaaataactcttaaataagtaagtactgtctccccgcaagggtgactattaacccaggggccacccagcagtactgaggggacagacaccccgccctcttacctggccaaagacaaagcagtatagtgtcacacccatggcccaaacatccaaggcctgcaagaaaaagagcttagtgtgagggcacaaggggcggtccagcctccaatcctccagttttcctttrgggaaccacctcttgactttcagcccttggagttggggcgggaccaatcttgtctcctaggctctggggcaggcaca

SEQ ID NO: 73903 - DNA, 805 bp, Homo sapiens
ggaaagagtttccaaagagtgaagggcagtacagtggcttcaagagtccttactgaagccaggcaccgtggctcacgtctgtaatcccagcgctttgggaggccgaggcaggcagatcacctgagrtcgggagttggagacccgcctggctaacaaggcgaaatcctgtctgtactaaaaatacaaaaatcagccagacatggtggcatgcacctgcaatcccagctactcgggaggctgaggcacaagaatcacttgaacccgggaggcagaggttgtagtgagcccagattgtgccactgctctccagcctgggaggcacagcaaactgtcccaaaaaaaaaaaaaagagtccttaccaatagcaggggctgcagtagccatgttaacatgacatttaccagcaacttgaacttcacctgcaaagctctgtggccacattttcagccaaagggaaatatgctttcatcttctgttgctctctgtgtctgagagcaaagtgacctggttaaacaaaccagaatccctctacatggactcagagaaaagagattgagatgtaagtctcaactctgtccccaggaagttgtgtgaccctaggcctctcacctctgtgcctctgtctccttgttgcccaactactatctcagagatattgtgaggacaaattgagacagtgcacatgaactgtcttttaatgtgtaaagatctacatgaatgcaaaacatttcattatgaggtcagactaggataatgtccaactaaaaacaaacccttttcatcctggctggagaatgtggagaac

SEQ ID NO: 73904 - DNA, 1997 bp, Homo sapiens
ttggggcttatttgttccacagcaacaggtaactggaacagagggcaagcctgatgaatgggcacacagactcagcccataccttccctggttctaatgttctcagggagcccggaccaaccctgggagcctcaggaacttaggtttccactggacagttctagaagggctatagaccaaatcaggtaactcaccagaccagccttggaatctatcaaatctaactgctgagctacccartgcattccgatcctcatcacaattctttgactgaaggccgggcgtggtggctcacgcctgtaatcccagcactttgggaggctgaggcgggtggatcacctgaggtcaggagttcgagaccagcctggccaacatggtgagaccctgtctctactaagaatacaaaaattaggtgggtgtggcggtgggcgcctgtaatcccagctacttgggaggctgaggcaggagaatctcttgaacctggaaggtggaggttgcaataagccgagatagtgccactgcactccagcctagataacagagcaagactctgtctcaaaaaacaacaacaacaacaacaaaacaattctatgactgaaagtgactaaaaagctggctttatgccattaacactctgtactttgcagccaatcagaactgacgcagtctgggtgctagctgcttcaaaagcaacccacaccacacttttaccatttccatacatcaactgctgagaatatgaaaatgcacagtgacaggttttaggatcctgcttcaggatttccttttcctggtttggtcactagagttggctatttatctgtttctaaacaatagctattttatcgaatagtttagagaccactattaaatattgtgactgatgaaggatctgtgaatttttttatatatgttctaagagttaccattttgataccttttaaaaaccagcagctttctactatattcatgtaaaacagcatgaataaaaccattttttgatacagggttttatttggctttaaactcaggaaccaagttaattatgccagattgaactttgatttttactaccttttcaaagatattttaaaaagtggattactacatatgatttctttggagcttacatttctttacttcacgaattctatgtcactgttacaagtttccattctgatggcttctgggcctttgtacctttgtttttggtgccttattcctagtatgtttctatcaccttaatgaggccgcagatggagtcagaatgtgaaattacaaataatcactggatccatctactgttttccatcaccttccccactgatgctctgggcgagagagtgatgtgtcacttcaactgtgtgtaatatgtcagacacgtcctacaataacaggcgtcatatttgtattatttttagtttactgtagaaaataatgtcaccgccaaaggtgatgagagtcacgttttgtaggatctgttttcttatacttaaagacagacttctgctacggtaattgccagtattcatggcttcctttctgtgtcagaagagaagggatctgctttctcttggctgatttcacatagcattggtaatagacatgcatttctctttctaaaggggagtaactttttaaacccttcctgattttagcctggcaatgtaagtgtccttaatgtgactgttttgataattaaaaaaaggtatataatttatttaaatcttcatttcctttcttttcagaaggtccccaaatcacagttaactcattcattgacgcattcactcaacaactattcaatgaggcactctctagagaccaaggataaataaggtagccagtctcatagagatatgaggagatggaaattaatcaaataattcaagcaaatggcatcttgcaacttgtgctgagtataatggtgaaaaggcaaatgatggcatgagagcttatagtagggaaatttggcctatttggggagatcagcctac

SEQ ID NO: 73905 - DNA, 510 bp, Homo sapiens
cctgtaatcccagcactttgggaggctgaggtgggtgatcacctgaggtcaggagttcgagaccagcctggccgacatggtgaaaccctgtttctactaaaaatacaaaaaattagccaggcgtggtggcgggcacctgtaatcccagctacttgggaggctgaagcaggagaattgcttgaacccgggaggcagaggttgcagtgagccacgatcacaccattgcactccagcctgggcaacaagagcgaaackctgtctcaaaaaaaaaaaacaccctaattccaggccaaccagcagccctaaaaaattaatcttcgtttggcttctaccaaaagtcatggtctacacaaagccctgcctactagaggcaataaggaaccatgaccaccacccccatttattcaaattacccactggaatgcaccgagtggggtttcaccctctgctgcttgtatgtttctcaacccatgttctaatcccatgcagtcatcattcaggaatccctga

SEQ ID NO: 73906 - DNA, 1398 bp, Homo sapiens
tggtacatgctgggagtatatttctgaagcctaccgacaaacaggctgagagcagttaacggactacagctcccagcatattaggtggggcgcgtaccactctgccycttcttccagttctgcgcctcgccctggagcctggcgcatgctgggattgtagtcctgtagccctttgaccaaagggttgggagtgtttatgagaatacatcttccagcaatcctagggaggcgcacacagcccggtctcttcctccagtgacacgcattgtccctgagactagtgcatgctaagattgtagtcctgcagctctttgaggaaagggctggaagagtttatgagcatatatctcccagcaaacctagggagacgcacacagccccgcctctttttccagtgacgcgcactgtccctgaccccggtgaatactgggatggtagtcctgtagccacgggaccggaaagtctgggagtctttatgaaactacatctcccagcaagtagaaggaggcacccacagtccagtctcttccaccagtaatgggcactgtccccgagctgtgtgcatgctgggactgtagtcttgcagcccggtgatgaaagggctgggagtgtttatgagactacatctcccagcaagcccaccgaggggcgcatggccttgcctcttcctccagggacgcgcactttccctgagtccggtgcatgctaggattgtagtgctgcagccctgtgaccaaaggactgggagcgtttatgagactgcatctcccagcaagaccagcaagaagtgcggagcctcgtcccttcctccagatattagcgcactctccctgagcctggtgcatgctgagattgcagtgttgcagccctgtgaccaaagagctttgttatagttatctgtgaagtattcaacaaattactttacttaattattactggaagccagaacctcagttgcgttcactttttggatattatatgagtgaaattgtataatatgtatacttttacatcgactttcttctatgcaacattatagttatggtattaattcatgatattgcagatagctatagtttgtttatttaattttttttttttttactttgtggtaaagtgtacatcaaattaaccattttagctattgtaagtttgcagctcagaaaaattaactacattcacattgttttgcaactatcattcccattcatagggaccttctttcaacttgcagaaacaaaactctatacccattaaataagctccttgttactcccctcaggcttctaggaaccactcttctacttgggtttctagaatttctttactctaagtatctcataattggaatgattcagtatttgttcttttatgactggctcgtgtcactttgctcaa

SEQ ID NO: 73907 - DNA, 1398 bp, Homo sapiens
tggtacatgctgggagtatatttctgaagcctaccgacaaacaggctgagagcagttaacggactacagctcccagcatattaggtggggcgcgtaccactctgcctcttcttccagttctgcgcctcgccctggagcctggcgcatgctgggattgtagtcctgtagccctttgaccaaagggttgggagtgtttatgagaatacatcttccagcaatcctagggaggcgcacacagcccggtctcttcctccagtgacacgcattgtccctgagactartgcatgctaagattgtagtcctgcagctctttgaggaaagggctggaagagtttatgagcatatatctcccagcaaacctagggagacgcacacagccccgcctctttttccagtgacgcgcactgtccctgaccccggtgaatactgggatggtagtcctgtagccacgggaccggaaagtctgggagtctttatgaaactacatctcccagcaagtagaaggaggcacccacagtccagtctcttccaccagtaatgggcactgtccccgagctgtgtgcatgctgggactgtagtcttgcagcccggtgatgaaagggctgggagtgtttatgagactacatctcccagcaagcccaccgaggggcgcatggccttgcctcttcctccagggacgcgcactttccctgagtccggtgcatgctaggattgtagtgctgcagccctgtgaccaaaggactgggagcgtttatgagactgcatctcccagcaagaccagcaagaagtgcggagcctcgtcccttcctccagatattagcgcactctccctgagcctggtgcatgctgagattgcagtgttgcagccctgtgaccaaagagctttgttatagttatctgtgaagtattcaacaaattactttacttaattattactggaagccagaacctcagttgcgttcactttttggatattatatgagtgaaattgtataatatgtatacttttacatcgactttcttctatgcaacattatagttatggtattaattcatgatattgcagatagctatagtttgtttatttaattttttttttttttactttgtggtaaagtgtacatcaaattaaccattttagctattgtaagtttgcagctcagaaaaattaactacattcacattgttttgcaactatcattcccattcatagggaccttctttcaacttgcagaaacaaaactctatacccattaaataagctccttgttactcccctcaggcttctaggaaccactcttctacttgggtttctagaatttctttactctaagtatctcataattggaatgattcagtatttgttcttttatgactggctcgtgtcactttgctcaa

SEQ ID NO: 73908 - DNA, 1310 bp, Homo sapiens
caccactccttcaaatagcaggctcgtggaaaggggattccaagattctccccctccagctacggcattgctttacaatatttaacattccttgactaaagagcaagtctaaattgcaagtactcctaggaaagggwctggtttagatccatgacagctccctctctgagagaagggcgtgccttactccaccagaccaaacaaaactaaagtgacctctctgctccccccagagaggggcactggggatggtaaaagcatttctgtccctgaacccagggatgaagtagagaaatgccacttaaccatagccaggacccaaagaattgtgagaccaagctacaaaaggctcaagtgaggggctggaaagagtgacaaaaacagaggacagaactgtgagccaccgcacttcatttaggaagtcagtgctaaggtaacaggaaggatcgggcgggctgtcaggggagtggaacgtgttagagaaacaacaaaactgagtggagatgcaaggcaggagactgtttataggtgaattagcagcagagggtgggtggtggctgtgcctggggcaggggtggtggggtgaggaggtgggggtggcattgactttgagggagctcttgcagagggcagccttttaaggtgaagagccagagctctgggtcttaagagttgggaaagcaggttatatttcacatccttccctgaatagagaaattgaatttggtcaagaataggtcctaagaagcagctgtgagcaccccacttttccatcttgttgatgaatatggagtgggagcaaagttgagtgtgggcatctgacaaggtctttatgatcctagatgcacttactataccttcctcctcctcctctgccttggctaatgggctgtgggtacccaccacacagagggctataagacactcattgtggctgatgcaaaagctgggccctgccctcctggccttctaaggaaagtgattattgtttttggcttgtttttcaactatccctttgcccccagcaggactgaacctttccactcttaccatctctgggtcccttcagatcttttatagccttgaactacctgctacaagatttttttctgtcctaagaacggatgtctggtctgtttcctaacattaatcccttccacacggcacagcctcatttcctctagatcagagagatggcttctggattcatctttccctgcaatccagcttctcctcctggggccctcatactgcagactgggatcatcatccaggcttttgcactgggccaggaatttgggagtcatcct

SEQ ID NO: 73909 - DNA, 1310 bp, Homo sapiens
caccactccttcaaatagcaggctcgtggaaaggggattccaagattctccccctccagctacggcattgctttacaatatttaacattccttgactaaagagcaagtctaaattgcaagtactcctaggaaagggactggtttagatccatgacagctccctctctgagagaagggcgtgccttactccaccagaccaaacaaaactaaagtgacctctctgctccccccagagaggggcactggggatggtaaaagcatttctgtccctgaacccagggatgaagtagagaaatgccacttaaccatagccaggacccaaagaattgtgagaccaagctacaaaaggctcaagtgaggggctggaaagagtgacaaaaacagaggacagaactgtgagccaccgcacttcatttaggaagtcagtgctaaggtaacaggaaggatcgggcgggctgtcaggggagtggaacgtgttagagaaacaacaaaactgagtggagatgcaaggcaggagactgtttataggtgaattagcagcagagggtgggtggtggctgtgcctggggcaggggtggtggggtgaggaggtgggggtggcattgactttgagggagctcttgcagagggcagccttttaaggtgaagagccagagctctgggtcttaagagttgggaaagcaggttatatttcacatccttccctgaatagagaaattgaatttggtcaagaataggtcctaagaagcagctgtgagcaccccacttttccatcttgttgatgaatatggagtgggagcaaagttgagtgtgggcatctgacaaggtctttatgatcctagatgcacttactataccttcctcctcctcctctgccttggctaatgggctgtgggtacccaccacacagagggctataagacactcattgtggctgatgcaraagctgggccctgccctcctggccttctaaggaaagtgattattgtttttggcttgtttttcaactatccctttgcccccagcaggactgaacctttccactcttaccatctctgggtcccttcagatcttttatagccttgaactacctgctacaagatttttttctgtcctaagaacggatgtctggtctgtttcctaacattaatcccttccacacggcacagcctcatttcctctagatcagagagatggcttctggattcatctttccctgcaatccagcttctcctcctggggccctcatactgcagactgggatcatcatccaggcttttgcactgggccaggaatttgggagtcatcct

SEQ ID NO: 73910 - DNA, 1310 bp, Homo sapiens
caccactccttcaaatagcaggctcgtggaaaggggattccaagattctccccctccagctacggcattgctttacaatatttaacattccttgactaaagagcaagtctaaattgcaagtactcctaggaaagggactggtttagatccatgacagctccctctctgagagaagggcgtgccttactccaccagaccaaacaaaactaaagtgacctctctgctccccccagagaggggcactggggatggtaaaagcatttctgtccctgaacccagggatgaagtagagaaatgccacttaaccatagccaggacccaaagaattgtgagaccaagctacaaaaggctcaagtgaggggctggaaagagtgacaaaaacagaggacagaactgtgagccaccgcacttcatttaggaagtcagtgctaaggtaacaggaaggatcgggcgggctgtcaggggagtggaacgtgttagagaaacaacaaaactgagtggagatgcaaggcaggagactgtttataggtgaattagcagcagagggtgggtggtggctgtgcctggggcaggggtggtggggtgaggaggtgggggtggcattgactttgagggagctcttgcagagggcagccttttaaggtgaagagccagagctctgggtcttaagagttgggaaagcaggttatatttcacatccttccctgaatagagaaattgaatttggtcaagaataggtcctaagaagcagctgtgagcaccccacttttccatcttgttgatgaatatggagtgggagcaaagttgagtgtgggcatctgacaaggtctttatgatcctagatgcacttactataccttcctcctcctcctctgccttggctaatgggctgtgggtacccaccacacagagggctataagacactcattgtggctgatgcaaaagctgggccctgccctcctggccttctaaggaaagtgattattgtttttggcttgtttttcaactatccctttgcccccagcaggactgaacctttccactyttaccatctctgggtcccttcagatcttttatagccttgaactacctgctacaagatttttttctgtcctaagaacggatgtctggtctgtttcctaacattaatcccttccacacggcacagcctcatttcctctagatcagagagatggcttctggattcatctttccctgcaatccagcttctcctcctggggccctcatactgcagactgggatcatcatccaggcttttgcactgggccaggaatttgggagtcatcct

SEQ ID NO: 73911 - DNA, 2164 bp, Homo sapiens
tgcatactttattcaaatattagcattttaagtaaaatttattttcttcacaattagaaaacatgaaaaggtatatacaatgcctttggtgttttgaatttaagaatcaatgtttgagggacttttgtgtgtgaaaataaatattcatatacatttttagttgtttaatgtttgatgtattacactgctttctattaaacaaaactttaaaaactgattttcttgtgtatctaaatctgggttgtaaatttgtttagcttaactcctgtaacaaatataatatttatttataacttgtatttggttgattcttttggaaaacttggaataccataacatttagacaaaatatttataaatacaatgattacaaaatatgttaaccttatatcacatccagttaaaaatgtgctgataacatggatttcttagtcaagtcacaagagctgggtggtctctcatctggatggctcctggtgagccctggaacatggcggtgtggtccaaggtgatttaaacctgtgccacagattattcagctaagtcctttttgcaatacagttttaagaccctctttcatttaaatttaaatttttgaaacttagtgtccttcctaaaaataaaatgaaatgaactttcctaaagtgttgtattattagtactatctaagtcatcatcctggccttatgaaatattggcattttctactggtgtaacttttattagaagcatctcatcataactagtaggatcatctcaaaggggttrcaacacattagcaggtaatgaaatcaatgtagtgtttcctgaacggtattggatgggtggggggggaaaggaatacacacagacacacagaggaaggggtaaaagagaataagagatatcaaagtgcataacacatggataagtaagtattgttaagtacaactcttgcttcagttacacatatgtgtgtgctgggctgcaatgtaaaaatgcatttctcaatggattgggtcaaaatagttttcaagtcactgacttaagattttatcctaggggatgaggaaattagtctaagtgattacctctttctggtgggatgtttgtttaatctgtcatcttagaaaacactgctgagttcctattttcagttcattattgtatactaccaaagctgctactcaaaggctgagcttatcttctatttgcttgttctgcgtggtgcccactggtccttactgcttttgatatagttatctactttttaaagacagtttagcactcacatatttttgttcaatctttacttctcacacaaacagaaaaaggaaattatgtattctgtatcaacaaagatttaacaaaacatccatgtactacaactgtctacttactaaaatcaagaattagtatcttttttcttcttatattaaaactatcttttcatacgctatttttagcttatgaactgaaagtcttttagagataatttacttcaatgaactattattatttatattttataagcaaattgtcacaacttggtcttagctagctccaacgttcacttacagtctgtaatgtttctgaaagcatccatgatttcagctacaaagaagatacttaggaactattctgttttcccactctgtgacctaaaattgactggttcttcaatggaaatgagatccataactaggcactaagggtatacagaaataattgtggacaaaagtactaatgctatttttgttgcactatattttgagatctctttaaggctctatgttcttactgatttattccaatttaatatgttatactattgcatcctactttttctttttaaatatattatgattgactgttacagactttctgttaaactgacaggaagtttttataaacaataacaacacttacattttgaaagacttgttcccattgttcttttggtccaattgcatctgaacacccaacaacaagttcatctgaatttataccaagatattttccatagccagatttcagggcgattctgtatattaataagacacataaaagttaaaaactgagagaaaattaattatagaacatcaaaacaggacatgtgtatgtgtgtgggtgtgtacatatgtaaaatttcagactggacatattccaagtgttcaaaagatgc

SEQ ID NO: 73912 - DNA, 438 bp, Homo sapiens
tgcatgtatttaaatgccactgaagtgtacacgtaaaaatagaaaaactggcaaattctatattctgtatattttacctccacacacacacaaaaccaatggagaaaaagaaaattaatcaaaattaaaatttcagctaaagacgattagaaagcaataaaactaatgacratttagatgattgagttatagctacaattgttttcagtaaaagaaataatgctttattcaaaatcattatgaacagtgttatgattagcaagtctttcttataaatgtaatagttaataattttaaattagttttattttgtatgttctatgccacgttcaccaagtacacttaatattaaataaaataatttaaatataataactcattaatgttttgcaaatgaagaagaaatttctgggagacaagctcctcaaaattttcacc

SEQ ID NO: 73913 - DNA, 808 bp, Homo sapiens
agtcttccaagggtagacttcactcatggctggtagattacatcaggtgtgcaggcacaggatgggtctcatttcaaatggtaaaaggacaaagtcacaaaccagaagatagcctgtaattaagggccagagtgacacctgggatgccattacaagcttgcttaatgctgagaaggggccataggcagaagttgtcgattccactaccacacacaggaaaagccaaactactggccagcaaattgcactcagaggaataaatgatcatgtttacatttttatgaaatttcccctcttcctcctaccttgcagatggatttgaagccaattttttccaaagctgttttatgttgtattctttcaygcctgtccagttactgcgaaattggaagtctaccatcctttaactgacgtaaatgtgtatgacaatgtcattaactatttattggttgtcaaccatgtaaataaaagtcacttttagaaaatatggttatatcagaattgcagaaagccaaggatgcttcatttgcacacaaggaaacatagaggtaaggttggcatgtggctgtagaactccaacacggtggaacatcagcattaccaaaagtcagcaagtgttgagaggcgtctaagccttaacaacttatatttgtactagaagcaaaatattcttaattgtcactaactctagtatactccaaatcctgactcgtagcaaaccgtatacaaacaaaaagtaaatgtattgcggcaccatgctgaatgaagttcctttcctcagaattctagcccttccaagttccaaaaa

SEQ ID NO: 73914 - DNA, 621 bp, Homo sapiens
agtctctgccatttgctagttgcgttagcttgggagcactacttaacctctctgtgcttccagtttccttatctgaaaataaggaagtagaaataataatagtayctacctcacaaagtgattgcaagaattgaaaaagttaacaagcataaacactcagaattgtgctatttgctatttattattactctttttatggctagttctttgctgcaaatattgtgcaaaaccacagcctatatctgtttactaagtagagagatggatatttttttatcgcgttaactttttcttcctcttctctccatcatgttcccataatggaagaaaatgtactctgtggctggttctgtggccactcagaagtcatggcaacactgaactgagaagtagacctagtgccaggcaaggccaaatgataatataaacggacttagcagattagaaatatgaacagcacataatgaaatgagatttatcttgggaggaaatgcaaactagtttatctaggaagaaatagttcaatatatagtcaacctggaagcaaagaagagtgcatctaagggaggcagagataaggaacaaggagagtgaaggacactggcaggaatatggccagat

SEQ ID NO: 73915 - DNA, 621 bp, Homo sapiens
agtctctgccatttgctagttgcgttagcttgggagcactacttaacctctctgtgcttccagtttccttatctgaaaataaggaagtagaaataataatagtatctacctcacaaagtgattgcaagaattgaaaaagttaacaagcataaacactcagaattgtgctatttgctatttattattactctttttatggctagttctttgctgcaaatattgtgcaaaaccacagcctatatctgtttactaagtagagagatggatatttttttatcgcgttaactttttcttcctcttctctccatcatgttcccataatggaagaaaatgtactctgtggctggttctgtggccactcagaagtcatggcaacactgaactgagaagtagacctagtgccaggcaaggccaaatgataatataaacrgacttagcagattagaaatatgaacagcacataatgaaatgagatttatcttgggaggaaatgcaaactagtttatctaggaagaaatagttcaatatatagtcaacctggaagcaaagaagagtgcatctaagggaggcagagataaggaacaaggagagtgaaggacactggcaggaatatggccagat

SEQ ID NO: 73916 - DNA, 744 bp, Homo sapiens
gatccagggaactgggcccaggccctgcttatagcacctcccagmcctccctttcagtttctgttgaacctaagcctgtaaatgtcaatttcattttgtaaaggccaggcagttgtcagttcttccaggggattcagggagaaggaactcaggatgaggcttccagtgacacaaacattctgcagtattttattgcagctcttcaacttcaacctctccctccttccgtatcccagtctcttctaatacaccatcttcccttgccttagaaattatcagtgaaccagctttttattgggtccaaactggaaatataaccagtttcaaactactcccatgtctggcagatcaagtgtgaagtattaaaaaaagttgtttgggtacaatttcctctttgtcagagactgcttccaaacacaaagttgaccagatcaggtaataagaccgacagagagtgataatttggataatcttactggtgaggaaaatccctatttaaccttaaactttagtgtcaccactagtccagttacttctctttaattctgatggtggcaagatcccagtttaagatgagattcctacatgcccatgcctacccaacagctggatttgaggacatgtcagaagacatttgcatgaaagctaaatgggctcttggaaggaaatttatgtgaggagaaaaaggaactaggcacaaagactttgacccagtggcaaagctgccgagggccacaaataaaa

SEQ ID NO: 73917 - DNA, 1169 bp, Homo sapiens
gtaaccaaaaaccacttgtayccctaaatatgttgaaattaaaattaaaaaaatatatataatttaaaactttaatgataaaattaagtttttaaattaaaatttattcactttatttttaaatgacatttaaaaataatatttttaaatttagaatataattatggaaaaagtgaggaatcagttaacctgaattttattttaaattttgcctcattgccaggtgcagtggcttatgcctgtaatcccaggcataggattggtgggggagagcttgagccaggagtttgagactagcctggggaacatggcaagaccctgtctctataaaaaaattagctagttgtggtggtgggtgcctgtactcccagctactcgggaggctgaggtgagaggattgcttgagtctgagagtttggggctgcagtgagccctgattgcgccactgcactcgagcctgggggacagagcaggacttcatctcaaacaaacaaacaaacaaaaatccaaactgttgccagagtatgaggaaatgttcttattttcccagatttttagttttttctcttacaatgcatgagttgggtttgattaactctcgtacacaccagcatagtcattgctctagaacaggctgtgccatctctggaatggcctattgccatggatgactaatttaactctctcttctctcatacttgccctcttcaacttcactgttcatatacatgctaagaaataaattacagaactaatctggccatggcattcttctagcaattcttgaaggtctccttagggtgtctctttggggaaaaaaatcccagttctttaacatggtgtaggaggctctctatcattgtatgcccttcctctctggtattctgaccactctgattcctgttttgcacccgagtagtgctgaaatatttgcagtttcccagaagcaccgcattgcccctacctctaggaaatttcacttgcacatgtggtcctttttatagggaatgctctgcgccttcttgctgggcttacttattccctgcaggatttccctacttctcttcctggcctcccttctcaaagtttcttaatgtgaggctgtctgtatgtaccacagtcactgaacctccatcttgtgtatctgtgtcactcctcttaggaatttc

SEQ ID NO: 73918 - DNA, 1170 bp, Homo sapiens
taagtcagcaacaaagattctttttgggaaagaagtaggcctgtgccacgaactaccttaaatatttattataatttttgttatctatttaaataaatatgggcctcttgttttggaacaacaaaatcataactgaataatgttgagttttcctcaggccagtcagcatcatttataatccagattatcaggactaacaattataatatttatgatacttagactttgtaaagcttaaaacacgtctagtttctcattggctttctcctgctatgaggagatctcttatttgtcaccaaagcattttcacaataatttttgttttgtcctggcaaaataaccacatggttgtttgaaccatatttcattttaatccagcttttctggtgggtgttttatgaacccatgactatcataggaaatgccaccatctggaagacattctcccaaatttaagtacaaagtctaagtgaagatttattatcccataaataagtagttmagtgtctacatagaatctccctgatatgaaagaagttgttatttataagcaaatctataaattacatctactccattcttcacaaatatagcaacccatttgtttcatttactatacctagatagcttctttttgcatttcttgtgtgaatagtaaaatggattatctgcagtgaaacaatgcttaccagaactttagccacatacctttctggttgccttgttatataagagttgaatcactaaccagttttaaatttcatttaattgtattactttccagtctagattttagaccttcaaaactgcattgagctaaagatggctgcttcagtagtcacaacataattataaattcctcagtgtctggaggaatttgttataaaacttggtattaggtgattttgagaatggactaaagaagtagtctaaatggactaaagaagtaggtcttgttttctgatagcatccaaaccaaagacaagggtaattttatgattaggtacatcaattttttatttaggaatggtaggtgcagtgtaggacgaatgccataattgataaggagaagcagttacttatgttcagtggaagaaagacatgtttgttcagttttgtcattgtacaatgctagtttttcgctgtgctcccatataataatgtgtcatc

SEQ ID NO: 73919 - DNA, 560 bp, Homo sapiens
tttaaatagaaacaaggatcaccaatgattgttttatggttttccatataacagccacttttcaggaagttaaccatttagagcctgtaagtgctgtcgtgatcagtagtacctggacatgtagagccaacacttttttctratatcttcatttctttatatcagggtcaggcaggatttttctttatatacctaaaatatgacattttaaaattcatcctctttccctgcatagtgggattattttcccaaagtattaaagtagttgacccttaatgaatttaagggtctactgttctgagccaacttgctctcaagtcaatttcttaccctttgctctttctactgggtgtgttggagattgaattcttagactgcatttgctaggctattgtgtcatctggcatctgatttggttcagtcactggaagtcattggtgatataacgaatggagggattaagggaaattttcaaggtatctctccttctccctctggggcagcatctctaataatggctgtatctcttctttggatccaacttctcttgaatataccaa

SEQ ID NO: 73920 - DNA, 560 bp, Homo sapiens
tttaaatagaaacaaggatcaccaatgattgttttatggttttccatataacagccacttttcaggaagttaaccatttagagcctgtaagtgctgtcgtgatcagtagtacctggacatgtagagccaacacttttttctaatatcttcatttctttawatcagggtcaggcaggatttttctttatatacctaaaatatgacattttaaaattcatcctctttccctgcatagtgggattattttcccaaagtattaaagtagttgacccttaatgaatttaagggtctactgttctgagccaacttgctctcaagtcaatttcttaccctttgctctttctactgggtgtgttggagattgaattcttagactgcatttgctaggctattgtgtcatctggcatctgatttggttcagtcactggaagtcattggtgatataacgaatggagggattaagggaaattttcaaggtatctctccttctccctctggggcagcatctctaataatggctgtatctcttctttggatccaacttctcttgaatataccaa

SEQ ID NO: 73921 - DNA, 560 bp, Homo sapiens
tttaaatagaaacaaggatcaccaatgattgttttatggttttccatataacagccacttttcaggaagttaaccatttagagcctgtaagtgctgtcgtgatcagtagtacctggacatgtagagccaacacttttttctaatatcttcatttctttatatcagggtcaggcaggatttttctttatatacctaaaatatgacattttaaaattcatcctctttccctgcatagtgggattattttcccaaagtmttaaagtagttgacccttaatgaatttaagggtctactgttctgagccaacttgctctcaagtcaatttcttaccctttgctctttctactgggtgtgttggagattgaattcttagactgcatttgctaggctattgtgtcatctggcatctgatttggttcagtcactggaagtcattggtgatataacgaatggagggattaagggaaattttcaaggtatctctccttctccctctggggcagcatctctaataatggctgtatctcttctttggatccaacttctcttgaatataccaa

SEQ ID NO: 73922 - DNA, 1463 bp, Homo sapiens
tcaaggctcctagatgcgtgctttattccacataatcccaccacagtgagtaaaggggctttatttagttccatatctgcttgcacaaggatcaccatcttctaacacagatgggtgggcacaacctggcctgagctccttcctaacctgccttctgtctttcagttatctggccatcttctcttcctggctactgtggtttctagttctgttcacataaaaatgccagaccaaccttttattctaaattcaaacttctcaggcactgtttggtccttctctgaggctttcaaatctaaaagaaacacataaatgaataaagttgacaggcaaggttaatctttcctagggtttctagggcattttactcaccctacacatcttaaataatacaaaataatatttacatgcaatcaaaggcagcaaacccaaggtgaacactgtaatggtttgccctgttcctccttcaggacagaaagatttatttccacaactattgggagtgctgccagcagatgaccttcagcttacagccctctcagggaactgcctcaggtgcaaacaacttaaagccatgccccctcaggcacccacatccaatgactgatcaacataggggtattaaaaatagagctttccttccctgacctgtgatactctttagggccattccaccttcagagttcctcgtcgggttgactgaggactttaagactatatcacagctcaacttttcccactgtccaatcctgcttctgtctctttccatgcacaggtgctgatcttaaaagtcttccctaataaactttctacatgctgatctccatttcagagtctgttttctggaaaacccagcctatggcaaaatgtaaagcaagaggagagctgtatcccaatcctcctgaaatccaagctcctttttaggtatctcagatcaataggttatagaatttgacttacttctgcttacttagagttagctcttcatacatcatagacccgttaacattaatgttccacatgagaaatgaagaaaggtgtaaggaagggatccagtttcagctttctacatatggctagccagtttccccagcaccatttattaaatagggaatcctttccccattgcttgtttttctcaggtttgtcaaagatcagatagttgtagatatacggtgttatttctgagggctctgttctgttccattgatctatatctctgttytggtaccagtaccatgctgttttggtcactgtagccttgtagtatagtttgaagtcaggtagcatgatgcctccagcttagttcttttggcttaggattgacttggcgatgcgggctcttttttggttccatatgaactttaaagtagttttttccaattctgtgaagaaagtcattggtagcttgatggggatggcattgaatctataaattaccttgggcagtatggccattttca

SEQ ID NO: 73923 - DNA, 1463 bp, Homo sapiens
tcaaggctcctagatgcgtgctttattccacataatcccaccacagtgagtaaaggggctttatttagttccatatctgcttgcacaaggatcaccatcttctaacacagatgggtgggcacaacctggcctgagctccttcctaacctgccttctgtctttcagttatctggccatcttctcttcctggctactgtggtttctagttctgttcacataaaaatgccagaccaaccttttattctaaattcaaacttctcaggcactgtttggtccttctctgaggctttcaaatctaaaagaaacacataaatgaataaagttgacaggcaaggttaatctttcctagggtttctagggcattttactcaccctacacatcttaaataatacaaaataatatttacatgcaatcaaaggcagcaaacccaaggtgaacactgtaatggtttgccctgttcctccttcaggacagaaagatttatttccacaactattgggagtgctgccagcagatgaccttcagcttacagccctctcagggaactgcctcaggtgcaaacaacttaaagccatgccccctcaggcacccacatccaatgactgatcaacataggggtattaaaaatagagctttccttccctgacctgtgatactctttagggccattccaccttcagagttcctcgtcgggttgactgaggactttaagactatatcacagctcaacttttcccactgtccaatcctgcttctgtctctttccatgcacaggtgctgatcttaaaagtcttccctaataaactttctacatgctgatctccatttcagagtctgttttctggaaaacccagcctatggcaaaatgtaaagcaagaggagagctgtatcccaatcctcctgaaatccaagctcctttttaggtatctcagatcaataggttatagaatttgacttacttctgcttacttagagttagctcttcatacatcatagacccgttaacattaatgttccacatgagaaatgaagaaaggtgtaaggaagggatccagtttcagctttctacatatggctagccagtttccccagcaccatttattaaatagggaatcctttccccattgcttgtttttctcaggtttgtcaaagatcagatagttgtagatatacggtgttatttctgagggctctgttctgttccattgatctatatctctgttctggtaccagtaccatgctgttttggtcactgtagccttgtagtatagtttgaagtcaggtagcatgatgcctccagcttagttcttttggcttaggattgacttggcgatgcgggctcttttttggttccatatgaactttaaagtagttttttccaattctgtgaagaaagtcattggtagcttgatggggatggcatygaatctataaattaccttgggcagtatggccattttca

SEQ ID NO: 73924 - DNA, 1634 bp, Homo sapiens
attgcttaatgatggggatacattctgagaaatgcgtcgttaggtgatttcatcgttgtataaacatcatggagtgtacttacacgaatctagacgacatagcctagtacacacgtggggtgaatggtaatagcttattgctcttaagctacaaacctgtatagcatattactgtactgaatactgcatgccattgtagcccaatgttaagtatttgcgtatgtaaacacagaaaatgtaatgtgttgcagtataacattatgatggctgcaacatcaacaacgtgactaggtgataggaatattgcagctcaattatgattttctgggaccacccaagggtatgtggtccatccttgagggaaacattgttatgcagcacatgactatacagtgttgtaccaatagtactgcaatttataatgaacgacaaggaatttgtggatctgataccagtgatctatttatcaggaaacatatcttatgactatcttatcaagcaccatgatgaccatctgagattgtaacagctcattaattaccagtattattgcagtgtcctaattgctccctcctcttctacctctctcattgcatctcctacgttcctactcctcacctgatcactcatctccatccctgctccttctgtgctattcctcaaacatgctaagaccactcccatttcacgacatgactggctacataatatttgggacccagtgcaaaatgacctggggcctcttgctcaaaaattactaagaattttaagacagtgactgctgagcattgaagaaagcacagagtccttctgagaatggggacccatgtgagtatacagatcacaaaccctgcctcatgacctttctacttggtatgtcctctgcctggatcctgggtgttctctcctcagatacctgcaagactctctcactgtattcaggtctttgctccccaggaggccttccctgaatatcttacctaaagagattcgtaacctcttccctcctttctttaccctgaattatctttcttcatagggcccaataactttttataagtctttttgcttattgtctgtttccctccactagaatgcaaggcacaagasagtgggaacttcatcatgtttattgctgtctccccagtgtctagaatagtgcctggcacatagggtacatttcataaatatttgctgaatgcatgattaaatgaatcccatcatttagtcaatgaaagtcaagtagccttgtatattatcttcccttttaaaacatgctcttacgcttcctatacctaaaataaatatggcctcttatgcctcttttccacaaagtgctcatagtgctgcatcatttacagtctacagagctgcataaggaacatgcgaagtgaaaaaggaacaccgtaaacacctgatagtctttagtcttatagagccttataaagccagttcttttagaaaagtcctcttttggaaaacctacctagttttataatcttctacttcaattggtatttataatttaaagccaaaacaaagtgtccaatatctacatggaaaacaagccttttttggttgttgttatatgttatagaaacaagaaagcaatagcctcagaagtttgcacccat

SEQ ID NO: 73925 - DNA, 1634 bp, Homo sapiens
attgcttaatgatggggatacattctgagaaatgcgtcgttaggtgatttcatcgttgtataaacatcatggagtgtacttacacgaatctagacgacatagcctagtacacacgtggggtgaatggtaatagcttattgctcttaagctacaaacctgtatagcatattactgtactgaatactgcatgccattgtagcccaatgttaagtatttgcgtatgtaaacacagaaaatgtaatgtgttgcagtataacattatgatggctgcaacatcaacaacgtgactaggtgataggaatattgcagctcaattatgattttctgggaccacccaagggtatgtggtccatccttgagggaaacattgttatgcagcacatgactatacagtgttgtaccaatagtactgcaatttataatgaacgacaaggaatttgtggatctgataccagtgatctatttatcaggaaacatatcttatgactatcttatcaagcaccatgatgaccatctgagattgtaacagctcattaattaccagtattattgcagtgtcctaattgctccctcctcttctacctctctcattgcatctcctacgttcctactcctcacctgatcactcatctccatccctgctccttctgtgctattcctcaaacatgctaagaccactcccatttcacgacatgactggctacataatatttgggacccagtgcaaaatgacctggggcctcttgctcaaaaattactaagaattttaagacagtgactgctgagcattgaagaaagcacagagtccttctgagaatggggacccatgtgagtatacagatcacaaaccctgcctcatgacctttctacttggtatgtcctctgcctggatcctgggtgttctctcctcagatacctgcaagactctctcactgtattcaggtctttgctccccaggaggccttccctgaatatcttacctaaagagattcgtaacctcttccctcctttctttaccctgaattatctttcttcatagggcccaataactttttataagtctttttgcttattgtctgtttccctccactagaatgcaaggcacaagacagtgggaacttcrtcatgtttattgctgtctccccagtgtctagaatagtgcctggcacatagggtacatttcataaatatttgctgaatgcatgattaaatgaatcccatcatttagtcaatgaaagtcaagtagccttgtatattatcttcccttttaaaacatgctcttacgcttcctatacctaaaataaatatggcctcttatgcctcttttccacaaagtgctcatagtgctgcatcatttacagtctacagagctgcataaggaacatgcgaagtgaaaaaggaacaccgtaaacacctgatagtctttagtcttatagagccttataaagccagttcttttagaaaagtcctcttttggaaaacctacctagttttataatcttctacttcaattggtatttataatttaaagccaaaacaaagtgtccaatatctacatggaaaacaagccttttttggttgttgttatatgttatagaaacaagaaagcaatagcctcagaagtttgcacccat

SEQ ID NO: 73926 - DNA, 703 bp, Homo sapiens
catataccaatatatgacatatctacttctatgccacttaaatttatatttgttgatatcctartctctaggccacattcccatacatggaatacatttgccctggtctttattagattttgaaagtgcattccttgattcatgttttactttctgagaaaggactgtggaatgcaaactgagtggctttaattttatttgagaaaaggcaagaagaaagtgttcttaccaaattcaagcttttattttgcaggtaagcatcacttgtgctgctgcttctgatttataaaagagaaacactattctctttaaaacaacaagtgttaagcaaaatcataaatagctctctacgttttcattcccaattctattggcttggctaatattactggtaatacatacattgattgttacagcactattttggctgcatttaaaacaccacatgaacaatgaacaacagtatcaactaaatatgctataggtgttattatactcttgcggcaaacatcctgaattgaggttcagtgaggaatgagacatcaccaaaaataagtcatcaacaggaccatatcaatgtcaggatttagcttcagcatccagcctaggccaagagatctggagacctttgggagggaattagcattttttaaaattattattattatggcatctagaaattatatgcattctgttacaagaa

SEQ ID NO: 73927 - DNA, 677 bp, Homo sapiens
gttaaaaataaacatttggacttcatcagctgattttccctgaccttcagtttcaaggggaaattttctataaaaatatatttcttcttttctttcttcatattaatctaaagatgtggggaagtcttggcttaataatgttgctggagtttcccagaagagaaaatttccattgcaaaaatctgttattacytctttcatcctttttgtcaaatggaaagtgagtaggtgtaaaatatttggcacaatctttggcacttgaccaaatgcaaaaggacacaattatcagattacatgaaatatcgaggggataatccaagcaaagttatgacaccagtcttggagcaaaagtcagaagcctaagttgagtggtgggaaagctggcgagaagaatgagcttccatgagtacagtattctggcccttctctgtctctcccttcctaactccatgttttccacttccacggctacctcatccctctcttcttgtagtaaaaacatgcccattatttctcacctttaacctatcctcacatgcctgacttctctatgtggtttttcttccatttacagctaactttttattcagttttcattctcttctctatattttttaaagtattccattcatcaaggcagtaaaaatatgaatagccccagtggttctccaccatgg

SEQ ID NO: 73928 - DNA, 677 bp, Homo sapiens
gttaaaaataaacatttggacttcatcagctgattttccctgaccttcagtttcaaggggaaattttctataaaaatatatttcttcttttctttcttcatattaatctaaagatgtggggaagtcttggcttaataatgttgctggagtttcccagaagagaaaatttccattgcaaaaatctgttattacctytttcatcctttttgtcaaatggaaagtgagtaggtgtaaaatatttggcacaatctttggcacttgaccaaatgcaaaaggacacaattatcagattacatgaaatatcgaggggataatccaagcaaagttatgacaccagtcttggagcaaaagtcagaagcctaagttgagtggtgggaaagctggcgagaagaatgagcttccatgagtacagtattctggcccttctctgtctctcccttcctaactccatgttttccacttccacggctacctcatccctctcttcttgtagtaaaaacatgcccattatttctcacctttaacctatcctcacatgcctgacttctctatgtggtttttcttccatttacagctaactttttattcagttttcattctcttctctatattttttaaagtattccattcatcaaggcagtaaaaatatgaatagccccagtggttctccaccatgg

SEQ ID NO: 73929 - DNA, 1428 bp, Homo sapiens
tctttaagttgccttcagattagagccaatggcataaacttttgaatcccttcggtattaagaaatatctatcctttgaagatgaattcaattttggggagcaatcaaaagtcatttagagccaagttcagtaaagaaggtaggtaatcataccaagtaattcaagtattggtccaaaaatggtgtaacattgaagtaatgaggctgatttttttttccttgtagcttataaaccagcttttatgtcattatattaaaatggaaattcctttgacattcaaaattcattttggagtgatattattcacaatttgattctgtcatgtttcttggattttaagggagccctattaatattactagttaagataacagcaacaatatggaatttttcttgcttaagtagatataactgagaaagaaagcaaataatgcaatttaatttaactgtaatttgtttgatgcttatataccaagcactraagcagaccttgatataaagaaaagaaatacatgacactgaatatttagtcttaatttcctattttaatgatgagaagttgagactcagaaaggttcagtaaacttactcatagatgggaactgaacaatgagaacacttggacacaggaagaggaacataacatactggggcctgttgtgtggtgggggagaggggagggatagcattaggagatatacccaatgtaaatgacgagttaatgggtgcagcacaccaacatggcacatgtatacatatgtaacaaacctgcacattgtgcacgtctaccctagaacttaaagtataataaaaaaaaaaaaaaaaaaaaaaaagattcttgattcccaggccagcaatcttggtaaagaaccaacctatattaacattccacccctgatataattaaattaaaaataaaagcagtctttagccaacataaatagtggattggcccccaaaattaacaatgcacacttacaagcatgacccagaatgtataaagttatagttctatttaatttcagaaaacaaaatagaaatgttaatatagaacgtggaagaggggagaaatgatattacctggaaatcatgaagataatggaaattagaaaatctacaaaaaggaatatggaaacttgaaaagttgagtggaagaaaagatcactgttatttattagttgggcaaagcaatgaaggagaagactgtataaacagggtaccaagaaagcgagaaaggttttccaaaaagctctggggaaaaaatagccagtaattctgagcccttatttatgacttcacattcactatgcaatttagatattcatttggtttcataataggtttccactataaaatctctgagggtggtcttccaggcaccagttgtacaatgataactcctcctattgtaaaacttttctggatcc

SEQ ID NO: 73930 - DNA, 663 bp, Homo sapiens
ttatttgtcaccagtatatcttcctcagtgaggtgtctattcagttaggttgaccatttttaaattgaattgtttggctttttattgttgacctttaagagttcytgtatagttctgataccagttctttatcagatacatgtttttcaaacattttattccaatctgcggcttgtcttttcactcccttaacagtgtctttctcagaacagacgatataaatttcagcgaagtccaacttaccgttttttctttcatgacacatgcttttgatgttgtatataaaaagtcatcaagaaatcaagggtcacccagccgttctcctatgttattttctagaagttttatagtttcgtgttttacatttgggtctatgatccattttgagataacttttgtttttttatttgttaatatttagaatttcgaagtaatttgagttaacttttttttttaatttgttaacatttcgaattttaaagtaatttcctttaacagtttaagaatcatggagatagaagctttagaatagctgccccaaagactggtgataaatttcatagtactgagttgctattttttctcatagatgtgaatctatatttgaacgttaagtgtactatacagttttttcattatgttcattaatgttattggaaaaat

SEQ ID NO: 73931 - DNA, 1320 bp, Homo sapiens
tgttatttgtttttgtttgttttctgcctccccaaaggcctacagggtctggaaggacacatgtggcctacggacctccagcagtctggcaaacatcaaaacactgttcaaccttcttgctagatcatggcatttcctgagatgtatcagtaaacattccaaatacaatcttggcctcagattgaaggaaaccccggggctttcagcagagcttagcagcacagatatgggaaggtggctctgctgtgattggcaggaggggaaagctggacaccttcctgtcacctttaatcccacatcaccagtgagcctgagaaggttagacatagggtagcaaatgcaaagatcattcctgcaaaagacaagtcttcatacaattgtcatttaggttgaatcatgagaaccttgacgctcattagaactgaaaattggaggccgggtgcagtggctcatgcctgtaatcccagcactttgggaggccgaggcrggcagatcacttgaggccaggagttggagaccatcctggccaccatggtgaaaccctgtctctactaaaaatgcaaaaattagctgggcatggtgggacgcacctgtaatcctagctactcaggagactgatgcaggagaatcgcttgaacccgggagtcaggttgcagtgagctgagatcatgccactgcactccagcctgggcgacagagcgagactccctcttaaaaaaaaaaaaaaagaaagaaagaaaaggaagaaaaaaagaaaactgggcttgcatgacatacagcagtgaactccttagctgtactccatgggattctattaaatccgctgcagtttcccagtgaagaaatactgtagctagacacccttcatctgcgcaggaactgagtttttcatttcacagctcagcctctttcctagtaataaattgacccgaactggagtcctaagactgtcaatttgcactttccttttgtatcacctcttctctcctgttacaaatgtgtagaaccatgacgggagattaatattgaaagagaactttttcccagttacatttgatctgcctacttctgccttctatttctttctccaagacttattttagttcagcaaaagcctccaggttaatttaacaaagaattcttccctgagcttaccggagtttcctgcccatgggtgacctgttcttccaccaattgagatttgtcactgagcgattctgaatgttgatcttgcttctttaagagggaacagtgtgccttcaggtcaatatccctcctaaccacaacagaatgtaagcctcattctcagacagaaagcaa

SEQ ID NO: 73932 - DNA, 1320 bp, Homo sapiens
tgttatttgtttttgtttgttttctgcctccccaaaggcctacagggtctggaaggacacatgtggcctacggacctccagcagtctggcaaacatcaaaacactgttcaaccttcttgctagatcatggcatttcctgagatgtatcagtaaacattccaaatacaatcttggcctcagattgaaggaaaccccggggctttcagcagagcttagcagcacagatatgggaaggtggctctgctgtgattggcaggaggggaaagctggacaccttcctgtcacctttaatcccacatcaccagtgagcctgagaaggttagacatagggtagcaaatgcaaagatcattcctgcaaaagacaagtcttcatacaattgtcatttaggttgaatcatgagaaccttgacgctcattagaactgaaaattggaggccgggtgcagtggctcatgcctgtaatcccagcactttgggaggccgaggcaggcagatcacttgaggccaggagttggagaccatcctggccaccatggtgaaaccctgtctctactaaaaatgcaaaaattagctgggcatggtgggacgcacctgtaatcctagctactcrggagactgatgcaggagaatcgcttgaacccgggagtcaggttgcagtgagctgagatcatgccactgcactccagcctgggcgacagagcgagactccctcttaaaaaaaaaaaaaaagaaagaaagaaaaggaagaaaaaaagaaaactgggcttgcatgacatacagcagtgaactccttagctgtactccatgggattctattaaatccgctgcagtttcccagtgaagaaatactgtagctagacacccttcatctgcgcaggaactgagtttttcatttcacagctcagcctctttcctagtaataaattgacccgaactggagtcctaagactgtcaatttgcactttccttttgtatcacctcttctctcctgttacaaatgtgtagaaccatgacgggagattaatattgaaagagaactttttcccagttacatttgatctgcctacttctgccttctatttctttctccaagacttattttagttcagcaaaagcctccaggttaatttaacaaagaattcttccctgagcttaccggagtttcctgcccatgggtgacctgttcttccaccaattgagatttgtcactgagcgattctgaatgttgatcttgcttctttaagagggaacagtgtgccttcaggtcaatatccctcctaaccacaacagaatgtaagcctcattctcagacagaaagcaa

SEQ ID NO: 73933 - DNA, 996 bp, Homo sapiens
tttctattgatcctttagtctacgtgtctgtttttatgccagcatcatactgttttggttactatagctttgtagtatattttgaagtcaggaagtgtgatgccttcagctttattcttttgatcaagataataaactcaataaagtttcaggataccaaatcagcatacaaaacttagaaatgtttttacacatcaagaggaaactctctgaaaaagaaattttaaaagtcttatttacaatagctacaaaaaaattaggaataaactttaccaaggagataaaaggtctctacaacaaaaaccataaaacattgatgaaagaaattaaagaagacataaatcagtgaaaaggttttctgtgttcatggattgaaagaattaaatcattaaaatgtccatactacccaaaaacaatctacagatttaataccatccctatcaaaataccaatgacattcttcatggaaatatatgttcaaaaatcctaaaatttgtatggtaccacaaaagacctggaatagccaaagctatattgagcaaaaagaacaaagctggaggcatcacactagttgacttcaaaatacaatacaaagcaaataattcctaaatgccactacgtggtagacattttaaaagctataacggaacataaacacattccttgctttaaacagcttagaatcgagctgagaagataagctctaaggggagagggagagacgagttcaaaggaactgagaagttcaaaggagcataattgtccatggctcctgctttccaagaagggctttatagtgagcgcaggacttgggcaaaatcacagacaacaagtagaggttaagccaatgtggaaaagcgtaaagacatcttatggagagagaaaaacaaaaagattggttggtgtggagagaactcagttagcctgggcaactctcycttcgtttttctcaaacagagcagcacttgccaagttattcctttgtttgcagtttct

SEQ ID NO: 73934 - DNA, 810 bp, Homo sapiens
atcaaagattgtctgctttctctgccagactttagctgactgagatttgttctggaatcttgtagtggaatcttgcatacctagacataggtagcagggaagaccccccttgagaacaatattaaacgtggtgatgaagtcaacaacagtgtcagaatgtgcctccaaaggagtatgggttaactgaacaaccagaaattaacaaaggaatcagaaccaggcacaccccttgattttgatcagcccaccaaccactgctcctaaggaatacaaggaagccatctagggaaccgcctgctataactccctaagtctctgaaaccaaaagccataaaatcacacctaccaggaagcatgcaacatctattacataaaaatgacttctaaagaatacagagttggttcaaaacaattcctggaagatatatgttttatcacttatttctgaactgatctgaaaactgaagtttcctgccaccaatctcaaccttaattcaccagattygttttgaagatctgccttagaggagtaagagatgtgctagtctcccgatattggccttgtaaagaaggacaggcacataatagattgtaattgaaatgggaatgcttcattttatagacactcaaatatttgatttaacagtgttccaagatgtataattcaaaattggcctgagtgtgaagcttgaaattttggtacttctgtgaatgaagcctgctgttttgttttgttttaaccaatactgttgtgtgttcttatgtatttccactaagggttaaaatttcaatttagtccctgtcagatgc

SEQ ID NO: 73935 - DNA, 1864 bp, Homo sapiens
ctccagaatacactaaatcaggaactctgagggtgaaacccaacactgtgtgttttaacaagacctctagctgatgcaagctaaggttccagacccactgggttttatttttaactttcctaagcttcaatgtcattgtctataacatgtgagtagcacctaattttcagggttttcataaagattaaatttgaccaaaatcattattgttattattaatattaataacaaaataagaatgcatgtgaacattttttagatatacatrtgatggcataaaatgcaatatctttcctttttccataaaagaggcagttgcaggaattcaacattgagtgacagcatataataatcaaatgctcaatgaaagatggccataaagttatcagtccagtccctactcccttggcaactgtacctgctactactactcttactaaattcatttactaaatttacattttaacagagttaggtaaagtaaaatcttatattttagttccagaaatacttttcccagaacaagatagagcttgaattaagtacagcattattctgctcagaggaaggataatgaacaaaaatatttcatgaataccttttcccaaatagacataatcacatttccattcactcttaggattctttgaatctaggaattagtttccaattatctgttacctcccaatagaatcctataaaatagatgaaattcttcttgccacgattaactttcatttcatctcaaaatgtaatggagaaactttcattctaaattcttgctaaatttattttgagatttatagcccgggataaaaggaatgtgagagccatggctccagaacggggattggatccacattaggttccaattagacacctgaaaattcatctttcagagatgaagcatcctcagacaccagctattcaggagggaaacccattcttatttccccccccctcaggaaagaaatagaatttttagttgcttagtgatttgtgaactcctgaaaaattgtagtgacacctgaagaggactcagctcagttcaagtgacctcagcacaaggagcaatgaattgggatttatgctttcctattcctttcatctcagacaattgtgtttacctgaagtaccaaataccaaacagtggaagcagagggcagagcaatggttttccagtcagctgagattccagtttagcaggcatagggacctagtcatctgcattttaccaagcaccctctcttccctagtggttctaacccaggtctgcacatctcattttcagaaacactgctagaaggaaaagacaacagacttttgaattagaaaaaccagaattggaagttcagctctgccatttgctaactggtagatttggatggcttgcttagtatctgaggttgtttccaggtctataaaatagaattagcaataacaatgactttagttgttgttctgacaaacatatgagataatacatgccatgtgcctagcatatataatatgtactcaataaatacttgtctcatttcaagaggcttttaggaatataagttataggaagtgatgtcaggaagacatgaacacacacacacacacacataccacctttctgtgatttttccaaatttataataaaaatagatattcataacatactgctgcttactcttactcttttactatttgtactattgtcttgcattattgtgtaatgtttaaacaataatgtgtttatgtgtctgtgggcactgtgagtcttttctacacaaccagcttgcaaactttcaggtagcaagggccgtttgttgcattgtcagaaatatctgacacacagtgacagtttccatcacagcac

SEQ ID NO: 73936 - DNA, 748 bp, Homo sapiens
aggtagaaggcagcccctgctggaaggtcaggcactactttacccaagccaggccaccccttattaaacaccagcttcactcgagcagtggttcccaaattttcttggtctgtgaagacgtattttctctatttttagccaaacagaatgattttagtccatcatgggtcaaacyttctgatattctttagtccccatggaagacattcttgtttctcctttaagaccatctctggggtcaccttcggttgccttgggggtgtttgagcctctgccgcagggacactgataaggacatgagttgtggtacgccccgttttgtgtagcagctgtcagtttgtttctggaatgagactgagcttctagaagtctgggcatttggttctggttcacctttgagctgctggcacggaggagctttgtaacacaagcttactgaattgatgttttagtgaaagggagaaaagtccttttcagctccctttttcccaccattccccgctgttcatccgaattactcatccacacatagccagtaaagggcgccgtagactgaacctgtaggaaaccagactccaggcagccccagagcacactccccagaaccactaaaataaacacaaaatgcactctcgccggattctgagaaggaaaggccctccaaggtcgtagggtccagtggctctcaaccctggctgcacatttgaatcatctggggagctttttagaaatggtcatgcccagcctc

SEQ ID NO: 73937 - DNA, 748 bp, Homo sapiens
aggtagaaggcagcccctgctggaaggtcaggcactactttacccaagccaggccaccccttattaaacaccagcttcactcgagcagtggttcccaaattttcttggtctgtgaagacgtattttctctatttttagccaaacagaatgattttagtccatcatgggtcaaaccttctgatawtctttagtccccatggaagacattcttgtttctcctttaagaccatctctggggtcaccttcggttgccttgggggtgtttgagcctctgccgcagggacactgataaggacatgagttgtggtacgccccgttttgtgtagcagctgtcagtttgtttctggaatgagactgagcttctagaagtctgggcatttggttctggttcacctttgagctgctggcacggaggagctttgtaacacaagcttactgaattgatgttttagtgaaagggagaaaagtccttttcagctccctttttcccaccattccccgctgttcatccgaattactcatccacacatagccagtaaagggcgccgtagactgaacctgtaggaaaccagactccaggcagccccagagcacactccccagaaccactaaaataaacacaaaatgcactctcgccggattctgagaaggaaaggccctccaaggtcgtagggtccagtggctctcaaccctggctgcacatttgaatcatctggggagctttttagaaatggtcatgcccagcctc

SEQ ID NO: 73938 - DNA, 847 bp, Homo sapiens
gctcctccagagatgaatataattcccctaatttcctcacagtggcagcagtggctgaagggagaggtgaactgtgagagatgggcccctcttgcctaagatgaaggctggggtcaggggcagtgttaaacatcagctggagaggattgtgaaaactctttggacaagaggggtttgttttaaagcgaggctactttggaatggacatctcattagtgaacaggttggggagtggcagggttatggagaggaggaggcgttccattcccgtagctattctgtatcaaccgctggggtcagaggctctcagctggagtccacccacagacagaattcagggaagctccaaaaacctgaatggaaagaaattacattttattttcactaactgaaaattggcattttcttcaattatgaatgtagactataaaccacagggacattaacagttctcatgactgtcaccagtagcaattgcaaagtgcatttttaaaaaatgtttgtgggtacatagtacaccgatgtatttataggtacatgaaagcaaagttaattttttacagtgtggtagagtcattgtaaatgtcttgatatactgttatccttagcaattcttaatacttcagaattaaggttgttatgagattcgctgctaggtcttatttaatatgttaattaaatattaccatggtggaaaatwtaaaatattttgataactgcattttactgtaattggtttcctttgcaatgctgtgtatttaatttgtgcatttagcatcattctgtggaggcctctgtgggcttccctagcctaccaaggagtggtctgtggcattgaagaggatag

SEQ ID NO: 73939 - DNA, 1359 bp, Homo sapiens
  misc_feature (1)...(1359): n = A,T,C or G
gctggacttaatgagccttcctgaaaccaagggcacagacttgaggccctccagacctgggtcctgtggttcaatgcatggccctgtagctgcaggttcccggagaagggcggatggcagagcagactgtgacatctccaggtggctcctgagcacctgctctgctctccttcccctccaggctctctgattttggctgcttggctgctcgccatcttccaggctctacgctcatcctgtgagggcatgaactgatctgtgcttcgcctgcaagctctattctctcccccagacacctcacactctgtggggaccctggagagaaaggtagccttgggcttcttggaagtgccaggaaaggaaaacaatccaacagtttaggggccscacttctcattggagctggagacactcatcccctaggaaatgctggtccttaatcactgccctcctgaacagacctgctgctgctatgcccagcatctttgctcaccagcctcgtcctaatatgaaggccgaaggcacatttgggctgtgccaggagccagggtgattgacagctggagctcctagtggggctcattaagggaagctgggtggggcctaggggagctcactctcccctgccagccccagacccaggcgatgagctgggagggggcaggagagggggtcagatcagccaagctggatgtcctctgcagcctgccagcttgaggccccagctgtgcccactgccgagggccaggctctgctcctgaaggcccaacagccagcctggaatattcataagtgccaaagcctcccacccctgggcctctgggcttccttagaccccccctggaacatgcccttcatggcttttcgttctagagacatcacaagttactacgcactactcccaatgctgcctcctccctgtccaagtcctcgctttccataatttcccagtcttgcaacacacactgggcctgcctgtcattttgatttgcaaattgaatctcccaagagctagttataatatgcaacattataaacagaagtaaacttctctatgtctaacagngctactggagagacttctttctgtttatacccttttatcttggttaaatatttttgtgtctttttagttcctttcaaaatcaggaaaaacaagagatatttcctttttagaaggagaaaaagcccattatttcccctcctggtggtaaagagcaaggaccttttcttaccaggctgattgtgtttgaattcttatgctgggtgatcttgggcaagtcacttaacctctctgtgccttagcgttctcatgtgtaaaatggagttaataattccttcctgagggttgtgaggatt

SEQ ID NO: 73940 - DNA, 526 bp, Homo sapiens
taaccaatggttgtttaagaagaaatcacttgggagttgctctgaacctgttctggttcggggggtgcccagaaaaaaaaaagaagaaatcacaaaggaaatttaaaaatacttagagatgaatgaaaaatataaaaacaggctggatgtagtggctcacacctgtagtcccagcactttgggaggccgaggtggtggattgcttgagctcaggagtgcaagaccagcctgagcaatatagtgaaacccatctctaccaaaaatacaaaaaattagccgggcgtggtggcacatgcctgtagacccagctactgaggaggctgaggtaggaggactgcttgagcctgggagggggagtttgtagtgagtcaagatcttgtcactacactccagcctgggtaacagaataagatcctgactccaaaaacaaacaaacaacwacaaaatatatatatatatataaacaatacatcaaaacttatgaaatgcagtgttttgagggaaatttataatagttaatgacctc

SEQ ID NO: 73941 - DNA, 519 bp, Homo sapiens
caatgaactgttttttggccataagaaggaatgaagtaatggcacaggctacaacgtgaatgaacctgaaaacgttatgatatttctcataatgatactgtaatcattttatatgattctatttaagagattagtggttttcctgggctgggatgcatgggggagagagggggtcacagctgaagggtatagggttcatttttgaggtgatgaaaatgttctaaaatagactctggtgggccaggcacggtggctcacgcctgcaatcccagcactttgggaggccgaggcagatggatcatgaggccaagggttcgagaccatcctggccaacatggtgaaaccccrtctctactaaaaatacaaaaattagccaggtgtggtggcatgcgcctgtagtcccagctactcgggaggctgaggcaggagaattgcttgaacccaggaggtggaggttgcagtgagccaagatcgagccactgcactccagcctggtggcagagccagactctgtctgga

SEQ ID NO: 73942 - DNA, 1678 bp, Homo sapiens
tgtctttgaaatcaatttaatatgtacatacacgcaaagcccccctaaaaacatcttctgaatgtgactcacatttgatcacagaatataaagatctccgggtgacagcatcaagggagattctcgttttacaatttttccccaaattgacaccaagaagtaaatggggggaaaggaacagttaattttttttttaatatgctccattattttcagtatatgggtttggtagggtgaaaccagaaactctacaaagaaaaaatgcgtaactatagaagatgctaaaatcctctaatgtcagtttttaaaaaagactccattctttctggttctgtgttctactaatattttaatctaaatatatgatcagagtaaccctttgactataagttataaattctggtattgcccatttaggttttcataattaaaaaatttttagtaatacagtaacaaatgtgtattgtttaaaaataatggaggtaagtttttaatgctatttattgtgaaactgcaagcccctcatccctttttgaagtagtacatacatatttttaaaggacccaaacacatacctttagaaatcagcaaaaccaaactgctatgaagtatgaacagaagcaaaagtcaatttctaccctaaggacagggcacaaattacactaaaaatcaatattcttcctttgaaagccatgagtcctttctaatcacattttaacttcaccctcaccccacacatacacaagaaaaagcagagatgtgggtgtggacttctggaggaaacaaaaagtaaaaaccaaccacctggttctaagaacttgaccacgcccctatggtaccaaaaaggaaatgaacaaaaatgtttgtcttttattcactgaaagcagctagaatcgataggatctaatctagccctcactacagacaaaagcaataaccaaatttggtacagtgactatacaactcaatgttaactttcaaacaaaacggatcctgcttgaaaatgttttgtcaaggaaataaaaatgaaattacaaatgcaagtgattgttctatttgtctttagattattttatcctttgagggaacaaacaccatctataaaatagatctcactatttcatccacaaacaaaatacagtgcttttagtggcatccaagtgttatacagttggcagttacagttatccaaaaagtttgaaccacgatagtacaaatgcaaattatttctcactaaaatgtgggcatttcctctcaaacaattttttttttttttttgagacggtctcactatatcactgaggctggagtgcagtggtgcaatcacagctcatggcagcctcaacttcctgggctsaggtgattctcccacctcagcctcccaagtagctgggactatgggcgtgcaccaccatgcctggctaatttttaaaatttgttgtagagacagggttttgccatgttgcccaggctggtcttgaactcttggactcaagcaatcctcccactttggctgggattacagccatgagccactgtgccagtccaaataatttcttaaattcccatggtaatgcatatacttggacttctcagattcaaaggccattatatattaattgtataagcacttaacacatttttagttctcctatagcttttttaatgaaaacttgag

SEQ ID NO: 73943 - DNA, 688 bp, Homo sapiens
aaaacccaattatcacgttgaagaccaggaaattttgtatgttgaaaaaggtcctcattctccaaatagttcaaagctatgcaatttagaaattagttataattggtcctgtttcccagcacaaatgttagaggtcctcttgtgaaacgggcccttatcactctgtctgagtcaaaattgttttcaacctcattagggaactcaccagacatgcaaggtgctgcagtgcctaatctagtgcttacaggaatatgctcaattttcaggagttaacatttctgaattgctataaggtctttaaaggaaatgaygccataaaaacccagtgttagtgtgataatgatcagtttggacatttatatgagagaatgatgcttcaaatcaagtaatttcaagggacttaatttactttttttttcatgttttatgggttttactttttcctggttaattttcagaactgagtgatataactgaaagatattactggacaaagcaattgacattcaccaaggaagttagggtagtgtcccatatcacagccccattgtgggtgaccaggaagggaggccctgccaccagacagctccctgagcttcatgttaacatgccacagtcctctctgttgtaaatgtgggctataagtgactaaaagcactggccaaacagcagaaagaagaagcttcag

SEQ ID NO: 73944 - DNA, 709 bp, Homo sapiens
ttctaaaaaaacaattcattggtcacctttggaggtcagctaaccaacccatcttgaaactggtgcataaaagaaaataataaagaatttatcctgcttttctatgacacatcattagcagcaggtagctgaggccttaatgtggaacagttattttttacagaatcattccaattaatgaagaagaatattagaattagaagattaccattttgcatctcctaatgaatgaatggaacctcagcaaatatcatccatcgctgctatggtaattaccaaggccagtcacatcctctccaagtttcacatagggaaacagatcacccagtatagactcaagcttaagcggcaaagggagtaaagccaaagttaattttaccatttggactctcttctctccaatgagttaaagaaattatgagtaactcagcaatatcagcccgcaaactttctttggaatagaaactgccgcctgtcaaagaagccagaggcagttataaattagttcatccctgggttcactgctctacttaggagtatttcctatataaactcttacatatktcttccctaaaagctaaaagtaagggtaattctgacttttttttggtgggatgggggttctgtgttctcttcctccaacctaaaatagagataattaagttaaagaattcaaagaaaattccctgaagaagaaaaacacatttgg

SEQ ID NO: 73945 - DNA, 656 bp, Homo sapiens
gactgctttcaaaaatttattttataaccagattgttttgttaataattaccagcacaacaaaaatttcagtgtatcccaaaaatttctaagctccttaacattgtccaatttactggattactattaatacaataaaaaatgccagagcaacaaaagaatttgaaaaattcctttgagaaatgggattttacctatggggaaaaagtcgtttctgactcttacgtatctcttgatctgtatttcatttactttcttgaattcctcaccagtatctctaaaactctccatgctactaattacaaatacatataaagattgagtagtactaagttgtttattttaccttaattcctttgaaaggaataaaacaggcattcattccatcttattttacaaagcttttttttttttttttttttttttggagacagggtctaactctgtcactcaggatggaatgcagtggcataatcacagtttactgcaccttcaacttcccaggcacgggtgagtgatcctcccacctcagtctcccaaatagctgggactacaggcatgcactaccaaactcagctaaatttttattttatttttttggtaragatggggtttcaccatgttgcccaggctggtctcagactcctgggctcaagc

SEQ ID NO: 73946 - DNA, 690 bp, Homo sapiens
ggatcccctaatcctgttgatgctgcagcagtatcgactggccctaaaagcagctgctaaaatgcgtctggcacaaaggaactttctgggctgatggaaatggtctgtatcatgattggggtggtggttaggcaggtgcatgcatttgtcaaaactcatcagactgtgcacttaagatttggacagttactttatggacattatatctccataaaattagttaatttttttaaaatgtggcctgaccagacaggctggatacaggggcctgttgtggtcttcctgtggccttgggaaatgcagctcatgccagcatggcacaggattgctctgggaggaaaagagacagaacagtctctgcatttgtggaacttaaccctttaagtcctgagctaggactccacacacaggtgcctcsccaccctctcccaggagacctcaccctggcctgcctccaaagaatcagagccaagcctcacacggccacaggctgaggcctgcctctcacaggagaagagaagattaaaattaatgtaaaatctaacagatatttgtatacccatgttaatagcagcattattcacaatagccaaaaggtagaagcaactcaggtgtccattaattaatgaatggatacacaaaatgtgttgtatacatacaattgaatattatctagccttaaaaagaaag

SEQ ID NO: 73947 - DNA, 506 bp, Homo sapiens
aaggccaaaggcaaccaagctgtgcctgagccatgcccagggctgtgggtgtgatgcagacccctaccctaacccaccaccacttgtgccctggcactgccatgccctctcccctctgtctctgcctctccatggcctctgagaccgacagcttcccctgcgtctttacagcgttcttgaccgagagtaacaccrggccctggatgggcagggaaccaggcaagtcatggtaatactgagcaaaatgcaatctttggtgattcagaagcccttccaagtatcatggtgtgtccaggtctccatgacaacatggaagggccttatgctcagaggctcaggagagctgtgtgggagatagtctggttaacagaggccagggtactccgggtctctgatgccgcccgagatcaaatcatagggctgtgattatgaaagggaactcaactcctggaggctaacaccctttgcgacttgagttgtgcatttagctaggatctaaaggctgg

SEQ ID NO: 73948 - DNA, 1424 bp, Homo sapiens
cacctccaaccagcagtcaaggtgtttcctgggctggaagatgaaggctacagcggcggcrgtcagggctctgacagcaggaacaggggcatgtcctctgagttcttgggggacctctgctgggccctgagctctgtgtctcgggacaaaaatcccagattccagagctgaaggcacttcccaggtttcctacccagccagttgctttccaggtggggtctgaggcccaggccttttgaaaggccctggcacgtttggaataaaaattctgaaagtgctgattttctaaaagagggagatcgaggaggctggccgggaaagcatacccttcctcgggtgctggagcccaggaaagccgtaaacactgtgagtccacatcccagcccttccctgtctccaggccagtccagcattgtgtccagccctggggagcaggccaggccgaggagccctggtggattccatcagaggccctggtgcagctgcattcacggtccagcgggaaaggaaggctgcactcagcccatccccgagttcagtgcaggaacagctcttacggggtccccactggccacccaacattgtccccgtctcctccagagggactgtgcccagaggaggtgcccagatttgtggcgaggttgaccatagcaccatgaagtcggttctgtgagctcaggcctgggtactgggtgcacagttctagtgtgggtctggtcttcagtgctcagggtctggggcagcccccgaggggaccgtgttgctatccagtgtgaagcatctagacaaaggaccattggacaactggaagatcctttcttttttgtttttttattttttttattttttttatttttttgagacagagtctcactctttcgcccaggctgcagtgcagtggtacaatctgggcctcccgagtagctgggactacaggcgcccgccaccacgcctggctgtatttttagttgagacggggtttcaccgtgttagccaggatggtctcgatctcctgaccttgtgatctgcctgcctcggcctcccagagtgctgggattacaggcgtgagccactgcgcccggcctggaagatcatttctattctctataactgaggcagttgctgctggttaccgggcttgctaataaatggccccactgggacgcaagtgtcacagggggagagacttgacagtgatgaaaatgactgatttcctgggagacagcattccctccagcagcagcaggagccctggaggtggccttggggggcttttccttctggttctgacactaccatgtcctgagagctcaggcccctggagcactgagtgcccatctgcaaaatggagagagagcaagtcacttggagtcattttagaccatcatagatctgagcaagaggcagggtgaagacagaaagga

SEQ ID NO: 73949 - DNA, 1424 bp, Homo sapiens
cacctccaaccagcagtcaaggtgtttcctgggctggaagatgaaggctacagcggcggcagtcagggctctgacagcaggaacaggggcatgtcctctgagttcttgggggacctctgctgggccctgagctctgtgtctcgggacaaaaatcccagattccagagctgaaggcacttcccaggtttcctacccagccagttgctttccaggtggggtctgaggcccaggccttttgaaaggccctggcacgtttggaataaaaattctgaaagtgctgattttctaaaagagggagatcgaggaggctggccgggaaagcatacccttcctcgggtgctggagcccaggaaagccgtaaacactgtgagtccacatcccagcccttccctgtctccaggccagtccagcattgtgtccagccctggggagcaggccaggccgaggagccctggtggattccatcagaggccctggtgcagctgcattcacggtccagcgggaaaggaaggctgcactcagcccatccccgagttcagtgcaggaacagctcttacggggtccccactggccacccaacattgtccccgtctcctccagagggactgtgcccagaggaggtgcccagatttgtggcgaggttgaccatagcaccatgaagtcggttctgtgagctcaggcctgggtactgggtgcacagttctagtgtgggtctggtcttcagtgctcagggtctggggcagcccccgaggggaccgtgttgctatccagtgtgaagcatctagacaaaggaccattggacaactggaagatcctttcttttttgtttttttattttttttattttttttatttttttgagacagagtctcactctttcgcccaggctgcagtgcagtggtacaatctgggcctcccgagtagctgggactacaggcgcccgccaccacgcctggctgtatttttagttgagacggggtttcaccgtgttagccaggatggtctcgatctcctgaccttgtgatctgcctgcctcggcctcccagagtgctgggattacaggcgtgagccactgygcccggcctggaagatcatttctattctctataactgaggcagttgctgctggttaccgggcttgctaataaatggccccactgggacgcaagtgtcacagggggagagacttgacagtgatgaaaatgactgatttcctgggagacagcattccctccagcagcagcaggagccctggaggtggccttggggggcttttccttctggttctgacactaccatgtcctgagagctcaggcccctggagcactgagtgcccatctgcaaaatggagagagagcaagtcacttggagtcattttagaccatcatagatctgagcaagaggcagggtgaagacagaaagga

SEQ ID NO: 73950 - DNA, 1822 bp, Homo sapiens
tccttctttcctataacccattttgtggagggttcttggcagcacccagaagtatttgtgttttaaggcatcgtcattctgaaaaatgaaaagtctgaacatttcttatggtcaggaagttgatgggtgtaatttatttttcccacctcttctcttaattattattactccattcaagtgagacaagatgatttaatccaggctgtatttaaaatgcccataatcaatgctctcattctgagcatgtatctatgtgctcttagataatttatgtataattttaatagattcgtcaacagcagcccttcctcatctaaacaggctgcttgcagacagatcgcttaatttgcttctcaatgttatttttcatacatggttgctgcacggccgacagatagtagatgatcccattacgaacacatttgacacggcctctactgtggggatgagcaaactcgaggtctcgtactgtggcaggcagggtatggccccctctcactcagaagggtcagatcccagagaacaaagccaccaggaaggtgctgaagctagtcctggcagcgtttgggtgctgatgggagccctggcatcctgctagagcaaacaggaggctgtcagtgctgcacccattttccagccagggcatcacctgctcatgcctctcacctgctcacgcctctcacctcctgcctctctgtgtgtgagggcacctagcaggcaggctggaggtgtgggggcattcatactgcagaaacagccctctatcagcaagaggcaggaggcaatgcataaataccccggcttcctcgcctcatcgtgagacaatttcaggtgcactctgcacgactctcagagggttcccagcaggacagagccccagctggccccagcagtgaccccatggcaaaagcgtcctcagttggcttttctcctgtcctgtctcataccctagtgcttccttggatcaactcccaaagaaaccacttctgtcaaaatcttgtttcaggatcccctttaggaggagcccaaatgaagacatttgcccctctgaatttcttcacgttgatctttcaggcaccaccttcctccaggaccccgcttaagccctgctgtgaagtcgtcctactccctctggcccagaaactctcctcctctggccatcttcagtcccactagcttagttaacttagcctgcaccatcagcagccttatctgtcccctatttctgcttgtgggtgtgtgatggggcaggtgccaatcccgccaccttcccgctgactttcatgtgtgtctcagaggtgacggtgttcatctcagtcctcagtctggagtgcagacaagagacgtcgagcagggtaaaggatgggtggccagataatgccaagagtacactctttaagggaaaaaaaaatcacagagaaacgcctccttccaaagaccaatgtgagtgctgatggattacttgcaccatttccgtccrctggggtaattgcaagatgagtgcattgtgttccaaaggagaaatattctgtagatgtggtaatctttgccatgcaggctcgtgacagagagaaccacatcaacttctaaattttctcaatggagtgcaatgtgtgtaatgtgtaataaaatataaataagcctttaagaagcatctatgtgtttctttttatcaacctttagatgcgttaaagcgaagtacaattttatatgaattctagatgatatgtagtatttttatttgctacttcattgctaaatgtttcatataaaactgaagagaaaaaaatacacagtcccacatataaaagaagaagcagat

SEQ ID NO: 73951 - DNA, 716 bp, Homo sapiens
agacatcaattcgtgccaggctgtggctccatgatgggtacctccgtgctgactgctgctcagctgctggcctcctttccagaagagcagtcagggtggtaagccatcccgcgtgtttcttcagatggatcacagagccacagtgcgatcaagccacttacctacacacattggtagagaccaggaaaacagaattagcttctcattctatttccagctcctaggctctttccatattggccaagaaaagcagagtacttacagaaattcctagttaatggcatctttctgcctgtgtatggagaaacatgcctgtctgtagtttatttttaaatgaataactcatcatatttgggtaaaaagtcctgtaatctctaaagcctttctttcacaattttttttattctgagagtgtagaaaacagcctcagatctattcaaataaaatagcttttttactgagtgaggaagcaatgcattttaagacccacttgtgttggggaaggggtttttggccactggctctgtaggcttgggctcaaaggaaaggcagaatcatgaaatagaagctgtagcagcatctgcccgraggtcttgattttggtttaccaatcgctggctgcaggcgggatgggaacaggggctctgtgaaggctgaaattcagggagagagctggagggagcggagagtggtcgctgaccagtgtgaaaccaacc

SEQ ID NO: 73952 - DNA, 566 bp, Homo sapiens
tttacagggaggatggaggcctgtttataagagcaaaatctggaagcagtgtctgatttttttttaaactggtttatattccaatcatcaacctatggtgtgaacatcttccagatgttcaaagaaaaattgtggaaaatgagttgaaccgtggaggcaatttccttttttgaacagagctttactctttactgagcatctactacgtgccaggtgggtcctccctgccgacatcttcagtgctgctgtgggtgagtcaagctttggtaggtccagttggcacctttggcttcyttttcttcatcttgtggaaatgcaagggtcattccggttctgcttccagtgatgggcgaatctgtattaactggtagagtgagggtggggggatatgtgccagcattgagtggcagggctgagttgggtgagttcgagttcatttcattttgggggggtctgctgtgtatcaaaaaaaaaaaaaagattttaagaggattttggtttgcaactttttttcctgaaacctttcatgctgggtttatggtggagtcatgtcatggcataactta

SEQ ID NO: 73953 - DNA, 1650 bp, Homo sapiens
catgtctagatcctgatgtcacttacttgtgttaaacacatgaatctactgccttttataaaatgtatgtgctgggtggttgtttttgtagattttttaaaatgcccaatattcattattcaagtttcaataagaatgattttgtttctacaaaaaggaaacaaytttttaattttttatttggaaaaaaattaaatgtacagaaagttgcataaataatattgcaaataccatatatattaaggtaaacattaaaatattcctaatattttaaaccatttgctttatcatttgtgctttctgtgtgagtatacgaattttatgtatacatttacactgacacgtatgtatacacacatatatacatatgattttttttctgaagattctgaaagtcacaagcatcgtacacatccctgtacccctaagtacttcagtggtctgtatttcctaagaacatggatacactcctatataatcaaactgtagttatcaacttcagtaaatttaacatggattccatactttaatccacatcatttaccatcaattgatccaatgaagtcctttttttcctccagtcaggatccactctggaatcagatatcgtatttacttgtcttgtctctttattgttgcttaatctggagcatatccacagcctttctctcttttacaatatagacattttttgaagaaaatgtccctcaccctcttttttttgtagtagaatgttcttcatttagggtttgtctgatatttcatcatgattcaatttgagctaaacatccctggccataatgctatataagtagtatgtcctcagggtatcaaatatggaagcacacatatttatctgccctcacttgtgaattaattttgattactccttcaaatttctccactacatagttatattttttcttgcaactaataagcaatctgtgaggagacactcgtagatcaaatatcgtgctcctcttcaaaactttccactggattgatcatgattcttgcctagtcccatctttactgtgagggtaataaaggctccacatgtacccagcagttagtacttagcgttttaccataagcaggagccccgcctttgcttatttattgtttttgcttttcatttttatccattatttaatataggagagtaggggactctggagcttaaacaaactatcacatagtgaggactgagagttgagctttattttttttcctcctggataaaataattttatccattgtttaatatagaaggagagtaggggactctggagcttaaacaaactagcacatggcgaggattcagatttgagctttttgttgttaaaaatatttaacatcatacagtcttgtgaaattctatttttcaatatttcatcattcattaatgtctttaattattttggtgctcaaattatttcagatttgtccagcagaagcctcttcaggctggttcctgtgtccttgtgacatgctctcattgttcatttttcttttttttgagcactttcttactttctatcataacaaggtgtctgaggctcaacttctcatttccctgcttcaaccttggaatcacacatttctctgaggagccctggttccttttattgggaatggtgttagagatga

SEQ ID NO: 73954 - DNA, 1239 bp, Homo sapiens
tatcatacagaataggaagaaactaatttttatggaacacctgcagttgtccatgtgctatactgcaaactttatataagtcatcttatagaaaatagcaagcccttacaataagtcccaattatttcccccattttacacacacacacacacacacacacacacacagccagccagagacacacaaagaaaaagtatcttgctctaattcacccaacaattaagttgtaaaactatgattcaaacccatatttaatagtcctcacgatctgaaaaatttcccaagtaatctaatttccaacttctaggccatcttctaagccaaaagatgctagataggtaaccatcctaattttttccaatcactttacattaaaaaaaatgtgaataggctataaggtaaaacaaatttaaatatttggaaaagatttgaaaacacaattaataaaagagaacttcaaatggctaacaatgtttggtaaaatggtcaccctcactaataaccagaaaaacacaaatttaaatgagatatccctttatacccatgaggtttgtaaaaattataattttcaataatactaggtgttggggggacagtgagacttggagcctttgtacaaggttagtgggaatctgggactgatgcagtcagttagcaatgtttggagaaattggtgggtgtaccctagatccaatgatagggtctcccacgtattttgtgggagctaggagctggtgtcaaacaagttctattattagggaacaaataaataaaatgtattcaatgcacactatggaataacatgcaatggtcagtagcagtgaattagcacgtatagcatcatcttaaaaatagcatgttgagccaggtgaggtggctcacgcctataatcccagcactttgggaggccaaggcrggcagatcatgaggtcaggagttcgagaccagcctggccaatatagtgaaacccagtctctactaaaaatgcaaaaaattagcctggtctggtggcggcgcctgtaatcccagctactcgggaggctgaggtaggagaatggcttgaacctgggaggcagaggttgcagtgagccgagatcacgccattgctctccacctgggcgacagagtgagactccatctcagaaaagaaaaagaaaaaaagcatgttaagtgaataaaaagtatggcagagaatgaaatctattgcacaatatcatttatctaaattaaaacatgca

SEQ ID NO: 73955 - DNA, 1239 bp, Homo sapiens
tatcatacagaataggaagaaactaatttttatggaacacctgcagttgtccatgtgctatactgcaaactttatataagtcatcttatagaaaatagcaagcccttacaataagtcccaattatttcccccattttacacacacacacacacacacacacacacacagccagccagagacacacaaagaaaaagtatcttgctctaattcacccaacaattaagttgtaaaactatgattcaaacccatatttaatagtcctcacgatctgaaaaatttcccaagtaatctaatttccaacttctaggccatcttctaagccaaaagatgctagataggtaaccatcctaattttttccaatcactttacattaaaaaaaatgtgaataggctataaggtaaaacaaatttaaatatttggaaaagatttgaaaacacaattaataaaagagaacttcaaatggctaacaatgtttggtaaaatggtcaccctcactaataaccagaaaaacacaaatttaaatgagatatccctttatacccatgaggtttgtaaaaattataattttcaataatactaggtgttggggggacagtgagacttggagcctttgtacaaggttagtgggaatctgggactgatgcagtcagttagcaatgtttggagaaattggtgggtgtaccctagatccaatgatagggtctcccacgtattttgtgggagctaggagctggtgtcaaacaagttctattattagggaacaaataaataaaatgtattcaatgcacactatggaataacatgcaatggtcagtagcagtgaattagcacgtatagcatcatcttaaaaatagcatgttgagccaggtgaggtggctcacgcctataatcccagcactttgggaggccaaggcgggcagatcaygaggtcaggagttcgagaccagcctggccaatatagtgaaacccagtctctactaaaaatgcaaaaaattagcctggtctggtggcggcgcctgtaatcccagctactcgggaggctgaggtaggagaatggcttgaacctgggaggcagaggttgcagtgagccgagatcacgccattgctctccacctgggcgacagagtgagactccatctcagaaaagaaaaagaaaaaaagcatgttaagtgaataaaaagtatggcagagaatgaaatctattgcacaatatcatttatctaaattaaaacatgca

SEQ ID NO: 73956 - DNA, 1239 bp, Homo sapiens
tatcatacagaataggaagaaactaatttttatggaacacctgcagttgtccatgtgctatactgcaaactttatataagtcatcttatagaaaatagcaagcccttacaataagtcccaattatttcccccattttacacacacacacacacacacacacacacacagccagccagagacacacaaagaaaaagtatcttgctctaattcacccaacaattaagttgtaaaactatgattcaaacccatatttaatagtcctcacgatctgaaaaatttcccaagtaatctaatttccaacttctaggccatcttctaagccaaaagatgctagataggtaaccatcctaattttttccaatcactttacattaaaaaaaatgtgaataggctataaggtaaaacaaatttaaatatttggaaaagatttgaaaacacaattaataaaagagaacttcaaatggctaacaatgtttggtaaaatggtcaccctcactaataaccagaaaaacacaaatttaaatgagatatccctttatacccatgaggtttgtaaaaattataattttcaataatactaggtgttggggggacagtgagacttggagcctttgtacaaggttagtgggaatctgggactgatgcagtcagttagcaatgtttggagaaattggtgggtgtaccctagatccaatgatagggtctcccacgtattttgtgggagctaggagctggtgtcaaacaagttctattattagggaacaaataaataaaatgtattcaatgcacactatggaataacatgcaatggtcagtagcagtgaattagcacgtatagcatcatcttaaaaatagcatgttgagccaggtgaggtggctcacgcctataatcccagcactttgggaggccaaggcgggcagatcatgaggtcaggagttcgagaccagcctggccaatatagtgaaacccagtctctactaaaaatrcaaaaaattagcctggtctggtggcggcgcctgtaatcccagctactcgggaggctgaggtaggagaatggcttgaacctgggaggcagaggttgcagtgagccgagatcacgccattgctctccacctgggcgacagagtgagactccatctcagaaaagaaaaagaaaaaaagcatgttaagtgaataaaaagtatggcagagaatgaaatctattgcacaatatcatttatctaaattaaaacatgca

SEQ ID NO: 73957 - DNA, 831 bp, Homo sapiens
caacctgatttcataaggaagaaaatactaggaaaagcgaatataatcctcctccaaataatcacacaactttaacatttttagacatagggtccagaacacattttcaatccagtgtttcaggaagttagaaatgatacattaataaatgagtaaataagtaaaccaaaaaatgaaaacaagcaaaacaaaacagaaaacctaagatacacgtctttaccttaaatacaatatttacccttggctacaaatttgaggtaatatgtcctacaataaatgttataatttggctgaaagtgattttatccattttgataagatagatgaargataaagaaaaaataggctaaataagaaataacttcatttatctacactttttaagaattacggtttatcttatgtgattcatcacttaacctgatgactactttttgttagttaatttcccattttaaaaaaacctaaatgttttcagtagaattatttattgtttgcagtgattagaaactaactatatagttttggcacagaatatccaagtatccataacaattaatgtgctataacagtaatgtctgcaagggtcactggaatgcgaggacttggcatgatgcaaatagccctgaacttccacatgtttacaaattctatttgcctcttcttggtacattttctctctgttttcttttacttctttttaccatgattttttttagatgttacaccctcccttggccatcctcatgcctaccatggtcatatcttttcctgtgtgtgtgtgtgtgtgtgtgtgtgtgtgtgtgtgtgtgtgtgcatatatctatctat

SEQ ID NO: 73958 - DNA, 831 bp, Homo sapiens
caacctgatttcataaggaagaaaatactaggaaaagcgaatataatcctcctccaaataatcacacaactttaacatttttagacatagggtccagaacacattttcaatccagtgtttcaggaagttagaaatgatacattaataaatgagtaaataagtaaaccaaaaaatgaaaacaagcaaaacaaaacagaaaacctaagatacacgtctttaccttaaatacaatatttacccttggctacaaatttgaggtaatatgtcctacaataaatgttataatttggctgaaagtgattttatccattttgataagatagatgaaagataaagaaaaaataggctaaataagaaataacttcatttatctacactttttaagaattacggtttatyttatgtgattcatcacttaacctgatgactactttttgttagttaatttcccattttaaaaaaacctaaatgttttcagtagaattatttattgtttgcagtgattagaaactaactatatagttttggcacagaatatccaagtatccataacaattaatgtgctataacagtaatgtctgcaagggtcactggaatgcgaggacttggcatgatgcaaatagccctgaacttccacatgtttacaaattctatttgcctcttcttggtacattttctctctgttttcttttacttctttttaccatgattttttttagatgttacaccctcccttggccatcctcatgcctaccatggtcatatcttttcctgtgtgtgtgtgtgtgtgtgtgtgtgtgtgtgtgtgtgtgtgtgcatatatctatctat

SEQ ID NO: 73959 - DNA, 1094 bp, Homo sapiens
ctgatatgcaattatttgttcaaactcaagtattagcttgaatagacttttagaatcattcagaagaataaagtttagttttgaatggaggtaaataaatgcaattacatattaaaattagtgtacactagtgctttacagccattacaaaacaataagactgattaataatttcatattttataaacagctagcatctaccagctgataaaataaaatactgtaccgcagattttccaatggattgctggatttcatttaaaaattctagctgctgatctgcatcctgtaattgcccttctatcaactgacattggataaatcctaaaatcaaacagcagaaagacagtcaaagtccacaccaattcagggatgcactcttcaagctaacataacaacattaataaaacaccctttyccccatcacaatacttaacgttttagattaaaaacaacagaaagaaagaaaatgaagagtgaaagaaaataaaatgggtagccttggaccttataaaatcatttactgaagaattcataatttataggaaccacgttataaaaatctattctctcaagatattatttgtgaattaaaaattttaaagacatgactttttcgagtgtgggcagtagagaacaatttaagtttagaaaaccacaaaatccatgtgttcttctctaatggcaagttaaaagcaattgctacttgtatctatattataaatatttatgaaaacagttgtcataccaactagggcagacacactagtctcatcaagtgtcatggcggtcttataccacttcagtgcctctttaactcttccttgtaaaatcatttggtatccaagttctgtagcaaattctgattgctgagggtttaaactaaaagctctctcaagtaacgtttgaattttttgaagaataagttgactacgtccacactaaaaagaaaaaaaaatgatgtaagatttcaaagtctaacatttctactgagactaaaggattattttttctaaatatatatattatttgtacttcaaaggagtgatgaaaaagaaaaaaattaataattaaggaaaaataaaactttccta

SEQ ID NO: 73960 - DNA, 1094 bp, Homo sapiens
ctgatatgcaattatttgttcaaactcaagtattagcttgaatagacttttagaatcattcagaagaataaagtttagttttgaatggaggtaaataaatgcaattacatattaaaattagtgtacactagtgctttacagccattacaaaacaataagactgattaataatttcatattttataaacagctagcatctaccagctgataaaataaaatactgtaccgcagattttccaatggattgctggatttcatttaaaaattctagctgctgatctgcatcctgtaattgcccttctatcaactgacattggataaatcctaaaatcaaacagcagaaagacagtcaaagtccacaccaattcagggatgcactcttcaagctaacataacaacattaataaaacaccctttcccccatcacaatacttaacgttttagattaaaaacaacagaaagaaagaaaatgaagagtgaaagaaaataaaatgggtagccttggaccttataaaatcatttactgaagaattcataatttataggaaccacgttataaaaatctattctctcaagatattatttgtgaattaaaaattttaaagacatgactttttcgagtgtgggcagtagagaacaatttaagtttagaaaaccacaaaatccatgtgttcttctctaatggcaagttaaaagcaattgctacttgtatctatattataaatatttatgaaaacagttgtcataccaactagggcagacacactagtctcatcaagtgtcatggcggtcttataccacttcagtgcctctttaactcttccttgtaaaatcatttggtatccaagttctgtagcaaattctgattgctgagggtttaaactaaaagctctctcaagtaacgtttgaattttttgaagaataagttgactacgtccacactaaaaagaaaaaaaaatgatgtaagatttcaaagtctaacatttctactgagactaaaggattattttttctaaatatatatattatttgtacttcamaggagtgatgaaaaagaaaaaaattaataattaaggaaaaataaaactttccta

SEQ ID NO: 73961 - DNA, 1213 bp, Homo sapiens
tgaatctgtttgaggctcaatttcctcatctttagcataggaacaataatgtttatattttacttttcttctgcgttaagacgttaatagtcaacaagtttttagggtttctatgatgaccaaaatcctaatgaagcaaaatatactgatatgcttgataagttgtgtagtgctattacaaggtaaaagattattattataattgcacacctttcctgaaagtttattaaatctgatattcaatgtgtaataaaaacacaataacaagaaaatatgaaactgtgtaatcaatagtaatgagaaatatgaaaatttccaccgaattttttattgtaaaagctacgaaattgactgggtgttgtggctctcgcctgtaatcctagcaccttgggaagccgaggtgggtggatcatctgaggccaggagttcgagaccagcctgtgcaacatgacgaaaccccatctctgccaaagacacaaaaatcagctgggcatggtggtgcacgcctgtaatccgatctacttgggaggctgagacaggagaacagctggaacctgggaggcgcaggctgcagtgagctgagatagtgccactgcactccagcctgtgtgacagagtgagacttcatctaaaaaaaaaaaaaaaaaaagctaaaagctactcctggttctcatagaaaaaaaaagctatgaaattatattaataaaaagaatctcctaccactagaacccaactgaaacccatgaatgtttttgagcaattaatgatgcttgtttggttccattaacaaatgaaatcctaaaaaaaatcttaactatttcccttaaattttacaaaacaatgtcaagactatagatataaaactggaatgaatgttgggttattttatataataaaacttgctagcatctcatatatacaaaaccctgagttagaaactgtctactgagggctgatttgcaaaggatagggagaattcaattcaaaaggatgcccttcaactctagtgtccactgacaggtgaatggataaacaaaatgtggtatatatatacmtacagtggaatgttattctgcctcaaaagggaaggaaattttgacacatgttacaacatggatgaaccttgaagacattacactaagtgaaataagccaataacaaaagcacaaatattatatgatttctcttacctgaagttcctaaagtagtcaaa

SEQ ID NO: 73962 - DNA, 946 bp, Homo sapiens
tacaaaaaataaaaccaaacaacaagaactgtctggaataacaagaaattttcctgtggttctttctaccacctcctccctatcccaccactaattcatatgttaggggtaactattgatattcagttcctgttcagctatctgcagttctttccattcaggaaattttatccttttttttttttttttttttttgaggcagcgtcttactctgtcacccaggtgggagtggagtggtgtgatcatagctcactaccgccttgaactcctgggctcaagcgatcctcctgcctcagcctcctgattagttaggatgacaggtgcataccaccatgccttgatactttttaagattttttgtggagatgggggtctcactgtgttgcccagactggtctcaaactcctggccttaagcaatcctcctgcctcagcttctcaaggtgctaggattacaggtgtgagccactacacttagctaggaaattacattccaatatttcaacatcagatttacctgataaaggcttaagaacagtggttttggttttggtttttgtttgagaacaagtcttgctctgtcgcccaggctgtagtgcagtggcatgatctcggctcactgcaacctccccttcccaggttcaagcaattcttgtgcctcagcctcccaagtaactgagattrcaggtgtatgccaccatgtttggttttagtagagaaagggttttgccatgttgcccaggttggtctcaaactcctgggctcaagcgatccactgcctcagcctcccaaagtcctgggattacagatgggaaccaccatgccccaccagaacagtggttttgataccatgctggtaatagggttatgaatagtcagagaatatcttcctatgtactgcttactgaattggttggtaagcagttgcctgtacttagttctgccca

SEQ ID NO: 73963 - DNA, 1153 bp, Homo sapiens
tgcattatacttcagtttttatgagacttctttctgaagattgtttgaagaagaaaagaaaaaaacaccccacacagcgctatttaaagcttccaggatatttgtctgtaaatatgtttctaaatttaattaaattgaaacatgtctcaaatgagacattttttgttttctctcaaacagcattctaaatccatcaaacckttaggtggtggagttactcatttgcttaaaccacagctttgaaagcccaaaggctgactgggtttatgagtttaaaagaaaatgtgttttactttttattcatagtgaggacggaagcatttattgagtaactactgtcatcctttatttacattttctcatttggttctcacaacagcccagttgtgagcctctgcactcttgatgaaaatatttaacatactgctgatttaattgtctgtcttcttcacaaggctgtgagttcccgagaaagagactgtatcttgttcaaatctgttactccagggcctatatcacttactgactattcaaagttaagagctagattcaaattctgtcccagtcacttaacttagtacctgatatacaggaggtactcaatttacagtaatagcttttaacattattttattactttgtatgattacttctaagaaggcatcaaatgtttttgaatgaatgaatcttttacatttgggaaattactagaattcttcaggttttcatcttctcacttcttttttgtttttgagacggagcctgctctgtcgcccaggctggagtacagtggtgtgatctctgctcactgcaaactccgtgtcccggtttcaagcaattctcctgtctcagcctcctgagtagctggaactacagatgtccaccaccacgcctggctaatttttgtatttttagtagagacaaggtttccccatattggtcaggctggtcttgaactcctgacctcaggtgatccaccgcctcggcctccaaagtcctgggattacaggcgtgagccaccgcgcacagccttcatcttctcacttctaatgttagagtgttaacctagagagccacagggctattggaaatctgtgaaatgtggaaactatgaaatatactggtgaaattgtactttctctttttttatgtt

SEQ ID NO: 73964 - DNA, 535 bp, Homo sapiens
tccatcttgtaaacacrggattgtaaacttatgagagaaataaatatactgtagtactgtaaacgtattttttcttccctataattttcttaataacactttcttttctgtaactagcttcattgtaaaactacggtgtaaaatacatacagcgtatgaaatatgtgttaaggattgtccagtcaacagtaggctgttagtttagttttggggagtccaaagttatatgtgaatttttgactgtgctggggtggtggggaggggttagggaggtttgatggccctaaaccttgtgtttttcaggagtcaactgtacagtttagaagaatatgatttagaatttccctgagattaagaacatattaaatggtgggaaggatattgatagacctctagatctagtgacactatcaactttgactgtgtctgtttgatgaaggaattaaaatctagtaacaaaagcattttgtagatagttattgtaccagtctttgttcttgaacatcagtgtgtttttttgaactgaaaatcacac

SEQ ID NO: 73965 - DNA, 535 bp, Homo sapiens
tccatcttgtaaacacaggattgtaaacttatgagagaaataaatatactgtagtactgtaaaygtattttttcttccctataattttcttaataacactttcttttctgtaactagcttcattgtaaaactacggtgtaaaatacatacagcgtatgaaatatgtgttaaggattgtccagtcaacagtaggctgttagtttagttttggggagtccaaagttatatgtgaatttttgactgtgctggggtggtggggaggggttagggaggtttgatggccctaaaccttgtgtttttcaggagtcaactgtacagtttagaagaatatgatttagaatttccctgagattaagaacatattaaatggtgggaaggatattgatagacctctagatctagtgacactatcaactttgactgtgtctgtttgatgaaggaattaaaatctagtaacaaaagcattttgtagatagttattgtaccagtctttgttcttgaacatcagtgtgtttttttgaactgaaaatcacac

SEQ ID NO: 73966 - DNA, 690 bp, Homo sapiens
ttgccatttctccctactctactgtgtcttcctcttgtcagccttccgcaagacccctctgaccagtgtgctccccctcttcctttccaatcctccaccactccacacaaatcctaatcatctctgactgttttcagatcttgcaagctctaggatctcatatttctgggaggctttcctctgccccagctttcccagagtggaaggaagatgagaaatgctctgtttctagtttgatccttttgcagagctaaataccaatttctttccaaagaaatataatttcacaaagagacttaatcctatttctggtgtaataaacatggcaataatgtggtaagaggcaattaattcttcatgcattcacttacataagggctgctagatttgctggtatttttttttccgtgagctctaaatatattctttctgattcattcattaaacgaatactaattgagtgccacatgagtgtyaagcacttttctaggttcatgtcattcattagtgagcaaaaacctctaccctcatagagcttatttttatttttattttttgagacagagtttcactcttgttgcccaggctggagtgcaatggcgttatcttggttcactgcaacctccgtctcctgggttcaagcgattcttgtgcctcagcctcctgagtagctggcattacaggcatgtg

SEQ ID NO: 73967 - DNA, 2065 bp, Homo sapiens
tataaaagtatgtttaactttgtaagaaactgccaaagtgtttcacaaagtggttgtactattttgcattcccaccagcaatgagagcaatgaatgagcgttcctgttkttccacattccagcaaggacttggtgctctcagtattctagattttagccattctaataagtatgtattggtatctcattgctgttttaatttgcatttctaagatgacatatgatgtgaagcatctttccatatgcttacttgccatctgtatagactaatttttcaccactttgttgagtggggccttacctatcagagaaaaacaaggagaataatttcttttagcagctgggtttgcatctttagactctttctacatatgccaagaggaagagagttcttttttcaatttttatttttattcttattgttattttctcttgctttcaaagaggaaattggaatagacaagctttattccaccatctttaactggaagctccacattaactattttaaatacatcagattaaaaataaaacatagatatcaaaggtttttggtaagaataaagaaaaggtaatattgctaaggtcaagttctggggttgtctaaagggtcttatttgattttctaaactttgacagtaggagaatttatttgggaagaaacaattagttccatagaccaaggctcatcatgtatcatttgcaagtggaaaagaatgaagctgacacctagaaagatgtcctatttcactatcctaagtctagttggccagggtggccatggttgggagattttatcaggctaagctgctatttgaaagaggagtataaaactttccaaagtgtcttaattaaaactcaacagacaaactcagaggacagacatggaggaattggaagagatgattcaatcagcctcaaggagaatgaatactttggcttcaaagaagccaactcaaaaagagctatgtgatttctgagaacatggtgcccatccatggcctgtgctgggcaagcctgtgtgatttcgaaggacagaatttgagtggggggtggagtgttaattgatgacgcctttatcaagtctgaacaaaatgaaacaaacaaagaaaatcagtcaattggggcaaaccagcagcttttcaagtggagtctgcaatctgttttggagattggctttgtcgttaggatgttacacaatggggtgacataaccatttttctcctctccagctgtttgttactgtttataccccgtgtttgtgttagatataaaattacctgacaaggtaaaatgaaatgatgttatcttcctaataaacatgtaatggccatgctagtttcagcaacattgattgagcagcccatctctgggatccagagaagtcattagaagtaccattgatacttcttttcttgatgcctctgggtggagattgtggtgagatgatgtcactgtgagcagagtgtgtgtcttctttctttcaacggcttttaatctacacatttcctgagggaagagagtgtcctctaccttttttaaagtacattcagagatgtgctagggaagggtttgcacttagtagtcagctgtcccaccaaagaggagcagcagtaagttcagtgatattttgcctcatctgatgtgcacaattggtgccctgatgatattccaatgggtccaagtcaaacggccagtcaataacgtttatgcagcctctgatgacacagaaagacaccagaggctcacatggaggaagactgatgcagtggaatgggtgagtgcttgaagctaggcaggcctgtgttcaaatcccagccccagcacttattgcctctaaggcctggaatgagttattaaatcaccctgatttctagatttctccacagaatagaaagaaaaattctatcccaaattattcaattaaatcaataccagtattgagtacctactatgtactagagtcaattaggagagacactttttgttattccttcggtaaatatgttgtgaacctactatgtgccaggcactaaactgagtgaaaaaaaaaagactgcaggaa

SEQ ID NO: 73968 - DNA, 565 bp, Homo sapiens
tagcgttccagtggatggatggaggggctgtttcctgagtttagaatgaaatctgacatgaaactgccttgcttcagctcttcctggctcctgcctactttcaggactcagccctgcctccctccttcctgccgcacttgctgagaggaacacggtgaactactggagcacaacacactgtttctcagggccctttgttcacgttctccctgcagcacccttcttaacwacacctggctggcactcactcacctgtcaggactcaggaagccatgcctcagttcgcagaactagcaaggggcttctttgggctcctgccaagcttccatgatgcattcctccatagccctgaaatttgctctttgcttttctttctttttatggatttgtgagatccgtgagaacaaggtctatgcctcgttcgttttggaatcctcagcccctagcacagtgcttggctcagaatggccctcaataatgcagcactgaatgactctaaacaaacagcaagggtatacaatttgtttttggcagaagagcagccaaggtccctctgcacaatgga

SEQ ID NO: 73969 - DNA, 565 bp, Homo sapiens
tagcgttccagtggatggatggaggggctgtttcctgagtttagaatgaaatctgacatgaaactgccttgcttcagctcttcctggctcctgcctactttcaggactcagccctgcctccctccttcctgccgcacttgctgagaggaacacggtgaactactggagcacaacacactgtttctcagggccctttgttcacgttctccctgcagcacccttcttaactacacctggctggcactcactcacctgtcaggactcaggaagccatgcctcagttcgcagaactagcaaggggcttctttgggctcctgccaagcttccatgatgcattcctccatagccctgaaatttgctctttgcttttctttctttttatggatttgtgagatccgtgagaacaaggtctatgcctcgttcgttttggaatcctcagcccctagcacagtgcttggctcagaatggccctcaataatgcagcactgaaygactctaaacaaacagcaagggtatacaatttgtttttggcagaagagcagccaaggtccctctgcacaatgga

SEQ ID NO: 73970 - DNA, 1021 bp, Homo sapiens
ttgaagaatgtttatggccatagcctctctgttattttacaaaaaactccaggaaatatggtgtttttctcagaatgccaatataaaagttgatataaagattggtgatgtgtaagctttgacattacataaatatatgtaggcgttgtaaaagttaacaaccgttttatttataattatactgcagattgatatttttatatccatattgtcgatggtaacctttctatcttcacttcagtctgggcccaagaatgtttatattagacttttatgtctgtgtttccttctgtaacatcagggcacatgctggctttcttcagtcacaggagtattagtgtcacccatccatcctcccaggaaaaaaattcttgtcccattggtctcgtaattcatggtattatggtgcacagtttgatatcccttcattgccatgtaactacaaactgtgctttctccttcccctacattctcatcataatatttctggattgccacatctgtcttgcaagatagaaaagttatatttggttgaaatttgagccactggattgagaaacgcttgttatctgactcctccaggtttacaagaatgtggatccaaactctccttcttgcatacggatgaggaagatagcacgtttttatcctccgcttagctctgctctaagggggaaaaatgccctgtcttaaatatttgatcctctttacaaaagattccctactgaacagacagctatagtatttttaactggcgaaaaccactctggtgtcacttttaaagtagaaaaggaaaagcaatattcacacaatatggagaactattgaccccagaatagtgccattttctttcttgatgggttcaaattaarcaaaacctagacattttgctccacgtagaggcatctcagtgcaggccagcttgtagattctgcaccaggctctgcaggttactagcgatataacctccctgagcctcaggttccttgtcagtcaaagatagcattgaaagtcactccca

SEQ ID NO: 73971 - DNA, 1073 bp, Homo sapiens
actgaatgtgagtttttctgcaaggtaagaatggggaaggaaaagtgtgctcaaagttgaagacaaaacagcacaggtgcgatggatatttctgataatttagtatttctgaaggttcaagtgtaaggtagggagacatggaggaagatgctaatgacgtcggaaccgcaagaatgagtgaattaattcaatgaatatttcaaagtctcctgtatgtcattctaaaaacattttaatctaataagcaattsaggaccatctaaagggaaatattatgacctgattttcattttacgtaaaacacttggacagatgtggcagtagagttgagaggtgtgagactagactaatgtatcactctaggaaagatgtggtaggagcctgccctacagaagtagctgataaatggaggaaaataatgcagtatgagactacctagcaacacaattgggagagcaggtgcttacaggcaacatccacatagcagtctgtggctgggaaaagtaattcagtctccttgcacctgaacttcatttatctcatctctgacagggctactaaaaggactaaattagtttacatctgaaaggattttagaatagtgtggcccaatcaaccctgatagcgaatatgggagagtaaaaattaatattgcattgaattttggacatgctgtgtatgtgatacttttgggaatatttggcgaaatccagtaagcagctggatatacgggatgagatctcagaggtaatctcatgggttattaacattgacacattaatttgtgtgcattcgttactgataacaaagtaataatgcacagactgcagagactgtaatgtttgctaagcagagcttgtaaggcctagagatgtttactagctaatgaatgaacatcttaaatgctattaaaaataatttaaagatgacgaagtgcactgtgtaaaacagtgggttgcgtgaatgttggcaaaagaaaaagtgagatttctgtgtagtgatacctactgacacattagcttcttttctacagatctctgttctaaaacaactgtaaagttgatatgtatcaa

SEQ ID NO: 73972 - DNA, 823 bp, Homo sapiens
tatagctacttgtgtttatttgtgagatactatatttcatttttaatatcttttagtagaccttacacttttctgattatakttcctcatctttcttttgtgagagtgggacagagcaatagtcatttatgcattcatctagccaagtgaatctgcagttttacacatgttaatattgaacgggcagaggaagcagtaagttacacatttgtctcaggtgagtagaggaattactttgagttctgtcctttgttccatacctgtgaagattaactctcaatttacattgctggggtgaaattcaacagaactgttttagggtgaagatcttggtgcacccaaagaagaccctagtgagaaaattgtgaaggaggtatttagagatgttatttttgtagctgtcttatttaggaataaaacgggaggcaggtttgcatgacacagctcccagcttggctgttcactttgacttagtgatttgggggctctgaaatttattttcctttcacagaaagatagatatctgagtagatggaggaatgctactcattccctatcttaaaacgctgcctttttgcctaaccctgagttttctatattttttttctgatctcagatataataaataatcacaagtcccatcagtttctcacatttactataatcagttcatgtttcatcaggccatttggatgacatacttaggttactaatgtacatttttaatctttttgtcattttaaagttttgcttttatatgccaattcatggctgtctgttagaattacttgcgaaaagcttgagcttatgaccgtcctttaaa

SEQ ID NO: 73973 - DNA, 823 bp, Homo sapiens
tatagctacttgtgtttatttgtgagatactatatttcatttttaatatcttttagtagaccttacacttttctgattatagttcctcatctttcttttgtgagagtgggacagagcaatagtcatttatgcattcatctagccaagtgaatctgcagttttacacatgttaatattgaacrggcagaggaagcagtaagttacacatttgtctcaggtgagtagaggaattactttgagttctgtcctttgttccatacctgtgaagattaactctcaatttacattgctggggtgaaattcaacagaactgttttagggtgaagatcttggtgcacccaaagaagaccctagtgagaaaattgtgaaggaggtatttagagatgttatttttgtagctgtcttatttaggaataaaacgggaggcaggtttgcatgacacagctcccagcttggctgttcactttgacttagtgatttgggggctctgaaatttattttcctttcacagaaagatagatatctgagtagatggaggaatgctactcattccctatcttaaaacgctgcctttttgcctaaccctgagttttctatattttttttctgatctcagatataataaataatcacaagtcccatcagtttctcacatttactataatcagttcatgtttcatcaggccatttggatgacatacttaggttactaatgtacatttttaatctttttgtcattttaaagttttgcttttatatgccaattcatggctgtctgttagaattacttgcgaaaagcttgagcttatgaccgtcctttaaa

SEQ ID NO: 73974 - DNA, 697 bp, Homo sapiens
gcaagggggtttctttccaccattttttttctccttgctctgccagaggaatagaagactcaacagggagaatagtttgaaacacattaataaaatttgctttgcattttgttcttgtgcacatgatgttctccctgtcaatcagagttatcatgcagtattgcagtgaggaggtagatgcaactgttgagttaggattgttacaggtggagggcagaaagagaataatttgcttcagatattcaaagtacaatttatagcaagataataatagtctagtgagccagacttttcagagaattacatttttctctttagayctttatgtctcctccactaacatataagtacccatgccaggccaaccataagttttatgttatgtagatccccaccagactggaagaaggtggcatagatcccatgttttgatgctgggatacctggggaatattgggtaacaaagacagaagataaaagtgcatgtgtaccagtctacctcatctgagatataaatgttgatagagggatgcctggagaatgaggcttttgtctaattcatgtgtgggaatatagagggaactgtgtcccaaactatctcttacctttaccaattaagatagtgaccccatcaaatgtagtctgtggcatagaatggtatggcagaaggagagccaaagtttaatgttttgagtag

SEQ ID NO: 73975 - DNA, 697 bp, Homo sapiens
gcaagggggtttctttccaccattttttttctccttgctctgccagaggaatagaagactcaacagggagaatagtttgaaacacattaataaaatttgctttgcattttgttcttgtgcacatgatgttctccctgtcaatcagagttatcatgcagtattgcagtgaggaggtagatgcaactgttgagttaggattgttacaggtggagggcagaaagagaataatttgcttcagatattcaaagtacaatttatagcaagataataatagtctagtgagccagacttttcagagaattacatttttctctttagatctttatgtctcctccactaacatataagtacccatgccaggccaaccataagttttatgttatgtagatccccaccagactggaagaaggtggcatagatcccatgttttgatgctgggatacctggggaatattgggtaacaaagacagaagataaaagtgcatgtgtaccagtctmcctcatctgagatataaatgttgatagagggatgcctggagaatgaggcttttgtctaattcatgtgtgggaatatagagggaactgtgtcccaaactatctcttacctttaccaattaagatagtgaccccatcaaatgtagtctgtggcatagaatggtatggcagaaggagagccaaagtttaatgttttgagtag

SEQ ID NO: 73976 - DNA, 555 bp, Homo sapiens
attacatttattgtgcactttatttccattatgattatgttgtaatagataatgaaataatatacacctcaccataatgcagaatcagtgggagccctgagtttattttcctgcaactagatgttcccatctgcggggtgacaggagacagtcacaaattatcagacattacattctcataaggagcacacaacctagacccctcacatgtgcagtttacaatagggttcatgctcctgtgagaatctaatgccaccagtgatctgacaggaggcagagctcaggcagtaatgctcactcacctgccacccacctactgctgtgcggcctggttcctaagaggccacagaccagtactggtccatggcccaggggttgcagactcctgtaaaagagcrgcacaggcagtggaaattgcaagatcgttcagggtagctccagtagctgaagatgctgagagagcaggtgtatataaaagtgtggtagaaagtgaagaatgacaggcaggcaaggaccagtccacgatagctagaaaactagttatgaaagccccca

SEQ ID NO: 73977 - DNA, 2189 bp, Homo sapiens
aacaataccttcctttgaagttcttttctcgtctctttccgcatctcgcccaaagccacatcaccacagctgatacaagttcatctcctccctgctttgtaaaagcttcaacttttgcaagttctctttcttacctcacctttcctctctctcactccacctcctttgcccaccaaaactacctccttcacccaccaaaactacctccttccactagacttctcaccccactacccctggaagcacatcaatgccttgcccaacmaatgtgtctttctctttcgaaggcaatagaaagaagagatagtaaacacttaacacattttttaagcacaaggaaattggagaaatttgtctgatcttagtatctctacatgttctttaacatattctccattaagactgcaattgtagaaaaaatgttaacattaagaacacaatgacaatacaaggcagagaaaacagaagtcccaagagagaaacaaggcactataatgaggccatggggaagaaaactgaagatcttgggtgaacaacttccctttcccttctttgatgtggtacatttagccctagaaacagtaaactggccaagacctcaaggttttcccttgcatattcaggctactcctacatcctgctggattcctgtcacatttctctgccttctcctctaacacctctattccaacagcttccaccagccatttggggatctagttcatttcagagcttcacagctggatggagagaggggtactcaaggggaagcttagggaaaaggtagtgttagcaaatgggctcagttctgggaaagctgaagtatctccatgcatgggcaaatacaactgctttccagttctgaacggctgaggggtggaaaaaaggcctcctcacttgctctgcctggagaactgtctttgagagaaaaactacacttactgaccacttaccatatataagccgaacacctgttcatgccctttacatacgttaactcctcttcttctcaataaccatataaggtaggtgttgtcattatgcccattgtttttagacagggcccaggaaggaagcctgtctcagaacacatggccaataagtggtttgggtgcccatgccctgactccttccctgctttcttgaccccagcactgtacctcctctttagcgcacaaggaaatgtattgagcagcttctgaatgtttggtttaatccacttatttcccatcttttctcaggggtggtgggttgtgtttctgggtggaagaaagagcttaaaataaaaccagggaatcacattctggcattgtgtccatgggaatagaagacacttcttctaggcccttatggaaacacgcaagtgttctgtggagcccagaagctcaaggtaaaatcctcagtatgaacctgcaatctgtaatataggggtacatggagggaccactccacccctcaaagttccccgctccctcagaacttcttattttcttggctatacatccaactagaaattcaggttgacaactcttattgtcaaataccaatactaaggcatatgattcaaaccacagcagccgccacccagcggagtgccctctcatatacactttgacataggatcctgcatgcaacaagtttgaatgaattgctgtctctctcaaaactggatttaatccctaatatcagcatttggttggtactctttcagagatataccttgagcattcaaaaaatacttaaaagattcattattttactatcataacagtaataatgacaaaggctaaaataaattatttatgtctaaatctttcaagaagattagtctggcaggctagaaaatccagccagtattttttaaaatgtttttagttttctagagacaggacagggatatcgctatgccacccaggctggtctcaaactcctgccagccaacataacatgagtcagcctccagcctccttctccaacagcagctgcagtgtatctcagttgcttgatgtcagccaacactcaggttctgaaattactgaatgcattacttccattccagtgtgcaaatagggtaagttattttttttaagccaggaatgaaaataaccctgttaggaatcagtgctatcaacaaatgaggtaggctgggcatggtggctcatgcctgtattcccagcgctttgggagtc

SEQ ID NO: 73978 - DNA, 2189 bp, Homo sapiens
aacaataccttcctttgaagttcttttctcgtctctttccgcatctcgcccaaagccacatcaccacagctgatacaagttcatctcctccctgctttgtaaaagcttcaacttttgcaagttctctttcttacctcacctttcctctctctcactccacctcctttgcccaccaaaactacctccttcacccaccaaaactacctccttccactagacttctcaccccactacccctggaagcacatcaatgccttgcccaacaaatgtgtctttctctttcgaaggcaatagaaagaagagatagtaaacacttaacacattttttaagcacaaggaaattggagaaatttgtctgatcttagtatctctacatgttctttaacatattctccattaagactgcaattgtagaaaaaatgttaacattaagaacacaatgacaatacaaggcagagaaaacagaagtcccaagagagaaacaaggcactataatgaggccatggggaagaaaactgaagatcttgggtgaacaacttccctttcccttctttgatgtggtacatttagccctagaaacagtaaactggccaagacctcaaggttttcccttgcatattcaggctactcctacatcctgctggattcctgtcacatttctctgccttctcctctaacacctctattccaacagcttccaccagccatttggggatctagttcatttcagagcttcacagctggatggagagaggggtactcaaggggaagcttagggaaaaggtagtgttagcaaatgggctcagttctgggaaagctgaagtatctccatgcatgggcaaatacaactgctttccagttctgaacggctgaggggtggaaaaaaggcctcctcacttgctctgcctggagaactgtctttgagagaaaaactacacttactgaccacttaccatatataagccgaacacctgttcatgccctttacatacgttaactcctcttcttctcaataaccatataaggtaggtgttgtcattatgcccattgtttttagacagggcccaggaaggaagcctgtctcagaacacatggccaataagtggtttgggtgcccatgccctgactccttccctgctttcttgaccccagcactgtacctcctctttagcgcacaaggaaatgtattgagcagcttctgaatgtttggtttaatccacttatttcccatcttttctcaggggtggtgggttgtgtttctgggtggaagaaagagcttaaaataaaaccagggaatcacattctggcattgtgtccatgggaatagaagacacttcttctaggcccttatggaaacacgcaagtgttctgtggagcccagaagctcaaggtaaaatcctcagtatgaacctgcaatctgtaatataggggtacatggagggaccactccacccctcaaagttccccgctccctcagaacttcttattttcttggctatacatccaactagaaattcaggttgacaactcttattgtcaaataccaatactaaggcatatgattcaaaccacagcagccgccacccagcggagtgccctctcatatacactttgacataggatcctgcatgcaacaagtttgaatgaattgctgtctctctcaaaactggatttaatccctaatatcagcatttggttggtactctttcagagatataccttgagcattcaaaaaatacttaaaagattcattattttactatcataacagtaataatgacaaaggctaaaataaattatttatgtctaaatctttcaagaagattagtctggcaggctagaaaatccagccagtattttttaaaatgtttttagttttctagagacaggacagggatatcgctatgccacccaggctggtctcaaactcctgccagccaacataacatgagtcagcctccagcctccttctccaacagcagctgcagtgtatctcagttgcttgatgtcagccaacactcaggttctgaaattactgaatgcattacttccattccagtgtgcaaatagggtaagttattttttttaagccaggaatgaaaataaccctgytaggaatcagtgctatcaacaaatgaggtaggctgggcatggtggctcatgcctgtattcccagcgctttgggagtc

SEQ ID NO: 73979 - DNA, 749 bp, Homo sapiens
aatgattttattagtatactaaggttgaaaatttaaataatttgtagataataagaatcaggtttctcagtgttggagaaaaatgcaaataagaaaacggagaaggactctgagtacactgcctatggggtagccctgctctgcaggagaagtcatgaagctgtaatattgccagagctgtaatactgccacttcaataaggctgttttcttctaccctaccagtggctcactcttaaattctttcctgggcaaagccaataagtctcatgggctaagccccaatttggggctcatttgccctgcatcagcatggtacccaaagtgggatgaagagagaagacggcagcatgagagatggttgaagaaatggcagctgacatttggtgatcaacagggtggcagtcagtgaaatggcatttggtgggatgaacagtcagtggaatggtagtcaatgaggtggcagttggtgagatggtaaaaaatgaaaattggtaaagacaatgagcagagagacagtgaaaggcagcaaagcagagctgttaacacytaagagctgttacactaccagccaaaggctattttcagagccatcattttccttggcaggcagtagaactaagcagaaatgcaagttgccttaatactgctgctttgtgtgagacctgctgctctgactaccagaccaattggtttctgatccccatgatagcccttttcaccatggaagcttagccaacccaagctaag

SEQ ID NO: 73980 - DNA, 749 bp, Homo sapiens
aatgattttattagtatactaaggttgaaaatttaaataatttgtagataataagaatcaggtttctcagtgttggagaaaaatgcaaataagaaaacggagaaggactctgagtacactgcctatggggtagccctgctctgcaggagaagtcatgaagctgtaatattgccagagctgtaatactgccacttcaataaggctgttttcttctaccctaccagtggctcactcttaaattctttcctgggcaaagccaataagtctcatgggctaagccccaatttggggctcatttgccctgcatcagcatggtacccaaagtgggatgaagagagaagacggcagcatgagagatggttgaagaaatggcagctgacatttggtgatcaacagggtggcagtcagtgaaatggcatttggtgggatgaacagtcagtggaatggtagtcaatgaggtggcagttggtgagatggtaaaaaatgaaaattggtaaagacaatgagcagagagacagtgaaaggcagcaaagcagagctgttaacacctaagagctgttamactaccagccaaaggctattttcagagccatcattttccttggcaggcagtagaactaagcagaaatgcaagttgccttaatactgctgctttgtgtgagacctgctgctctgactaccagaccaattggtttctgatccccatgatagcccttttcaccatggaagcttagccaacccaagctaag

SEQ ID NO: 73981 - DNA, 2446 bp, Homo sapiens
  misc_feature (1)...(2446): n = A,T,C or G
ggttttttaaatgacggtttttgttttgttttgttttgttttgtttttttgagacagtccactctgttgcccaggctggagtgcagtgatgcaatctcggctcactgcaacctccgcctcctgggttcaagcgattctcatgccccagcctcccaagtagcctgggattacaggcgggcaccaccacaccaggctaatttttgtatttttagtagagatgggatttcgccatgttagccagtctggtcttgaactcctggcctcaagtaatccaccagcctcggccttccaaagtgctgggattataggcgagagccatcgctcccagcctaaaatgacagttttaaacataattagaaaatatgtaaaaggtgaaatgtgaatcaaatatttgtggaagcccagggttggtggtgggcactactagaacactgctgcactgggcaccgtgccatattttgctgtctacttaatataagacagcaatttagcagcactttttaaagttgataaacagagtcagccaacttaagttaaaacaaatgcattgtgttttcctttgggcaattaacttagyaattaataaatcactctttctgaaaaaattaagccattaatatagggatagtgtatgaccctaaaattatttaaaaagacatgtctaaatatttttaaaatttgtattatggcaaatgtaaaatataatccaaagtaaaaagactgattaaaataaattctcataaacccatcatctggtttcaagactgtgaacccataaccaatcttgttttatctaaattactcccctcctcccagcccaagccaaattgatccaagccatggatcaatttgaagcaaatctcaaacagcatatcttttcttctcaaagtatttcataggtgttctaaaagatgaaagagttttctttaagaacataaccatactcctataattccaatattccttactgtcatcaaatatccactcagtgtgttcatagttctcttgttgttgcatagtttatannnnnnnnnnnnnnnnnnnnnnnnnnnnnnnnnnnnnnnnnnnnnnnnnnnnnnnnnnnnnnnnnnnnnnnnnnnnnnnnnnnnnnnnnnnnnnnnnnnnattttttttctggatttattaaatttgtttccaagtagtgttgatcgatgcatactaatgaatggaagctttcatctgtagccagaaaaaagaaattggttaagtttaatactttggaaaattttaaatttctagacccactaatattcaatttcccacaccttgaagggtgtttatttttgtgctgttgcctcagtaaataatgttgtgaacaagtgcaagtcagtctaaattctgtttaatttgccactaatgtacctgtacttacattcactttaaaatgtcaggttaaaaatgatacatttgggttcacacattttaaaataccagtaatttatttaatagagatttatctctgttcttttatttttgccaaggaaagtttcacccaccacccttattaccaaagtggtatgagggctttactctgttttcctgggtttttggttttaagcattttcccttttaacagagactttgctggtctacaggaaagaatactcatccaaatgcagtcatcctaatatatatctagcttttgtaaaaaaggaaatctcttacctagcagtcagaataaggttttaaatccaggaaatgttatctcataaatacttaatctatagaattttttagaaaactcatataactccacttctttgaaagatggattttgctaatttatataggaatatatttatacatgtgtatgtattatgtaaattatatgtatgttatatatgttttatatactatgtattatgtgtatgtttacatatataatgtatgattagtgcagcgcatgatctttttagttctgatggtgtggttatttttacaagtgaacgttttccttatcatagtctttgatgaccattgtatatagcatactagtttggaaaagaacttatttagataaagtacatactgcttttgaattttttcatgtttttttttcttaaaattattataggcattgattcacctatgaaacttgaaagtttaacggatataatacaaaaaaaaattgaagagacaaatgggcagttccttattggtcagcgtgaagaatccttaccacctccttgggccacactctttgatggtaaccatcaaatggtcatccagaaaaaggtactgtatcctgcaagtgagccattacatgatgaaaaagggaaaaagagacaagctccccttcctccttctgataaacttccattcagcttaaaatcacagagtaacacagatcaattggttaaggacaactggggaaaaacaagtgtatctcagacatcgtctttggataccaaactatcaactctaa

SEQ ID NO: 73982 - DNA, 1091 bp, Homo sapiens
ttataatgaatatattggcagtctttttaacagacctactgaaagcagtgtgttgctgtcatcctcttccaaaaattacttagataaagtcccatttcaaactcccatcagtctttctccagaagccttcttagaatcaaacaatatccaaatggaaaatttccatcttatcacttatttgaagtaacaaattaaattagctggtagttaattagctgaccaaattaaataggaatgaaaaatacaaagaatactcttagaaatattgccctgtaaatggaatgctaatctctaaatgcagtttattaggaaaataggatattagggaaatagtcaaagattggattgtttctatctttttaaagttttcatggtaataaaatattccaacttcagatttggaagtgtcttatatccccagaatttcctttgaatcgtaatatttaggatattagggaaatagtcaaagattggattgtttctatcttcttaaagttttcatggtaataaaatattccaacttcagatttggaagtgtcttatatccccagaatttcctttgaatcgtaatatttttctctctaaattttattctgtctacagagctactctgtttctcatcttagtttgttaatttattattttaacatacacttagttctttggaatcttggggaaattaaatatgatattaaatatgattatacagcagagggtacttttttggatatttatcagattctataaggataagatactcctggacagtaaattgcatgattgggaagttcattaacttttccaggccactgtatctgataagttagaaatgtaatatatgaaattgtgatctaaggtattatacttctggggacatggamaaatattgtacatcttgtttacagatataaatgatcacaaaagtctttcattgtaaagtaaccagtatacagtcatcaaggaatataaagtttatatgaaaaatcgggagtggctccagatatttcttttaacttgctaacttgactaaacatcttaaagtttgagtcaaatagtttacattaactggaagtcattattattcacggata

SEQ ID NO: 73983 - DNA, 635 bp, Homo sapiens
aaatgaaataaaaattttcattttgaagattttttwaaaaattttttcttattaaattaaatttttgtattatagaaaaaaatcagaaagtaaaaatcacccattttatatacacagacacacacccatatataaaatcacccatagtcttaaaatgttggtgcatatcctgtcatctctctatcgcttcactctcttcctctttctcttcactctcttactcttcacctgtatctctataattatataacatagaattaatgttttatatatttccaaaaaatgttgttactggatattttatatagtttattttaaaaactgtcttattgtctaccttgaaagtatctgaaaaaacgtttgttgatgtgctctgtacaccaaaggcagcaaattggtgttattctttttagtaaccttaaagcaatataattcagagaatgaagtatatgaagtacccttgacaaattttgctaaaaatcattctatattcaaggacaaaaaataatttgataagaagaaagatctccccttctcatatatttttctaaacagcagtattcacagtaacttatagaatattggactaagtattccttccttgaaattatagccacattcaaggtagactaaaa

SEQ ID NO: 73984 - DNA, 1126 bp, Homo sapiens
tatgcctagcaattcatttttataaacaacagaaatgttgtttatttgtacccaaagacaaggagtttcaaaactttatcattcataataatcaaatattagaaacaattttaaagtctgcaaatggtataatggatactttattatataatatattcatataagaaattcagtgaagcaatttaaaaaaacaaattacatctccattaagtaacatasctgttcttaaaatattggatgaataaaacctatacaaaataatacatatagtgaggtgtcaggtatataaaatgtgaacagtggcaaaattgaacaggagaatactgtttaatttccatgtgtttgtatagtttccatagtgtttagaaatgtatattttcctgtaaacctataatctatagaaagttacacagtatatgatttattggtcttggtggtggttcaaaggtattctccttgtgaaaatttattgaaccatacattttattttgtttcctttcatttatgagtgaaatatttcataataaaaatgttttatgagaagaaaattacagagtactaaaatcttctttttttcctgtctatttttattttaggttcagagggtacatgtgcaggtttgttacatgggtaaattgcatgttgctgaagtttggtgtacgaatgatcccttcacctaggtagtgagtgaagtatcctataggcagtttctcaacctacattcctctcctaccctcccccatcaagtagtccccagtgtctatgttcccatctttgtgtccctatgtattcagtgtttacttcctacttataagtaagaatttgcagtattcggttttctgtttctgccttagttcacttaggataacagcctccagctgcatccatgttgctgcaaaagacaagattttgttcccttttatggttgcatcgtattccgtgctgtatatgtgaaatattaatttctaaaataataaaattcagatattaagacaaaaattattttaattttatatagtttgtattgcatcttcattaatacaatataaagtatttactttttactttagtttttcaatttttaatttttgtgagtacagatttggagtttggtttgttcttatct

SEQ ID NO: 73985 - DNA, 1126 bp, Homo sapiens
tatgcctagcaattcatttttataaacaacagaaatgttgtttatttgtacccaaagacaaggagtttcaaaactttatcattcataataatcaaatattagaaacaattttaaagtctgcaaatggtataatggatactttattatataatatattcatataagaaattcagtgaagcaatttaaaaaaacaaattacatctccattaagtaacatagctgttcttaaaatattggatgaataaaacctatacaaaataatacatatagtgaggtgtcaggtatataaaatgtgaacagtggcaaaattgaacaggagaatactgtttaatttccatgtgtttgtatagtttccatagtgtttagaaatgtatattttcctgtaaacctataatctatagaaagttacacagtatatgatttattggtcttggtggtggttcaaaggtattctccttgtgaaaatttattgaaccatacattttattttgtttcctttcatttatgagtgaaatatttcataataaaaatgttttatgagaagaaaattacagagtactaaaatcttctttttttcctgtctatttttattttaggttcagagggtacatgtgcaggtttgttacatgggtaaattgcatgttgctgaagtttggtgtacgaatgatcccttcacctaggtagtgagtgaagtatcctataggcagtttctcaacctacattcctctcctaccctcccccatcaagtagtccccagtgtctatgttcccatctttgtgtccctatgtattcagtgtttacttcctacttataagtaagaatttgcagtattcggttttctgtttctgccttagttcacttaggataacagcctccagctgcatccatgttgctgcaaaagacaagattttgttcccttttatggttgcatcgtattccgtgctgtatatgtgaaatattaatttctaaaataataaaattcagatattaagacaaaaattattttaattttatatagtttgtattgcatcttcattaatacaatataaagtatttactttttactttagtttttyaatttttaatttttgtgagtacagatttggagtttggtttgttcttatct

SEQ ID NO: 73986 - DNA, 965 bp, Homo sapiens
tgcatttgtataattatttaatgtctgtcttctcccagtaatctgtggctaagactccattggtcttagtcacagtcatattctcagcattcacaccaaggtggccacatggtaggagttcatgaggaatttgtggagccaatgaacatctactctgaaaggcatgattattgcatatcactgggagaatattatcccctcaactgttcagtcagtgacaaacacaatattaccttaagattcaagccaagtagttgattttgtccaaagcttactattgcccacttctgaagtagttacgttatagctacacaaaatataaagaggagagacactgtgtttaagtccttcctcacaagtgcgtatgttatgctacaatggcaatgaaggacctgcagtgcaatccatggctctcagactaaaaggagtgaggagagattacarccctatctaaaaccctggtgccaggtgacaataaacagtgagtccaagggcctgggtgccccaaccagctaagagaagaaagtctgcctttggtttgttacaagcaagcccaagtggaattcagcttcctgatgcttccccaggaagagtcctggcctgcccttaggatagtaataagagagaggccagctcaccacatccctgtgcagggaggggaagcttgccatgtggaggaggtaaccggtcacgagcttcctgactcttctttccggtccgtgcactttttctgtgagtagattcctctttgaagtccccaaagtgctgagttagaagaagtataaaatggatcaaggccacaaaaggtagcctataaatctcatatcttactaactttcaaaacttctcttgatttaactaagcaaaaccagctccatggtaataatatcttaccatctcagggccctgaggggcttttataattgctatctgcataagtgcattacagtttccaaagctctttt

SEQ ID NO: 73987 - DNA, 965 bp, Homo sapiens
tgcatttgtataattatttaatgtctgtcttctcccagtaatctgtggctaagactccattggtcttagtcacagtcatattctcagcattcacaccaaggtggccacatggtaggagttcatgaggaatttgtggagccaatgaacatctactctgaaaggcatgattattgcatatcactgggagaatattatcccctcaactgttcagtcagtgacaaacacaatattaccttaagattcaagccaagtagttgattttgtccaaagcttactattgcccacttctgaagtagttacgttatagctacacaaaatataaagaggagagacactgtgtttaagtccttcctcacaagtgcgtatgttatgctacaatggcaatgaaggacctgcagtgcaatccatggctctcagactaaaaggagtgaggagagattacagcmctatctaaaaccctggtgccaggtgacaataaacagtgagtccaagggcctgggtgccccaaccagctaagagaagaaagtctgcctttggtttgttacaagcaagcccaagtggaattcagcttcctgatgcttccccaggaagagtcctggcctgcccttaggatagtaataagagagaggccagctcaccacatccctgtgcagggaggggaagcttgccatgtggaggaggtaaccggtcacgagcttcctgactcttctttccggtccgtgcactttttctgtgagtagattcctctttgaagtccccaaagtgctgagttagaagaagtataaaatggatcaaggccacaaaaggtagcctataaatctcatatcttactaactttcaaaacttctcttgatttaactaagcaaaaccagctccatggtaataatatcttaccatctcagggccctgaggggcttttataattgctatctgcataagtgcattacagtttccaaagctctttt

SEQ ID NO: 73988 - DNA, 965 bp, Homo sapiens
tgcatttgtataattatttaatgtctgtcttctcccagtaatctgtggctaagactccattggtcttagtcacagtcatattctcagcattcacaccaaggtggccacatggtaggagttcatgaggaatttgtggagccaatgaacatctactctgaaaggcatgattattgcatatcactgggagaatattatcccctcaactgttcagtcagtgacaaacacaatattaccttaagattcaagccaagtagttgattttgtccaaagcttactattgcccacttctgaagtagttacgttatagctacacaaaatataaagaggagagacactgtgtttaagtccttcctcacaagtgcgtatgttatgctacaatggcaatgaaggacctgcagtgcaatccatggctctcagactaaaaggagtgaggagagattacagccctatctaaaaccctggtgccaggtgacaataaacagtgagtccaagggcctgggtgccccaaccagctaagagaagaaagtctgcctttggtttgttacaagcaagcmcaagtggaattcagcttcctgatgcttccccaggaagagtcctggcctgcccttaggatagtaataagagagaggccagctcaccacatccctgtgcagggaggggaagcttgccatgtggaggaggtaaccggtcacgagcttcctgactcttctttccggtccgtgcactttttctgtgagtagattcctctttgaagtccccaaagtgctgagttagaagaagtataaaatggatcaaggccacaaaaggtagcctataaatctcatatcttactaactttcaaaacttctcttgatttaactaagcaaaaccagctccatggtaataatatcttaccatctcagggccctgaggggcttttataattgctatctgcataagtgcattacagtttccaaagctctttt

SEQ ID NO: 73989 - DNA, 965 bp, Homo sapiens
tgcatttgtataattatttaatgtctgtcttctcccagtaatctgtggctaagactccattggtcttagtcacagtcatattctcagcattcacaccaaggtggccacatggtaggagttcatgaggaatttgtggagccaatgaacatctactctgaaaggcatgattattgcatatcactgggagaatattatcccctcaactgttcagtcagtgacaaacacaatattaccttaagattcaagccaagtagttgattttgtccaaagcttactattgcccacttctgaagtagttacgttatagctacacaaaatataaagaggagagacactgtgtttaagtccttcctcacaagtgcgtatgttatgctacaatggcaatgaaggacctgcagtgcaatccatggctctcagactaaaaggagtgaggagagattacagccctatctaaaaccctggtgccaggtgacaataaacagtgagtccaagggcctgggtgccccaaccagctaagagaagaaagtctgcctttggtttgttacaagcaagcccaagtggaattcagcttcctgatgcttccccaggaagagtcctggcctgcccttaggatagtaataagagagaggccagctcaccacatccctgtgcagggaggggaagcttgccatgtggaggaggtaaccggtcacgagcttcctgactcttctttccggtccgtgcactttttctgtgagtagattcctctttgaagtccccaaagtgctgagttagaagaagtataaaatggatcaaggccacaaaaggyagcctataaatctcatatcttactaactttcaaaacttctcttgatttaactaagcaaaaccagctccatggtaataatatcttaccatctcagggccctgaggggcttttataattgctatctgcataagtgcattacagtttccaaagctctttt

SEQ ID NO: 73990 - DNA, 652 bp, Homo sapiens
aggtgacctgctgggcctggccttgaaggaaccccaagtacactcacctgtacccctcacagccacctcaaaatgggcccgcgatgtctcagctcaggacttcctgggaggcgacctcacccaaggctccccaaggttccagtcctcaatgtcagggaggggcagaagagaccagcggcttctcatccaggccccacagtgctgtgctgagccccatatgccccccgctcaggcgggtccagcactccctgtggctctcgggggagacgagctgaaatggagtggggtccttgctcagctcacagcaccctctcctcagcctcaccccattggaaggtggcccctgaaccctctgcctaccygtcctgtgcactcctctgggttagctctgagaaggctgggaaggccctcgacccaccttgagccaggtgtgggaacagagtggtcagtctgcgccctggaacaaagatcaaagccagggtgaggctggtccagagacgtccccaggcccttccagggtcagcttccttcacccacaggctcctggttcccctggagggaccaagcaaagccaacatagcagggagcctgcactctgccaagcctaggggtgccctggcttctccccttgcctgtgtgtgtgggtgtctga

SEQ ID NO: 73991 - DNA, 803 bp, Homo sapiens
tcatcagaaaaacggccaagctgtggctcttcatgacatggcttcaagtcagcaatgaaaaggaacaaaactctcaaccatgttcaagggatatgaaccctcagggacagggccctctctcaaaacaggcaggtccaacccacgtgtagctcgtggtcccattcctctgcaggctccggacagaaagcgggaagctagaatcacataacccacaagagtggaccctcccgctggggaagggcggggaggaccgggaacccacgagagtggaccctcctgctggggaagttcagggaggaccaggaacccacaagagtggaccctccctctggggaagttcagggaggactgggaacccacaagagtggaccctcccgctgcggaagggcagggaggaccagaggactcggggatgatgaagacgttccagctcctgacgctggcgagactcacgctgctgacacctgtcacagtgcacgggctcacacttaacttttgtgtgtttcacgttgttttcatattctggtgtaagtttgttttatttctctagaaagaagcaagggctgtgaatggtgattaaacgttccttctcaggtttgcctgtgcgtggggtagaggtggaccacgcagaccctccctgctgtgagctccgtggagggtcaatgcagakgcagggagactgtggggcccggtatccgtgacgctggacaagggggttcccgttctggaaggaggagtcaaggtctccagtggtgtcggattagaatatgaggaatccgtctgagctcattctccacaggatc

SEQ ID NO: 73992 - DNA, 335 bp, Homo sapiens
cacacacacacacacacacgtaagatgcacatatgaatttatataaactcccacacagtaattccagctaggactttgtccccaaaagtaggataagagcatggtttcatgtgtaaggacccatgtcgctctgttgtttactgtactggaaagtacagtttggaagaatcaggaaagcaccaattcactccacacacgagaggaggaaggtgtggagtgcagagcaggcaggaagctggggggtgctctcrggccaggtcctggaagcccacactgcggggaagaggggcagctcatgggaattcttcttgggaaataccatttgctgtgcagtg

SEQ ID NO: 73993 - DNA, 708 bp, Homo sapiens
aaagcataggtgaagatattgaccttgggtaggaagagagatattccttctattgtaacttgagggaaggagaccaggataagtatggacataggtgggtttggagatttggtattaaaagttgagagacctcccaacagaaggtttctatgtactctgagaagtaggccatgagattatccactaagtgttaaggtcaagggaaaaaagaaggtaggaaagaggggaaagtggaggtttgatttttttaaatgtttaataaagattagcctagcagtagtaatgtcttcctcttcaactagcttgtggctaacagtcaattaatttgactcaagaaatcagaaatgggatatttttataccaatataaataaaggcaaaagtgctgttatgatgtcacacaataaaatgactatttatacactatttaaatgtcaatttaggcccatttgatctagagtatagtttaactctgatgttcctttgttgatttcccaactggataatctgttcattactgagagtgggttattgaagtcaccactataattgtatagcagtctattcctccctttasgtctattaatgtctgctttatatactttggtgtttctgtgttgggtgtttctgtgttggtttataattgttataaagttgtagtctattttatctaactatagctactcctgctttttttggttcccatttg

SEQ ID NO: 73994 - DNA, 582 bp, Homo sapiens
tgacccaagatgaatgcaaatcttccttcctaagttgacattttattaaagaaaacagtggatggtgtgtgtccttttaggttccagcccctccctcattaactttttgtgaagctttcctttgttctgctgtaccatgattgcagcgagcctcctgacctgggagtcccacccatattcctggagggaccccagttggaatgcttgccggaatctcactttgtatgggttacacaacatctgcaagatagacaaagggctgccacttcacaggattgttgaaggaaatgaacaagtgaaatatgagacagaacctgtcctggaacccggggcagagtggacagccggtgtgctggtgggaagttcctcccgccccctccttcccttgctcacaggcttctccttccacctttgtttcctcatgtggttttccctatctctaaaacagctgcaaagccaragcagctatgagtctcttgagtttgcagagaactttgtaattcatataatgccttgcacacttgctacttaatgaggtgccctgatgtgtgttttgcttggaaggcccaaagatagcccttt

SEQ ID NO: 73995 - DNA, 1569 bp, Homo sapiens
ctggtgtgagccatggtacctggccaagaactaattttttttttttttttttttttgagacagagtcttgctctgtggcccaggctggagtgcagtggcgctatctgggctcactacaagctccgcctcctgggttcacaccattctcctgcctcagcctcccgagtagctgggactacaggcgcccgccaccatgcccggctaattttttgtacttttagtagagacagggtttcaccgtgttagccaggatggtctcaatctcctgacttcgtgatccacctgcctcagcctcccaaagtgctggtattacaggtgcaagccaccgtgcctggccaagaactaatattttaaatgcacgaaaatttcataaactcagtaaaatcccttggagtcctcagtggctgctttctgatgtcaagtaccacattaggccataactgtgaacccaggaggagctcactttgggtcccaggtctgccagagaccagcaaggtcctcctaacccgagtctctagccacagggacctgctctcccctccccgacagagtcctcttgcaggaacaggacatgggggcttggactgcaggctgggttacggacagctcccactttgacaccagaacctgagctccaggcctccctccctgccacagtcactcctccactaaccaggaagcaatttccattttgccaaccagccagaccctgcctttcagctcctgctgctcaattcgcttggtcaattctttgcttgtcagcagcatcaagaagaggagataggagggagggcaggagccagagatcagtcctagcctctgtgaggggtaaggaaggctcggggaaggaatgttgaagagaaactggaagtcctggcagaaggcagtgcaggtgtgcatgtctagccatatccaggtgttttcccaacagcacttcttcctaggaattactctttccaaggcagctgggagctggtcagccttctaaaaccctacgtcatagaaaatacctccacgtctcaattctgactccagcaagtttgggctcctaaaaatacatctatgaagattagcaagaatcataacttatattttctagtcatccttcaaaaatgtttaaacagagaatgacaacaacacgtattatcatgaaaccctaaaaataaatccttctaaatggcatagtttgaatgcttaatagacttctatgcctagtttgagacaaacactttaaaaatcacgctacaaatcctaagaaaatagcaatcaaaatgatgacaggttgcaataaagatgtcttgtaataggccccctagaggggagctccatcattttgacagagccaacttgtgagagtgcgaccacccaggatagcactaattcgagcacrgcaccaaggacaccacaccagcctgtgcctcaatgggtgcccccagcctctccctcagatctgtgtgtgttgtgagggtgcagagctgggagctggacccaacagaggtgggaggacagccataggaagtgcactcagccactagccttttgaatacaggaaaagcaagttgtcaaaat

SEQ ID NO: 73996 - DNA, 1569 bp, Homo sapiens
ctggtgtgagccatggtacctggccaagaactaattttttttttttttttttttttgagacagagtcttgctctgtggcccaggctggagtgcagtggcgctatctgggctcactacaagctccgcctcctgggttcacaccattctcctgcctcagcctcccgagtagctgggactacaggcgcccgccaccatgcccggctaattttttgtacttttagtagagacagggtttcaccgtgttagccaggatggtctcaatctcctgacttcgtgatccacctgcctcagcctcccaaagtgctggtattacaggtgcaagccaccgtgcctggccaagaactaatattttaaatgcacgaaaatttcataaactcagtaaaatcccttggagtcctcagtggctgctttctgatgtcaagtaccacattaggccataactgtgaacccaggaggagctcactttgggtcccaggtctgccagagaccagcaaggtcctcctaacccgagtctctagccacagggacctgctctcccctccccgacagagtcctcttgcaggaacaggacatgggggcttggactgcaggctgggttacggacagctcccactttgacaccagaacctgagctccaggcctccctccctgccacagtcactcctccactaaccaggaagcaatttccattttgccaaccagccagaccctgcctttcagctcctgctgctcaattcgcttggtcaattctttgcttgtcagcagcatcaagaagaggagataggagggagggcaggagccagagatcagtcctagcctctgtgaggggtaaggaaggctcggggaaggaatgttgaagagaaactggaagtcctggcagaaggcagtgcaggtgtgcatgtctagccatatccaggtgttttcccaacagcacttcttcctaggaattactctttccaaggcagctgggagctggtcagccttctaaaaccctacgtcatagaaaatacctccacgtctcaattctgactccagcaagtttgggctcctaaaaatacatctatgaagattagcaagaatcataacttatattttctagtcatccttcaaaaatgtttaaacagagaatgacaacaacacgtattatcatgaaaccctaaaaataaatccttctaaatggcatagtttgaatgcttaatagacttctatgcctagtttgagacaaacactttaaaaatcacgctacaaatcctaagaaaatagcaatcaaaatgatgacaggttgcaataaagatgtcttgtaataggccccctagaggggagctccatcattttgacagagccaacttgtgagagtgcgaccacccaggatagcactaattcgagcacggcaccaaggacaccacrccagcctgtgcctcaatgggtgcccccagcctctccctcagatctgtgtgtgttgtgagggtgcagagctgggagctggacccaacagaggtgggaggacagccataggaagtgcactcagccactagccttttgaatacaggaaaagcaagttgtcaaaat

SEQ ID NO: 73997 - DNA, 1569 bp, Homo sapiens
ctggtgtgagccatggtacctggccaagaactaattttttttttttttttttttttgagacagagtcttgctctgtggcccaggctggagtgcagtggcgctatctgggctcactacaagctccgcctcctgggttcacaccattctcctgcctcagcctcccgagtagctgggactacaggcgcccgccaccatgcccggctaattttttgtacttttagtagagacagggtttcaccgtgttagccaggatggtctcaatctcctgacttcgtgatccacctgcctcagcctcccaaagtgctggtattacaggtgcaagccaccgtgcctggccaagaactaatattttaaatgcacgaaaatttcataaactcagtaaaatcccttggagtcctcagtggctgctttctgatgtcaagtaccacattaggccataactgtgaacccaggaggagctcactttgggtcccaggtctgccagagaccagcaaggtcctcctaacccgagtctctagccacagggacctgctctcccctccccgacagagtcctcttgcaggaacaggacatgggggcttggactgcaggctgggttacggacagctcccactttgacaccagaacctgagctccaggcctccctccctgccacagtcactcctccactaaccaggaagcaatttccattttgccaaccagccagaccctgcctttcagctcctgctgctcaattcgcttggtcaattctttgcttgtcagcagcatcaagaagaggagataggagggagggcaggagccagagatcagtcctagcctctgtgaggggtaaggaaggctcggggaaggaatgttgaagagaaactggaagtcctggcagaaggcagtgcaggtgtgcatgtctagccatatccaggtgttttcccaacagcacttcttcctaggaattactctttccaaggcagctgggagctggtcagccttctaaaaccctacgtcatagaaaatacctccacgtctcaattctgactccagcaagtttgggctcctaaaaatacatctatgaagattagcaagaatcataacttatattttctagtcatccttcaaaaatgtttaaacagagaatgacaacaacacgtattatcatgaaaccctaaaaataaatccttctaaatggcatagtttgaatgcttaatagacttctatgcctagtttgagacaaacactttaaaaatcacgctacaaatcctaagaaaatagcaatcaaaatgatgacaggttgcaataaagatgtcttgtaataggccccctagaggggagctccatcattttgacagagccaacttgtgagagtgcgaccacccaggatagcactaattcgagcacggcaccaaggacaccacaccagcctgtgcctcaatgggtgcccccagcctctccctcagatctgtgtgtgttgtgagggtgcagagctgggagctggacccaacagaggygggaggacagccataggaagtgcactcagccactagccttttgaatacaggaaaagcaagttgtcaaaat

SEQ ID NO: 73998 - DNA, 563 bp, Homo sapiens
caagtgatccacccacatcagcctcccaaagtgctgtgattacaggcatgagccactgcgcctggctgggtacatagccgatgctgaggatatgcttggtgctttcttcttatttccatgtctgggtgttgtaagttttcccaaagggataagaaacaaatgcttgtggaatccatgttacagataactgcatagcccttcttatgtagggtaagatgaagtcctctgggtactgttgattaccttctcataataccaaatattatattagcctttcatgtccctgaactagtatgctggtactttggccccagagtacagtctccaggactcctacagccaaacgtttagttgcatttacaaaatctaaaaagtgcgtgtgtgtgtgtgtgtcaggtgggaacayaactttcttttctagatgagaatatttttcttggactcttcacagtctcctttaattcaactaattcttcatttttaacaggatttggactcctaagttccctgtgccaggcaagggagcagctgagagtgtcttctcaggagctgcagtcctgaag

SEQ ID NO: 73999 - DNA, 563 bp, Homo sapiens
caagtgatccacccacatcagcctcccaaagtgctgtgattacaggcatgagccactgcgcctggctgggtacatagccgatgctgaggatatgcttggtgctttcttcttatttccatgtctgggtgttgtaagttttcccaaagggataagaaacaaatgcttgtggaatccatgttacagataactgcatagcccttcttatgtagggtaagatgaagtcctctgggtactgttgattaccttctcataataccaaatattatattagcctttcatgtccctgaactagtatgctggtactttggccccagagtacagtctccaggactcctacagccaaacgtttagttgcatttacaaaatctaaaaagtgcgtgtgtgtgtgtgtgtcaggtgggaacacaactttcttttctagatgagaatatttttcttggactcttcacagtctcctttaattcaactaattcttcatttttaacaggatktggactcctaagttccctgtgccaggcaagggagcagctgagagtgtcttctcaggagctgcagtcctgaag

SEQ ID NO: 74000 - DNA, 530 bp, Homo sapiens
taaatgtgttcatgctcatattcaccagtggtttgtatagtttacttgtgtatcaaatgttactttccatttcagatctgctcaatattattagaaatgatacagaaataagttttacagatctgtagaggaagrtcacatttctctctcttttttttctttacttttaattttttaaaaacatttcctaccaagaatcttgaaaaagagcacatatatgggcttcttttttataagtgttcgcagactagtatcattaacttcaccctgggaacctgtagaaatgcaaattcttaggcctttccccaaacttactaagtcagactctgctattggtgtttttaacaagacccctgggtgattttgaaactcatgaaagttcgagaattactgattcattgcatagagcaaggctgaactgtgtagacatttttatatgtaaataagaaaattgtgttgctttttctgtataggtctcactggttagcttaactgcaaatgccttgggttactcagaacttggtgccatc

SEQ ID NO: 74001 - DNA, 672 bp, Homo sapiens
aaagctgaaaattacagaattcctgctaataaattaagatctaaaatctgttgtgataagtgttgtaagatactgtagtagggtatgtataaatcacaggggagaacagaggcataatttaayttgcatatggggaagagtgaaaggccatagacaggaggtaaatttttagctggagcttaaatggaatggtaaggttttgcctatcagaaaaaggagagagaatattctttgcagagaaaactgcatgttcaaaggtgtggaggcatttgctcttgggtagcagtttttgaggtaggtgttatgcttaccattgacaagttctttacaggagaaataaatagagttactgtgagaaatactattatgttattcacagtgactaatacttgaaataagaagcaggtaattttgaaaaaagataaacagtactcgaaagcgtaagtggacattaaatgttttataattactctccacactacctttttaaagaaagcttttgtgaaagaaagaaaaagggaaagaatatgttttcatcacttgttaaagaggtttccatggaaaagctgaatctcagtttagggcttactgatggtgaaattactagagtgtgcttcagaaacatatcctaatttctgaagattagtgtccctgtggaattagagccaattt

SEQ ID NO: 74002 - DNA, 652 bp, Homo sapiens
tctctttgagggctctgaaatgaaaaccaaaaatagaacagtcatgtttcaccacagcgttatgaacacactgcagagtcacatccttgagaccatccagtcacatgcaggcagggaatttgctgggcagagcacgttcaagtccccatgacaaccaagacatggaagccacaggcggggcctctaaacatgaaaagtgtcattgttgttttgtattccttgtactttctggagcccttaaacacagatacaaacaacatccatccaaacagaccagtcctcctaggaacatttggcaaagctcagtaggtctttcttggatactgacttcatagatggtaacactgaytcaccatggcctatgtgcttgtgtgcttccacctgagactaggagctttcaaaaaaacaaataaacaaacagaaacaaagaaaaacaaaacaaaaacagagtcttgacttcaagagaagggaagagacttattttcctactttccttgttggcttactttggggcttcaatcactttatgttaacttttggtgactcatacactggccgctcctaacatttcagcagctgggatgagaggacaaacagaggcccacaaaccatatgtctatacacataaaggttctaaatcaagctaccgatt

SEQ ID NO: 74003 - DNA, 869 bp, Homo sapiens
tgtttccatttctttcaccctgagttccctgcagctttatgacaagtaaatgaagatatttggagcctgctgaagaattacaaacatttgaggtggcaggagcaagggcctgaggtcatgcccaagatgcaggtgttcagaattccaatccctgccttagcaagggcttgctgagtgcccttgagcaagtcactttgcttccctggacttctctcctccctgctagggtgaggatattaatgctcagctcccacacggggggatcaagtgtattaagtaattagaaaacaagattcccatagaactctgtaggaaatgagaatttagtcagatgattcttaagtgttctggaaaacaaaaaacaaaaattagactgagagttatacaaagcaaaatttagttgtcaatacataagattggtggaggctacctctccattttacctaagcaggaaaacataatatttaaggacatatattatttccaaataaaattccactcttctctctctctctcgctctctctctctctctctcwcacacacacacacacacacacacacacacgagatacccttcctcattctttctttattttaaagtactgcacctatttggtttcaaaataggagccttctacataaaattatcagctttaaaacaatgtttgaaataattaggtcacaaattctggagccctttaatgtggttgcaattctataactatctgcgcattccatgtatggccctattaaatgtaccaggcaccaatgttgccggctgtcaagaagcaaaatgaaaaatagttttaatagctgctctttgacctgttttatattttatgtcaattataacagcacacaaccatgc

SEQ ID NO: 74004 - DNA, 869 bp, Homo sapiens
tgtttccatttctttcaccctgagttccctgcagctttatgacaagtaaatgaagatatttggagcctgctgaagaattacaaacatttgaggtggcaggagcaagggcctgaggtcatgcccaagatgcaggtgttcagaattccaatccctgccttagcaagggcttgctgagtgcccttgagcaagtcactttgcttccctggacttctctcctccctgctagggtgaggatattaatgctcagctcccacacggggggatcaagtgtattaagtaattagaaaacaagattcccatagaactctgtaggaaatgagaatttagtcagatgattcttaagtgttctggaaaacaaaaaacaaaaattagactgagagttatacaaagcaaaatttagttgtcaatacataagattggtggaggctacctctccattttacctaagcaggaaaacataatatttaaggacatatattatttccaaataaaattccactcttctctctctctctcgctctctctctctctctctcacwcacacacacacacacacacacacacacgagatacccttcctcattctttctttattttaaagtactgcacctatttggtttcaaaataggagccttctacataaaattatcagctttaaaacaatgtttgaaataattaggtcacaaattctggagccctttaatgtggttgcaattctataactatctgcgcattccatgtatggccctattaaatgtaccaggcaccaatgttgccggctgtcaagaagcaaaatgaaaaatagttttaatagctgctctttgacctgttttatattttatgtcaattataacagcacacaaccatgc

SEQ ID NO: 74005 - DNA, 869 bp, Homo sapiens
tgtttccatttctttcaccctgagttccctgcagctttatgacaagtaaatgaagatatttggagcctgctgaagaattacaaacatttgaggtggcaggagcaagggcctgaggtcatgcccaagatgcaggtgttcagaattccaatccctgccttagcaagggcttgctgagtgcccttgagcaagtcactttgcttccctggacttctctcctccctgctagggtgaggatattaatgctcagctcccacacggggggatcaagtgtattaagtaattagaaaacaagattcccatagaactctgtaggaaatgagaatttagtcagatgattcttaagtgttctggaaaacaaaaaacaaaaattagactgagagttatacaaagcaaaatttagttgtcaatacataagattggtggaggctacctctccattttacctaagcaggaaaacataatatttaaggacatatattatttccaaataaaattccactcttctctctctctctcgctctctctctctctctctcacacwcacacacacacacacacacacacacgagatacccttcctcattctttctttattttaaagtactgcacctatttggtttcaaaataggagccttctacataaaattatcagctttaaaacaatgtttgaaataattaggtcacaaattctggagccctttaatgtggttgcaattctataactatctgcgcattccatgtatggccctattaaatgtaccaggcaccaatgttgccggctgtcaagaagcaaaatgaaaaatagttttaatagctgctctttgacctgttttatattttatgtcaattataacagcacacaaccatgc

SEQ ID NO: 74006 - DNA, 1292 bp, Homo sapiens
ggcagcttgacagggcacaatttaaaatacacggtcattctcagccaggcatctacctgccgcttcagcaagtgcatttcgtgtaccataaaaatagtgaaaatatccctttcctacagagctgacatcaattatctgaaagttaagaaataagtaattattctctcagtgttggaacatatgtatatgtcaggcttttcctaatacagacaaatcgtaagcatgaaagtgaagcaattcaaaactttagaatatttgacaccccaactggtgttgatgaacaatttttatgagtatttttatgtgtatgtgctctatctaatattcaaaatcaagagctttatcttccatagagcatttctcagtattctgtaaaaggatttttcttggtttgaattttgatcagggcttcttaaaatgtaacttttttttaatcacacataaaaggtaagaaattaagcagggcaaaatttaattacagaacaattcctacctgtattgttaaagatttattgctgaaaaatcctagttaaagaaaactaagggggaggagaaggggggaaagatgattaagcactttaaaatactggcatcactagagactttttctatttattattgccagtggagttaacgctgaccaggaagaattactctacattgcaggggccaggttctctgtgccctgaataattaattatccagggctagatgtattgaagcagggttcaaattcccacacattgggatcagttctatcaagataatactgataaagggatgaatttgtaatggatattgttgttgatttatgttgccagcataccaaacatttagtataaatggtttatgcaaagtttcttccttgtgattcagtctgtgcagggctagcagcactacagaagtaatctgttccagctaaaagggcaaagttataaagagagaatcaatgactgaagattctgctgcccctccccacaaacgtcttattctaaaaccactgaactaatataatcggctaagaacygtccccccaaaattaaatgctctatcaagtggagaacttatgttaaacctcaacatgcaaaataaggagttattttatctaacaattaatagaatgaaagtagaagaaaaaaacaatgacaatagcagtagttgagctataagtgggaagggtagcggttccatagtttcaactcagcatgatcctaaggttgcttaaaatcatatttgaagttaagctgaagaaatcaatttttattaatgtagggttccttgcttaaaattgg

SEQ ID NO: 74007 - DNA, 1292 bp, Homo sapiens
ggcagcttgacagggcacaatttaaaatacacggtcattctcagccaggcatctacctgccgcttcagcaagtgcatttcgtgtaccataaaaatagtgaaaatatccctttcctacagagctgacatcaattatctgaaagttaagaaataagtaattattctctcagtgttggaacatatgtatatgtcaggcttttcctaatacagacaaatcgtaagcatgaaagtgaagcaattcaaaactttagaatatttgacaccccaactggtgttgatgaacaatttttatgagtatttttatgtgtatgtgctctatctaatattcaaaatcaagagctttatcttccatagagcatttctcagtattctgtaaaaggatttttcttggtttgaattttgatcagggcttcttaaaatgtaacttttttttaatcacacataaaaggtaagaaattaagcagggcaaaatttaattacagaacaattcctacctgtattgttaaagatttattgctgaaaaatcctagttaaagaaaactaagggggaggagaaggggggaaagatgattaagcactttaaaatactggcatcactagagactttttctatttattattgccagtggagttaacgctgaccaggaagaattactctacattgcaggggccaggttctctgtgccctgaataattaattatccagggctagatgtattgaagcagggttcaaattcccacacattgggatcagttctatcaagataatactgataaagggatgaatttgtaatggatattgttgttgatttatgttgccagcataccaaacatttagtataaatggtttatgcaaagtttcttccttgtgattcagtctgtgcagggctagcagcactacagaagtaatctgttccagctaaaagggcaaagttataaagagagaatcaatgactgaagattctgctgcccctccccacaaacgtcttattctaaaaccactgaactaatataatcggctaagaaccgtccccccaaaattaaatgctctatcaagtggagaacttatgttaaacctcaacatgcaaaataaggagttattttatctaacaattaatagaatgaaagtagaagaaaaaaacaatgacaatagcagtagttgagctataagtggraagggtagcggttccatagtttcaactcagcatgatcctaaggttgcttaaaatcatatttgaagttaagctgaagaaatcaatttttattaatgtagggttccttgcttaaaattgg

SEQ ID NO: 74008 - DNA, 663 bp, Homo sapiens
agctacatgtggatctttgccattttacttggaatcaaggaccatttggatcatgcactaggtgtgtctcagaaagcacaatactggggaagatcattctcctctttgcagagagagaacacagaagaaaaaataagggcattcttcatttagcttgattcacttctccagtgacacagatatccaaaattgaagcaatttgacaagagccaaagttctgaatgttagtgacaatgggaatatactcagaagatgcacttagtgtcagaaaagttgggagacaaatgttcaagatcctgaaagcagtaaatggcagctgtaaggmtctatggcagcccaggaaacagtggcccagagacccacattagaaccccacatgagaacactggaggacagtggcaggaacaacgtgtcggtgaggggtccttctggaggcctgcagtgtcggagccaccccactccccaagcctcttgtgattctaggtcagggactgttggaagcagttcactaggacaatgcttgggctgctgattcactccccagggagagttggatgtgtgagcaactgcagcacacaggtcttgcagcacacactggagagagctggggaggagtggaaggtggtgaccttatgaaaagaagagatttgagtgaattctgaa

SEQ ID NO: 74009 - DNA, 364 bp, Homo sapiens
taactctgagttgtttgtcctgggrctgaagaggcagtggctacgcagggcatgtgcttctcatagtggatcaccagaatgcaagatccaagccaaactgtgacaacatatttaaggctcttattacatctgctaatgtttcatcgaccaaagcaagtcacttggccaagcctaacatcattggtttagggaattgtactttgtccacagtggaagagggaaaggaataaatattggttgaacgataattcaaattatcacaaacgaatacaaagtgctttaagtgctttaggaaagagattagcaaacgatggcctacaggcaaattcgacccaccatttgtttttgaaaataatgttttatt

SEQ ID NO: 74010 - DNA, 431 bp, Homo sapiens
ttatgagccaggttgtggccactggtcagctggctaagtgcaaagatttattcagtcaatagtgtcatatttggaggccatggataatatcaagcccaggcttgatttttggagagatagtagcctggtaggggaataacattaattataaaacccttacacaatgctcactggatatcagacactcttttttttttcttttctttttttttttttttttgagatggagtttcactcttgttgcccaggctggagtgcaatggtgtgatctaggctcaccacaacctccacctctcgagttcaagcgattctcctgcctcagcctcctgagtagctgggattacaggcatgagccaccatgcgctgctaattttttatctttagtagagacagggtttctccatgttgmcgaggctggcctcaaactccta

SEQ ID NO: 74011 - DNA, 431 bp, Homo sapiens
ttatgagccaggttgtggccactggtcagctggctaagtgcaaagatttattcagtcaatagtgtcatatttggaggccatggataatatcaagcccaggcttgatttttggagagatagtagcctggtaggggaataacattaattataaaacccttacacaatgctcactggatatcagacactcttttttttttcttttctttttttttttttttttgagatggagtttcactcttgttgcccaggctggagtgcaatggtgtgatctaggctcaccacaacctccacctctcgagttcaagcgattctcctgcctcagcctcctgagtagctgggattacaggcatgagccaccatgcgctgctaattttttatctttagtagagacagggtttctccatgttgcygaggctggcctcaaactccta

SEQ ID NO: 74012 - DNA, 431 bp, Homo sapiens
ttatgagccaggttgtggccactggtcagctggctaagtgcaaagatttattcagtcaatagtgtcatatttggaggccatggataatatcaagcccaggcttgatttttggagagatagtagcctggtaggggaataacattaattataaaacccttacacaatgctcactggatatcagacactcttttttttttcttttctttttttttttttttttgagatggagtttcactcttgttgcccaggctggagtgcaatggtgtgatctaggctcaccacaacctccacctctcgagttcaagcgattctcctgcctcagcctcctgagtagctgggattacaggcatgagccaccatgcgctgctaattttttatctttagtagagacagggtttctccatgttgccsaggctggcctcaaactccta

SEQ ID NO: 74013 - DNA, 532 bp, Homo sapiens
gctgaggcagaagaattgcttgaacctgggagaaagaggttgtagtgagccaagagtgcgccactaaactccagtctaggtaacacagcaagagactctgtctcaaaaaaaaaaataaaaataaaaatatctgtcagaaaatgaattctaggagtatatgaaccccaaagctattggaggtagcaaaaaggtgagaaataattattgtgcaagtatccaagtaactatgcctgtcccagtgtatcataacctgaaagtagcattgtctacttgccaattttaaagagctggagacactgaacacatgatgtgctagtaaaatagctgcaaagcacctggtactctctgaacagataggcaatggtrtgaaagttggcttcactactcttttattctcattccttcctctatctactagccatttccagacccaaatgttaacatcttgaacaagaagactacctggcctttcactctatagcaaagtgtatctccctgctactctagatgtttagattttctaggtttattc

SEQ ID NO: 74014 - DNA, 716 bp, Homo sapiens
aattagctgagagtgatggtgtggacctggggtcccagctactcagctaatcgggaggctgaggaaggaggatcacttgagcctgggaggttgaggctgcaatgagccattttcatgccacttcactccagcctgggcaacagagcaagaccctgtctcacaaaaaaagaaaatatttgtccctgtcttcattacttaactctgccattatagcgcaaaagtagccatggaaaatataaacaaacaagtgtggttatattccagtaaatctttatttacaaaagcagatgaagggctaggtttggcccacaggccatggtttgccaatgtctgctttaagtggctcatccggtggccaaggatgccacttagggctgctctgtgatcccatcccatgcttctcccctaccagtagacacacccagcttccagccacactacaccatgctgacttatgagccgtatgtctccatttttctgaggatttacctccttctccatcagttgaaccccaggagcctgatgaaatgtcatttcctctttgaagcctcccctaagcctcattccacactctaggcagaattattcattcttccctccccaacccygttttctcacagtgcttcgcacaaagctccatgaaccgcaaacttattatattatacagatagtatgattcttcacacaccagtgagtctccctggctggattataaa

SEQ ID NO: 74015 - DNA, 620 bp, Homo sapiens
ctattttatctatcaaactaataaagacttaaaagtgatgaccagtgttgacgaggaagaaatgaatgccattctcacagttggtgagactgaaaatttcaggaaagcaattcaggtaacaattactttaaaccaatcataccccttgactcatcaattttacttttaggattcagtcctaaagaaacagatgaaatggggcaaagatttcattaaacacttacatttaagcactttcccaagtgttttataggtattartacatttaattctcactctatgaggtaagtctattagtgcctttttattatttatttatttatttatttttcttgagatgaggtctcgttctataacccaggttgctggagtgcagcgatgcagtaacagctcgctgcagccttgacctcctgggcttgagtgtgcctcccacctcagcctcccaagctgctgggaccacaggtgcacgctaccacactcaactaattttttatttttagtagagatggggtctcactatattgcccaggctggtcttgaactcccaggctcaagcaatcctcccactttggcctctcaaagtgctgggattacaggagtgagccaccacacccagccta

SEQ ID NO: 74016 - DNA, 1265 bp, Homo sapiens
tatgccattgatcctgcaatgcatcacatgcctagagtgggctccctcagatgggaggggggttgattctcctacctttccttcccagtcctctggtaacttaggttgggtgcttgggagaggactcagaaggcacatgaggcttttggtggctgtgaacagccatgyggtgcaaagggcccacaaggagaacggggggcagggcctctcagtcctgctaggctaatcacttgaggggttaccccagatttttgttttgagggaaaaccccaacaatgtatcaacatttatgaatgcatgttaagcaatactgggagagagctgtctacattagaggtcaattttggggtttgggttttttttttcacttttagagttaaaaaaattattaaatcagtaatcacaaatgactcacttctagacctttgctattttatctaactggcttagaaaaagccatgtcagtgcccaggggaaaatgtgagctccaggaagcctttgggtaccaggcagctttggaaggagtttggaggacactgtttcagagctccagggctttgggttccaaatgctttccaggctgaacatctccaggtgatgcttttcgaggaagagggatttgagccgctgccctgaggcccttgtgtgaacacggtccactttggcaagcccctctggtgtttagagctggagacaaggagaccagcatttgtcaagcactttctaagccccagactctgtgctccttgctttctctgcattaccacacgtaatcgtcacaacctccactatgaggcagctgccattatcctacaagagaagcaagatagccaggcggccagcccaggacctaacttggctcacccgactcctctaggtctcgtggcccaggcatggatggctcagcttagaccaggacagaactggctactttcttgcaccacgtggaataattcagtccatggcctatcacattatgacatagaatgaggaggactaaaattaaatactcactgtttgccaagccctatgtcaggcccctgagagaggcagcaccgggtaacagaaggagctccagctttggaaagagaaggccctggattcatgtcttacttgttattcatagttgtgcagtttggggcaacttaacctttctgaatcagttctctcagccataaaatgaatataataatagcacaaacttttcttcagaaagctgttgtgagggttaaatgaaatattgtgagagccacataagtcttcag

SEQ ID NO: 74017 - DNA, 1265 bp, Homo sapiens
tatgccattgatcctgcaatgcatcacatgcctagagtgggctccctcagatgggaggggggttgattctcctacctttccttcccagtcctctggtaacttaggttgggtgcttgggagaggactcagaaggcacatgaggcttttggtggctgtgaacagccatgcggtgcaaagggcccacaaggagaacggggggcagggcctctcagtcctgctaggctaatcacttgaggggttaccccagatttttgttttgagggaaaaccccaacaatgtatcaacatttatgaatgcatgttaagcaatactgggagagagctgtctacattagaggtcaattttggggtttgggktttttttttcacttttagagttaaaaaaattattaaatcagtaatcacaaatgactcacttctagacctttgctattttatctaactggcttagaaaaagccatgtcagtgcccaggggaaaatgtgagctccaggaagcctttgggtaccaggcagctttggaaggagtttggaggacactgtttcagagctccagggctttgggttccaaatgctttccaggctgaacatctccaggtgatgcttttcgaggaagagggatttgagccgctgccctgaggcccttgtgtgaacacggtccactttggcaagcccctctggtgtttagagctggagacaaggagaccagcatttgtcaagcactttctaagccccagactctgtgctccttgctttctctgcattaccacacgtaatcgtcacaacctccactatgaggcagctgccattatcctacaagagaagcaagatagccaggcggccagcccaggacctaacttggctcacccgactcctctaggtctcgtggcccaggcatggatggctcagcttagaccaggacagaactggctactttcttgcaccacgtggaataattcagtccatggcctatcacattatgacatagaatgaggaggactaaaattaaatactcactgtttgccaagccctatgtcaggcccctgagagaggcagcaccgggtaacagaaggagctccagctttggaaagagaaggccctggattcatgtcttacttgttattcatagttgtgcagtttggggcaacttaacctttctgaatcagttctctcagccataaaatgaatataataatagcacaaacttttcttcagaaagctgttgtgagggttaaatgaaatattgtgagagccacataagtcttcag

SEQ ID NO: 74018 - DNA, 550 bp, Homo sapiens
gggtgagagtcctgtcactggcagcgtgggtaagtggaatcaccatcctgcgtggtcatcaccatcatcatcttaaggattgtccctaacccggggttcctcaacctctacaactaacatttggggcctgtgcattgtaggatgtttagcagcatccttggcctctacccacttgatgccaccagcgcctcctctccaaytgtgacaattggcagccgcctctagacattgccaaatatccctggggcagagctgcctctagttgagaccactgctgtaaacacagctgcctcagtcctcctgtggccactctgcaataaaggcctagactttccctctggagaggctgggctcctgccaagacaggagcacgcagagtcctagggcgcccttttgactcctgctcatggaggcagagaggaggaaaagggcagtcttatgtcaccaaatatttgctattctttgagccctgcgcaacctgcctttgctcacttagcatgctctccctcaccccaacctctctccacttgtccaaatctgaccccttccc

SEQ ID NO: 74019 - DNA, 576 bp, Homo sapiens
tgatagtgctttcattcctgtagtctaataaacaggccctgattctcagccaagaaaccacagccctttgatttatggcaaataaacgcacagtggtgtcactttctggcagactaagccagggccctccccatgagataaaaggagagggatagcacagtcytttcagtctttgttgtatatattctaaaaatacacgagccaccattactgggttggtgcaagtcttggcaaatctgtgatggtcagtgtcaaagtggttatttttaaaagcatattgaaacttctgcagtttacaatcgtgttctttattttaatgaaagaaacagagccactaggaagttctagctaatggcttttgggcatcacaaagcagtagtgtattcagtctatgatgaaaagctgtgaaatgttaaactaagtcgccatttctaactggtttgattacttttttgttaagctagggtggaacatgctcacaagcacagaacagcagaaggctggttttggcttcctggcgggcccttccatggcctgtctgtagaagctgagtcctgccccctcaactagccgtgc

SEQ ID NO: 74020 - DNA, 632 bp, Homo sapiens
ggctaggtagttacctcatgaaggaaaacaactgttttggtccagattttaaaaattgagttgaatagaaaaggtggggtggaaccagmaatactgaaatgtaataatgtatattaagctccaaccaaacaatccagcacttcttcaaatccaggaggtcttctggctaggagttacattgcagaactaacatggactcttaaactttgtaaggaattagtcacagttgaacactggaaactatcagcatacctctgggcttcttttatatggtcttcctcatgagttaaaatgccttaagcatagtatctgttccataggaccttactgattatgcttttccacttgaataaaagagatattaagttgtaataaaactttaaatattttaatttagtttgaatatttaagttgaattaacctcttactacagtaattatcttttttgctaacttcttactacggtaattatctgcttttataaaatccagaaacgatgttatacacattagcacgcattattaggtgcccaaatgccaaggctaaggacacagcaatgctaaggacacagtgtgcctccggcctgcttgcaccctcggttgaaattatattagcaagagaagctcctgcat

SEQ ID NO: 74021 - DNA, 632 bp, Homo sapiens
ggctaggtagttacctcatgaaggaaaacaactgttttggtccagattttaaaaattgagttgaatagaaaaggtggggtggaaccagcaatactgaaatgtaataatgtatattaagctccaaccaaacaatccagcacttcttcaaatccaggaggtcttctggctaggagttacattgcagaactaacatggactcttaaactttgtaaggaattagtcacagttgaacactggaaaytatcagcatacctctgggcttcttttatatggtcttcctcatgagttaaaatgccttaagcatagtatctgttccataggaccttactgattatgcttttccacttgaataaaagagatattaagttgtaataaaactttaaatattttaatttagtttgaatatttaagttgaattaacctcttactacagtaattatcttttttgctaacttcttactacggtaattatctgcttttataaaatccagaaacgatgttatacacattagcacgcattattaggtgcccaaatgccaaggctaaggacacagcaatgctaaggacacagtgtgcctccggcctgcttgcaccctcggttgaaattatattagcaagagaagctcctgcat

SEQ ID NO: 74022 - DNA, 1388 bp, Homo sapiens
cctggctaagatggtgaaaccccatctctactaaaaatacaaaaaattagccgggcttggtggtgggcgcctgtagtcccagctactcgggaggctgaggcaggagaatggcatgaacctgggaggcggagcttgcagtgagctgagatcgcgccactgcactgcagcctgggtgacagagcgagactccatctcaaaaaaaaaaaaaaaaagtgtacgcatatatatatgtgtgtgtatatacgtgtgtgtgtgtgtatatatatatatatggagagagagaattcactaaaggatgtgaagtactgaaaatatgttttaaaaatttagttggttcttctgcatttaaagaacatctgaaatatagccacattatgttctctgctgtttagatgtgggtagaggaagaaccacaggatggtgttagagacataattctaaacccagaacatctatttcctaaaccatctcccctttcctttcatgacctttttagggctcggttactgctttggaaatgtgtcatatattgggatagaacaaaactcaagaagcactgaaagagaaagagagaagttagagaacaaagaattatggaatcagctatgaaacctaaaaacctaaaaaggaaacactggttgtcaaattcattatgtcaaccagtacatgtctgagtctgagaaaaactacaaaggaaagcaatgaaaagcactgagtcactgcagrcaaggaatgagtaaagagaggagctatgaaggaatcttgggatccatgggattcctgctgtcatggactataaaaaaaacatattcgttggtgatgaagaggagttttaagttgttaatgttgaaatttcagatgtaggactggtggcaactaggtgatgtaaatttgtggcttgagagatggggtctgaattgatcgacttagctaccctgtaattagcaaacaggagtcattgtttcctccagacactaccaaaagtgtagctagaatttggaattattaaaatggatttactgtcatagtgagacttaaattttaagaaatttcagtaattaaggttttcttctagtttattgttttgtcctttcctggggtaaaatatttggaaacccttgattcttggaaatctgtactatgccctcttaaatatggttagatgtatttagttatgtttgtttttatcaagtgattttaaattttaaatgttaagcataattcatatttctttttataaccaggaaccttttgaggatggctttgcaaatggggaagaaagtactccaaccagagatgctgtggtcacgtatactgcagaaagtaaaggagtcgtgaagtttggctggatcaagggtgtattagtatgtatatatagacttaatttt

SEQ ID NO: 74023 - DNA, 1388 bp, Homo sapiens
cctggctaagatggtgaaaccccatctctactaaaaatacaaaaaattagccgggcttggtggtgggcgcctgtagtcccagctactcgggaggctgaggcaggagaatggcatgaacctgggaggcggagcttgcagtgagctgagatcgcgccactgcactgcagcctgggtgacagagcgagactccatctcaaaaaaaaaaaaaaaaagtgtacgcatatatatatgtgtgtgtatatacgtgtgtgtgtgtgtatatatatatatatggagagagagaattcactaaaggatgtgaagtactgaaaatatgttttaaaaatttagttggttcttctgcatttaaagaacatctgaaatatagccacattatgttctctgctgtttagatgtgggtagaggaagaaccacaggatggtgttagagacataattctaaacccagaacatctatttcctaaaccatctcccctttcctttcatgacctttttagggctcggttactgctttggaaatgtgtcatatattgggatagaacaaaactcaagaagcactgaaagagaaagagagaagttagagaacaaagaattatggaatcagctatgaaacctaaaaacctaaaaaggaaacactggttgtcaaattcattatgtcaaccagtacatgtctgagtctgagaaaaactacaaaggaaagcaatgaaaagcactgagtcactgcagacaaggaatgagtaaagagaggagctatgaaggaatcttgggatccatgggattcctgctgtcatggactataaaaaaamcatattcgttggtgatgaagaggagttttaagttgttaatgttgaaatttcagatgtaggactggtggcaactaggtgatgtaaatttgtggcttgagagatggggtctgaattgatcgacttagctaccctgtaattagcaaacaggagtcattgtttcctccagacactaccaaaagtgtagctagaatttggaattattaaaatggatttactgtcatagtgagacttaaattttaagaaatttcagtaattaaggttttcttctagtttattgttttgtcctttcctggggtaaaatatttggaaacccttgattcttggaaatctgtactatgccctcttaaatatggttagatgtatttagttatgtttgtttttatcaagtgattttaaattttaaatgttaagcataattcatatttctttttataaccaggaaccttttgaggatggctttgcaaatggggaagaaagtactccaaccagagatgctgtggtcacgtatactgcagaaagtaaaggagtcgtgaagtttggctggatcaagggtgtattagtatgtatatatagacttaatttt

SEQ ID NO: 74024 - DNA, 483 bp, Homo sapiens
aggactctgattctatcctctatacaaatgcttgtctccttccttgggtcatgagccttaggtttcagaacatgggagttagatgcaggcattctgaataactcattctattttcagtaaaaatgaagagagctccttagtaaaggctgatatttgtatgctactytgagttggtactttacatacagtgccttatttagtcctcacaacaaccctgccaatgagatgacattgtccccaatgcacagatgaggaaactgaggcagataacattgtccccaatgtacagatgaggaaactgaggcagggaaacaaggatgactactctgtgttcccacctgggaccctgctaaggaggaagagagatcctgatgataccactggtgggagtggctctgcggctctcttggtgggacatgagctccctgggggcagtgatgtgtgtgatttgtctctgcacccccagccccagcactgggcttg

SEQ ID NO: 74025 - DNA, 1437 bp, Homo sapiens
ctccccaaagtcagaagttacaggcagatgcttcaaggaggcactcaaggcgttgctgcctgtcttcccattctcctcttccacctcatccctacatcatctgatctggacgatgtgctgttttctaaattcatcctcagggttcccactactgcgctggctagtgttgttccctctgcttagtatgcccttcctaacccatcttggcttgttaggaatacgtttgtctttcctgcccatcctcaaaagacccttcttttacaggatctgcctctttaatcaatggaggaaaacgcatgggttttgagcctcagatttgcaacccagctctggaaatcacttcttggagcagcagtacctccatcagttatgccaagataataacctctagctcctagggttttggagtggggaggttagagatgatcctggtgaaggcttgagaaaccataacacttcagtaaakagtaatttcagtaaagagtaatttctctctagtgttcttaacctctgaacacatcacaagctgctcaatagctaagccaaagtgaggagtgggtctatcaatcagaactttttgggtggcaagtgacagcaacccaacacaaactgactcagaaataaggagatgtattgactcatgtcaatgaaaagcacaggggtagggctaacttcaggctcagctggatccaggaccacaaatgacatcactggattgttttctttctcctgcttgtcctttttctctatctctccctattgttttcttccgttttagctttttggtttctcatttagactcttcccatatggggactctgcacagtccctactcacatcctgatagcttagcaaccctgatggaaaaagagagccggcttttccaaagttccagcacacaggcccccagctgactgactgcattggctggtcacatgcatgtcagtgacccaaacctgtcaatgtccactcttgaatcagagggctgtgggcagtcccaccggaaccacatgggctgtggatggggaagggctggttcctgaggaaactcagggtgctttaactggaagagtagggaatgaatgttgagcagacagaaaaatatccacacagcggatggaagcagaacgaatgtgcagttagttatgcttgcagacaattgtacgagagtgtcctggtatgttctgcccactggctctgcaagggcagggcctaccttccaaactcacataacacgtgatcctccagacacacctatgggatagaaggtcccctctcctcttccagtctctagtgacagcctcacagctgcccattgcccgtcctatttctccctagccatccctttctgcttgctggtgccttctgagtagcagggtgattccagtgctgctggccactcattcacagcactatcttgaacagattactgggcct

SEQ ID NO: 74026 - DNA, 1437 bp, Homo sapiens
ctccccaaagtcagaagttacaggcagatgcttcaaggaggcactcaaggcgttgctgcctgtcttcccattctcctcttccacctcatccctacatcatctgatctggacgatgtgctgttttctaaattcatcctcagggttcccactactgcgctggctagtgttgttccctctgcttagtatgcccttcctaacccatcttggcttgttaggaatacgtttgtctttcctgcccatcctcaaaagacccttcttttacaggatctgcctctttaatcaatggaggaaaacgcatgggttttgagcctcagatttgcaacccagctctggaaatcacttcttggagcagcagtacctccatcagttatgccaagataataacctctagctcctagggttttggagtggggaggttagagatgatcctggtgaaggcttgagaaaccataacacttcagtaaatagtaatttcagtaaagagtaatttctctctagtgttcttaacctctgaacacatcacaagctgctcaatagctaagccaaagtgaggagtgggtctatcaatcagaactttttgggtggcaagtgacagcaacccaacacaaactgactcagaaataaggagatgtattgactcatgtcaatgaaaagcacaggggtagggctaacttcaggctcagctggatccaggaccacaaatgacatcactggattgttttctttctcctgcttgtcctttttctctatctctccctattgttttcttccgttttagctttttggtttctcatttagactcttcccatatggggactctgcacagtccctactcacatcctgatagcttagcaaccctgatggaaaaagagagccggcttttccaaagttccagcacacaggcccccagctgactgactgcattggctggtcrcatgcatgtcagtgacccaaacctgtcaatgtccactcttgaatcagagggctgtgggcagtcccaccggaaccacatgggctgtggatggggaagggctggttcctgaggaaactcagggtgctttaactggaagagtagggaatgaatgttgagcagacagaaaaatatccacacagcggatggaagcagaacgaatgtgcagttagttatgcttgcagacaattgtacgagagtgtcctggtatgttctgcccactggctctgcaagggcagggcctaccttccaaactcacataacacgtgatcctccagacacacctatgggatagaaggtcccctctcctcttccagtctctagtgacagcctcacagctgcccattgcccgtcctatttctccctagccatccctttctgcttgctggtgccttctgagtagcagggtgattccagtgctgctggccactcattcacagcactatcttgaacagattactgggcct

SEQ ID NO: 74027 - DNA, 1055 bp, Homo sapiens
tcctttcctggatcctcaatcccttccttagtttctggtggctgtggccatgctaacctctatcctcttttactgcagaaagattatatgtttcctatcagagcttcagcgccttacaccactctgagattacagccctccctcagacaaagctgcaaaactgggaactcacccgattccagtcctttcagcattttggcttccctccaaaatttgcctgcttttaattactctctagagtctttaatgtagttgctttttatattctgtccatagtttatagttattatttctgggaggattgatgtctgctaggacttaactcaccatactgtaagcaaaattccacgctcattcttaaagaaaaagtagttctttttgcagaaagtatgggcaagggcctctaaggcaaaaagatcagcatgacaaaggcatgaaaacagtgtgataagctcatgcttctcttatgatatctttccttcaaataaatatacaagagaaaatgcttgcaaacagatacagctacagtttctggcatctcaacagcctgccttttccccttgagagaagaactgagataatgagggctttaaattcatctttctgaatatagaccaaatcttactgcctatgttgtcttccacacagtccctcagctagaagccctgaagggcaatgacacactttggacccattgttggagatgaggtcaggaaacttatttctggcatttggatattgtcaaaaggaatatatcttttcctgtctctttaaaatgccttgccgatttttgtgacacatccataaatttatctagaaacagattggcagcaagctcagtgtcaattatttagaatgtgtgcccctttggacccctcttttgctcatctcttcgcccaccccggcatggcacatgtgtcaggaaagcaatctgcacgtgaatcaatgctgtgggccgggactgtctacactgtggtcaaaggctactacatttgattcctaggaagctcataaatgtgccattgcggagtgaaaaraagaaatacacgataatg

SEQ ID NO: 74028 - DNA, 1134 bp, Homo sapiens
tgtaagcaccataagatgtacaaaaatgttcattgcaggyctacttgtaatagcttcaaactgtacactaatcaaattctacttaaccatagaaaaaattgtggtgtattttctcaacaaaatactatacaacaatgaaaattaatgaaccacaaagctcaaaagcaggcagaaaaaatttatggtgctgtaagtcagaatattcattagcctttgggaatgtggtctctggaaggagcaatggcagggagactgggatgctggtaagttcttatttcttaatatgagttctggttgcacaagtgtgatctctttgtaaaattttacctacaatttgtacatttttctgaatattttctataccccactaaaacttcaaaaaataaaaatgtgggtatgaggagccattaaccagtggagtaaagttggaaaggaggctggagagctgaaagtgggtttcatgactagcatcttcaaattttggaatccaggaaacgggagagactaaatgaacatagaaatgggtgaccttcccttaagagatgccaatccttgatgttggggagccccatgttgacccttccctgatagggcaaagcaagaccaatcaaatggagctgcctgccgtcctctctaagaatccagcccttgtcctacagttgggagctgtgggagatgcagacttgttgatctgataggctaggatccctgataaggttggacactgccttttgggaacagtttcagtgaactttggagagtcttatggggaaaacagacagaggcattggtttcttcagacctcagacttgaaaattctccaaccaagtctcattgcctctaaagaagacggaatttcacttaatttcctgcagaatagatgaaagaggcagagagggctatgtatattccatgaactcctaaattccaatttcttcacatcttttccagggccattaactgtccttcctacagagtcagttcaggctcacctcccttctcctggagttcaaggagtctctagcctccctgcttcgtggctgacaacctccttccacagaacagtcagaagaattcttctaacatgcaaatctgattgatcatgccactctccttcctacaaactttaatgca

SEQ ID NO: 74029 - DNA, 1134 bp, Homo sapiens
tgtaagcaccataagatgtacaaaaatgttcattgcaggtctacttgtaatagcttcaaactgtacactaatcaaattctacttaaccatagaaaaaattgtggtgtattttctcaacaaaatactatacaacaatgaaaattaatgaaccacaaagctcaaaagcaggcagaaaaaatttatggtgctgtaagtcagaatattcattagcctttgggaatgtggtctctggaaggagcaatggcagggagactgggatgctggtaakttcttatttcttaatatgagttctggttgcacaagtgtgatctctttgtaaaattttacctacaatttgtacatttttctgaatattttctataccccactaaaacttcaaaaaataaaaatgtgggtatgaggagccattaaccagtggagtaaagttggaaaggaggctggagagctgaaagtgggtttcatgactagcatcttcaaattttggaatccaggaaacgggagagactaaatgaacatagaaatgggtgaccttcccttaagagatgccaatccttgatgttggggagccccatgttgacccttccctgatagggcaaagcaagaccaatcaaatggagctgcctgccgtcctctctaagaatccagcccttgtcctacagttgggagctgtgggagatgcagacttgttgatctgataggctaggatccctgataaggttggacactgccttttgggaacagtttcagtgaactttggagagtcttatggggaaaacagacagaggcattggtttcttcagacctcagacttgaaaattctccaaccaagtctcattgcctctaaagaagacggaatttcacttaatttcctgcagaatagatgaaagaggcagagagggctatgtatattccatgaactcctaaattccaatttcttcacatcttttccagggccattaactgtccttcctacagagtcagttcaggctcacctcccttctcctggagttcaaggagtctctagcctccctgcttcgtggctgacaacctccttccacagaacagtcagaagaattcttctaacatgcaaatctgattgatcatgccactctccttcctacaaactttaatgca

SEQ ID NO: 74030 - DNA, 1134 bp, Homo sapiens
tgtaagcaccataagatgtacaaaaatgttcattgcaggtctacttgtaatagcttcaaactgtacactaatcaaattctacttaaccatagaaaaaattgtggtgtattttctcaacaaaatactatacaacaatgaaaattaatgaaccacaaagctcaaaagcaggcagaaaaaatttatggtgctgtaagtcagaatattcattagcctttgggaatgtggtctctggaaggagcaatggcagggagactgggatgctggtaagttcttatttcttaatatgagttctggttgcacaagtgtgatctctttgtaaaattttacctacaatttgtacatttttctgaatattttctataccccactaaaacttcaaaaaataaaaatgtgggtatgaggagccattaaccagtggagtaaagttggaaaggaggctggagagctgaaagtgggtttcatgactagcatcttcaaattttggaatccaggaaacgggagagactaaatgaacatagaaatgggtgaccttcccttaagagatgccaatccttgatgttggggagccccatgttgacccttccctgatagggcaaagcaagaccaatcaaatggagctgcctgccgtcctctctaagaatccagcccttgtcctacagttgggagctgtgggagatgcagmcttgttgatctgataggctaggatccctgataaggttggacactgccttttgggaacagtttcagtgaactttggagagtcttatggggaaaacagacagaggcattggtttcttcagacctcagacttgaaaattctccaaccaagtctcattgcctctaaagaagacggaatttcacttaatttcctgcagaatagatgaaagaggcagagagggctatgtatattccatgaactcctaaattccaatttcttcacatcttttccagggccattaactgtccttcctacagagtcagttcaggctcacctcccttctcctggagttcaaggagtctctagcctccctgcttcgtggctgacaacctccttccacagaacagtcagaagaattcttctaacatgcaaatctgattgatcatgccactctccttcctacaaactttaatgca

SEQ ID NO: 74031 - DNA, 1134 bp, Homo sapiens
tgtaagcaccataagatgtacaaaaatgttcattgcaggtctacttgtaatagcttcaaactgtacactaatcaaattctacttaaccatagaaaaaattgtggtgtattttctcaacaaaatactatacaacaatgaaaattaatgaaccacaaagctcaaaagcaggcagaaaaaatttatggtgctgtaagtcagaatattcattagcctttgggaatgtggtctctggaaggagcaatggcagggagactgggatgctggtaagttcttatttcttaatatgagttctggttgcacaagtgtgatctctttgtaaaattttacctacaatttgtacatttttctgaatattttctataccccactaaaacttcaaaaaataaaaatgtgggtatgaggagccattaaccagtggagtaaagttggaaaggaggctggagagctgaaagtgggtttcatgactagcatcttcaaattttggaatccaggaaacgggagagactaaatgaacatagaaatgggtgaccttcccttaagagatgccaatccttgatgttggggagccccatgttgacccttccctgatagggcaaagcaagaccaatcaaatggagctgcctgccgtcctctctaagaatccagcccttgtcctacagttgggagctgtgggagatgcagacttgttgatctgataggctaggatccctgataaggttggacactgccttttgggaacagtttcagtgaactttggagagtcttatggggaaaacagacagaggcattggtttcttcagacctcagacttgaaaattctccaaccaagtctcattgcctctaaagaagacggaatttcacttaatttcctgcagaatagatgaaagaggcagagagggctatgtatattccatgaactcctaaattccaatttcttcacatcttttccagkgccattaactgtccttcctacagagtcagttcaggctcacctcccttctcctggagttcaaggagtctctagcctccctgcttcgtggctgacaacctccttccacagaacagtcagaagaattcttctaacatgcaaatctgattgatcatgccactctccttcctacaaactttaatgca

SEQ ID NO: 74032 - DNA, 1134 bp, Homo sapiens
tgtaagcaccataagatgtacaaaaatgttcattgcaggtctacttgtaatagcttcaaactgtacactaatcaaattctacttaaccatagaaaaaattgtggtgtattttctcaacaaaatactatacaacaatgaaaattaatgaaccacaaagctcaaaagcaggcagaaaaaatttatggtgctgtaagtcagaatattcattagcctttgggaatgtggtctctggaaggagcaatggcagggagactgggatgctggtaagttcttatttcttaatatgagttctggttgcacaagtgtgatctctttgtaaaattttacctacaatttgtacatttttctgaatattttctataccccactaaaacttcaaaaaataaaaatgtgggtatgaggagccattaaccagtggagtaaagttggaaaggaggctggagagctgaaagtgggtttcatgactagcatcttcaaattttggaatccaggaaacgggagagactaaatgaacatagaaatgggtgaccttcccttaagagatgccaatccttgatgttggggagccccatgttgacccttccctgatagggcaaagcaagaccaatcaaatggagctgcctgccgtcctctctaagaatccagcccttgtcctacagttgggagctgtgggagatgcagacttgttgatctgataggctaggatccctgataaggttggacactgccttttgggaacagtttcagtgaactttggagagtcttatggggaaaacagacagaggcattggtttcttcagacctcagacttgaaaattctccaaccaagtctcattgcctctaaagaagacggaatttcacttaatttcctgcagaatagatgaaagaggcagagagggctatgtatattccatgaactcctaaattccaatttcttcacatcttttccagggccattaactgtccttcctacagagtcagttcaggctcacctcccttctcctggagttcaaggagtctctagcctccctgcttcgtggctgacaacctccttccacagaayagtcagaagaattcttctaacatgcaaatctgattgatcatgccactctccttcctacaaactttaatgca

SEQ ID NO: 74033 - DNA, 750 bp, Homo sapiens
tttttaaacactaagaatttaatattgtaataaagaaacaatttattgaatgttttctctttgccacacatttcattagcrttccactgtgtcatgatatctctttaccagattatctaactcctttaaatatgacaataataatcaacagcagccaggataacaatagctaacatttattgagtaattacacgtgctaggtactgctctaaagactttattaattacctgatcttcacaacaaactaatgagatagtatagcagttgaggtcctataaggcaacagatagcatgcctaaatgtggcaaatttaaaaaagtcttctaaaagagacaatttacaaaggtatggatactattaagaaaaatcaataggggttggtgaagagcaacattgatccattagcaacactaggctcatgggtctgaaaaaggagcagttattagaaattagagagaataggcatagatatagcagagggccactcaactgggaagttttcccaaataatcacctaccactactactctttacatgaggcaggaggagagaatgtatttataaacaaatgtagctgttgcaatttcagcttctgtttctggacatgatgtctaggtttataattgtaacttctctatttcaccacccattacactcttgccatctgccagcactttggctgggtaaaattctgtacctggtggagtgagacaaaagcttcagtctcagcatccaagtcctaggtagcc

SEQ ID NO: 74034 - DNA, 750 bp, Homo sapiens
tttttaaacactaagaatttaatattgtaataaagaaacaatttattgaatgttttctctttgccacacatttcattagcattccactgtgtcatgatatctctttaccagattatctaactcctttaaatatgacaataataatcaacagcagccaggataacaatagctaacatttattgagtaattacacgtgctaggtactgctctaaagactttattaattacctgatcttcacaacaaactaatgagatagtatagcagttgaggtcctrtaaggcaacagatagcatgcctaaatgtggcaaatttaaaaaagtcttctaaaagagacaatttacaaaggtatggatactattaagaaaaatcaataggggttggtgaagagcaacattgatccattagcaacactaggctcatgggtctgaaaaaggagcagttattagaaattagagagaataggcatagatatagcagagggccactcaactgggaagttttcccaaataatcacctaccactactactctttacatgaggcaggaggagagaatgtatttataaacaaatgtagctgttgcaatttcagcttctgtttctggacatgatgtctaggtttataattgtaacttctctatttcaccacccattacactcttgccatctgccagcactttggctgggtaaaattctgtacctggtggagtgagacaaaagcttcagtctcagcatccaagtcctaggtagcc

SEQ ID NO: 74035 - DNA, 741 bp, Homo sapiens
aaaaaaaaaaaaaaaaaaaaaagaaaaagaaaaagaaactcttccacgtgtacacaagtacacaataaagaatttattaggatagctaatgagcttgtttttaatggccaaaagtaaaataaaaagaattatatgcatgagaaacataaatagataatatatccacacaatgtattactaaaataaatgaattacttatatatgtccctgaataaattttaataatgtaattaagtggaaaagttgcgaaaaaaagtatgtagaatatatactttgtatttaaattttaatagcacaccaagtaattgtatatattgttttccaataaccatatatgtaataaaactataaaaataatgtatggaaagaataaacacaaacgtctgtatagtcattacctttgggaaggaaggcataggaagaggtttcaacagtatctgtwatctgttacaatattatgattttctctgtaaaagaaatttgcaacttgttaatgttaaatttaggtgttaaataagtacatggaggtttatgttgtcattttctgtgcttttccgttttaaattttttgtaatgttttgaaaatttagaaagggaagaaaataattcctagtgtggtaaagataagagcaattgacatcatttattaagcacttaccacatgcctgataacatattaagcactttacatgggttacctcctttaatcctctccataactctacgagagaagtactccag

SEQ ID NO: 74036 - DNA, 664 bp, Homo sapiens
gactgttatccgcagccctgaaagttctggcaggactggtgaccctgaaggcagcgccagggcccagccacctttatgtggcaatgggcacttgggaattctcagccagtatcaacccccagtgcctccagccggtgtctcccagagatsccccctggcataaggacacctgttctctgctgcatttgcttcaaagaaaatgttacaacaacatttgacaatagtgcaggggaggtctttccgaagaaaaatgacttatgacaaaagcatggacaacgctctgctcttaggggctgggaatgagaagacgcgtgctcacctccctcattatccttgttatcagcacaggaagtttccatggcaacgttgcatccgggccctctccagccggtctggcagacacactgccagctgttctgacccagtgtgcatctcccgttaccgttgcacaagtcagggcagccatctggttggagaaatggagaggatgagaaggagggacgtgaggccgcgctggggaagcaggggagccatgcagaggggagcaaggccgcagggcagccgctgggccagcctcacagtggggcccgcgcctgccttccacagagtcaggggagcaggcaacgcatgcagtagcaagacacagtggggtcacagatgcagg

SEQ ID NO: 74037 - DNA, 1612 bp, Homo sapiens
gggaaagaaatgaatatttcattccaaaaagaaaaaaaaaaagaagagtcagttaaaatgggctattttggaatgtcttctcagcccacttgactctggcttcaactctgttgctggtggtcctggcaaggccgtgcagatgatgggaggaggcaggggtcctagatccaaaacccagttatgctacagatatgctgtgtgactttgagtgagtcactggccccactccccggcctggtcttccttcacctggcatgccaagccacgcctccctcaatagactgatgaaaggatgaatgtctggcacgtgcttgtcctcgcgtgagaggtctggaataccagagagtgcatatctgtctgtctgcctcctccccaagcacaaaagactttgagctcctttgagaaagaagctgtgtaaatgcagcacaattacagcggtcattatcaccgccaaggtaccaatctgggtaacggggtatctgcagtcatcatgggaatggagcagcggggtccccaactgacctcttgtgcttggtcagttcaggctgtcagtgggggaggaatcccagctgactagagagtcaggatccgtacatggatcttttcaggtgggtacttcccggttagctttgccaaactggttggagtggtctcaatctctagaagagtggttctcacattctagcgagtatcaaaaccacctggaggacttgttccaacaaaatctctgagtcccattcccagatcttctaattcacttggtccaacgagggcacaagagtctacatttctaacgagttcccaggtgatactgatgctgttggtccaggggccacactttgagagtcacttctctagaaaaaaagatctaacaatgaattgatacccagccaaggagagacaagcctccaaagatgacagagctgctgggcctcggggcctgctccaggggtctgggccatgtgcgtggtctggactccatggaaggtttcaccagctgtggtgttgagctgtaatcattgtttttcttccagaagtgtgctcagtagactgtggcactcacggcgtctgcatcgggggagcctgccgctgtgaagagggctggacaggcgcagcgtgtgaccagcgcgtgtgccacccccgctgcattgagcacgggacctgtaaagatggcaaatgtgaatgccgagagggctggaatggtgaacactgcaccattggtaggcaaacggcaggcaccgaaacaggcacatattgctttattttcataaattgtagatctatagtgatggtcgcgcatggcaactggctgttccttcagggacacaagtgctctcccacatttcctgctgcccctccaaatctcccaggggatagggaargagaaaaatgaggtccctaattgggaagggcttttccttctttccaggattccgagttgaaaggaaagggaccagagcagataagaaaacccctccaaacttgcaatctcagggagggagaaatgcacatgcatgggaaactgtcggtgtctgggggttgcaagcacctcaaatcactgtggtctgcaactctcccctttttaaatcctctctcagctggctggatcact

SEQ ID NO: 74038 - DNA, 1830 bp, Homo sapiens
ttatttaggcaatgtgggtgacgttttagcaagggcctggcccttagtaagggctcaatgccttagggttttggacatcacgtcctttcaaatcaggcccatggacactgcctgttttgggaccctctggtccctcagacagatgtgttcctgggacattaaatgtctatatcggatttctcagccttggtgttattgacattttgggtgggatcattctttgatttggggctttcctatgtgtgtagggcatttggcagcaaccctggcctctacccactggatgccagtagcacctccccacctccccaccaccatgactcgtgaatgcttccagtcattgccagatgttcctgggtgagcgagttgccccggtagggaaccactggtctggacttgggggaagactgtgggagcaagagagctagtgatggcacgaggaccttgcctctttattcaaatgctggtcacagagaccgggggatggcaagggtgtgcctgccaccatctagggcaaggctctggccaaagcacaaatacaggaagccaacataacgctatcaatatcacctccttgccaccagtgaaatctgcgttttcatcctttaattccctaaaataagtccatagtgatttacatgattaaaattttttttcagattatgcattttcatcacaatttcataatggatatttgatttgtcatctaatcagggggaaaaaaacataatcccttaagagacacttaataaccatttaaactaataaagacttgattaaaaaagactgaaagtgctgtgttgggtaaattataaactttaaacccctttttttaaaaaagaacacaactaattcaatggtcaattacatgtaccaggaaaaggttttcaatggaaaagttttgtctttgaggtgtttttttctaaggcttccttgcagcagcacacattctgtacttgtttgaatcttcttcagaaacactgtccaaattttttgagtgttttagaaaaaaggagccaatggttttaaaggagaaaagccatatatcatggtggttagctgaaagggctattctgagtcttaacttcttgagcctttgtatccttatctgtataatgaaaataatatgatgaaatagactcattgaacttayagtctagtgtgaagaaacagacaatctgcaagaataacagcgtgagaaaatttaggagtgtgatatttccataaaggaaacactaatggttgatgggagagacacagaggaagacttcgtaataagtccttctgaggcatttgagctgagaactgaatgactacattgagccagtgatacaatgtgccttgactgagcatttccaccttgcactagcaaagaccctcgggtggaactaatctttgcacttgtgcagtctaaacaccggccagagtggatgaggcagagcttccggagaggatgggggaggacaggtcagagacaaggcaggggatatacagagggccctttaagccaaggtgaaaaaaacagctgattttgattctaactccatgagaaaccctttgagaacatggaatgatgagatttacaatgtattaggttggtgcaaaattaattgctttcaatggccaaaaccacaataacttttgcatcaacctactaaaacactccctctggctgctgtgtggaggaacagagagcagacggcaagaggagtgcagggagaccacttgggaggctgttcccgtaacccaggtgcagagcaagctcagcacagtgcttggcacatgtaagctctcaaaaatcttactgattattatttttatatgcaagag

SEQ ID NO: 74039 - DNA, 1830 bp, Homo sapiens
ttatttaggcaatgtgggtgacgttttagcaagggcctggcccttagtaagggctcaatgccttagggttttggacatcacgtcctttcaaatcaggcccatggacactgcctgttttgggaccctctggtccctcagacagatgtgttcctgggacattaaatgtctatatcggatttctcagccttggtgttattgacattttgggtgggatcattctttgatttggggctttcctatgtgtgtagggcatttggcagcaaccctggcctctacccactggatgccagtagcacctccccacctccccaccaccatgactcgtgaatgcttccagtcattgccagatgttcctgggtgagcgagttgccccggtagggaaccactggtctggacttgggggaagactgtgggagcaagagagctagtgatggcacgaggaccttgcctctttattcaaatgctggtcacagagaccgggggatggcaagggtgtgcctgccaccatctagggcaaggctctggccaaagcacaaatacaggaagccaacataacgctatcaatatcacctccttgccaccagtgaaatctgcgttttcatcctttaattccctaaaataagtccatagtgatttacatgattaaaattttttttcagattatgcattttcatcacaatttcataatggatatttgatttgtcatctaatcagggggaaaaaaacataatcccttaagagacacttaataaccatttaaactaataaagacttgattaaaaaagactgaaagtgctgtgttgggtaaattataaactttaaacccctttttttaaaaaagaacacaactaattcaatggtcaattacatgtaccaggaaaaggttttcaatggaaaagttttgtctttgaggtgtttttttctaaggcttccttgcagcagcacacattctgtacttgtttgaatcttcttcagaaacactgtccaaattttttgagtgttttagaaaaaaggagccaatggttttaaaggagaaaagccatatatcatggtggttagctgaaagggctattctgagtcttaacttcttgagcctttgtatccttatctgtataatgaaaataatatgatgaaatagactcattgaacttacagtctagtgtgaagaaacagacaatctgcaagaataacagcgtgagaaaatttaggagtgtgatatttccataaaggaaacactaatggttgatgggagagacacagaggaagacttcgtaataagtccttctgaggcatttgagctgagaactgaatgactacattgagccagtgatacaatgtgccttgactgagcatttccaccttgcactagcaaagaccctcgggtggaactaatctttgcacttgtgcagtctaaacaccggccagagtggatgaggcagagcttccggagaggatgggggaggacaggtcagagacaaggcaggggatatacagagggccctttaagccaaggtgaaaaaaacagctgattttgattctaactccatgagaaaccctttgagaacatggaatgatgagatttacaatgtattaggttggtgcaaaattaattgctttcaatggccaaarccacaataacttttgcatcaacctactaaaacactccctctggctgctgtgtggaggaacagagagcagacggcaagaggagtgcagggagaccacttgggaggctgttcccgtaacccaggtgcagagcaagctcagcacagtgcttggcacatgtaagctctcaaaaatcttactgattattatttttatatgcaagag

SEQ ID NO: 74040 - DNA, 1830 bp, Homo sapiens
ttatttaggcaatgtgggtgacgttttagcaagggcctggcccttagtaagggctcaatgccttagggttttggacatcacgtcctttcaaatcaggcccatggacactgcctgttttgggaccctctggtccctcagacagatgtgttcctgggacattaaatgtctatatcggatttctcagccttggtgttattgacattttgggtgggatcattctttgatttggggctttcctatgtgtgtagggcatttggcagcaaccctggcctctacccactggatgccagtagcacctccccacctccccaccaccatgactcgtgaatgcttccagtcattgccagatgttcctgggtgagcgagttgccccggtagggaaccactggtctggacttgggggaagactgtgggagcaagagagctagtgatggcacgaggaccttgcctctttattcaaatgctggtcacagagaccgggggatggcaagggtgtgcctgccaccatctagggcaaggctctggccaaagcacaaatacaggaagccaacataacgctatcaatatcacctccttgccaccagtgaaatctgcgttttcatcctttaattccctaaaataagtccatagtgatttacatgattaaaattttttttcagattatgcattttcatcacaatttcataatggatatttgatttgtcatctaatcagggggaaaaaaacataatcccttaagagacacttaataaccatttaaactaataaagacttgattaaaaaagactgaaagtgctgtgttgggtaaattataaactttaaacccctttttttaaaaaagaacacaactaattcaatggtcaattacatgtaccaggaaaaggttttcaatggaaaagttttgtctttgaggtgtttttttctaaggcttccttgcagcagcacacattctgtacttgtttgaatcttcttcagaaacactgtccaaattttttgagtgttttagaaaaaaggagccaatggttttaaaggagaaaagccatatatcatggtggttagctgaaagggctattctgagtcttaacttcttgagcctttgtatccttatctgtataatgaaaataatatgatgaaatagactcattgaacttacagtctagtgtgaagaaacagacaatctgcaagaataacagcgtgagaaaatttaggagtgtgatatttccataaaggaaacactaatggttgatgggagagacacagaggaagacttcgtaataagtccttctgaggcatttgagctgagaactgaatgactacattgagccagtgatacaatgtgccttgactgagcatttccaccttgcactagcaaagaccctcgggtggaactaatctttgcacttgtgcagtctaaacaccggccagagtggatgaggcagagcttccggagaggatgggggaggacaggtcagagacaaggcaggggatatacagagggccctttaagccaaggtgaaaaaaacagctgattttgattctaactccatgagaaaccctttgagaacatggaatgatgagatttacaatgtattaggttggtgcaaaattaattgctttcaatggccaaaaccacaataacttttgcatcaacctactaaaacactccctctggctgctgtgtggaggaacagagagcagacggcaagaggagtgcagggagaccacttgggargctgttcccgtaacccaggtgcagagcaagctcagcacagtgcttggcacatgtaagctctcaaaaatcttactgattattatttttatatgcaagag

SEQ ID NO: 74041 - DNA, 1119 bp, Homo sapiens
tcacaccagctagtgacattggcattgccatgcctattttacagataagaaaactgagactttgagaagcaaagtgacttgcagagctggaatacaaaggctgactctgaagcccaagccctcaatcaattatgatgatacagtgtcacctgttcagaaaccagggacatgaaagagaaggtgcaaaacatctttcagtgctgtgttgaaacggaacgaggggaaaagacatctctcctagtttagtaaggaagaaagtgatgcggggtgacgggacaggctcagcctaaaaaggcttcctyctaccctacctccaggtgatgtggttatgacatcacctcccttggtctccactgtcaccgctgcccacagatgggagaaagcatctcataggattccacaggagcttcagactcactccgatgccggcttgaaatgatggaagggctagggctcctgactctaagttcagggtgataaaggggagtggggaagaagtaaggactgtctcaccaggccagacagtctaacaacgcctcctcaccttgcagttcccacttttagaggaaacctacaccctctctcctacccctggctgtgatgaactaaatctcacacctctgtcttggtggtgataattaaatattatccgcctgtcacttggtgcacatgttgtgtgtattctcagactttaatgagctggtatttgtcttctgtaagcaaaaatatttctttgagtctcttctttttcaaattggggtgagcagttcaagtgaagatctctcactattaaaaagacagtctgccagctgccgtgtctgtctgaaccatttccacttctttttagtggccatgggcaggtgtggcttgtcccttcagaatcagccattgcttcctgaggttacatgagtggcggtcacatgactgggggtgtctggagactttgaaagccaagggggtgagaaggcagggagttggcataaactgttttggtggggatattctaaggcagccttctccaacagggattttcatctcaacactgctgactacagagcatatttgagtgaaagttttctcagttcttccaaaggagttattttatccagtaccattcta

SEQ ID NO: 74042 - DNA, 646 bp, Homo sapiens
tccattcagccccaaatcctcattagtgctcatacagtatgtataactttgcattctcatttatttgtattttcctcatttctagtcatttaaaataatatgttcatgtaattgcacaattccacagctctactgagatgctgctgccgagtctgaaccgttgattagtgggcactgcccccttgtgataactgaaaatgctgattgttcagctgatggagaaaaactgaatttggtgttcggagggcagtttgtggtcacagtgagtagcatataaaagtagaggttgagagaaagctagggactgtaattgaatgggacatggatggagctattgaaaaatatttttcctgtaatcccagcactttgggaggctgaggtgggtggatcatgagatcaggagatcgagaccatcctggctaacacggtcaaaccccttctctactaaaaatacaaaaaattagycaggcatggtggcgggtgcctgtagtcccagctactcgggaggctgaggcaggagaatggtgtgaacctgggagtgagccaagatagcgccactgcactccagcctgggcggcagagcgagactccatctcaaaaaaaaaaaaaaaatggaaaatatttttaattagcataagcatatttg

SEQ ID NO: 74043 - DNA, 1248 bp, Homo sapiens
tttactagtttaactctcagaaactttgaatttgtcccataattattaatgatacatatatagtctccttgcttattaacataaacagttaatcatatccactgtataaagccaatgctagttcttttactgaacatggccaggtcgggggcagtaagtggggattctctcttatcctcttgtatcaacaacaattatctcttttatggttcattccaattataaattcttaccattaaaatttttctgtttctcaaagttaaaaacaacaacaataacaacaaaatctcaggaacattaaatagcagcagtagttaagactattataatgcaattatttcatatactttcgtatacaatttccccaaattgaaagtgtaatttatcaccttgagaagttacaaaagcagttgattgccaaagtgaaaggatcttcgagataatcttgtgcatcgtttgtctacagatgaggaaataaagactgagagttcaatttttaactttttcatggtcacacatcccgttagtgacagagacaggaccagaacccaggtctttacaatattatgcttccccagttaaatttgactgaaagtgttgtttgtctcttacaattttctaaactcaacacctgcagtgtgtcattaaccacaccaatctcaggacatgcggtagggtaataattttttcatcgctatagcaataactcactattttagaagttatttaaactcttctccattactcaaacatgtgagatcaagtgttccaatttggggtgtagaagataatcatccattcatttgtccatttggcaaacatttaaggaatacttattttgtgcccgttactatcatagttgctaaagacacaagagtctttatccttgaagcacacagtctagcagaagtaaacaaactaaatattagccaagacaaatggctagtaattactaagtgattagcacacgcaaggactttacctggaatttctcatttaattccccatgacaatctacatatcacagctactaactagccccacttcacagatgaggtaattgaggcttagaaagcttacgcgagttgcctaaactcatacaacttaggtggggtagtctggcaaccacatactactgcatttgctctgaatctttatgtcatactctttgtagttagrcagaaacacagaagcagggactgtgtttggagggagactccgttgtgaaggtggaaactgaggaagtaa

SEQ ID NO: 74044 - DNA, 762 bp, Homo sapiens
ttcatcttccctcaataattccacatggactgcacagctgacccagttattgcctctatatatttttccacaaaacagggagagagaatgagagagagaaagagaggacaagaacatggagctgaggtgggcagtgggagagggatggggagattgagaggactgaggagagacctaggtgaggctgggagaaaggtgtgagatagtttctcaggcttcacaggggcatycagagagcaagagcaagtacaaactacagcatgcaggcacggaaaacagtgttctccgtccttttaaggcctggcctgcagccacgtcacctggtcttggtccttactcaagaagtggcaggcatagtttgccctgggctttatgctaaagctgagggagaagggaaagggggaaagggaagtggcacacagctatgctttgccaggatggcccaccatcacaagcagggacagaggcagcagcagtggcaaaagccagctgcggtccctggcataagtaaagccaaagtcatggcatcccattgaggcacagtttggcacacctggcctgatgatagtgccattcccaaaccacttgccacccataaactctgggttcacctgatcaatggcccctgcataccctgcaaaaaaaaaaaaatccttctcatcatccttggctttcaatggaggacagacctacatctttacatttatggccctcttctgacataaaataccatcactctgtccaggaaaggggaaactattt

SEQ ID NO: 74045 - DNA, 1054 bp, Homo sapiens
aacatgcagaactgccagctgcaggaacagctgtaagacaatcacctgctttacaaactgaaggttagaggatgagctcttccacagacacacattcattactatttatgggctgcacaaactcatatgcacacatacagtcactcacctctacacaaacagaagtgcactacctaatttaagcagacaaatatgaagctggagaaacaacgcaaagaggacactgaaaggacgcccctgacaagggagaacaacgtgcaaaggcttaagaaaagaaatggaattttaaagaataatttgaaggacaagaaaaacaagtttgtaatagtcaggcaaacaagcttttcccrcctgagacaatactaaacagaaagtcaagaggcagacagcaattaaatggaaagtctttgaacagcaaaacaaatgtggcttctaactagtccagcccccagctggcaaggtggctggactggaacatccctgagccagtggccatttgtacaatggggataatatctcccctatgttttgaagtcatgcctagggccaagcaaagagggactgctctcaacaaacccaaggcacccaagaaaaaaggttattagaggaggctgttggagggtagagggttcacaatggatccaagcctctgcctaaccagagagctacaaagagctacagagagctacaaaatccaccgtgcagcctgcaagggagaacagtggcagtacagatgttagccctgccagagggcacagggagccaagaagggctccacaggcccagctgggaataggcacctggaaggaagacaacatgggatgggatgaaatgggaagggcagtgaggagcattcctagccctttctctgtactcccagaggtggaacacgacctactccattcccactccagtagagaagaatacagatcttcaagaagggagctaaacaaactagcaaaaaaaaaaaaaaaaaactgcaatcacagcgacaaaagttagtgcatccaatgaaaagaaatcacatgacacaatcgggcatggtggctcacac

SEQ ID NO: 74046 - DNA, 568 bp, Homo sapiens
tgaatgactgagtctccattctaccaggagggcacctgaaattcagtaagatgcagggactcatctgaagttacccactattctgaggctgaactgaagccttrtctctcctgagaccacccagtgtgcccagctggaagttcttcccaacctctcaccactacctcgtgccaagggctggtttcctatggctcctggggctccccccagctccacctcatgcccatccaacactggtcccttctgccccaggaggtgggcagaaatggagggaggactagggaggaaggagaaggggtcagagtaggctgggcggttgggatggttgatactgatggccgctgaggaagggaggaaggatgccaagattggtcagtctgtcctgaaggactagaagaagggatcgggaccgtgggatcatggtggacatccctctgggactgactaccccaactggaaaacactggaaatgggcaaggccaaggagaattcaggtgtagcagcaaccttgctgctaccgctcccactaaccactttgctcaaggcctttctcagctggagaaactga

SEQ ID NO: 74047 - DNA, 568 bp, Homo sapiens
tgaatgactgagtctccattctaccaggagggcacctgaaattcagtaagatgcagggactcatctgaagttacccactattctgaggctgaactgaagccttatctctcctgagaccacccagtgtgcccagctggaagttcttcccaacctctcaccactacctcgtgccaagggctggtttcctatggctcctggggctccccccagctccacctcatgcccatccaacactggtcccttctgccccaggaggtgggcagaaatggagggaggactagggaggaaggagaaggggtcagagtaggctgggcggttgggatggttgatactgatggcygctgaggaagggaggaaggatgccaagattggtcagtctgtcctgaaggactagaagaagggatcgggaccgtgggatcatggtggacatccctctgggactgactaccccaactggaaaacactggaaatgggcaaggccaaggagaattcaggtgtagcagcaaccttgctgctaccgctcccactaaccactttgctcaaggcctttctcagctggagaaactga

SEQ ID NO: 74048 - DNA, 1111 bp, Homo sapiens
agagtgtctggcacacagtgaacacctaataagcattagctatgccaattattttcatcagtattatctttattattaccaaacatgggtaaatatctttattattctatctcctttctctatggcagcgtttctcraaatgtaatgtgtgtaccattcacctaagtaagaatcatgctaaaatgcagattctgattccttagatctggatgaagcctaattctgctttttaacgagctcccaagtaaggctggtgctacctatgagaagattaactggctgcatgtcataatcatctagaaagctttcaaaaaaataccagaggcataaatgtaccctcctcctccagaccaattaaatcaaagtcactgatggtgggaaccccaggtcattgctattttcgaaacagttccccaagaaaatcgaacatgaggattaaacccctctcttactacataagaatttttacacgctcacaaatgatggggtaaaaagaaatgccagttctctctattacaaattaaactctcatcccacctggaagaagttagcagcataaactgtaacacatctgaagtggtgcccacggttactcttgcaagcttcttatgggaaacacaatattttggtatttcccaacctggtgctgttaacaagaatcatcccttgtttgtgtttgttaatcagcttgatgagcagtttctgtgttgatcttcccaaactgtgttggccagttgccaaatcaagtgcataaattacacactgccctctctccaagctgctcccaaccctgcagaacatcagaaagaatttcctttgaatgcgcaaatctgtgtaagccgattgcttagactgatactttgtggggttggtctgatgtgacatgatcatgtgtcacaatattatgacactgtgatgacgtattttaatgttaagaaataatattttgaccaatatccaaatgtcagtctttttgaaaggtcagattctctttatataatggtgtttcctagagaagttatttataggtcttgaggctccacgtaccaacctaagcactctattccaagaaccaaggagcaacatatggctcagctctactgagatttgt

SEQ ID NO: 74049 - DNA, 1111 bp, Homo sapiens
agagtgtctggcacacagtgaacacctaataagcattagctatgccaattattttcatcagtattatctttattattaccaaacatgggtaaatatctttattattctatctcctttctctatggcagcgtttctcaaaatgtaatgtgtgtaccattcacctaagtaagaatcatgctaaaatgcagattctgattccttagatctggatgaagcctaattctgctttttaacgagctcccaagtaaggctggtgctacctatgagaagattaactggctgcatgtcataatcatctagaaagctttcaaaaaaataccagaggcataaatgtaccctcctcctccagaccaattaaatcaaagtcactgatggtgggaaccccaggtcattgctattttcgaaacagttccccaagaaaatcgaacatgaggattaaacccctctcttactacataagaatttttacacgctcacaaatgatggggtaaaaagaaatgccagttctctctattacaaattaaactctcatcccacctggaagaagttagcagcataaactgtaacacatctgaagtggtgcccacrgttactcttgcaagcttcttatgggaaacacaatattttggtatttcccaacctggtgctgttaacaagaatcatcccttgtttgtgtttgttaatcagcttgatgagcagtttctgtgttgatcttcccaaactgtgttggccagttgccaaatcaagtgcataaattacacactgccctctctccaagctgctcccaaccctgcagaacatcagaaagaatttcctttgaatgcgcaaatctgtgtaagccgattgcttagactgatactttgtggggttggtctgatgtgacatgatcatgtgtcacaatattatgacactgtgatgacgtattttaatgttaagaaataatattttgaccaatatccaaatgtcagtctttttgaaaggtcagattctctttatataatggtgtttcctagagaagttatttataggtcttgaggctccacgtaccaacctaagcactctattccaagaaccaaggagcaacatatggctcagctctactgagatttgt

SEQ ID NO: 74050 - DNA, 641 bp, Homo sapiens
tctgagctctgcttctgagctgatcaagacagagagaaggggcagagggtgcccctgggttttaaccttttacctttaactaaaatccgcaggtttttagagaggaatattttgatttccttcaaacctaagagtccatggttttaaggctctggcactcagacttgcctccacttaccaagctctccttcgtgccaggcacgttgtccatgctttgtttcctgtgatctttacggaggccctttgaggagtgttttatcatctccatttacagatagggacacaggggctcttgtccaggatcacacctccagaaagtagtagcgcctgcatttttaaccactcyacccctctgcctccttgtgtggttcagatccaggagaatgggggcctgtgctgggagggaagaggacagcctgggaaagggtgcctgggaggatgggactgtgttggcaaggctcctgtgctgtgacatagtgaaaaacgtctctggtctctgtccctggttcctgacacaaggaccactaagaaccaaagagtctccagagtaagcctgggtgtggtggctcagacctgtaattccagcactttgggaggctgaggcgggaggatcagttgaggtcaggagttcgagacttgcc

SEQ ID NO: 74051 - DNA, 587 bp, Homo sapiens
catttagccagagcctcgcaccatagaagatgctgaagatatgaaactggatggaactggagacattttgtaagtgaaataagccaggaacagaaagttaaacacagaatgttctaactcatatgtggaagctaaaaaaagttcaactcatagaagtgaaaagtagaacagaggatactagaggctgggaagggtagggggaagggagggacggggatgcaaaaggatacaaaattgcacctagataggactaagttctcattttctatacccctgtgggatgactatagttaacaataacatacagtttcaaatagctgtgagacagagcagggacccttcttaggggccagcygagcaccccaccaacataaaaagagagaaaaatctaggccagaaatggtggctcacacctgtaattccaacactttagcaggtccaaggtgggaggatcgcttgaggccaggagttcgagaccagcctgggcaacacagtgagacccccgtctccacaaaaatttttctaaaattagccaggcgtggtggcacgtgcctgtagtcccagctactcaggaggctgaggcagga

SEQ ID NO: 74052 - DNA, 587 bp, Homo sapiens
catttagccagagcctcgcaccatagaagatgctgaagatatgaaactggatggaactggagacattttgtaagtgaaataagccaggaacagaaagttaaacacagaatgttctaactcatatgtggaagctaaaaaaagttcaactcatagaagtgaaaagtagaacagaggatactagaggctgggaagggtagggggaagggagggacggggatgcaaaaggatacaaaattgcacctagataggactaagttctcattttctatacccctgtgggatgactatagttaacaataacatacagtttcaaatagctgtgagacagagcagggacccttcttaggggccagctgagcaccccaccaacataaaaagagagaaaaatctaggccagaaatggtggctcacacctgtaattccaacactttagcaggtccaaggtgggaggatcgcttgaggccaggagttcgagaccagcctgggcaacacagtgagacccccrtctccacaaaaatttttctaaaattagccaggcgtggtggcacgtgcctgtagtcccagctactcaggaggctgaggcagga

SEQ ID NO: 74053 - DNA, 944 bp, Homo sapiens
tgcattaacccatttaaactccacaggaatcctatgagataggcactcttaattattcttcccattttacagaggtggmaaccagagcacacaaaaagaatggctagataatatattcaacacaaaatagctcggaaatagtgaaaactgcttttggatccaagcagtgggatttttatttacccatcacattgtgtaaaatagacaagtcaagcctgttttatttgaagtggaggttcaggctccttcttccaggcaatgttatagcctctggagttacagcctctgagaaagggtttgaaaagccctggcccaggtgatcctcagagtctgagaaaaactaagacgaggatatgctgtgctcctggttgcaatgaaaagtcaactctgcctggtgagttttgaaagcaagtggctgtcaggtcccccagttatcccttgggctgaggcttttctccttctgggtatattttatttctctttgcaaaatgcagggattaagttccctgtctcaaagtccccttccccagggtgggcatgctgttaccgggaggtgggtgggtctgccacgttcctaggtccagggtggaactgcttgcagcctgcaacacaggaactttctgaaaacatggcctggcatccccctcccacccatccccatgtgtgctcactcctcgggccagggcaggcctgctcaggctggggctcgccaccctgctcagaagcttcagctcccgacctcgtctctcaccagtgggaagggcagcaaggccagggaaagaacgagcccttgatgggtggcaggggcaggatgcagggccgagtggccctgccacttgctgctctgtgctggagtttcctccagacccgtctgtgaactccagagacactcgttcccagggctggctacaacttgtcagggatcctgttactcccgaatccag

SEQ ID NO: 74054 - DNA, 944 bp, Homo sapiens
tgcattaacccatttaaactccacaggaatcctatgagataggcactcttaattattcttcccattttacagaggtggaaaccagagcacacaaaaagaatggctagataatatattcaacacaaaatagctcggaaatagtgaaaactgcttttggatccaagcagtgggatttttatttacccatcacattgtgtaaaatagacaagtcaagcctgttttatttgaagtggaggttcaggctccttcttccaggcaatgttatagcctctggagttacagcctctgagaaagggtttgaaaagccctggcccaggtgatcctcagagtctgagaaaaactaagacgaggatatgctgtgctcctggttgcaatgaaaagtcaactctgcctggtgagttttgaaagcaagtggctgtcaggtcccccagttatcccttgggctgaggcttttctccttctgggtatattttatttctctttgcaaaatgcagggattaagttccctgtctcaaagtccccttccccagggtgggcatgctgttaccgggaggtgggtgggtctgccacgttcctaggtccagggtggaactgcttgcagcctgcaacacaggaactttctgaaaacatggcctggcatccccctcccacccatccccatgtgtgctcacycctcgggccagggcaggcctgctcaggctggggctcgccaccctgctcagaagcttcagctcccgacctcgtctctcaccagtgggaagggcagcaaggccagggaaagaacgagcccttgatgggtggcaggggcaggatgcagggccgagtggccctgccacttgctgctctgtgctggagtttcctccagacccgtctgtgaactccagagacactcgttcccagggctggctacaacttgtcagggatcctgttactcccgaatccag

SEQ ID NO: 74055 - DNA, 944 bp, Homo sapiens
tgcattaacccatttaaactccacaggaatcctatgagataggcactcttaattattcttcccattttacagaggtggaaaccagagcacacaaaaagaatggctagataatatattcaacacaaaatagctcggaaatagtgaaaactgcttttggatccaagcagtgggatttttatttacccatcacattgtgtaaaatagacaagtcaagcctgttttatttgaagtggaggttcaggctccttcttccaggcaatgttatagcctctggagttacagcctctgagaaagggtttgaaaagccctggcccaggtgatcctcagagtctgagaaaaactaagacgaggatatgctgtgctcctggttgcaatgaaaagtcaactctgcctggtgagttttgaaagcaagtggctgtcaggtcccccagttatcccttgggctgaggcttttctccttctgggtatattttatttctctttgcaaaatgcagggattaagttccctgtctcaaagtccccttccccagggtgggcatgctgttaccgggaggtgggtgggtctgccacgttcctaggtccagggtggaactgcttgcagcctgcaacacaggaactttctgaaaacatggcctggcatccccctcccacccatccccatgtgtgctcactcctcgggccagggcaggcctgctcaggctggggctcgccaccctgctcagaagcttcagctcccgacctcgtctctcaccagtgggaagggcagcaaggccagggaaagaacgagcccttgatgggtggcaggggcaggatgcagggccgagtggccctgccacttgctgctctgtgctggagtttcctccagacccgtctgtgaactccagagacactcgttcccagggctggctacaacttgtcagggatcctgtyactcccgaatccag

SEQ ID NO: 74056 - DNA, 607 bp, Homo sapiens
agagtccacttacctgctcgttggtttcttgaagaaaacaactttgccaattagaaacaaggctcaaaactcaaatgcagctgggtgcggtggctcacgcctgtaatcctaatactttgagatgccaaagcgagcagattgcttgagctcagaagttcaagaccagcctgggcaacatggcaaaaccccatctctacaaaaagtacaaaaaaaattagtagggtgtggtggcatgtatctctaatcccagctacttgggattttgaggtgggaggattgcttgagcctgggagttcaagattgcagtgaactgtgattgtgctgctgcactccagcctgggtggcagaggcagagtgagctacacacacacacacacacacayacacacacacacacccttacacacccttaaatgttccttattaattatactggcttgcattgaactgaggtgtaagtggtcgatttggactcctttcctaaaagaagggtttgagaggggaggagtgagagagatggagggtactgggtcccaacccgcaggaaggagagaagcaggacatgggaagaggaagccaggcaaagactgggggctaggagtgccct

SEQ ID NO: 74057 - DNA, 1309 bp, Homo sapiens
aattataaagttaatgttctttgtttttttttwaaaaaaattacatattacctaattttacaatacaacagttcccatccacccccatattctcctatacagaggtagccattattaaaagcttaagtctctttccagagagtttctcagcagaatcaaatggaatcagattacaccccattttaaagtttactgttttgcttaacagtatatcatagttatgtctccatctcaaaacataattatttttcttataaactacatggtgtcctggtagctaagtgcactagaatttagtgtaacattaatggggcaatcattgatagagatttaaattgtttctagtactgctaatacaatgctgcaacaaacatcattttgtttgtatatatcctatgtttcttttttttttttttttgagatggagtctcgctgtgtcccccaggctggagtgcagtggcgcgatctcggctcactgcaacctccgcctcccgggttcacgccattctcttgcctcagcctctcgagtagctgggactacaggcacccgccaccacgcttggctagttttttgtacttttagtagacatggggtttcaccgtgtcagccaggatggtctcaatctcctgacctcgtgatccacccgcctcagcctcccaaagtatcctatgtgtattttgcacattactactagtatatctataggataaaatctccagaagtggaatgtctggggcaaagggcatgaacattttatgtataaataggtattgctaagtggttatatatggtgaggattttttgactttgaagaaggaagttggtatgtctgcagaaatttttaagaagaagtgaaacacataaattaaatccagagttctttgagctagacaaaaagtagaattttattatccacatataaccttgaatgtgtcactgaagctgtaatgtctcctttcctgaagaactttaagaagagcaatctcttatccaagccccaaatgctgcactgtctcattgatgcttagggaggccatagccacatgtccgtttatggatccaaaccactaagagctgaattcttccacctgagcataataaatggcaagtgcaaggaagttgtcagaaacacaaatcgggttcacaaacctcttataaaatgtcttctcaaaccctcaccttagtgcagccgttgacaaacaggctggggccctcagtgacaactgacataccaacttcccttatcaaagtattactagccccaggggccctttaaatttcattttatttttgttctgatgcaagtca

SEQ ID NO: 74058 - DNA, 639 bp, Homo sapiens
aggcgcccattcctttgctgcctacagggttttatgtacccggtgatgagatttttccatatcattgtcctgcagtggatctgtagctctatcatgccttccactgtgaacaagtatctctgccttccaaatcagggtatatctctatataatcattgtataggctgggcacagtggctcacacctgtaatcctagcactttgggaggctgaggtgggcagatcatgagatcaggagtttgagacctgcctggtcagcatggtgaaaccccgtctctactaaaaatacaaaaattagycaggcacggtggtgcacacctgtagtcccacctactagggaggctgaggcgggagaatcgcttgaacccgggaggaggaggttgcagtgagccgagatcaggccactgcactccagcctgggtgacagagtgagactccgtctcaaaaaaaataataataatcattgtgtagagaaaaggataaggcagaaggggaaggagattcaaaataaaatcactgtatctaaataccctgaatttatactcttaaaaatcacaatacccatgtatcagtatttgttctagaaaacaacagtatcatcattggccactgctgcaacagtacaatcaggcaaggatcc

SEQ ID NO: 74059 - DNA, 1612 bp, Homo sapiens
cagtggtgatggtcccccaaaaaaggcatagactaaaaagcactgaatgatatattttaagatggtgaatcttatgttacctatatctcaagaaaaaaagaaggaaaaaagaaaagggcagggttgtagaaagagaatgtctctaacagtggggcttcccctttttaattcaactggcctgtagaccccagctctgtttctgggcctggagaaggatagtgcttattgctgcattttttgatcatcaacaacagtgtaagcttccttagcttcccactgctcatacttctctctctgaagaagcagccttctgtccatcacgggatgagaagaactcctccatggttcacaggtttctgcgagatgaagcagcaccagagatgcggggtcatgctaaggtttcatagaagaacttcaagtattcagcagcagtgggggattgcacagcttaaaggttttcagaccacttgtgacagcaacagaagacgacaatgcattcctgttgtgccctgctatgtgaagcagaccttaatttgagacagggatgggggttgggaggggtgactcctgtaggctggagctgctggtgagatgaaaaccctaaacgtgcaacttgggcacagcttcacttgctacttcctcactgcccgggctttccctcacacctaggaaaatcctctgagttgctgcttcaacagacagcaaaaaagaacttctactattgttacttcaaagacttcttccaagtgtagtccatgcaggaaaaaaaaaaaaaaaaagaactgagatgatgtagtttatttcctggaaatattagtatttcaagacctgggtgcaccatccacactttccagggcattgcctgacacacggtaggtattcaatagatgatttttactgaaagaaggagtgaatgaatatgtgtatatgagtatttactatgtgataggtgctgtactaagtttttacatcattatcacattttaaatgcacagaggtgtacagtgacttgcccaaagtcaaacagcttgtaaactgcagacccaggagccaaaccacagcaagctcttccatcctacaggaagcattctctgcctaattaagaagagtttgtggcctacacttcatgttcccatagcacctggtgagtcctccgattttaccatacaccgagtcagattgttaagtttgtgctcacttttcattcatttcacccactacatttagtgagcacttagacgcagtaactgactgtgttttgtgcattgctatatctctagggatacaacaggcacagttcttagtataatatatcactcactacggacatattgaattaatgattgaatttatcacttgatgaatgggagtcacacagactgaacagggaagccagagtatgagaaggatttgatgatggacaaagaagtaggagacagtgtatggagggagaccccttccctaccccccaaaaggtgccttatttttgtgctttggtataggtaaagaggtggtattgcctagagggactgtaactagccaggaatcacaaagcaaattagggggcagtagggtctggcagtraaacatctgtacagcacattgtgagcac

SEQ ID NO: 74060 - DNA, 2713 bp, Homo sapiens
ggttaaaattttacattttaacttttttctattctgtccttcagatccttttcattttatcctttctttctttctttttctttctttcttttctttctttctttcttttctttctttccttttctttctttctctctctctccttccttccttccttccctccctccctcctttcttccttccttcctcccttcctttcttgctttctttccttctttcatttttgagacggagtctcatcctgtcacccaggctggagtgcaatggcgtgatctctgcttgctgcaacctccgcctcctgagttcaagtgattctcctgcctcagcctcctgagtagctgggattacagacatgtgccaccagacccggctaattttttgtatctttagtagaggctgtgtttcaccatgttggccaggatgttttcgaactcctgaccttgtgatctacccgccttggccacccaaagtgctgggattacaggcgtgagccatcgcacctggccaccccttctttcaacttactacattaaaatattaagtggagtaggcttgtcaatgtgtattcaaggatcaatacacttataccatatactatgtggagggtggggtgcgggatggtggtagatgtggggttcatcaattaaatatgcctggtcaatatttatactatattatttccttggagctttactttgcatattaaaggctctgaaaaagcctttcagttaacaaatatgtttaactgttcaacccaatgtttctgaactgatttgacctcacaacatcctgttgaacggacaggaaaatgtcatcacaacatacagagacattttcttcagagtctgataaacctgtttagatcctgaatttgctacttattagctctgtgggcaaactacttagcctctctgatcttctgcttcttcagaaatagtaacaactactttgaagccatctcctaaggattaaagagaataaagtaaataaaatacatcacacggtatctatcacacagaaagtgcatcataaatgttggtatcaacaatgtcattattattgtatgaaaattatgcaagtctcttacataggttacattacaggatttttgtagtctctgtgactcagatatatatatatattttttttcttctttttttttttgagacggagtcttgctctgtcgcccaggcgggagtgcagtggggcgatctcggctcactgcaagctccgcctcccgggttcacgccattctcctgcctcagccttcggagtagctgggactacaggcgccggccaccaggcctgggtaattttttgtgtttttagtagagagggggtttcactttgttagccaggatggcctcgatctcctgacctcaggatccacccgcctcggcctcccaaagtgctgggattacaggtgtgagccaccgcgctggccgactcagatatttttgatagactgtcttgtacattgttgtactcaattaatacagggtcgaatgtatgatgtatatattagagggatgagatacagtataaggaacaattatttaaatcattctccattgtcatgtcatgtaatgacccaatctcagttgaagaggtaaaatttttctacaaataaatgaaaactcaggctttggctgtgtctaaaaaccgcaacagatttttcagaggaagaattcccacagtaaaatagatgggttataagcactttggaaaatatctaggaaattaaaatatattaatttcatcactaactgctgttttcaaaatagttacttgaatgaattcatttccctctcctttgtaatatactactatgtttggtattcttattaaatcactatgcattcatggccacagaatgatgcaatttctaatataccttccaacaacacttaagacatttcaaaaggatgccatgtaattgttctgacagtgcagtgatgcacacatcttcaacacaaatggaagttctaggacctctttggtttttatgttgatttggctgagagaatctctatggtttagttacttaggatataaattaaagccagaaaaacagtgacacattatgtatgataaaagaacaaatttgttttagaagctagcaaaacaaataaataagctaatagaaagcataatttactttacatcatcaatatcaaagtttgaatccaaatggtccaattcgtttaagcaaaaatggtcaaaccagttttcctgaaaataacttcaaagagtaatttgcaccagtatatcatttttcaatgtggttgtaaattagcctcattatctttttttttttttaaatatactgtagtgagggggtttacacaggctgaattacacccaacatgttggtcatgatgacagcccaaccaacatccccctctcactaaaaccatttcaccaacaatatccagctcaaggaagccactgccygtgtcagggcaagactgactcaaaaaaccgattttgcacttgtttttttctgcttggaatgttcttttgtctcactgtaatgttttaaataaaagctaagatttaggttgcaattctgggcctaacatttataagctctgatcttgagcaaatgatttaatctctatgtatttctgacttttgtccgcaaagcttgttaataatactatctacctccaagaaagattctgaggattaaattagttggtgtatgtaatgc

SEQ ID NO: 74061 - DNA, 531 bp, Homo sapiens
gagaatgttaattaacaggggtgataatgttcctattcacccatataaacctatttattycattatgtagctattgccaattaaaactatactggatatacttaacagtttttcagacgaatgtttctactaccttgtagttgaggtgccaaatgaaagatcatactttgtagtggatagtataaacaatgtccttatgtagaaatatacacacatacatacgttactccccaaaggcattcagaattgaaagcaagcaccagcaacatctgggagttgataaccactgaaagctggttactaacagctactgattcctagttactgatagttatttgatacttcaaatgcttatttgatagaataagtaaatgtcttttttttttttttgatggagttttgctcttgtcgcccaggctggagtgcaatggcgtgatctcagctcactgcaacctccgcctcccaggttcaagcgattctcctgcctcaccctcccaagtagctgggattacaggtggctgccaccacacc

SEQ ID NO: 74062 - DNA, 531 bp, Homo sapiens
gagaatgttaattaacaggggtgataatgttcctattcacccatataaacctatttattccattatgtagctattgccaattaaaactatactggatatacttaacagtttttcagacgaatgtttctactaccttgtagttgaggtgccaaatgaaagatcatactttgtagtggatagtataaacaatgtccttatgtagaaatatacacacatacatacgttactccccaaaggcattcagaattgaaagcaagcaccagcaacayctgggagttgataaccactgaaagctggttactaacagctactgattcctagttactgatagttatttgatacttcaaatgcttatttgatagaataagtaaatgtcttttttttttttttgatggagttttgctcttgtcgcccaggctggagtgcaatggcgtgatctcagctcactgcaacctccgcctcccaggttcaagcgattctcctgcctcaccctcccaagtagctgggattacaggtggctgccaccacacc

SEQ ID NO: 74063 - DNA, 2135 bp, Homo sapiens
catagcactcagacgagggttatgtgtggccacttcttctgtgatttaaattcaaggaggaaatctttttggactagccaattttattcaggtttctcatcttatgaatctgtgctctgggaagacaaccaccatatctggcttccttattactaaatctccactgcttcaccaactgcttgggacataataggtgatcaataaatagtttttctggatgaatgaataaattctgtccacaaagcgtccttcactgagcttgttttagatttatgtgattacatctaagaacttggatggggctgacataggaaaagggaattaattctaaatttaatagatgtatgaccttaaatgaggccagcagtgtcattgcagaagtgcttgggagacctgccactgtcaagtgaaatgccggtagcacaaattgagatattaaattgattcaagaggtccaatgcgcacatggatatcactcctgggaagaccattaggggcttcaggagaggaaatgttactgcccaccaagtttccttgaaggaacaaatcagtttgactcatcagcagtctttatggattgccagctgtgggccattccagagcaaaaagattatgcctctgcatagtgacactgctattttaacaggacatggaacaggatgattcatgagacaaataattctgttctagactgtgtgtgtgcatgcatgtgtgttcaaagttaaggatgtcaaggtaaatatttcagaaaagttacctgagggtgctaatctagccccctagagcctccttgttatataaatcacgtactgaaggtcatcaatttagatttgaatgtgtgaaattagccatttataagatagttctgctgttggtgtgtttcctaatttgggtwtaagaaatggtagtgacattttttttttgttatagatagtttgtaaccagagatgccacatcacactttctcaagttccctgaacagtgataagatgaatttatcaaacaaaacctctctgcctttgctgaaaaatattttgaatgtgtatttgtgtatccaagattttggctctgaagacctataagctcagtgttttgggattgctttgaaaagccattttagttatatatatatatatatatatatatatatatatatatatacagatcagattgagaattttcccaaaatgtagatatattttagactaaatgttgaaattcagtaacagcaacaacaccagcaaccataacaacaataataatacattctggaacttaataatagcaagcacatggagaccacgtgatatcgtgggccaactccgttaaggattaaacatacattatctcatttaattcccacaacactccatggtacactatgtcatcactttggcactcccttaaacttctgttactcagccagcctcacctgacttttttctcagcttctatctcctgcataagcagaatgcaacagtgaaatagcaatattttctggcacaactcagggtggcatgatgtttattataaagcaggaagatctaaatttgtttagtccattggcattatgtcagtatcaaagccctaactgatgtaatgcatgacagctttctgaataagtgacacccactcaatgaatgtcttgaccagatactccagggaaaaaaatactacgatacatacatttttgttaaataaggctgttattcatgttacctatgatgcctttaacattagggccctagtacataatttgcccaattcaaatgatagaattatttattatcaaatttgcaattccagatctccaaattactcttttgcatccttgaaggctacctgaagtaataaagaaattcctctgcctttgagtgactccaagagacaatgtaaaggcaagacacagcagcttcatgaaagctcaacataaatttgaatatgctctgaagagggggcagttgtcaccatggtgattttattctttcctagattgagctcaaaatcaaaggggaggagtttttaaagcaaagatgctgaaataggtgaatcaaaaatctggataaaatttccaattgttattcaaaatacagtccttcgtttgatgtttggagcctatatttgggatcagatac

SEQ ID NO: 74064 - DNA, 1266 bp, Homo sapiens
caccatgttggccaaactggtcttgaactcctggcctcaagtgatctacccacctcagcctccctaagtattgggattacaggcgtgagccaccacgccctgcctgaaactattactttcaacttcattgtttaataattatctcctgagcaacatggaaacatggcaaaaccctgcccctacaaaaaaaatacaaaaattaactgggcatggtggtgtgtgcctgtagtccagctgctcaggaggctgaggtgggaggattgagcccgggaggtcaaggctgcaatgagctgtgatcatgccactgcactctaccctgagagacagagcaagaccctgtctcaaaataaataaaaataattatctcttttttggtcagtctcccaggggtccctgtcctcttgagggctgggtctatgtcttacctttttcttcatagcactacctcagtgcccagcatacagtaagtgctcattatagctcatgaaatcaatgagcaaacacttcatagtctacctggtatttttgtatgtgagctgtttctaaattttcaggattgccattcgtgccatggcgaatgtatggcatttagaacatcttggatttcccatcacccctcacctttctgcatctatgttggccttattcatataacaaaccttggcaatcttgttcatgtgaaaagtggtggagcaaataactcggaacatgttacctattccattgactctgcaacttccaagcagggcagttcgacttggatatacaaacccagtaagtaatcctaaacttgtcatccttattggaaatttcctttaaggttattccatgctgagtagtactccaggggttcctggaagggaacactttaatttcttccattgatcacagacatgagaagatccaatttatttacctgctcacatcacctagttttcaaatggcttctgaacacagtgccaataaataaatgatcatccagtaataggtcaaatttatttttcacttctaaggtgccaggtactttacatataattttcatagtacaactctctgaggtcactactattattcttcatattaaataaagaaagaaatgggaactaagagaggttaagtaacttgctcaggattacacagaagaatgaagtgtaatttcattttacagaataaaatattttttatcaataagtaamtattaacctccaagactgcttctctgcatatgtggaaaagtgacctgcttaaatgatattacccaaggga

SEQ ID NO: 74065 - DNA, 1266 bp, Homo sapiens
caccatgttggccaaactggtcttgaactcctggcctcaagtgatctacccacctcagcctccctaagtattgggattacaggcgtgagccaccacgccctgcctgaaactattactttcaacttcattgtttaataattatctcctgagcaacatggaaacatggcaaaaccctgcccctacaaaaaaaatacaaaaattaactgggcatggtggtgtgtgcctgtagtccagctgctcaggaggctgaggtgggaggattgagcccgggaggtcaaggctgcaatgagctgtgatcatgccactgcactctaccctgagagacagagcaagaccctgtctcaaaataaataaaaataattatctcttttttggtcagtctcccaggggtccctgtcctcttgagggctgggtctatgtcttacctttttcttcatagcactacctcagtgcccagcatacagtaagtgctcattatagctcatgaaatcaatgagcaaacacttcatagtctacctggtatttttgtatgtgagctgtttctaaattttcaggattgccattcgtgccatggcgaatgtatggcatttagaacatcttggatttcccatcacccctcacctttctgcatctatgttggccttattcatataacaaaccttggcaatcttgttcatgtgaaaagtggtggagcaaataactcggaacatgttacctattccattgactctgcaacttccaagcagggcagttcgacttggatatacaaacccagtaagtaatcctaaacttgtcatccttattggaaatttcctttaaggttattccatgctgagtagtactccaggggttcctggaagggaacactttaatttcttccattgatcacagacatgagaagatccaatttatttacctgctcacatcacctagttttcaaatggcttctgaacacagtgccaataaataaatgatcatccagtaataggtcaaatttatttttcacttctaaggtgccaggtactttacatataattttcatagtacaactctctgaggtcactactattattcttcatattaaataaagaaagaaatgggaactaagagaggttaagtaacttgctcaggattacacagaagaatgaagtgtaatttcattttacagaataaaatattttttatcaataagtaactattaacctccaagactgsttctctgcatatgtggaaaagtgacctgcttaaatgatattacccaaggga

SEQ ID NO: 74066 - DNA, 1438 bp, Homo sapiens
aataaaaacaaacaggagcacttcttagattttcctcctggggaggtagaatcttgcagagaaaaatgaccacccttcccaaagctgacctgggaaagttcactatgttttcattgtgatgaacgcgaggtgactgtgcccatgtctgagagtctaggtgagtgtgtctgtgctaggggaggacaagaggaagggcgaaagtgacagagaaaccaaagtaacagcaaacaaacaagtacagatcaggccatgagccacaacagccaaaaagtctttcaagtgattgcaaaggctttcctctgtttctcttaagaattagccaggtcacttgtcattgtttttctgacctcttccctgtgttgctgattgcttgacgcagtgggtctaattatctccagactcccagcctgttttaatgaagagggatgtttatctgtgtaagcagacagacttgtctgtccccttggtcctaaaattttttcttgggaaacctagggatgaaactgacagttgttaatggatcagccggaatataaacttttcgtttctggcttgtttgtagcaagaaatgaacatttcttctccctccttactgtgccttactgcgcwgagcaattgtcatttggaaattcctagcagtatttgattttcctgtgagaatggcctctctcccctcatagttggctttggactgacagtaaactcagttacctagctagcccccgtcaaataatataaggtggtgcagaccctgcccagacaaaggactacacagcgttgaacttggctcatcagcaactggatcctgggtctttgaatctcaaacagttaacataagaaggaaagaaatagttgaagttctagttatctgttttttaattttatcccacaaatatttattaaggctcagctttgcgacagacactgttctggatgcttatatgacagtgataagcaggacaaagttgctgctctcatgaatttcgtactttagttggtagagggcaatcaaacaaatacagaagataattacagacagacacaagtgttatcgagaaaataaaacgatgtcataagactaggaccaggaggtgacatagagcagagatgtgaaagatgagaaggaaccagctttggggcgcttgcagggaaatgtgttgcatccagtggttcagtcctgtcatcacagaaacatgctcaactagcaccatttaaagacaaacaaacctcccttgacctcttctttttctatgctcccttttgtgaaaacttcttcagaagagtggcttgtttttccattctctcttcaatcttctccaatcgagtattcatagactcttccaaaacagctttcatttggtcaccaccaacctctatcttgtccttaaacagcagcattctgacctaactattcctgttataagtcttgcttcttagt

SEQ ID NO: 74067 - DNA, 721 bp, Homo sapiens
ggggaaggagggggtgcttctagatgggaagcaagaaactagggacccctagggaagaccctggaagccagagggtgggctgacaggcaagagccgtggaggtcgctgggctgagaaccccaaccatgcatttctgtagaatcgtcacaacctctggaatcagctgctcgtctagctccgtttcacggagaaggaacccgtttcctttttcatttacctgcctggctcctccttctccacctcctattactctcccttcttagccctcaccacaaaactgcacagctttttgaaatctgtaagttgggttcaaatcccagctccactgcttgctggctgtttgactgaacaaatcacttcccttctctaagtctccatgttctcatctgtcagatagttccagcttcgtgggtgctctggggaatgggaagaaagcgcatgggccatggaaaatggtacatggtggctgctcaatagatgtgtgcttctctgcacgtctcctgctgccctgtaatccaaggctccagcaggctctggccagtgacagggccccaacctggtgggatgggaactctaccccagacaccaagagagccagatgcagacctcccagcggctgcccaggctctctgccgaccggggttaagtgaagggggccatcagcagccatacaaaaagccagctcytccttgctctgtcccttctctggttcttccttctg

SEQ ID NO: 74068 - DNA, 569 bp, Homo sapiens
gggggtttgggactgcacactactcagaggtgagaaaagggcctcttgtttactatggcttgggggaaagactgatggagatttaggggacccacatgtccatcccccaagccacccctcggctgccactgcctatgacagccsacatgtcccagagtctctagtcagggtggaagtctcttcatcagggatataaggttctctgcccagttgctgaggccaaagattaaagcatctacccctgtcacctgaggcctggaccttatctcaaagtcaaggtagcacccacagagggagcaagtagtggtctgggggctctacccctaaccagctctgggcccgtgggcaagtccctgctcctgtctggggcttggagaggggggcattcgatcagggcttttcaaactggcctggaaagcttcaggctcctgtacccccacctcctctgcttccacccacttttatctcttaaatgttgggattctggataagattcttctaaaggagaaaagcagcagaatgcagaagttaagtcacaagctccagaggcaaagagacctgggttcaaa

SEQ ID NO: 74069 - DNA, 1554 bp, Homo sapiens
ctggagaatcatctgtccagttctaccgtgtctgagaggggcctccaagtggaaaagggccccatggtctggtctactgccttacttttggggtcacaaacacgtaagcagaaccccaaggcccagggtctgggcacctgcctggctccccatagcctcctctcccagctgggtgactcatctcttcatggaccttggcacctctggttggcatcaggagcagttgatgaagtcacatgctcctgaaaaccaatccctcaaatgacagaggaggagggggcagtcccagggagtgggagcggagacaaggagaaaaaccagggttctaaatattttaaaattttaaaagaaaatgagcgaattcaagttggctgctagtaatttacaatgacgaggctgtttttactctggtacctcataaataacttttgatttaaagtttccaaagaattgacagagcacttcaaacgacctcatcggagagggaatgagcttctccctccatgccctgcccgctcaggtgaggactgagatcastagctggaggggttcatcaggggtgtagcccgactggcaactgacaggcttactgactgactgaggagctaaccggccagcaagctcatggagagactgacccatgggctgacaggttggtgaaataaccaagggatggttgagccaatggcatggttgatacaccaatgaagggactgactgtccaatagatggacagttggactaatggccagccagcagaccaacggattgaccgatggatcggtttgtcagtgagtcagtggatcgtaaggctaacctgtctgcctcccccaaatctggttagccagctgacctacagaccaacaggctgatgaaccaaccttcccagacactaacaggagaatatggaaaggagggggtcatctagcagatggacagggcaagcaaccattgacctacacacatatcagaaagaattcagattgccaggactacacacagcgaggaatgctcccaaaagaagattacatgcagatgcaaaaaaagattaaaaactaaactagactaaaatgcttactatatggtagggaatggagaggaccctggtgatcatgttggaggtaacctgacattgttgacatccagagttgcataaagaggctggcagattccaacacaatgtcaagatgtggtttttgctattgaggtctcccttatgggttgaatcaaataagcaaatgagcaagtgagctcagcaatggcctctctttaacattcttctgagcctttctctatgttcccatcatgaacacagcagactcattcattctcctaaggtcatagatttggggtcataaaatgaagtcacagtggtgttctggttacaggattatgggtgattattttttctttcattttctaattatatcttatagtggagctgtattattttgtaataaaaaaattcacacataattttagaaggaaaaataaaaactaatttggacccttcttctcatttgctccatacccaaaaaagatttcttgatttat

SEQ ID NO: 74070 - DNA, 767 bp, Homo sapiens
cttggaaggcttcagaaaagtagttgcatttgagcggggcctttaaatgtgaataagagcttgccaggtggagaaggaagaaaggcattgcaagcggaggaaacaataaataaaggcccagaagtttgaatgttggrcaactattcagaaatagccttgcttcgggatttgggacggcaacctttcacattccttgtgttgctgtcccgaaaataaagtaacaaacaagtatgctggtttggctgtgttcttcctcctgcgtcttttgtaccctccttcctttcagactatccatagtttgtgtcatttctcaaggttcagcccaatcccagctcttcagtgtagactcctcaactgtttgagccctccctgctccctacttttcccaattcctatagcacttaatttcttactacacagtttagcagtaattatatgctgtcttggtatttatctcatttgtgtaactctagccttcccagttctctcctttcaggacaggaatagcatttccctattccgtgtcccacatagggcttgacataaattgtcagcccaaagaatatgtccaaacaatccctgttgacagaacatcttgtactaatgattattacagccaagggtaccagaccccagccaggggatttactgatttgagtggaaatgtattcattgcagatacaaacattcattgagggccctccctgtttgaagctagttgaaaagttttgaaggagagactaggacatctgcccccatgtatagaa

SEQ ID NO: 74071 - DNA, 667 bp, Homo sapiens
aggttctgcaataccatccagacaacattatgcaaatctttaaaaagaagccttttagtcaaagtctcccattgatatttaaagtaatctcaaaggcctgagaaccagtatttttgacaaaaagaaaattctcatatgctttagtatagatgcatcatccctggtttaagcactgaaaattggtaattttgtatttacgtaatggctttagaaatactagattttatatcaaagactagattgatttatgatmtaacataaatagtaacataaaagaggtaacttaaatagctccctcttgttctaatgaaatatattttccgttgactacagactgagagacatagcaacaaggaatgcaaactcctttgattccatatggtgaaatgaaaaccttggctcatccatcattctttaccagttgctttgagcaaataaatgcagagttctatcctaggagaagtgactccagttttcctcgattatcaattcaaaatcctcttgtgtgtagcaaggaggacatacccatttaaattaagttgatctgggagaccaatgtacatgtcttaaacttggtctgcctgggacagcagatacatccagccacaactactgagaaaacagcaagataaacaggtaaagataaggatttagaagcggcatcaag

SEQ ID NO: 74072 - DNA, 667 bp, Homo sapiens
aggttctgcaataccatccagacaacattatgcaaatctttaaaaagaagccttttagtcaaagtctcccattgatatttaaagtaatctcaaaggcctgagaaccagtatttttgacaaaaagaaaattctcatatgctttagtatagatgcatcatccctggtttaagcactgaaaattggtaattttgtatttacgtaatggctttagaaatactagattttatatcaaagactagattgatttatgatctaacataaatagtaacataaaagaggtaacttaaatagctccctcttgttctaatgaaatatattttccgttgactacagwctgagagacatagcaacaaggaatgcaaactcctttgattccatatggtgaaatgaaaaccttggctcatccatcattctttaccagttgctttgagcaaataaatgcagagttctatcctaggagaagtgactccagttttcctcgattatcaattcaaaatcctcttgtgtgtagcaaggaggacatacccatttaaattaagttgatctgggagaccaatgtacatgtcttaaacttggtctgcctgggacagcagatacatccagccacaactactgagaaaacagcaagataaacaggtaaagataaggatttagaagcggcatcaag

SEQ ID NO: 74073 - DNA, 613 bp, Homo sapiens
acttaagtggcttaagtaaatttaagtcattggtaattttaacaatgctttttaaataagtagatctatgttgacacactgaggccatgtagaggaagtagaatattgtcatggtggccaaataacaaatatttttctttcctttaatattagcaattttatacaagtatttcattaaagcaatttaactgaatgcaatttaattatagtccatttgtatccagaatttaatcagagaagaaaaccattaggagatcaataggcagatctatacaattgttacatgratcttaccttatgcaattgtgggagttagttaaatagtttccgcaaggtttttgtctttgcttgtggtgctggagcttgaagtccacaaggaaggtagttggaaagggaagatgattgtaaagtggggaaagtaaaaaaaaatctagagttaaaatatacaagctggagccacagaacaataaactgaaatgcatgccatttcttgttgcctctgaccttgatggtataggttaggtccgtcagaagatgagtctcctcaccgtggagttaaatacaaacacctggccgcagagtcagaaaagctgaagaaatatcaaagggaagg

SEQ ID NO: 74074 - DNA, 614 bp, Homo sapiens
atatatttagttgaatgggaaaaaaatgaatgtcataatttgccatttatatcttctagattccatgttatatatcatatgccatagtatgatagttgacatatatgttgtatttaaatgcagtacaaggcagtgcagatacaagggccataaataagaagatccagccaggcatggtggctcacgcctgtaatcccggcactttgggaggccgaggcaggcagatctctagaggcagggrgtcgagaccagcctggtcaacatggtgaaaccccgtctctactaaaaatacaaaaattacctgggcatggtggtgggtgcctaaataccagctactagggaggctgaggcaggagaatagcttgaacccaggaggtggaggttgcagtgagctaagatcacaccactgcacgccagcttgggggacagagccagcctatgtctccaaaaaaaaaaaaaaaaggagacccagacttgttgcttgttggccagctatgtgaccatgagccaggcatgtaacctctctgggtctgttttactcgtctgtaaagcaagactaatataacttccttgtcttatcatagagtagttgtagggatcaaataagatgacaa

SEQ ID NO: 74075 - DNA, 614 bp, Homo sapiens
atatatttagttgaatgggaaaaaaatgaatgtcataatttgccatttatatcttctagattccatgttatatatcatatgccatagtatgatagttgacatatatgttgtatttaaatgcagtacaaggcagtgcagatacaagggccataaataagaagatccagccaggcatggtggctcacgcctgtaatcccggcactttgggaggccgaggcaggcagatctctagaggcagggaktcgagaccagcctggtcaacatggtgaaaccccgtctctactaaaaatacaaaaattacctgggcatggtggtgggtgcctaaataccagctactagggaggctgaggcaggagaatagcttgaacccaggaggtggaggttgcagtgagctaagatcacaccactgcacgccagcttgggggacagagccagcctatgtctccaaaaaaaaaaaaaaaaggagacccagacttgttgcttgttggccagctatgtgaccatgagccaggcatgtaacctctctgggtctgttttactcgtctgtaaagcaagactaatataacttccttgtcttatcatagagtagttgtagggatcaaataagatgacaa

SEQ ID NO: 74076 - DNA, 1362 bp, Homo sapiens
caaaatatgcattttattaccttgctctgtcatttataagctgaataaattactaaattgggccagtcctttcacttttaacctatgtatgtctttatatttaaagtgggtttcaagtagacagcatatacttgggtcttattttttaatcctatctgacagtctccatttttaattagcatgtttagaccattcatatttaatacgatatgtttggattaaactctaccatcttactggctgtcttcgtttgttccatctgttttttatgttttatcttccttttctactttctcttgagttgagagtttttttatgattctattttatctctactattattacttatacctttttaaaaatgtagtggttactcttaggtttaaatgtacatgtttaatcagagcctatgttcaaataagataccatttcacatctagtataagaccttacagtttgctgggcatggtggctcatgcctgtagtcccagcactttgggagaccaaagtaggaggatcacttgagcccaggagtttgagaccagcctgggcaacatagtgagacctcatctctatttaaaaaaaataataataatcagaaaattttaaaaagactttaaaattcccaattccccctcccattctgtgtggttgttgtcacacatttattttgcatatgctataaagtacattcccatttttggtttaaacagttatcttttagagcaattaaacattttttaattgaaaaaatgaattttactttatcttcatttgttccatttcctggactttctttgttatgtagaactgaatttctgattggtgtattctttttggctaaagaaccttcctgaaactgtctctctctctctgtgtgtctctctctgtgtttctctctctttccccatctcttcttctccttcccactccctctctgtctctctccctgtctcccctcctctctctctcccrttccccccacatatatatggtgctggtctgctggccttaaatcctctcagtgtttatctgagaaagtttttatttctttttcatattttattttatttaagacagagtctctccctgtcacccaggctaaagtgcagtggtgtgatcatggcttattgcagcctcaacctcttaggctcaagcagtctccctacctcagcctcccaagtagctgggaccataggcacacaccaccatgcctggcctcttatcttttaaaatattttttctaggtaaagaattctatgttaaaagttatatttctggggtcagatgtggtggctcacacctgtaatcctagcactttgggaggccagggtgggaggatcacttgaggccaagagtttg

SEQ ID NO: 74077 - DNA, 2031 bp, Homo sapiens
aatgctttttctgtgtctattgagagtattataagaattttccggaagttggttaaggtggtgaatttcactattactcaaattttaaaccacccttgtattcctgggacaaaccccatttgacagtgatgtagtatccctctcatagattgttggatttcatttgctaaaaagtttgctcagaatttggctcagaatttccttatacagtctctgtccacttttcatatcagggtaatgcttgcctcttaaaatgacttgggaagtattttctccacctcagttcttttccttaaatggtagtattaccagtgaagtcatctgggcctggagttttctttgtgagaaggtttttaactgcaagcccaattttaaaaatatgtataggactattcagactgtctctttgagtgagcatttggtattttggctttcaaggaatttgtccatttcatttaggctgttaaatttattgacataaagttgttcataacattcccttattaccctgtaataaacaatgtacttatctacaaagataatttgaactgttgtttccctattgctgacagatgaaaaagtttagaccttaaaataatacctgattgttggccacttctggttaaggccactctctccagctttccagtgacaggtaatgctttacattacaaccaactaatattctaagattcttaraaatggacaaaccacttgttgcttattttgattgtttctggacagttactacctgtgtggaaaaattcagggtgctaaacaacagtgtcactttatggcctggtactacactagagcatgtcacaagttcgcaagggcggtggctgctccctctactaacggatactaccagagaccttcacacagtgcagacctcggttactaacacctaaatattaacacccatgggatttgcagtccctatgttcatgtctagtacttgggtaagctccacaccaggcacatattgttttatgcaatctttaaagacatctgcaatagacaatatgcagtttaaacaaactgtgaggtttataaacagagaattctttacgtttgctattatgtcataacaggcacaatctgaaatacaattttgtactagcagtgtataaaaatacttttaaacgatactttcgataggtacagtagcactttaaagaaaaccactgtgtagttattccttttgaggacctactaaaacagttcaacttactgcccccagctacatctaaagcacgaatgtggaaagcaagttctcttacccaggtacacaccacacacacccacatgctgaaacagtctccatttatgatgcatgctgatgaggcatcaatctcaaacagggtatgagatgacagtgtttggtgcctgtttccatttccaggtttggtatgaatgaacaagaggcaaaggcaaggtggagtctgtgtatgggccctctctaggagtttaatctggcatatcaatatttaacttgggaggtgggggaacatatttcccagggattaaaactacctggtcttcccaaacactggagcaattttcggagcttctggaaccaatgtttcttcagcaccttcgctatcttcctgatggagatcatatgaaatgttcccatattctcttaaaaatgggaaaatttcaagcagaaactggcagaagtctctgcgaataccaaaccaccaatgattgcccctttttggcctaaatgttgtggtcattaaagttagtaacaaaagccaaagggggacagatatggagatacaggagaatgtattgcggccatccagtctgtgaaccagcaggacttcaaaggtgagcagggcacgatgacagtcgttatccagctgatggccatggtcacgtgtgttcttcactgccctggtagttctcatttgttctttttctagtttcttaaggtagaagctgatgtcattgattcaaaacctttcttttcttttcttttctttttttggtaaataaggtttcactctgttgcccatgttagag

SEQ ID NO: 74078 - DNA, 1119 bp, Homo sapiens
agtaagaaaccaggcaactaaaccattttgtttgtgttatctcatctagaggctgtttccagattgattcaaatccgcttgyctagtagtagtgttaataataatgcagctaagatttattgagcattttattactatgccaagttcttaatctgtgctaagtgctttactatatgacttaattttccctacaaccccatgaggtttttatagacataggcactgaagcccaagggccttgcccaagctcacccagccagagaagggtggggctgagattgaccttgctctttctcagccgctgactgtggagtctgcaccctaagcactgccattctcaccagtacctcctacgactctgagttctgtttcttctgatcatatctggccacagcaagtttatggtttccaagaatagacagaggcccacctccctgcaaaggtgccatctcctagtcctgcctggcacccgtcctgtcccaatcaaggctcctctgtcccagaatggagtagcattcccttcactctcagtttgcttgtctctttccttcagtggtaccaggtacttctttcatagaggtacttctttgttttgtgtgtggagagtagtgtggtatgtgtggggagagagtatcctgaagtctgtgaactaaaacaggaagttattgaacaaaacttaaatatgctgttatccatgaagagacttgtcagcccctctctcggagttgtataaaggaggaccctgtggttagtttgtgtactgggttggcatttcctgttcccttgctccttgtggagaggatagactcagctggcctcattcccctaggtgtgccatttacacagagcatgcactaagcacccctgtgaggtggcaaacaaagaggaataaggtgaggagaggagcctttatggggagcagtggttcttggactttagtgggtataagaactacatagggcagtggttctcacaactttttacagtggagggcttgctgggtcccacccacaggatttctgactcaggagatctggagtggggccaggaatttgcatttctaacaagttgtcagatgatactcttgctgcttgtccaggaccaccctttgagaaccat

SEQ ID NO: 74079 - DNA, 712 bp, Homo sapiens
gcccctccatttgctcctctgacttccttgccagactttaccatcctgctccagccccagaggctggcctgtgtggatttcactgacagctctctgtcctggtcttcctgtttggcttggccagtggaagggcctggcaggagattgagggcaagaggagagagggaggtctgggtatttaatccctaagcccctcctccccgattgtttttaccaaaggtgccctttctcacatggtctctctcagggttcctgaagccacttttctgctcaggacagtgacagtcttgctgttgcaagccctgggtactacgccatcctcggtgcttccttagccccgcccacacccgtatacattgaccctttactaaactgtcttcatggacccagcttgagggtggcatctgttcggtgccaggaccctcactcatgtaattcctgtaaggcacattcttctgaagtacagtcccaagccagagggtcctgaggcctcattggaaatgtccaaagaagtgaaggtctgcttttccgtccctgccacatcgtgcattgmcttattaggagccaagccttcctaagaaggcagaagctagaggccctctctgaatcagccagcttcctgggtttttccggagaggcagagagacctgcccccagccacaccatgggtggcagaggtgggtcctgctggctgtgtccgtctcctctgtct

SEQ ID NO: 74080 - DNA, 703 bp, Homo sapiens
atccgaaactcagacatggccatcatgaataaacagctcagtttaacaaatatttacttaagcctcctttggcccgggccctggaccagggtaatgaggatgcagatctgagggtggttcaggtggttcacgcatacattttgttgcacacacctgtgcagagaacacgtgtgcatatgcatgaattgcacaggtgattctgccagccaagctgcccaagcagtgcrtgctctgcatgaggctggactctgttctctcctagagggcctcagttccctggtgcctctcatgagccttctcaccatgctgagcctgagtctctggggtctggggatagaagagatgtgtcttgcatttcctttctttctttctttttttttttttgagacagagtcttgctctgtcaccaggctggagtgctgtggtgctatcttagcacactgcaacctctgcctcccgggttcaagtgattccccagcctcagcctccctagtagctgggattacaggcgcacgccaccccacccggctaattttttatattttagtagagatggggtttcaccatgttggccaggatagtctcgatctcctgacctcgtgatccacccacctcggctcccaaagtgctgggattacaggcgtgagccactgcgcccggcctgtgtcttgcattttctatataaccagcccttaatagctca

SEQ ID NO: 74081 - DNA, 1481 bp, Homo sapiens
tcgaggctgagcccccctttgtctgaggaggggtgttggcaagttttgtgatacttgacactttttaagttattgggtcttatccaatagaaaggaaatgaacacatattcacattttagtagcatgtcatctctcttatactatctcccattggctcccccagtgtttaagggcacaaccttgccaggttcatctttaatcctatatttcaactagaagacagctctgtatacaacgagtatttggtaaatcattaatacttagccaagatgaatgaataactttccaaataagaccaaataactttccaaataagattctattcctctatagaattcaatctattgaccattccagaaatattttatgttaggctgagagtcaatttatgattttggcaagccttcagaccaacactgtaacaatccaagaatstgttacagtaacttgtgttgccttaactaatataggtggcaaggccatacattcttggataatgtcacaatgggctatagataaccaaaagcaatcagggaacaagaaaaccaagttataaaatgttgtcagaaggagagttatatggtaaacagaagccaccccctaatattgaggttaatattcaactggtttatttaatagcaggagagaaactcacttcagtgttcatggatgtcaatttgagattctgagatattcagtcactctgacttgatgaatatccccaattctggatcatgatttttctataccattccctaacatgtggctcagaggcctaagctaagtttcttaggccacacactgtccactgactaccctttgtctagtgctgagttgagtagagccataacacactcccatctctcctcaagagaatgcatttgtaagactgttaattctgtaaccaaggggcagagttgaaaacagctaagccttatgtgaaccaagccttcaatcttatttttgtcctgctcttctgaattagccaggcccccgtgttcatgaatatcctgagaacccaggtgccatcctaaacatggagtgttctgcaattgcagaggaaaggtaatgcaggcaaacaatccaggatatccacccgaagataaataatgttgaacttgaattactggagctagctattagcattaccgtatttctcctaccaccagttgaaatttgcttagcaagatgcctgcttgaaacctttcaatgactttccattgagcttagaataaaatctcaatattctgagtacgaattacaaagccttctataatctgcatcccacctacctcacctactttgtatcttgtctttccctttctccttttattcccttcctaccatttacctccaccaagaggaaaacaccagacttttgtctctgttggccttaaaatagctcttgcctcttcctagtacagaagccccaattctctcttgcttggccaactcccattcaggtttcagtctgtattta

SEQ ID NO: 74082 - DNA, 845 bp, Homo sapiens
tcattggcaaagcctaccggggagccaaccagcaaaggagaaatgtggtttgcagagttccagccccagtatcaaaaagccaagtaacaaagatgactttgagctgagaaacaatagcttagtattcaacacatcagaggtttgcaggcttctgtctccataaataccttcctgacagctctggggataggaccaaactgagagccatggatttaagcaagctccagggagaggggagcaaaaaaaggagatgaagcccacccaacagtcagaataagagggaggaatctgagcattcagaagatcatggcagccctatttctactgcccactggaagggcacagcccaatcgggggcagtctgaggccacatagagcaaaggacaatttatcctcagggccttgcatctccatttactactcccagtgtggggccccttaccaaactccagcttttctaaacaatggctctttggtaatcctggaatacttttaagtgccgttcaccttacttccagtttccttctgtgggggtctttttttttttttttttttttgagacaaagtctagcttcatggcccaggctggagtgcaatggtgcaatctccactcactgcaacctccacctcccgagctcaagcaattttagtgcctcagcctcttgagtagctgagattacaggtgcacaccaaaccacgccyggctactttttgtatttttagtagagatgggatttcaccatggtgcccccggccggtcttgaactcctgagctcaagtgatccacccaccttggcttcccaaaatgctgggataacaggccacagccaccgcatctggcgagg

SEQ ID NO: 74083 - DNA, 1259 bp, Homo sapiens
gggcaatctgtaccccacagaaagtgtctttgagcacaacagccctgacagtgaactttcccttgtaaaggggaactcagattatgctgccattgcaggaaggctgctattgcctatttttgtctctaggagatgttccagtcaaggagcygaatgcacacatattgagcatgcatattccacttgcattagtccttctccatgcaggtcttcacatcagtgaatcttattcagtctgaaatgctatcaagccccatactgacatttaaacataaatatagaaatatgttgagagagtcttttatattttctggatcttggttttttacctctaaactgtaaatgaatccaaatagctgatttccaagttaactttgagttttaacctgctacccattatattattagtaaaggatgtgttactgatcattcaacaagaagagaggacaagaacaagcattctaacctgcagacctgttgcatttctcatttcttctgctacaacagctactgtgtatgctgccctatggggactcatcctgttggctctagtgaaatcaaccctcccaccccgtgcaggccagagacacatactggcaagggtcagatgttttctctaggcactgctaatagctcccagccaaagaactctaaggaaaatgaatagtgtgtcacaaactgctttttggatccactatacagggagtctgagtttcatacctgacatggcaagttctgatctgtcgcagcactgggtgtaaccttactctccaaaggcaatttatttctttgtgaagcactgtactgcaatgtgagtaaacttgccatgtaaaaagttaaatgtcccacagtgaagttaacagacaaaaggaataaaaaatgtttatgccatccataataaattcatcttaaaaataattgtttttaaaataacttattttgaaaatcataaaaaaatggggtgaaacaaagtcaaaacacctagacacaattagatattattttcaataactttcaaatatatatatatatatatatatatatatatatatttttttttttttttttttttttttttttgagatggagtttcactcttgttgcccagactagagcccaatggcacgatctctgctcactgcaacctccgcctcctgggttcaagcgcttctcgtgcctcagcctcctgagtagctgggattacaggtgcttgccaccatgcccagctaatttttgttgttgttgttgggacagaatct

SEQ ID NO: 74084 - DNA, 678 bp, Homo sapiens
tcagtaaacgctttygaatgattaataaataactcaattttcctatagatgcacatattgttctactttttaaatcacaaacttatagtcaaaaggtgatagtaatctagaccttttattcatttgttgttattcatttgtaatagaagttaaaatattaaaatagaaaatgctgtgcttacatcgtggcaatctatgtccacagcaatgccacttcatcatctttagcagaagcatggctcttagcatctttgcacttattaaacatatactattcttggtagataataatacttagtcacctcagtggtgcttattgagtattagtgagataaatgagatttaccttgtcactttgagaaaggccaaaaaccgataagaatattttaactgcgagatcagaagaaagaatttcatcttccaaatgacattttaaaccattacctaattcatttttgttctatagtagcattatgttggtagttatagctgaattaatttcttcacatgctttgaagttgatctgaatattcaatacagcgttgcctcaggggagtttggggaaagactgttgaaaattcagctgttagttttctcttcagtaccctttgtgtctgaaacttttcataaattgtactggtcagtgtattaaagcgaaactgatgtgttgacttaaaa

SEQ ID NO: 74085 - DNA, 678 bp, Homo sapiens
tcagtaaacgcttttgaatgattaataaataactcaattttcctatagatgcacatattgttctactttttaaatcacaaacttatagtcaaaaggtgatagtaatctagaccttttattcatttgttgtwattcatttgtaatagaagttaaaatattaaaatagaaaatgctgtgcttacatcgtggcaatctatgtccacagcaatgccacttcatcatctttagcagaagcatggctcttagcatctttgcacttattaaacatatactattcttggtagataataatacttagtcacctcagtggtgcttattgagtattagtgagataaatgagatttaccttgtcactttgagaaaggccaaaaaccgataagaatattttaactgcgagatcagaagaaagaatttcatcttccaaatgacattttaaaccattacctaattcatttttgttctatagtagcattatgttggtagttatagctgaattaatttcttcacatgctttgaagttgatctgaatattcaatacagcgttgcctcaggggagtttggggaaagactgttgaaaattcagctgttagttttctcttcagtaccctttgtgtctgaaacttttcataaattgtactggtcagtgtattaaagcgaaactgatgtgttgacttaaaa

SEQ ID NO: 74086 - DNA, 678 bp, Homo sapiens
tcagtaaacgcttttgaatgattaataaataactcaattttcctatagatgcacatattgttctactttttaaatcacaaacttatagtcaaaaggtgatagtaatctagaccttttattcatttgttgttattcatttgtaatagaagttaaaatattaaaatagaaaatgytgtgcttacatcgtggcaatctatgtccacagcaatgccacttcatcatctttagcagaagcatggctcttagcatctttgcacttattaaacatatactattcttggtagataataatacttagtcacctcagtggtgcttattgagtattagtgagataaatgagatttaccttgtcactttgagaaaggccaaaaaccgataagaatattttaactgcgagatcagaagaaagaatttcatcttccaaatgacattttaaaccattacctaattcatttttgttctatagtagcattatgttggtagttatagctgaattaatttcttcacatgctttgaagttgatctgaatattcaatacagcgttgcctcaggggagtttggggaaagactgttgaaaattcagctgttagttttctcttcagtaccctttgtgtctgaaacttttcataaattgtactggtcagtgtattaaagcgaaactgatgtgttgacttaaaa

SEQ ID NO: 74087 - DNA, 678 bp, Homo sapiens
tcagtaaacgcttttgaatgattaataaataactcaattttcctatagatgcacatattgttctactttttaaatcacaaacttatagtcaaaaggtgatagtaatctagaccttttattcatttgttgttattcatttgtaatagaagttaaaatattaaaatagaaaatgctgtgcttacatcstggcaatctatgtccacagcaatgccacttcatcatctttagcagaagcatggctcttagcatctttgcacttattaaacatatactattcttggtagataataatacttagtcacctcagtggtgcttattgagtattagtgagataaatgagatttaccttgtcactttgagaaaggccaaaaaccgataagaatattttaactgcgagatcagaagaaagaatttcatcttccaaatgacattttaaaccattacctaattcatttttgttctatagtagcattatgttggtagttatagctgaattaatttcttcacatgctttgaagttgatctgaatattcaatacagcgttgcctcaggggagtttggggaaagactgttgaaaattcagctgttagttttctcttcagtaccctttgtgtctgaaacttttcataaattgtactggtcagtgtattaaagcgaaactgatgtgttgacttaaaa

SEQ ID NO: 74088 - DNA, 678 bp, Homo sapiens
tcagtaaacgcttttgaatgattaataaataactcaattttcctatagatgcacatattgttctactttttaaatcacaaacttatagtcaaaaggtgatagtaatctagaccttttattcatttgttgttattcatttgtaatagaagttaaaatattaaaatagaaaatgctgtgcttacatcgtggcaatctatgtccacagcaatgccacttcatcatctttagcagaagcatggctcttagcatctttgcacttattaaacatatactattcttggtagataataatacttagtcacctcagtggtgcttattgagtattagtgagataaatgagatttaccttgtcactttgagaaaggccaaaaaccgataagaatattttaactgcragatcagaagaaagaatttcatcttccaaatgacattttaaaccattacctaattcatttttgttctatagtagcattatgttggtagttatagctgaattaatttcttcacatgctttgaagttgatctgaatattcaatacagcgttgcctcaggggagtttggggaaagactgttgaaaattcagctgttagttttctcttcagtaccctttgtgtctgaaacttttcataaattgtactggtcagtgtattaaagcgaaactgatgtgttgacttaaaa

SEQ ID NO: 74089 - DNA, 654 bp, Homo sapiens
ggatccagggaagccaagggcaacaagaagactgggaaggggacaaggaacacatggcgcccatgaagtaagagcatctgaccctgtaggaaaggcagaagacagacaaaggaaacagtgggacagcagacagacacctccttcccctgcaaagtatacactagttaaacacagagcaatcctgaacaacacacaygtatatactcacactcatacgcatgcacagttttcatcccctcctcctacttctgagtcttgctcaattgtctcagaaaacatctttctggccaggagcagtggctcacgcctataatcccagcactttgggaggccaaggagggaggctcacttgagtccatgggttcaaggctgcaatgatcgcaccactgcactgcagcctgggcaaaggggcaagaccctgtctctaaaagtaagaagaaaaaaagtctttcttctgcatttaattctgaacaaaagaacagtagttctcaagagcaatcagcgtccacacagctactgatctacttgtctcaagaatatggaaaaccacaaagtatggttttcagacacaagggccggaatcaccaagttgtagagcatgtgaaggagcccagagccctgctgagtctcacacgcattcccacccgcctactt

SEQ ID NO: 74090 - DNA, 660 bp, Homo sapiens
atctcggctcactgcaagctccgcctcgtgggttcacgccattctcctgcctcagcctagtgagtagctgggactacaggtgcccaccaccgcgcctggctaatttttttttttgtatttttagtacagatggggtttcaccctgttagccacggtggtctcgatctcctgacctcgtgatccgcccgcctcggcctcccaaagtgctgggattacaggcgtgagccactgtgcccggccartatcatgtattaaatgcactgcctccaagtccttaccataaatgtgggatactacaaagtacacagaagctaaaagattaaattttccaccgtcccatctctttgtacacttggcatatccttctagtttctgtttttagagttactgcatacatatacaatttgtcttgttatgaataagggttttttgtttttttgttttttttttgagacagggtctcactctgtctcccaggctggagtgaagtggtgcaatcatggttcactgtagcctcaatctctctgggctcaggtgatcctccagtctcagcctcccaatagctgggactaaccaagcccagctagtttttgtattttttgtagagacggggtttcaccatgttgtccaggctggtcttgaactccttggctcaaggga

SEQ ID NO: 74091 - DNA, 678 bp, Homo sapiens
gggagggtgagtgagacaagggctgtgtgaagccatgaattcacctgggtttatcccctgctcactctggttttagatgtttgaaagtttccataataaaacacttctgagaaagggggacctgcctttcacagcctcccagctgctctgaccccaatatcaggaacttggcatctctgatctaacaagggcaccactaacaaggacaaagccaccatcattcaccttgattccgcacatgcccaacgatgacttctgtcctgggctaaccatmaaggccatgggtgctgagagagccccccagaggcagccatgcagtgagtgcccccacccggggccctgggatgttctggaaacaggaaggagggttccatgggaagggggaccctgtcctggggtcaggccaaagattgggggactcactaattctgtcctccgatccctgagtcccttccccaatctgggcctggaccccctgactcccacccaggtcccaggtcatcccctgggcaggccctgcccacccaagccttggtgaaagttttgtgtttgttttgttttgttttgtttttgagacagagtctcgctctgtagcccaggctggagtggaatggcgcggtctcggctcaccgcaacctctgcctcccaggctcgagcgattctcccgcctcaggatcc

SEQ ID NO: 74092 - DNA, 675 bp, Homo sapiens
aggaccctgccctaggttctttctagtcctcagaaaaaccctgcacagtagggcttacagattaccagtattagaaggaggaaattggccaagggtggtggctcacacctgtaatcccaacactttgggaagccaaggcaggcggaycacctgaggtcaggagtttgagaccagcctggccaacatggtgaaaccctgtctctactaaaaatacaaaaattaaccaggcgtggtggcaagtgcctgtaatcccagctactggggaggttgaggcaggagaatagcttgaacctgggaggctgaggttgcagtgagcccagatcacaccactgcactccagtctgggtgacagagggagacttcttctcaaaaaaaaaaaaaaaaaaaaaaaaaaaaaaacaaggaggaaactgacggagggagaggtcacccagtcaagtaagtggtagaggagagagtgacacctaggactgacaccattcaagccagctgtatctgataccaaacaagccccctgttgtacttttctgtatgccaacacagaacaccaagcttcccgaagtgcctatgcagggatattgcttctctgtcttcagacctctccccgcccacctcaacccccttccatccgccctcaaggttgccttcagctgagtgaagatgaaataaaacccc

SEQ ID NO: 74093 - DNA, 843 bp, Homo sapiens
caccaggcccagccaatattattttattcctgtcagtatgtattagcagcagtctggctggtaagacttggtagcagggctggtcacactggctcacacctgtaatcccagtactctgggaggctgaagcaggaggatcacttgagcccagtagttctgagactaacctgagcaacatagggagatctagtcctagctacttgggaggctgaggtaggagggttgcttgagtccaggaggttgaggctgctgtgagctgtgagcctgccactgcactccagcctgggtgacatagtgagaccctgtctcaacaaaagacttggtgtcctctggaaccagggggcctaggtgggttcaagccctggcttggctgctcaccagctgagtctttggacaaatgattccccyatctgtgcctcaactccccatctgtaaagtgagacaataattgatagcaccccaactttggtgactatggaaggaacagaaatgagaccaaagtgtgtggcacctggcaggctgtgggtacctactatgcctgactgatgacggctgaaggtgcacgaccattttcatggtcagtaaaaatagccgatgtgtactaagcttataccatcggcattcaatcacttcctctttctgatggccttccagtaggtttggaaacaggcctagaggctgggaatgacagtttcatatgtaattaggaagcctggtggttggcagcgacccctgcccgttctgaggctttggggatggccgggtatgggtgacagctcaagggccctgaggctcaaactggaatcaattcagccaacttcccagccatctggcctagggcaa

SEQ ID NO: 74094 - DNA, 761 bp, Homo sapiens
ttgacaatcccatagcatggcgcccagatcagagcagaaccaagcagcctgactcactaagccctccctctgtgtgtttcagtggctcctcatcagcaccaggtttatgtctcatttgtagaaaatgaatgcactgttttacattgtcttggaactcaaaacaaattaatctgaccaaatatttcatgtatgcaattcagacactgctgcagaatgaatgtttgtgttcttccaatattaatatgttgaaatcctaacttccaatgtgatgttgttaggagatggggcctttgagaggtgtcaggtgataaaggtagcgccctcatgaatggaattagttccctcatgaaggaaccctggagagctcctttctctttccccatgcttggacagaacaagaagtctgycctctatgaatcaggagcagacactgatctaccagcaccttgatcctgggctttccagcatccagagctgtgacaaatacatttatattgttcacaagcttctcagtccataggttttaaaaatagcaaccttggccaggcatggtgactcacgcctgtaatccgagcactttgggaggcggaggcgggcagatcacctgatgtcaggagttcgagaccagtctggccaacatggtgaaaccccatctctactacaaatataaaaattagctgggcatggtggcgggcacttgtaatcccagctactcgggaggctgaggcacgagaatcgcttgaacctgggaggtggaggtt

SEQ ID NO: 74095 - DNA, 495 bp, Homo sapiens
ggctgaccaccgggaggcagcagcctactctgcaaggcactctctttacccgacccccacccccttttaacaggtggcaggaaacctgctggcccagccatctgccgcacccacccttcactcccagtcccatctccccatagcacagatttccctatcatgagcccagacgtggcctgcatctcctcttgccttcctctgcccaaggaatccctacagagattctttctctatcttcctttatacatttccacagaattgtttccccagggcccctccccttgaagaaattagacaggaagctggagtagatggttccctctttcccacctctcacactcccaagctctggttaactctctgtgggccagtggctagattccccaacacagatgacaactgaacaatacacatgcagcgtaagaatgttgtcgctgccaccagccacttacagatacaccattgytaaggtccacccaactggactgtttcccc

SEQ ID NO: 74096 - DNA, 858 bp, Homo sapiens
ttttggggagagatgacttctcttaggagttttggtrgggaagagccactgagctcggtgcacagaaggccacggtttacagggagacactggtcttctgagaaatcaaaaaagaaagtgggaagcaggaagttatatccagaacactagtataaaggaatgaaaagcccccagagaccttcccccatgggatgaggactcaattgcaaagcaataccaggcttgaattgactgacacagagggcctttctctgctgacagctttgggagtgatggtcccacccaggccgcttaagtctggctaagtgtttcaaccagtctgcacaactttaacccagctctttgctgtttgctgctggattgggaaatttcatatttagcagtgaatcacaagtatacagagtctccacacactaattcctagagaagagaactctgaataaaggaggagaacacccctcatattgtcttatgcccaatttctgcctccaaagaaagaagaagtaaaaactaaaaggcagaaatgaaatccacaagcagacagcccagcgccacaccctgggcctggtagttaaagatcgacccctgacctaatcggttactagtggtgcatgcagcccccagtcatgtaccccctccttgctcaatcaatcacgaccatctcacacgcacccccttagagttgtgagcccttaaaagggacaggaattctcattcagggagctcagctcttgagacaggagccttgccgatgctcccagccaaataaaccgcatccctctttaactcggtgtctgaagggttttgtctgtggcttgtcctgttacacaagcaccagatagaattatccctaaatca

SEQ ID NO: 74097 - DNA, 858 bp, Homo sapiens
ttttggggagagatgacttctcttaggagttttggtggggaagagccactgagctcggtgcacagaaggccacggtttacagggagacactggtcttctgagaaatcaaaaaagaaagtgggaagcaggaagttatatccagaacactagtataaaggaatgaaaagcccccagagaccttcccccatgggatgaggactcaattgcaaagcaataccaggcttgaattgactgacacagagggccyttctctgctgacagctttgggagtgatggtcccacccaggccgcttaagtctggctaagtgtttcaaccagtctgcacaactttaacccagctctttgctgtttgctgctggattgggaaatttcatatttagcagtgaatcacaagtatacagagtctccacacactaattcctagagaagagaactctgaataaaggaggagaacacccctcatattgtcttatgcccaatttctgcctccaaagaaagaagaagtaaaaactaaaaggcagaaatgaaatccacaagcagacagcccagcgccacaccctgggcctggtagttaaagatcgacccctgacctaatcggttactagtggtgcatgcagcccccagtcatgtaccccctccttgctcaatcaatcacgaccatctcacacgcacccccttagagttgtgagcccttaaaagggacaggaattctcattcagggagctcagctcttgagacaggagccttgccgatgctcccagccaaataaaccgcatccctctttaactcggtgtctgaagggttttgtctgtggcttgtcctgttacacaagcaccagatagaattatccctaaatca

SEQ ID NO: 74098 - DNA, 858 bp, Homo sapiens
ttttggggagagatgacttctcttaggagttttggtggggaagagccactgagctcggtgcacagaaggccacggtttacagggagacactggtcttctgagaaatcaaaaaagaaagtgggaagcaggaagttatatccagaacactagtataaaggaatgaaaagcccccagagaccttcccccatgggatgaggactcaattgcaaagcaataccaggcttgaattgactgacacagagggcctttctctgctgacagctttgggagtgatggtcccacccaggccgcttaagtytggctaagtgtttcaaccagtctgcacaactttaacccagctctttgctgtttgctgctggattgggaaatttcatatttagcagtgaatcacaagtatacagagtctccacacactaattcctagagaagagaactctgaataaaggaggagaacacccctcatattgtcttatgcccaatttctgcctccaaagaaagaagaagtaaaaactaaaaggcagaaatgaaatccacaagcagacagcccagcgccacaccctgggcctggtagttaaagatcgacccctgacctaatcggttactagtggtgcatgcagcccccagtcatgtaccccctccttgctcaatcaatcacgaccatctcacacgcacccccttagagttgtgagcccttaaaagggacaggaattctcattcagggagctcagctcttgagacaggagccttgccgatgctcccagccaaataaaccgcatccctctttaactcggtgtctgaagggttttgtctgtggcttgtcctgttacacaagcaccagatagaattatccctaaatca

SEQ ID NO: 74099 - DNA, 858 bp, Homo sapiens
ttttggggagagatgacttctcttaggagttttggtggggaagagccactgagctcggtgcacagaaggccacggtttacagggagacactggtcttctgagaaatcaaaaaagaaagtgggaagcaggaagttatatccagaacactagtataaaggaatgaaaagcccccagagaccttcccccatgggatgaggactcaattgcaaagcaataccaggcttgaattgactgacacagagggcctttctctgctgacagctttgggagtgatggtcccacccaggccgcttaagtctggctaagtgtttcaaccagtctgcacaactttaacccagctctttgctgtytgctgctggattgggaaatttcatatttagcagtgaatcacaagtatacagagtctccacacactaattcctagagaagagaactctgaataaaggaggagaacacccctcatattgtcttatgcccaatttctgcctccaaagaaagaagaagtaaaaactaaaaggcagaaatgaaatccacaagcagacagcccagcgccacaccctgggcctggtagttaaagatcgacccctgacctaatcggttactagtggtgcatgcagcccccagtcatgtaccccctccttgctcaatcaatcacgaccatctcacacgcacccccttagagttgtgagcccttaaaagggacaggaattctcattcagggagctcagctcttgagacaggagccttgccgatgctcccagccaaataaaccgcatccctctttaactcggtgtctgaagggttttgtctgtggcttgtcctgttacacaagcaccagatagaattatccctaaatca

SEQ ID NO: 74100 - DNA, 1616 bp, Homo sapiens
tggactggaaacctattctcaggagaactgtagccatgaaaagtactgttattcattcctgacctcctggaaccaggccctaactcatcttctcagcaaaattgcacatttgctatggacctactgggtagtaccttctttgtttcccttttctgaatgtgagggttaattcaggttttatttttctgttccaccatgaaatgtcgtgagtgacgaggactctattgggctctcagtgaacagaagtgtcatgagactgtcatgagatccttgcttgcaactgaaagttatgtttgggctttttttttwaaaaaaaaatgttagaggaagtggaggtgaatattttgtgtgggcaaaagaggaacaaattatttctgatggaagctgcgctgtcacatattgtaatatttcgagacagggtctcgctcagtcacccaggctggagtgcagtggtgcgatctcagctcactgcaacctccacctcctggactcaggtgatcctcttctctcagcctcccaagtagctgggactacaggtgcacaccagcatacctagctaatttttggatttttttgtagagatggggtttcgccatgttgcccagactgggagaaacatattttaaggtataattagcatgttgtgttgttaaaatctcagtgataaacttgcatattagcaacagagctcttgtttccacattatacaatttcagtttattttcttgtatcattccaatgctttccctgaacttaaaataaaagggatcctccacatattggtggaacacattctttgcatctgttatttttctattctttttttgccacacaaatctgagaatgtcacctcgatttttggatccttcaagttcttcaatggaagaaatgtaagtccataaattgggttaaatggtttctagtggagtgtgtaatgataaaaaattatttttaaaatgtagttttggctgggctctgtggctcatgcctgtattcctagcactttgggaggctgaggtggacagattgagcccagaagtttgagaccggcctaggcaacattataaaaccccatctctactaaaaacacaaaaactgaggtgagaggatcacttgagcctggggaggtggaggctgcatgagccgtgattgcaccaccacactgcagcctgggcaagagagcaagatcccatctcaaaaaaaattatattacagttgaaaaatcatagaatacaatgtttaatatgataactcaaatatgcattgttagagcctttgaaaaatgcaattttattaaattatttaatatttattgtctgataaatttaatttttatagtgcatgtgtaaaaatattatagacaatttgaacagtatttcagaagcactttcaacaattatattgtgtaaagtgtcctatgtatgcatgaataaaggacatgtataaagtatttagcatgaggaaaattgagtctttctcaacctaggcatcataagtttcaggagtaaacattcagtatttttttttgtattttttaaaaccagaacatttattgcatgactaatcatagacattcttaagatgaactggatgctgcaacagctgccctcttgggt

SEQ ID NO: 74101 - DNA, 1551 bp, Homo sapiens
agagctcagatgggcacaatggaagcggtaccatgaaattgtgtgcgtaagactctgcaagtgggagagttctgtggggaaacaaatttgattttctgtgagctccagaagttttcttctttcctgcttatcactttgctttccagacacgtataactttacctttcactctccaggggttgctgcagctcaaacagagcaaagtacaagactgttatgatggaccacagtgtcatctgtattgtgtgaactctgatgctttgactctgtggcatgggaagggccttttcaaagaagtctctttcccgtgtggtctctcctcctgttcttgattccatctgatcctcagttctctgatccatatagattggagctgagggctccatagtcctggtgcctggaacttttctggttccaccccatttcctatacttgaaagtgctggtcaggagatgaggaaacattggttgcccttcctttgaagctggggtcctagaactggactatcttcagccctctctgcctgttcaggtccctcagccattttcttagttcttctttggacactcttcttgggtttgtgacacgggaatgagttgggtctcctgagattgttacatataagaattgtaaagacagttgacacaaaggtcctctctttattcttagtcctacacagggagcgtatctctgtcttcacactcttagtttgggatctgtggacagagcactgtctcatttcaagatccctcacaatccaattcctgtgtttttctctgtcttgtttatgccttggctctttctgatcttgcattctcttttatgtttgtgtgattttttgcctctgagacttgctttggataaatgcatttctagggtcggacattttatgcttttttcctgctgtgataacccatcttggggttatgaatatcttgtggactatygtatggagtgagtttactgggtaagagaaaatttttgaaggagagcactttgagtaatgagttttaacatcatcttgctacatacagaggtaactattaaagccagagtagaatgatcagcatttgtcatgatattcagatagagaccatcacaagagcctggtttctgagaaatgtcacaaaagtatctttcaagggtactgtggcaatgttgatctcatatactaatggtcctcttttttgagctagcagtgaatggtgtaggaatttctcccatgccgggcacggtggctcaacgcctgtaatcccagcactttgggaggctgaggcgggtggatcacctgaggttaggagttctagaccagcctggccaacttggtgaaaccccgtctctactaaaaatacaaaagttagccgggcgtggtggcaggcacctgtaatcccagctactcggggggctgaggcaggagaatctctcaaatctgggaggcggaggttgtagtgagctgagattgcgccatgcactctagcctggggaacaagagcgagactttgtctcaaaaaaaaaaatttctcccgggaagaacattgtccaggttcacag

SEQ ID NO: 74102 - DNA, 1582 bp, Homo sapiens
tttttttttttttgagacacagtctcactccgttgcccaggctggagtgcagtggcataatctcggctcactgcaacctctgcctcccggattcaagtgattctcctgcctcagtctcctgagtagctgggattacaggcatgtgccatgacgcctggctaattttttgtatttctagtagagacggggtttctccatgttggccaggctggtctcgatctcttgacctcaggtgatccacccacctcagcctcccaaagtgctgggatcacagccatgagtcactgcatccagcccacacctgtatttgtagggccaattcaagggctcagtcaagggatttgttttcagtctacagttggagagattctctagataaaaaagaactgctattttctaaatgacctttctcctaagtaccctaaaataatcatagaatctgatccgaattcttgctgcactacggacaccaatagcccaagaaagtccaagcctcagatgagcacctggaacctcagtccttcatcccacggccaagcacgagactcgcaccaaaccactaccaatgttatcaaccaatgaggttcttagccacttcctatgcattacacattattgaacttttgcaatggcacacacagtaacacatttcctgttccaagatgtgggatccaagggtcagaacagaaggagacatgcccgaagtctcacaaccgacccgtgatagcgccagagctcaagcttagcacttacaacccaaatcctattaacttcaatgaagtccatgtgggtggagccgttgtctacccatttctccctcctccattattttacaggctagagactacactaatttccaaccaatgacgatgaccaataggatccttctcacagctcagactcacactgcagaggtggagccggttactgaacaacgattcttccctgttcccatgagaacctgaaatcacctcccctccctgccctagacttgtcccaagtctcgcttacttttcatgtcatcccgtgccttctccgagagggttcgcaggttcatgttttcaaagatgctaatggacgtagcccaggccagcgatgctccataatactcatgcaagaggagtgccagacattccacrttggcattctcgatttcaaactgtggaatagagcatgtggtcgattctgaagatttcttctttagtaattccttgaatgtctgaaattcttccttgtctagctcatagagacaccattgcagcccgtagctggaaaaggtgagcgatttgtctccttccatcttgatacaaggctgagagctcaggttttgggggaaaagtggattctttggtaatatagagcaagtaggacctgtggaaagagtgacaagacttaaaagaggatcttgcagcaaattctcaagtagatacaactaacatcaatcacctcactagatgaacggccttctcttttcaattcttcatggacgaagcatttgttgccacaatatctgtttatcctattactagacatcagtgctgggacattttgttgtctgtacccttagttcccaaacagcatc

SEQ ID NO: 74103 - DNA, 696 bp, Homo sapiens
ttctgggctcaagtgatcttcccacttcagccccccaaatagctgggaccacaggcatgcgccatcatgcccaggtgatttgtaaaacattttttaatgtagatggggrctccctatgttgcccaggctggtcactaactcttgggctcaagcaactctccaccttaacctcccacagtgctgagattacaggtgcaagccactggcctggcccccattgttctctgagcattgtcttacttctggcacaagatgttccaagcccattctgtacattcccagcaccaactgtggagtcagctctttctctgaagattcttggttcctttaatgaggaacggtacttagaaaacaatacctgagcaccagtgtgctgtttctatgataccattgtttctacacttaagtttctttttcatggctgaatagtactccattgtgcgtaagtaccacattttctttatccattcatctgttgatggacacttaggtgcttccaaatcttggctattgtgaatagtgctgcaataaacatggaagtgcagatatctctctgatttactgatttctttggggtatatacctagcagtgggattgctagggtggaggttgaagaccccaactgctctggcttttgaaataaaatttcttcagaattaagaaatcaacctgggccgggcatagtggctcacact

SEQ ID NO: 74104 - DNA, 677 bp, Homo sapiens
tgggattacagatgtgcaccaccacaccaagctaattgttatatttttagtagagacagggtttcaccgtgttgcccaggctggtcacgaactcctgagctcaggcaatccgcccaccttggcttcccaaagcgctgggattaccggcgtgagccaccacgcccgaccggctatttcttctacattcagtcagtccataaggaggggcccgttctgtgcaacatggaattcagaactgagttctcagcttaacatccctagtcgcaccatctttcacaaatcacgtaacctctctaaagtttagtttcaggtctacaagggagagcatacgacattttctccttagaatggctgtgagaattaatcccatgmaattctcagcccattgcttgtcacatagtacgcactcagtaagcaggagcgaataataactatcacaataataggagagaaaatatatctgataatggccaggggccatgtgatgcctggtggcttatttcaaggaaggggccagtggttcacatggtgaattatcgggtttttggatcttaaaaactctggagagatagcgtatggagtggtggctaagagaactgattctagagccagatttgactgcttagtaatgatgtaaactcatgcctcagtttctcatctgtgaaatagggacacct

SEQ ID NO: 74105 - DNA, 633 bp, Homo sapiens
tccggtaaaaataaagttaaaaaaataaaaaagtaaacatataaaaatatgtattattatatatacatttaaagtatagtttttataaatgtacagtatataaaacgtctgtttatggataaattttatgcgtgctacacttttatttatttatttatttatttttgagacggagtcttgctctgttgcccaggctggagtgcagtggcgcgatctcagctcactgcaagctctgcctcccgggttcacgccattctcctgcctcagcctcctgagtagctgggactacaggcgcccrccaccacgcccggctaattttttgtatttttggtagagacagggttcaccgtgtcagccaggatggtctcgatctcctgaccttgtgatccgccctccttggcctcccaaagtgctgggattacaggtgtgagccaccgtgcccggcccttttatgttaaatttaatataaaatattttcttttatatcagcatttttatgtaaatatataaaatataacagcagctagctcacagctttgctgcatggattcagtgagtttacacacatcgaatagctctggcacacacaaagcattgcaccagcattcactatttattattgttatggttttg

SEQ ID NO: 74106 - DNA, 633 bp, Homo sapiens
tccggtaaaaataaagttaaaaaaataaaaaagtaaacatataaaaatatgtattattatatatacatttaaagtatagtttttataaatgtacagtatataaaacgtctgtttatggataaattttatgcgtgctacacttttatttatttatttatttatttttgagacggagtcttgctctgttgcccaggctggagtgcagtggcgcgatctcagctcactgcaagctctgcctcccgggttcacgccattctcctgcctcagcctcctgagtagctgggactacaggcgcccaccaycacgcccggctaattttttgtatttttggtagagacagggttcaccgtgtcagccaggatggtctcgatctcctgaccttgtgatccgccctccttggcctcccaaagtgctgggattacaggtgtgagccaccgtgcccggcccttttatgttaaatttaatataaaatattttcttttatatcagcatttttatgtaaatatataaaatataacagcagctagctcacagctttgctgcatggattcagtgagtttacacacatcgaatagctctggcacacacaaagcattgcaccagcattcactatttattattgttatggttttg

SEQ ID NO: 74107 - DNA, 633 bp, Homo sapiens
tccggtaaaaataaagttaaaaaaataaaaaagtaaacatataaaaatatgtattattatatatacatttaaagtatagtttttataaatgtacagtatataaaacgtctgtttatggataaattttatgcgtgctacacttttatttatttatttatttatttttgagacggagtcttgctctgttgcccaggctggagtgcagtggcgcgatctcagctcactgcaagctctgcctcccgggttcacgccattctcctgcctcagcctcctgagtagctgggactacaggcgcccaccaccacgcccggctaattttttgtatttttggtagagacagggttcaccgtgtyagccaggatggtctcgatctcctgaccttgtgatccgccctccttggcctcccaaagtgctgggattacaggtgtgagccaccgtgcccggcccttttatgttaaatttaatataaaatattttcttttatatcagcatttttatgtaaatatataaaatataacagcagctagctcacagctttgctgcatggattcagtgagtttacacacatcgaatagctctggcacacacaaagcattgcaccagcattcactatttattattgttatggttttg

SEQ ID NO: 74108 - DNA, 633 bp, Homo sapiens
tccggtaaaaataaagttaaaaaaataaaaaagtaaacatataaaaatatgtattattatatatacatttaaagtatagtttttataaatgtacagtatataaaacgtctgtttatggataaattttatgcgtgctacacttttatttatttatttatttatttttgagacggagtcttgctctgttgcccaggctggagtgcagtggcgcgatctcagctcactgcaagctctgcctcccgggttcacgccattctcctgcctcagcctcctgagtagctgggactacaggcgcccaccaccacgcccggctaattttttgtatttttggtagagacagggttcaccgtgtcagccaggatggtctcgatctcctgrccttgtgatccgccctccttggcctcccaaagtgctgggattacaggtgtgagccaccgtgcccggcccttttatgttaaatttaatataaaatattttcttttatatcagcatttttatgtaaatatataaaatataacagcagctagctcacagctttgctgcatggattcagtgagtttacacacatcgaatagctctggcacacacaaagcattgcaccagcattcactatttattattgttatggttttg

SEQ ID NO: 74109 - DNA, 633 bp, Homo sapiens
tccggtaaaaataaagttaaaaaaataaaaaagtaaacatataaaaatatgtattattatatatacatttaaagtatagtttttataaatgtacagtatataaaacgtctgtttatggataaattttatgcgtgctacacttttatttatttatttatttatttttgagacggagtcttgctctgttgcccaggctggagtgcagtggcgcgatctcagctcactgcaagctctgcctcccgggttcacgccattctcctgcctcagcctcctgagtagctgggactacaggcgcccaccaccacgcccggctaattttttgtatttttggtagagacagggttcaccgtgtcagccaggatggtctcgatctcctgacctygtgatccgccctccttggcctcccaaagtgctgggattacaggtgtgagccaccgtgcccggcccttttatgttaaatttaatataaaatattttcttttatatcagcatttttatgtaaatatataaaatataacagcagctagctcacagctttgctgcatggattcagtgagtttacacacatcgaatagctctggcacacacaaagcattgcaccagcattcactatttattattgttatggttttg

SEQ ID NO: 74110 - DNA, 633 bp, Homo sapiens
tccggtaaaaataaagttaaaaaaataaaaaagtaaacatataaaaatatgtattattatatatacatttaaagtatagtttttataaatgtacagtatataaaacgtctgtttatggataaattttatgcgtgctacacttttatttatttatttatttatttttgagacggagtcttgctctgttgcccaggctggagtgcagtggcgcgatctcagctcactgcaagctctgcctcccgggttcacgccattctcctgcctcagcctcctgagtagctgggactacaggcgcccaccaccacgcccggctaattttttgtatttttggtagagacagggttcaccgtgtcagccaggatggtctcgatctcctgaccttgtgatccgccctccttggcctcccaaagtgctggkattacaggtgtgagccaccgtgcccggcccttttatgttaaatttaatataaaatattttcttttatatcagcatttttatgtaaatatataaaatataacagcagctagctcacagctttgctgcatggattcagtgagtttacacacatcgaatagctctggcacacacaaagcattgcaccagcattcactatttattattgttatggttttg

SEQ ID NO: 74111 - DNA, 552 bp, Homo sapiens
atgaagtcctgccgtcccaaccagcctgatggtgacagcgtcaaacatgtcaacgccgcctactgctagttcccaactcttacagtcaatctataatcggggagcgaaggtcttggtcttcgtcaataagcttaacaacgtccattgtagcctcaaaargaggggtgcagcagggtcaaaaagagacagggtactggtggccttgccctcctcagtggagagtcagaaaacactaacaaaagctgaccaggtgcaagggtccatccagtcatcaaacacttagtaagcacctactgtatccctgcaggcaccgaacatgtagcagcaaacaaaactgacagaaacctctgacttggggtggggagagggatggacaagatgaagaagtcatatgtacgagatgttaagatggtgctaaggagaaaaccaaagcagaaaacaaaaaggctaagaagcatatggctgtgtgggtgtattgggcaacgaaaccgcgattgagcccaggcagccagaggactccctaaaaagggtgacgtgggactcttctgtgaa

SEQ ID NO: 74112 - DNA, 873 bp, Homo sapiens
tgatggtgacgataatctgggaccaatagrggttaagtgtcttccccagaatcatgctgtggttggataaagaccctgagatctgaactcgtttgttcgactcaagattaataataacaacagcaacgacagcagcagcagcagccacggccatgacaaaattgagcggctgggcacagtgactcatgcctgtaatctcagcactttgggaggctgagatgggaagactgccttagcccaagagttcaagaccagcctggacaacatcgcaagattctgtctctaaaaaataaaataaaagtgtttttaaaattagccaggcatggtggtgtgtgcctgtagtcccaactacttgggaggcagaggtgggaggatggcttcagcccaagaagttgagactgcagtgaattatgatcataccactgcactccagcctgggcaacagagtgagaccctgtctggaaaataaaagtaaagaaaagaaaagaaaagaaaaggaaaagaaaaaagaaaagaaggaaaagaaaaaagaaaagaaaagaaggaaggaaggaaaagaaaagagaaaagagagagaaaaaaattgagggtggtgactagaaataaatattaacattagttatatctcatcatcgagactaacaccaccctaatatgttatattctattttccaaatttttatgagcatatactacccctgtcttacagtgagttgaaatatatatatattttgaggccgggtgcagtggctcatgcctgtaattccaacactttgggagtggaacacctgaggtcgggagtttgagaccagcctgaccagcatgtagaaactctatctctactaaaaaaaaccccaaaaaattagccaggcg

SEQ ID NO: 74113 - DNA, 873 bp, Homo sapiens
tgatggtgacgataatctgggaccaataggggttaagtgtcttccccagaatcatgctgtggttggataaagaccctgagatctgaactcgtttgttcgactcaagattaataataacaacagcaacgacagcagcagcagcagccacggccatgacaaaattgagcggctgggcacagtgactcatgcctgtaatcycagcactttgggaggctgagatgggaagactgccttagcccaagagttcaagaccagcctggacaacatcgcaagattctgtctctaaaaaataaaataaaagtgtttttaaaattagccaggcatggtggtgtgtgcctgtagtcccaactacttgggaggcagaggtgggaggatggcttcagcccaagaagttgagactgcagtgaattatgatcataccactgcactccagcctgggcaacagagtgagaccctgtctggaaaataaaagtaaagaaaagaaaagaaaagaaaaggaaaagaaaaaagaaaagaaggaaaagaaaaaagaaaagaaaagaaggaaggaaggaaaagaaaagagaaaagagagagaaaaaaattgagggtggtgactagaaataaatattaacattagttatatctcatcatcgagactaacaccaccctaatatgttatattctattttccaaatttttatgagcatatactacccctgtcttacagtgagttgaaatatatatatattttgaggccgggtgcagtggctcatgcctgtaattccaacactttgggagtggaacacctgaggtcgggagtttgagaccagcctgaccagcatgtagaaactctatctctactaaaaaaaaccccaaaaaattagccaggcg

SEQ ID NO: 74114 - DNA, 873 bp, Homo sapiens
tgatggtgacgataatctgggaccaataggggttaagtgtcttccccagaatcatgctgtggttggataaagaccctgagatctgaactcgtttgttcgactcaagattaataataacaacagcaacgacagcagcagcagcagccacggccatgacaaaattgagcggctgggcacagtgactcatgcctgtaatctcagcactttgggaggctgagatgggaagactgccttagcccaagagttcaagaccagcctggacaacatcgcaagattctgtctctaaaaaataaaataaaagtgtttttaaaattagccaggcatggtggtgtgtgcctgtagtcccaactacttgggaggcagaggtgggaggatggcttcagcccaagaagttgagactgcagtgaattatgatcataccactgcactccagcctgggcaacagagtgagaccctgtctggaaaataaaagtaaagaaaagaaaagaaaagaaaaggaaaagaaaaaagaaaagaaggaaaagaaaaaagaaaagaaaagaaggaaggaaggaaaagaaaagagaaaagagagagaaaaaaattgagggtggtgactagaaataaatattaacattagttatatctcatcatcgagactaacaccaccctaatatgttatattctattttccaaatttttatgagcatatactacccctgtcttacagtgagttgaaatatatatatattttgaggccgggtgcagtggctcatgcctgtaattccaacactttgggagtggaacacctgaggtcgggagtttgagaccagcctgaccagcatgtagaaactctatctctactaaaaaaaaccccamaaaattagccaggcg

SEQ ID NO: 74115 - DNA, 772 bp, Homo sapiens
acagggaatgcagtatctaactccagaaagtcctcggtttgagttaatggttatcatcaacacagtcactcttggttaactcaagagtcaaggtatgactcttgactaattccgtcattagggaggagttttctgttgtagtaagttaagtaaacttaaagaagatagtttattcctctcccatccaacagtcatattataagcagaccagagctgataaagcatattcatagtgtgtctccgaaatattagtagggagagtgggagagggaacatctcccagcctggacagaaacagcrtatcaggagcaacaaaactcccagtgtctcttaagcttctagatactcagaggcaggccagagacccttttgagttccattttttaaatacaccagaaatttaaaatgacattctccttgcaaaaaaaaaaaattaatgcaatgccgataaggctaatgtcatatttgattgctgtactaggccattattgcactgttataaagaaatacctgagatggggtcatttataaagaaaagaggtttaattaattagctcatggttctacaggctttatagaaagtatggtgctggtgcctgttcagcttctggtgaagcctcagggagctcacaatcatagcggagggcaaaaggggagcaggcatgtcgcatggcgaaagcagttgcaagccagagggagtgccacacatttttaaatgaccagatcttttgagaacacactatcgtgaagacagccccaagccatgagggat

SEQ ID NO: 74116 - DNA, 613 bp, Homo sapiens
ccgttcattcattgtctgtttcttaagtgcctgtaacgtgcacagccctgtgctgggtgtagcaatataacaataaacaaaacagacccaaatccttacccttgtgtagcttttaaggggagacttgaagaaagtaagggatcattccatgcaatgtctggggaaagagcattccaggcagggggaatagcaggtgcaaaggccctgaggcaagaccatgcttgggctaacagtagagcagtaaggatggctagattgtagtgaatgaggaaggaaatgagggttggtgggagcggggaagtgacaaggcagatccattaacccttagcacagtcagagtatacagcaagtgctcaataaatggatgttgatgttctgagaccctgacagtggacttgttcaggccctggattaccaattccaatgccctcrggggctaggcaggcaatactaatcataatagtaataatatggagcatttattgagcacttactgtatatctaagcattttatgtggatcgtatcatttttttgttgttgttttttttctgagacagagtttcactcttgttgtccaggctggagtgcgatggcgcaatcttggctcaccac

SEQ ID NO: 74117 - DNA, 601 bp, Homo sapiens
  misc_feature (1)...(601): n = A,T,C or G
ccaynnnnnnnnnnnnnnnnnnnnnnnnnnnnnnnnnnnnnnnnnnnnnnnnnnnnnnnnnnnnnnnnnnnnnnnnnnnnnnnnnnnnnnnnnnnnnnnnnnnntttttcttttgagacaggatcttgctccattgcccaggctggagtgcagtggtgtgatcatggcttactgcagccacgacctccctggctcaagtgatcctcccaccttagcctcccaagtagcaggtcattgggcttttctccatggtgatagatgtagttagcatttcaggaccaaaaaccttctgtatgtcagcactgaagacctccaggcctagatcctgcagtctgtagcccactttgcccccatacctccccaccctaaccatagcagcttcacattgccccaccccgatcccctctctgtccagccctgggctggggtgtgtctgggtccaggtcctgcatggattgggggaaggcggatggttcaaatgggagaaaataccttacactttaattaatttaatgaatgtctgtcaaatcgcctgcttcttggaacatgtagaactaagcaagatgttcacagaggagtgctgtctcctcctggaccacgg

SEQ ID NO: 74118 - DNA, 535 bp, Homo sapiens
gatggactcactgtccagccaccagtgagccatctgctcagagcccaccgacttctcacctcccctgtatcctcaccccatccaggcctatcatccctaacctggaccagtacagcccctcctccctggtccaccagctccagcctcatgtccgcaacgtgttctccacrcagtagagcagaggaggccaaagtccccgccaccacgctcagcctctgtttgatcagctgtcaggggcaccccagccacacccagctgagtcagggctggtggtgctctggagagaaatagcctcaccagtcaggtctggcaggcactggggcgggtactgtgctcgaggcatctggggtagggcctttgattggagcaatctctgaagcagcgtttccaccaaggcaggacatggagtcgctgagctcaaaacccccttgggcttcgacagggaatgggccctgacaaggccctgaagtttgctgctccatggctcaacctacctcctgatgtctgggtctcaagctgtgaccaaccacgaact

SEQ ID NO: 74119 - DNA, 535 bp, Homo sapiens
gatggactcactgtccagccaccagtgagccatctgctcagagcccaccgacttctcacctcccctgtatcctcaccccatccaggcctatcatccctaacctggaccagtacagcccctcctccctggtccaccagctccagcctcatgtccgcaacgtgttctccacgcagtagagcagaggaggccaaagtccccgccaccacgctcagcctctgtttgatcagctgtcaggggcaccccagccacacccagctgagtcagggctggtggtgctctggagagaaatagcctcaccagtcaggtctggcaggcactggggcgggtactgtgctcgaggcatctggggtagggcctttgattggagcaatctctgaagcagcgtttccaccaaggcaggacatggwgtcgctgagctcaaaacccccttgggcttcgacagggaatgggccctgacaaggccctgaagtttgctgctccatggctcaacctacctcctgatgtctgggtctcaagctgtgaccaaccacgaact

SEQ ID NO: 74120 - DNA, 997 bp, Homo sapiens
agttaggacgccccagtcccctggccactgccaggggttcgggtatagaaacatgacttgacttggttgaggccactcattctaagacttttgccagaatcactagggaagggagaatctctggattaaacccaaacagcaaagtagacagacacatagacagcgagagagacacacacacacacacacacacacacacacacacacacagagagagagagagagagagagagagagagagagagagmcagcccctggatcaagccatgcctgaagcctgaccttttgttgactgagtcgataaatcgccatctttgctttataagtatatgatatgtttctttttcagctataactgcaagcatcccaataaagcaggttcctgaggcccttccagttgggatttggcaacttctctatcctataaataattccctgctaggcgtactactgtttctgattgatctcacctgctcaattctcaaggctaattatgaagtaaagcagtcaacacgtggcaaaagtccctgagccgacacctgggggaacaaaatgctaccatgtactggctgcacatgaccgaaacacatgcccccatccagtcaccaggctcacccttcaaaaaagccacctctggcaaggtgacagaggccaccctctttgcccctgggcctacttctgcttcaaaagacctcgagggaagggtctcaactctcccactaattgctaggaaggaaaattctggggtggaaagcaggaggggtcgggccaagcaacactttgcagaggacattggtcaaggcccaggctgactttcccaggggagcaggtgctaaggggctactgtgtgtggttggcaccaaagcctgctgtttgcagacagtgagttggaggaagcttgaggctcccaaaagcccaagcaaatggggtgaatgcaagggtgagaggcacccacccgcacctgcacacatgagcctgctgagtccccactggaatt

SEQ ID NO: 74121 - DNA, 997 bp, Homo sapiens
agttaggacgccccagtcccctggccactgccaggggttcgggtatagaaacatgacttgacttggttgaggccactcattctaagacttttgccagaatcactagggaagggagaatctctggattaaacccaaacagcaaagtagacagacacatagacagcgagagagacacacacacacacacacacacacacacacacacacacagagagagagagagagagagagagagagagagagagagcsagcccctggatcaagccatgcctgaagcctgaccttttgttgactgagtcgataaatcgccatctttgctttataagtatatgatatgtttctttttcagctataactgcaagcatcccaataaagcaggttcctgaggcccttccagttgggatttggcaacttctctatcctataaataattccctgctaggcgtactactgtttctgattgatctcacctgctcaattctcaaggctaattatgaagtaaagcagtcaacacgtggcaaaagtccctgagccgacacctgggggaacaaaatgctaccatgtactggctgcacatgaccgaaacacatgcccccatccagtcaccaggctcacccttcaaaaaagccacctctggcaaggtgacagaggccaccctctttgcccctgggcctacttctgcttcaaaagacctcgagggaagggtctcaactctcccactaattgctaggaaggaaaattctggggtggaaagcaggaggggtcgggccaagcaacactttgcagaggacattggtcaaggcccaggctgactttcccaggggagcaggtgctaaggggctactgtgtgtggttggcaccaaagcctgctgtttgcagacagtgagttggaggaagcttgaggctcccaaaagcccaagcaaatggggtgaatgcaagggtgagaggcacccacccgcacctgcacacatgagcctgctgagtccccactggaatt

SEQ ID NO: 74122 - DNA, 997 bp, Homo sapiens
agttaggacgccccagtcccctggccactgccaggggttcgggtatagaaacatgacttgacttggttgaggccactcattctaagacttttgccagaatcactagggaagggagaatctctggattaaacccaaacagcaaagtagacagacacatagacagcgagagagacacacacacacacacacacacacacacacacacacacagagagagagagagagagagagagagagagagagagagccagcccctggatcaagccatgcctgaagcctgaccttttgttgactgagtcgataaatcgccatctttgctttataagtatatgatatgtttctttttcagctataactgcaagcatcccaataaagcaggttcctgaggcccttccagttgggatttggcaacttctctatcctataaataattccctgctaggcgtactactgtttctgattgatctcacctgctcaattctcaaggctaattatgaagtaaagcagtcaacacgtggcaaaagtccctgagccgacacctgggggaacaaaaygctaccatgtactggctgcacatgaccgaaacacatgcccccatccagtcaccaggctcacccttcaaaaaagccacctctggcaaggtgacagaggccaccctctttgcccctgggcctacttctgcttcaaaagacctcgagggaagggtctcaactctcccactaattgctaggaaggaaaattctggggtggaaagcaggaggggtcgggccaagcaacactttgcagaggacattggtcaaggcccaggctgactttcccaggggagcaggtgctaaggggctactgtgtgtggttggcaccaaagcctgctgtttgcagacagtgagttggaggaagcttgaggctcccaaaagcccaagcaaatggggtgaatgcaagggtgagaggcacccacccgcacctgcacacatgagcctgctgagtccccactggaatt

SEQ ID NO: 74123 - DNA, 997 bp, Homo sapiens
agttaggacgccccagtcccctggccactgccaggggttcgggtatagaaacatgacttgacttggttgaggccactcattctaagacttttgccagaatcactagggaagggagaatctctggattaaacccaaacagcaaagtagacagacacatagacagcgagagagacacacacacacacacacacacacacacacacacacacagagagagagagagagagagagagagagagagagagagccagcccctggatcaagccatgcctgaagcctgaccttttgttgactgagtcgataaatcgccatctttgctttataagtatatgatatgtttctttttcagctataactgcaagcatcccaataaagcaggttcctgaggcccttccagttgggatttggcaacttctctatcctataaataattccctgctaggcgtactactgtttctgattgatctcacctgctcaattctcaaggctaattatgaagtaaagcagtcaacacgtggcaaaagtccctgagccgacacctgggggaacaaaatgctaccatgtactggctgcacatgaccgaaacacatgcccccatccagtcaccaggctcacccttcaaaaaagccacctctggcaaggtgacagaggccrccctctttgcccctgggcctacttctgcttcaaaagacctcgagggaagggtctcaactctcccactaattgctaggaaggaaaattctggggtggaaagcaggaggggtcgggccaagcaacactttgcagaggacattggtcaaggcccaggctgactttcccaggggagcaggtgctaaggggctactgtgtgtggttggcaccaaagcctgctgtttgcagacagtgagttggaggaagcttgaggctcccaaaagcccaagcaaatggggtgaatgcaagggtgagaggcacccacccgcacctgcacacatgagcctgctgagtccccactggaatt

SEQ ID NO: 74124 - DNA, 541 bp, Homo sapiens
tacatgatggtaaattgtgtaattatttcattatatgttgcaaagtaataataacagaaataaagtgcacaataaatgtaaygcacttgaatcatccccaaaccatccccctcccctggtctgtggaaaaactgtcttccatgaaaccggtccccagtgccaaatagattagggaccactggtgtagattatctctgtgtcttacactgttctaagtgcatcacatttgttaactcattctatcctttcaacaaccctaatagtgggtactactattattctcattttacacataagaaaacagaagcacagagaaggtaagtgactttcccaaggtcacgcagctgttgagtggtggaacctggatttggactgaggcactctgtctggttccagagcccaggcccctcccaccatgccctgctgacccttagaatctggcatttgagctttatcttgaaggatggttaggattgtacagatggagcccagtttgccagagagagaaagagagtgagaatgcagagagcagagccggtgt

SEQ ID NO: 74125 - DNA, 541 bp, Homo sapiens
tacatgatggtaaattgtgtaattatttcattatatgttgcaaagtaataataacagaaataaagtgcacaataaatgtaatgcacttgaatcatccccaaaccatccccctcccctggtctgtggaaaaactgtcttccatgaaaccggtccccagtgccaaatagattagggaccactggtgtagattatctctgtgtcttacactgttctaagtgcatcacatttgttaactcattctatcctttcaacaaccctaatagtgggtactactattattctcattttacacataagaaaacagaagcacagagaaggtaagtgactttcccaaggtcacgcagctgttgagtggtggaacctggatttggactgaggcactctgtctggttccagagcccaggcccctcccaccatgccctgctgacccttagaatctggcatttgagctttaycttgaaggatggttaggattgtacagatggagcccagtttgccagagagagaaagagagtgagaatgcagagagcagagccggtgt

SEQ ID NO: 74126 - DNA, 715 bp, Homo sapiens
cagcgagacagggttccattcaaaggccagcctctaccgcctaagccaactctgaaaactctaaatctaacctaggccgggtgccgtggctcttgcctgtaatcccagcactttgggaagccgaggcaggagaatcacttgagcccaggggtttgagactagcctgggcaaaaaataatgagaccccacctctacaaaaaatttcttaaaattagctgggggtggtggcgcacacctgtggtcccagctaattgggaggctgaagtgggaagatcccttgagcccaggaagttgaggttgctgtgagctgtgatcacgccactgcatttcagcctaggcaacagagtgagatcccgtctcaaaaaaaaacaaaaaaagaaaaagaaaagaaaagaaaacctcctctctaaatctasaactgtccccaaggccatcttccgccctcatccagaaacaatccaggttattaccaggggatttcaatgttatgaacctatcaagggctgttatccgtcaataagtaactctgaaaaagcacttggacagcctagagcgcagctttggagaaatctgtcttcctgattataaacctaatccccaaaccagcaaaaacaaaccaagaatcacatggggagacgattcacatgtggggttagggcagagtatgtctttccggtcttttcactgagcaaatacaatcgttttaaacaagaca

SEQ ID NO: 74127 - DNA, 1399 bp, Homo sapiens
ggttttgccatgttgcccaggctgttttcaaactcctgagctcaagcgatctgcctgcctcggcctcccaaagtgctgggattatacatgtgggcccctgcgtctggctgagagccttttttttttccctcctgagacggaatcttgctctgtcacccaggctggagtgcagtggtgggaccttggctcagtgcaacctccacctcccgggttcaagcgattctcttacctcagcctcctgagtagctgggactacaggtgcgtaccagcacacctgactaatttttttgtatttttagtagagatggggtttcaccatgttagccaggatggtctcaatctcctgacgttcatgatccgcctgccttggcttcccaaagtgctgggattacaggtgtgggccaccatgcccggcctctagagcctattttatgtcctcctagcactgggcacccctcctgagctcttggtgcagctgcaattttatgcatgtttagggctttcaggtttaatgctcacatcctcactagacccagtcccatttactgctgcatccctagcaatctggagactcacacggccttggtagctgctagataaacatttgttgactgaagtcagtggacctggctgggcgtggtggctcatgcctgtagtccttgcactttggcaggctgaggcaggaggatcccttgagtccagagttcaagaccagcctggcaatatagggagacactgcctctattattattgttattatagtagagcctgagccacaacacctggcctatctctattatattaaattaaaaattyaaaacaatgaaatggccaggcacaggggctcatgcctttattggcagcactttggaaggccgaggtgggtggatcacctgaggtcaggagttcgagaccagcctgaccaacagggtgaaaccccgtctctactaaaaatacaaaaattagccgggcacagtggcatatgcctgtaatcccagctagtcagggagctgagacaggagaatcgcttgaacccgggaggtggaggttgtggtgagcagagatcactccatcgcactccagcgtgggtgacagagcaaggctctatcgcagaaaaaaaaaaaaaaaaaaaaaaaagtcagtggaccttagaggattaaataatttgcccaagattactcttactcatcttagaactactaaatagaggaactaaaataagaaactaggtcaatgggcttcaagacctacactgagatacaatactgcccttgcaatgaaggctcaatccctccacagccttgttaacctccttggccgtatctccactttttttttttttgagagagagtctcactctgtcacccaggctcgagtgcagtggcgcgatctcggctca

SEQ ID NO: 74128 - DNA, 1399 bp, Homo sapiens
ggttttgccatgttgcccaggctgttttcaaactcctgagctcaagcgatctgcctgcctcggcctcccaaagtgctgggattatacatgtgggcccctgcgtctggctgagagccttttttttttccctcctgagacggaatcttgctctgtcacccaggctggagtgcagtggtgggaccttggctcagtgcaacctccacctcccgggttcaagcgattctcttacctcagcctcctgagtagctgggactacaggtgcgtaccagcacacctgactaatttttttgtatttttagtagagatggggtttcaccatgttagccaggatggtctcaatctcctgacgttcatgatccgcctgccttggcttcccaaagtgctgggattacaggtgtgggccaccatgcccggcctctagagcctattttatgtcctcctagcactgggcacccctcctgagctcttggtgcagctgcaattttatgcatgtttagggctttcaggtttaatgctcacatcctcactagacccagtcccatttactgctgcatccctagcaatctggagactcacacggccttggtagctgctagataaacatttgttgactgaagtcagtggacctggctgggcgtggtggctcatgcctgtagtccttgcactttggcaggctgaggcaggaggatcccttgagtccagagttcaagaccagcctggcaatatagggagacactgcctctattattattgttattatagtagagcctgagccacaacacctggcctatctctattatattaaattaaaaattcaaaacaatgaaatggccaggcacaggggctcatgcctttattggcagcactttggaaggccgaggtgggtggatcacctgaggtcaggagttcgagaccagcctgaccaacagggtgaaaccccgtctctactaaaaatacaaaaattagccgggcacagtggcatatgcctgtaatcccagctagtcagggagctgagacaggagaatcgcttgaacccgggaggtggaggttgtggtgagcagagatcactccatcgcactccagcgtgggtgacagagcaaggctctatcgcagaaaaaaaaaaaaaaaaaaaaaaaagtcagtggaccttagaggattamataatttgcccaagattactcttactcatcttagaactactaaatagaggaactaaaataagaaactaggtcaatgggcttcaagacctacactgagatacaatactgcccttgcaatgaaggctcaatccctccacagccttgttaacctccttggccgtatctccactttttttttttttgagagagagtctcactctgtcacccaggctcgagtgcagtggcgcgatctcggctca

SEQ ID NO: 74129 - DNA, 629 bp, Homo sapiens
ccctattgcactccagcctgggcaacaagagtgaaactccatctcaaaaaaaaaaaaaagttagccaggtgtggtggcaggtgcctgtaatcccagctacacaggaggctgaggcacaagaatcgcttgaactagagaggtgaaggtttcagtaagccaagatcatttcactgcactccaacctgggcaacagagtgagtctgtctcaaaaaaaaaattaaattaaaattaaaaaataaatatacaaaaattaggcaggtgtgggggcaggcacctgtaatcccaactactcgggaggcaaragctcgagaattcgcttgaacccggaaggcagaggttgcagtgagtcaagattgcaccactgcactccagtcagggcgacagggcaagactcttgattcaaaaacaaacaaaaagtttgtggtctgaataaataatcaattccccacctctgacctctatccacatttatctagtcaaagaagaccaagcaaatcccaacacctctttcttcccaaacccccatctctccccagaggtccataccagtataggaacccagtaataattgaggggtggtgctgtatcctgcacgatcctgatacggtgggtgaagaagaagaaagcca

SEQ ID NO: 74130 - DNA, 439 bp, Homo sapiens
cctcttccctatcacacacacttgccaatgtccaggtctcctgagtccacgctgtcaaagagacagggacttaagcccaggagtttgaggctgcagtgagctatgatggtgccactgcactccagcctgggtgacagrgtgagagatcctgtctctaaaacaaagtaccatcaatcccagccccagagcccttcctctaagaaaaataaaccagttttttttcctttttttgaaatggagtctcgctctgttgcccaggctggagtgcagtcgctcggtctcggcccactgaaacctcaacctccggagttcaagtgattctcctgtctcagcctcccgtgtagctaggactgcagacgcacacaccaccatgcctggctaatttttgtatttgtagtagagacggggtttcaccatgttggccaggctggtctcctga

SEQ ID NO: 74131 - DNA, 439 bp, Homo sapiens
cctcttccctatcacacacacttgccaatgtccaggtctcctgagtccacgctgtcaaagagacagggacttaagcccaggagtttgaggctgcagtgagctatgatggtgccactgcactccagcctgggtgacagggtgagagatcctgtctctaaaacaaagtaccatcaatcccagccccasagcccttcctctaagaaaaataaaccagttttttttcctttttttgaaatggagtctcgctctgttgcccaggctggagtgcagtcgctcggtctcggcccactgaaacctcaacctccggagttcaagtgattctcctgtctcagcctcccgtgtagctaggactgcagacgcacacaccaccatgcctggctaatttttgtatttgtagtagagacggggtttcaccatgttggccaggctggtctcctga

SEQ ID NO: 74132 - DNA, 702 bp, Homo sapiens
tttttgttttcctgatgggccatttccacgggaaagggcagggcagtgtgcggattcaggaaagagaagccacagggagggggtgacgcaccgtagcccagcaccagaatcaccatgatgatcatcacccagaccataataccagccaggaagcgaagcaggatgatgaacaggaggctcatcgccatggcaatgaccaggcctctggggaaaagaaaacggtcatgaacagactccaccctcagccaggcttagagggggcagccaggggagaggccccttccctcctgacttacatgataatccagtaccaagagacggtgtaatcttcaaatatgcgcatggcgagttgccgcgcctctaggactccattggctttcctgggggaaggaggacaaggctcgggtcagaccctcttccatgatcaggccaaccacaggggattgcctgtcccacccagmaaagtgagaccctggcgcggtgcgccaatatcctcacttggcgccctccaccaggtctgtgatgtttttccgggagccatgcccatcctcataggtcgtctcattgcccaccatcaggacacccttgtaggcgtggatagcggggaagcatctccgggccactgcatggagcagaggatggcaccagtcaggctgagcctctgcagagcctccccgtcaccacctgagcctcctgggatcc

SEQ ID NO: 74133 - DNA, 702 bp, Homo sapiens
tttttgttttcctgatgggccatttccacgggaaagggcagggcagtgtgcggattcaggaaagagaagccacagggagggggtgacgcaccgtagcccagcaccagaatcaccatgatgatcatcacccagaccataataccagccaggaagcgaagcaggatgatgaacaggaggctcatcgccatggcaatgaccaggcctctggggaaaagaaaacggtcatgaacagactccaccctcagccaggcttagagggggcagccaggggagaggccccttccctcctgacttacatgataatccagtaccaagagacggtgtaatcttcaaatatgcgcatggcgagttgccgcgcctctaggactccattggctttcctgggggaaggaggacaaggctcgggtcagaccctcttccatgatcaggccaaccacaggggattgcctgtcccacccagcaaagtgagaccctggcgcgrtgcgccaatatcctcacttggcgccctccaccaggtctgtgatgtttttccgggagccatgcccatcctcataggtcgtctcattgcccaccatcaggacacccttgtaggcgtggatagcggggaagcatctccgggccactgcatggagcagaggatggcaccagtcaggctgagcctctgcagagcctccccgtcaccacctgagcctcctgggatcc

SEQ ID NO: 74134 - DNA, 702 bp, Homo sapiens
tttttgttttcctgatgggccatttccacgggaaagggcagggcagtgtgcggattcaggaaagagaagccacagggagggggtgacgcaccgtagcccagcaccagaatcaccatgatgatcatcacccagaccataataccagccaggaagcgaagcaggatgatgaacaggaggctcatcgccatggcaatgaccaggcctctggggaaaagaaaacggtcatgaacagactccaccctcagccaggcttagagggggcagccaggggagaggccccttccctcctgacttacatgataatccagtaccaagagacggtgtaatcttcaaatatgcgcatggcgagttgccgcgcctctaggactccattggctttcctgggggaaggaggacaaggctcgggtcagaccctcttccatgatcaggccaaccacaggggattgcctgtcccacccagcaaagtgagaccctggcgcggtgcgccaatatcctcacttggcgccctccaccaggtctgtgatgtttttccgggagccatgcccatcctcataggtcgtctcattgcccaccatcaggacacccttgtaggcgtggatagcggggaagcatctccgggccactgcatggagcagargatggcaccagtcaggctgagcctctgcagagcctccccgtcaccacctgagcctcctgggatcc

SEQ ID NO: 74135 - DNA, 1944 bp, Homo sapiens
tctgtatgtaaaaatgggagcaacagaggtccccacccaatgagaattaatacaactcgctgcgtgtaaactacttagcatagtggcctttctggaaatattagggactcagcaaattgaaattatctccatcactgtcggcatccacagtgttaatacctggggaaggcaactggaacaggggcctctaactccccccatctgtggctgccttgcctcttcctgaagtccttttattcctcttgtctttttttattttggagacagggtctcttgctgtctcccaggcttgagtgcagtggtgcgatcatagctcactgcagcctggaattcctgggctcaagcgatcctcctgcctcagtctccggagtagctgtgactacacaggtgcaggccaccatgcctggctaattcttgacatttttttgtagagggatcccgctatgttgccaaagctgctctcaaactcctgaatatctggggctgcgggctgacccctccatgcccggctatttttaatttttttttttttttttttttaaatagagtcttgctctgtcacccaggctggagtgcagtggctccatcttggctyactgcaacctccacctcccgggttgaagcaattctcctgcctcagcctcccgagtagctgggactacaggtgcatgccaccatgcctggctaatttttgtattttttttttttttcaagacagagtctcgccttgtcacccaggctggagtgcaatggcatgatcttggctcactgcaacctccacctcccaggttcaagtgattctccttcctcagcctcctgagtagctgggattacaggcgcgcaccatcacgcccggctaattttttgtatctttagtagagatggggtttcaccatgttgggcaggatggtctcaatctcttgacctcgtgatccgcccacctcggcctcccaaagtgctgggattacagacatgagccactgcgcccggccgcacccggcctattttttatttttatttttttgtacagatggagtcttgctatgttgtccaggatggtcttgaactcctggtccccagctatccccctgcttcagcctcccaaagtgttcggatgacaggtgtgagccactgcagtcagcctgtcttgtcatttaatagccaaaataagagtggtggtgaaaataatattcccattaatattaatagtgagagctaagatgtttgagaacctgccatgggtcctccctgttcagacactggacaaaacaaccttaggaagtggttaactaattttttttttttttggagatggagtctcgctctgtcaccaggctggtgtgatctcagctcacagcaaccttcacctcctgggttcaagtgattctcatgccttagcctcctgagtagctgggattacggtcatgcgccagcacaccaagctaatttttgtatttttagtagagacggggtttcatcatgttggcctggatggtctcgaactcttgacctcatgatccacccgccttagcctcccaaagtgctgggattaaaggcgtgagccaccgtgtccagacagaagtgtttactattatgggtgtcttcctgactaccaggcacaatcatatgaactgtcatctttctttctttctttctttctttctttctttctttctttctttctttctttctttctttctttctttctttttttcttctttctttctttccttctttccttctttccttctttctttctttcttttcttctttctttttttgacagggtctcactctgttgctcgggctggagtgcagtagtatgaccacagctcactgtagtctcgacctcctaggctcaattgattcttctgccttagcctccagagtagctgtgactacagaggtgcaggccaccatgctcagctaattcttgaaattttt

SEQ ID NO: 74136 - DNA, 1944 bp, Homo sapiens
tctgtatgtaaaaatgggagcaacagaggtccccacccaatgagaattaatacaactcgctgcgtgtaaactacttagcatagtggcctttctggaaatattagggactcagcaaattgaaattatctccatcactgtcggcatccacagtgttaatacctggggaaggcaactggaacaggggcctctaactccccccatctgtggctgccttgcctcttcctgaagtccttttattcctcttgtctttttttattttggagacagggtctcttgctgtctcccaggcttgagtgcagtggtgcgatcatagctcactgcagcctggaattcctgggctcaagcgatcctcctgcctcagtctccggagtagctgtgactacacaggtgcaggccaccatgcctggctaattcttgacatttttttgtagagggatcccgctatgttgccaaagctgctctcaaactcctgaatatctggggctgcgggctgacccctccatgcccggctatttttaatttttttttttttttttttttaaatagagtcttgctctgtcacccaggctggagtgcagtggctccatcttggctcactgcaacctccacctcccgggttgaagcaattctcctgcctcagcctcccgagtagctgggactacaggtgcatgccaccatgcctggctaatttttgtattttttttttttttcaagacagagtctcgccttgtcacccaggctggagtgcaatggcatgatcttggctcactgcaacctccacctcccaggttcaagtgattctccttcctcagcctcctgagtagctgggattacaggcgcgcaccatcacgcccggctaattttttgtatctttagtagagatggggtttcaccatgttgggcaggatggtctcaatctcttgacctcgtgatccgcccacctcggcctcccaaagtgctgggattacagacatgagccactgcgcccggccgcacccggcctattttttatttttatttttttgtacagatggagtcttgctatgttgtccaggatggtcttgaactcctggtccccagctatccccctgcttcagcctcccaaagtgttcggatgacaggtgtgagccactgcagtcagcctgtcttgtcatttaatagccaaaataagagtggtggtgaaaataatattcccattaatattaatagtgagagctaagatgtttgagaacctgccatgggtcctccctgttcagacactggacaaaacaaccttaggaagtggttaactaattttttttttttttggagatggagtctcgctctgtcaccaggctggtgtgatctcagctcacagcaaccttcacctcctgggttcaagtgattctcatgccttagcctcctgagtagctgggattacggtcatgcgccagcacaccaagctaatttttgtatttttagtagagacggggtttcatcatgttggcctggatggtctcgaactcttgacctcatgatccacccgccttagcctcccaaagtgctgggattaaaggcgtgagccaccgtgtccagacagaagtgtttactattatgggtgtcttcctgactaccaggcacaatcatatgaactgtcatctttctttctttctttctttctttctttctttctttctttctttctttctttctttctttctttctttctttytttcttctttctttctttccttctttccttctttccttctttctttctttcttttcttctttctttttttgacagggtctcactctgttgctcgggctggagtgcagtagtatgaccacagctcactgtagtctcgacctcctaggctcaattgattcttctgccttagcctccagagtagctgtgactacagaggtgcaggccaccatgctcagctaattcttgaaattttt

SEQ ID NO: 74137 - DNA, 1126 bp, Homo sapiens
tcatggctcactgcagcctcaaactcccagactcaagggatcttcctgcctcagcctcccaagtagctgaaactgcaggcatgttccaccgcacccagctaatttttaaactttttgtagasatggtatctcaatatgttgcccaggctaaggagcctttattttcctgtctgtgaaatgggctgtgagcagatctgactccaggggttgctgaaaggaaggtctcgggagggtaggcggaccctcgtgtacctgatgcccccatgttccctcaggggggcaaggagtacttgatgcgagcccactttggcctccccagtgtggaaaaggaagaggtggagggccggccccccatcggggtcaagtttgagatcccctacttcaccgtctctgggatccaggtgagagaagcaggcagggaggatcctccccttgacttcggtgggttcccctctctcctgtcccttggctcgagtcacctcagtcccctggcctgtgtcaacactcctctgaaggctgcctggtctttcccagagcaatgttacctttatctgcccacagcctgtgctccctctcccccggcctgtgccaccttgttccccaccggcttgttcacttctgtcccttctccacctccaaagccattcaccattccgttgcctgtgccacctcatccccctaagaccatgtgatatcccctcatcgatcccagcctgtgccacatagccgcttggcctaagccgtctctttctccctggccctggcctcctccctcctgcaatcctggaccacctcttttcattcccttccaggtccgatacatgaagatcattgagaaaagtggttaccaggccctgccctgggttcgctacatcacccagagtggcggtaaggcagcccagctcctggggacaatggggtgagggaaaggcagtgggtagggactcgaggctttcaccacattctggctcagaaaaccaacaagggtcaggtgtgatggttcaggtgtgtaatcctagcactttgggaggccaaggcgggtggatctcttgaggccgggagttcgagaccaacctggccaacatggtgaaaccctgtttctactaaaaatacaaaaattagccgg

SEQ ID NO: 74138 - DNA, 594 bp, Homo sapiens
agaccctgtctaaaaaatagtttcagctgggagcggtggctcacgcctgcaatcccaacaatttgggaggctgaggcaggcgaatcacaaggtcargagttcaagaccagcctggccaacatggtgaaaccccatctctactaaaaatccaaaaattagccaggcataatgctgggcacctgtaatctcagctactcgggaggatgaggcaggagagtaacttgaacccgggatgcggaggttgcagtgggccgagatcactccagtgcactccagcctgggcaacagagcgagagactatctcaaaaacaaaacaaaacaaacaaaaaaactgtaggccaggcgccgtgtggctcacgcctgtaataccagcactttgggaggccaagacgagtggatcacgaggtcaagagtttgagaccagcctggccagcaaggtggaactaaaatacaaaaatactaaatactaaatactaaaaatactaaatactaaaaatacaaaaaattggctgggcgcggtggctcactcctgcaatcccagcactttgggaggccgaggcaggcggatcatgaggtcaggagatcgagaccatc

SEQ ID NO: 74139 - DNA, 746 bp, Homo sapiens
agggaaacaaaggcatcgaggaaggggtcagtgccagcatagggtagaacttgaggactctggagccaagacctgggttcaaatgccttcttggaaacaaacaaacaaaaatgctggccaggcttggtggmtcatgcctgtaatcccagcactttgggaggccgaggcaggtggatcacatgaggtcaggagtttgagaccaggctagccaacatggtgaaaccccgtctctactaaaactacaaaaattagctggatgtggtggtacgcgcctgtaatcccagctactcaggaggctgaggcacgagaatcacttgaatccaggaggtttagtgagctgagactgtgccactgcactgtggcactatgcactgtggcctgggccacaaagggagactctgtctcaaaaaacaaacaaacaaacaaaaaaaaccagcatgggcaatatggtaaaaatcaatctctacaaaaaatacaaaaattagtcaggtgtggtggtgtgtacctgtagtcccagctactcgggaggctaagatgggaggatcacctgaggctgtggtgagccatgattgcaccactgcactttagcttcagccagagtgagatcctgtctcaaaaaaaaaaaaaaaaaaaaaaggctgggccaggtggctcacgcctgtaatcccagcactttgggaggccgaggccagcggatcacctgaagtgaggaatttgagaccagcctgcccaacatggcgaaacct

SEQ ID NO: 74140 - DNA, 746 bp, Homo sapiens
agggaaacaaaggcatcgaggaaggggtcagtgccagcatagggtagaacttgaggactctggagccaagacctgggttcaaatgccttcttggaaacaaacaaacaaaaatgctggccaggcttggtggctcatgcctgtaatcccagcactttgggaggccgaggcaggtggatcacatgaggtcaggagtttgagaccaggctagccaacatggtgaaaccccgtctctactaaaactacaaaaattagctggatgtggtggtrcgcgcctgtaatcccagctactcaggaggctgaggcacgagaatcacttgaatccaggaggtttagtgagctgagactgtgccactgcactgtggcactatgcactgtggcctgggccacaaagggagactctgtctcaaaaaacaaacaaacaaacaaaaaaaaccagcatgggcaatatggtaaaaatcaatctctacaaaaaatacaaaaattagtcaggtgtggtggtgtgtacctgtagtcccagctactcgggaggctaagatgggaggatcacctgaggctgtggtgagccatgattgcaccactgcactttagcttcagccagagtgagatcctgtctcaaaaaaaaaaaaaaaaaaaaaaggctgggccaggtggctcacgcctgtaatcccagcactttgggaggccgaggccagcggatcacctgaagtgaggaatttgagaccagcctgcccaacatggcgaaacct

SEQ ID NO: 74141 - DNA, 746 bp, Homo sapiens
agggaaacaaaggcatcgaggaaggggtcagtgccagcatagggtagaacttgaggactctggagccaagacctgggttcaaatgccttcttggaaacaaacaaacaaaaatgctggccaggcttggtggctcatgcctgtaatcccagcactttgggaggccgaggcaggtggatcacatgaggtcaggagtttgagaccaggctagccaacatggtgaaaccccgtctctactaaaactacaaaaattagctggatgtggtggtacgcgcctgtaatcccagctactcrggaggctgaggcacgagaatcacttgaatccaggaggtttagtgagctgagactgtgccactgcactgtggcactatgcactgtggcctgggccacaaagggagactctgtctcaaaaaacaaacaaacaaacaaaaaaaaccagcatgggcaatatggtaaaaatcaatctctacaaaaaatacaaaaattagtcaggtgtggtggtgtgtacctgtagtcccagctactcgggaggctaagatgggaggatcacctgaggctgtggtgagccatgattgcaccactgcactttagcttcagccagagtgagatcctgtctcaaaaaaaaaaaaaaaaaaaaaaggctgggccaggtggctcacgcctgtaatcccagcactttgggaggccgaggccagcggatcacctgaagtgaggaatttgagaccagcctgcccaacatggcgaaacct

SEQ ID NO: 74142 - DNA, 746 bp, Homo sapiens
agggaaacaaaggcatcgaggaaggggtcagtgccagcatagggtagaacttgaggactctggagccaagacctgggttcaaatgccttcttggaaacaaacaaacaaaaatgctggccaggcttggtggctcatgcctgtaatcccagcactttgggaggccgaggcaggtggatcacatgaggtcaggagtttgagaccaggctagccaacatggtgaaaccccgtctctactaaaactacaaaaattagctggatgtggtggtacgcgcctgtaatcccagctactcaggaggctgaggcacgagaatcacttgaatccaggaggtttagtgagctgagactgtgccactgcactgtggcactatgcactgtggcctgggccacaaagggagactctgtctcaaaaaacaaacaaacaaamaaaaaaaaccagcatgggcaatatggtaaaaatcaatctctacaaaaaatacaaaaattagtcaggtgtggtggtgtgtacctgtagtcccagctactcgggaggctaagatgggaggatcacctgaggctgtggtgagccatgattgcaccactgcactttagcttcagccagagtgagatcctgtctcaaaaaaaaaaaaaaaaaaaaaaggctgggccaggtggctcacgcctgtaatcccagcactttgggaggccgaggccagcggatcacctgaagtgaggaatttgagaccagcctgcccaacatggcgaaacct

SEQ ID NO: 74143 - DNA, 545 bp, Homo sapiens
tttttagtagagacagggtttcaccgtgttagccaggatggtcttgatctgctgacctcgtgatccacccgcctcagcctcctaaagtgctgggaattacaggcrtgagccatcacgccccacctgagactgtcttttaaaaaaaaaaaaaaaaaatcaatgtggaacactcctttgccacctagaataatcaggaaaggtgacccatgccctgtgcctccttaacagactttcaggtacttgggaatttgaaacaaatctccttgatgcacaaagtaaccttttcttcccccattgtaccccaggttgaaaatcgatgactttaatgatgaactcaataagctgctggaagaaatagaagaaaaaaacccacaactgattattgatactgagaaacatcatccctgggcagaaaggccttcttctcatgacttcatgatctgaatccccccgagtcattcattctccatgaagtcatcgattttccaggtgttggtgaactgcctgtgactcctctcctccccggcccctacccctcagggata

SEQ ID NO: 74144 - DNA, 1941 bp, Homo sapiens
cacaattaagttcaattgtgtaataaaaccattttctttctgtgctacttttgtggagtttctctggggctggagaaaatttttcttttaatcrtttccaaacactgtctagaattaccagacatgataaaaacacataaggtgccaaccagaatttactctagaggggacttttcctctcaggcttccagtcaactcacatttgcacttcaaaatgcatgctgtcccctaaatatggaggcagaattgtgtctcttcctatttggtatctatagtcctctagagtcacttctagagaggctagaccacatttctacaaacttcacagggcaacaatcaatcattttacctctatcaatgactcttgtatcttcaggcctgaaactgatacaaaaactatttagcccagaaacccaatcacagtaacatgtgcattagtagacatagagacatgagaatctccacgttcccctttctcctcttgctaaagtgctcacaaatgttcaggtaacatctgctgctgctccagtccttcagcccctaaatctgcagctccaaattttgaatttaggtcttgagatttgggaaataaaaaacttttatctaaaaaatgcaagtcctttggttatcaaactcagagacatgaaaatgaaagtgcagttatttctccctcctttgaactatgtattcatctcttgaaactgttcacgattgccaaaagtagctataaattaaactaataatgacacgttggacactatatcccatatcctaaaccataactatatatatctaatcaataataaatgctatttctctaaatacataaaaatttctgacaaacaactttgtgtctacctactctgttcttctcttgttatctttacaaatcctcttgtaactgatgccaatcaaagtgtagattccagacaacttgaatctttgctcccagattataatccttcagcttgacccaaataaactgtctacttatattgatgttgtgtcagctttttttttttatttcatgtagacttatcatttagaatgtgctagaggagcctctatgaggggatctctcctcggattgtactccacttgctgtaacaccaaaggatgcagagccaggtggatcctacctagaatctgcagataaggtctggcctctgcctgggatttacaaaaaagggctggtctttggattgtgaatgtacagagaactaacaaatggcattttctgccttgtgagatgtcagcaaagacagcttacagcccccatttgggaatgtggctctgtgagatgtttcacatcttgttcattgacctgctacagtgatgtgagaggttccaggaggaaatagaatctgatggcagaatctgtaagtgtaaataagcatctttggagtgagagatcaaggccacaaagtatccagagccatgaccacaactatatttacctgtaaaatgtgatactggagtagagtatttttgttctttcttttacccaagagctagcaaatcagaacgggtgatccaagttctggagctccaccagtgcagttccattttctatttagaaacagcccgagtctgcagcctggcttatcattgggccatcagcccaatgatatctaataatctcacaataacctaggtgtctttgaggcatttgaggatgtccagaacagaattgtgtcaggttgacaaaaatggttaattctgcttctgtctcagtgtaagagaaatgagtcatctgtgtttgttcctcccctcatacaagaggtgtctttggttggtacccagatgagagtttatccagtttcctggtacttggatgataaacaaggaggagatctggagacccgaatagataaactagttgcttccatctcatatggccattaaaaaaaaaaccatgaagtagtcatggttcctacaacc

SEQ ID NO: 74145 - DNA, 605 bp, Homo sapiens
caggaatggacaggaaattagacactgttttcttaaactgattgctaaagaatgcccactgtttaaacctgcactatccatttcaaagggaagtattggctgatttcaggaagtttgaaatcagctcatggagaagcaggacaaagttagggttaaatgtgcttttcttcctccccaaaggggaaactatttyttaaaaaaaaaaaaaaaaaaaaaaaagaaacgaaaaagaaaaagaaagaaagagagaaagagaaaaaattttcccttttttctttaaggaggacttattatttccatcatcctcgttgagttgttgatgaatagttcacatcccctgccaagccccacccttgtctattttctaagctctttcctcattatttgctcagccttttcccacagccccgaccggccgtcagggcagcttaaacacaacacagcattaacatggggaaatggctttcagtttccaattgatctcctaatacgttatgttgaaatgataattggtacactcttcattgaaaaataagagagaaaaactactactcagtcaccaccaggtattatcgtagttcatgtattcagaacaaccagataca

SEQ ID NO: 74146 - DNA, 785 bp, Homo sapiens
ccagcctctagcagcctggctggtgtctcctcttccagggctcaggataccccctcttccaggaagccctcctgaccccccaggccgggcagccactccagggctcctcagttcagcaatgtgtctctggtctgaaccccacacctgacatcctctgcttggatgcctggatgcctccggggcacctgtgcctcagcctcaccagccccgagcccagctcaccatgaacacaaagatggcyacgcagcaccagcccagcaccaggtagtagccaatcttcccgaagagcaggcccatgaggaccccgccaatcatcctgggggagggagaggaggctgtgtgaggacaaggcccaagggctggggctggcgtgaagggcgggggtactcacccgacatatttgtagcccaagaaggccaccaggtcgatggtggtgaggtcggtgttgacagtgaccagatagaggctgagcaggatggccagcacctccagggtcagccaggccagggctgagctcgcttgcagccccaggaggtctggggagaacctgcaggcacaaagccccgccacttggttggctggttcagaccccccacccccagcacccatctggggacagctctgtgttgggtagggctggacacctggcagtgaccaagatggatgtgcgcgctatcctattcccacggaaatcccatccagagaggatggcagacccatccctagacagtgacacccagagcaggcagggctggagtcacagggggctgtgctgacagtcagga

SEQ ID NO: 74147 - DNA, 582 bp, Homo sapiens
tcactccctgggttccctggagcagtggacagggtttgctctgccacccagggccctttatgtgctggaagtccgtgctgacggggccaggcagctgtggcatctcctctctcatgtgggtctccaagcatcctggggccaggacagccagttccaggacagtgggaagtgaggaaggcctcaggtctctccctggagacccagatgccatcagcggttgtagtgttgtttgcggaagacagagctgcmcagacactgaccactcccccgcaaccgtgggccacaggaaagggctaggatagccagagccccttacccactcccagccgctccgtgtgcctggcatgcctgggagctgtgcgccccatgtgagaaagctgagggagcctggctggtggcactgatttctcccccaggctgtgcgtcacagtcgcctagggagctttttgcttccttataaaattaatagatgaaacacagaaggttacgggggagaggggggagtagcagaaagacctgggaggaagcacaccagcaccaccatggaggtgcctccccgggagccggaaaggggctggcagg

SEQ ID NO: 74148 - DNA, 631 bp, Homo sapiens
ccagaaagaaagtagggctagggggctggacagaagtgggatgggaggggctgggggcggtagctcacgcctgtaatcccagcactttgggaggccacagtgggcgaatcacttaaggtcaggagwttgagaccagcctggccaacatggtgaaaccccatctctactaaaaatacaaaagttagccaggcgtggtggcgggcgcctgtaatcctagctacttgggaggctgaggcaggagaatcgcttgaacccgggaggcggaggttacagtgagccgagatctcgccactgcactccagcctcagcaagagggagactgtctcaaaaaaagaaaaaaaagaaagtggggctaggcggctggacagaagtgggatgggaggggtgggaacagtatgatgcacctgctaaaagtcgaggctttgcaaatgggacctgggttttaatcacagcttcctctttggttgtgaccttgagcacaggggagccccctccccacatgtgaaatgagattccagcacctccccctggctgccacaggtattgtggtttccaggggcttgaagccgtgcttctgggttaaggttaggattctggagtcaaattgccagggcgtgaatcctggctctgc

SEQ ID NO: 74149 - DNA, 1260 bp, Homo sapiens
tggtgcagaaagagttccaacagagcccagcacacaggtgagactgtgccactcatatgcacacccagtcaacagtaaagattgtcattctgtctcatgaaaacagccaatgattgagcttctgaatctcagacttggaggcagtcaaaagttagaaaattgactatcatacctggatctcattcacaggtgggttggtgactctcagattcaacacaactctgaggctgtgacttcattaaggagatacagtccacacgaggaattaagggtctcatggacagattagtctaccatctagattgtgactctttacgtaggcccaacatacatgagctattgaatcttacacctcgaacctagatacatatgggattgttaatctcatacctggacattcctgcaggtgtgattgtgacatagattctgcctgtcatgtgactgatttaactctactccctgggcccagcccagagctgaaattataaaatttcattgaaagcagcaattaggtgatgtagctgcatgctcctgccttagcattgccaaaagggagcattgtgacatattgcttggccttgcacccaggtgatgtgagtctcttctgccttcatgctgcccacaggcagcactgtcacatatcacttggcaccacattcaggttatgtgactctcctgcctgtgccctgcccatatgggccattttgacatgtagctgagtctgatacccaggtgatgtaactctctggcctggccctgcctactaggttttctgtgacatatctatgcaccaatcaactttgtgttttgataatcctcttctaccaatttctgctcaaaagaaggattttgacaaataattgggaccagcacctagctgaggttactctactcttctttcaaggtttggtttgcaggggatgttgtgacattgctaggctaacagacaggtgatattcttctgccttggctcttccaaaataaagcatttttacatagtgctgtgcccaggactacagtgactgagtctcctgcctagactctgcccacagaaagattgtaacatatctctagacccatcaactatttgatgtgagwctcttcttttaccttgtcttttcccacaaaagagattgtgatatatctctgggcccagcacctaggtgatgtgacttcttctgcctgggtcatgcccatagaagggagagtaacttactaccaagcccaccacagacatgctgagatacttctgcctgttgc

SEQ ID NO: 74150 - DNA, 1260 bp, Homo sapiens
tggtgcagaaagagttccaacagagcccagcacacaggtgagactgtgccactcatatgcacacccagtcaacagtaaagattgtcattctgtctcatgaaaacagccaatgattgagcttctgaatctcagacttggaggcagtcaaaagttagaaaattgactatcatacctggatctcattcacaggtgggttggtgactctcagattcaacacaactctgaggctgtgacttcattaaggagatacagtccacacgaggaattaagggtctcatggacagattagtctaccatctagattgtgactctttacgtaggcccaacatacatgagctattgaatcttacacctcgaacctagatacatatgggattgttaatctcatacctggacattcctgcaggtgtgattgtgacatagattctgcctgtcatgtgactgatttaactctactccctgggcccagcccagagctgaaattataaaatttcattgaaagcagcaattaggtgatgtagctgcatgctcctgccttagcattgccaaaagggagcattgtgacatattgcttggccttgcacccaggtgatgtgagtctcttctgccttcatgctgcccacaggcagcactgtcacatatcacttggcaccacattcaggttatgtgactctcctgcctgtgccctgcccatatgggccattttgacatgtagctgagtctgatacccaggtgatgtaactctctggcctggccctgcctactaggttttctgtgacatatctatgcaccaatcaactttgtgttttgataatcctcttctaccaatttctgctcaaaagaaggattttgacaaataattgggaccagcacctagctgaggttactctactcttctttcaaggtttggtttgcaggggatgttgtgacattgctaggctaacagacaggtgatattcttctgccttggctcttccaaaataaagcatttttacatagtgctgtgcccaggactacagtgactgagtctcctgcctagactctgcccacagaaagattgtaacatatctctagacccatcaactatttgatgtgagtctcttcttttaccttgtcttttcccacaaaagagattgtgatatatctctgggcccagcacctaggtgatgtracttcttctgcctgggtcatgcccatagaagggagagtaacttactaccaagcccaccacagacatgctgagatacttctgcctgttgc

SEQ ID NO: 74151 - DNA, 797 bp, Homo sapiens
aatcagccaattatctaaataacgactttggatttatcaaggcaggaccaaaatggtgggtgtgagtagaacaygcacacactgagaagaaatgcaagggccgggtacggtggctcacgtctgtaatcccagcacttcgggaggctgaggtgggcagattgcaaggtcaagaaatcgagaccatcctgaccaacatgttgaaaccccgtctctactaaaaatagaaaaattagctgggcatggtggcacatgactgtagtcccagctactcaggaggctgaggcaggagaatcacttgaacccaggaggcagaggttgcagtgagccgagatcacaccactgcactccagcctggcgacagagcaagactctgcctcaaaaaaaagaaaaaaaggaactttcatacacgtataaatttatctgccctttaaacaagatctagagaattacacaaataaaaatatgctccaatatcctgctgcatttaacatatattgttaaagaaggattttttcttgtttcttgcttctgggagataaaaatacactaaggcaatggaagtcattcattgctatgtcaatgttgacccttctctttctgttgcacatgcggccaaagttgaaccagcctcagtccaaagtttctcaccaaaatttgagaatgtttattctttctcattaagactttcatcaagacagggactcttgtttatttccatgagcgtgcgatgtgaaaacacttttctttttgtctttgtggctaaaataggctctttatggtaatggaaagaaagccta

SEQ ID NO: 74152 - DNA, 797 bp, Homo sapiens
aatcagccaattatctaaataacgactttggatttatcaaggcaggaccaaaatggtgggtgtgagtagaacatgcacacactgagaagaaatgcaagggccgggtacggtggctcacgtctgtaatcccagcacttcgggaggctgargtgggcagattgcaaggtcaagaaatcgagaccatcctgaccaacatgttgaaaccccgtctctactaaaaatagaaaaattagctgggcatggtggcacatgactgtagtcccagctactcaggaggctgaggcaggagaatcacttgaacccaggaggcagaggttgcagtgagccgagatcacaccactgcactccagcctggcgacagagcaagactctgcctcaaaaaaaagaaaaaaaggaactttcatacacgtataaatttatctgccctttaaacaagatctagagaattacacaaataaaaatatgctccaatatcctgctgcatttaacatatattgttaaagaaggattttttcttgtttcttgcttctgggagataaaaatacactaaggcaatggaagtcattcattgctatgtcaatgttgacccttctctttctgttgcacatgcggccaaagttgaaccagcctcagtccaaagtttctcaccaaaatttgagaatgtttattctttctcattaagactttcatcaagacagggactcttgtttatttccatgagcgtgcgatgtgaaaacacttttctttttgtctttgtggctaaaataggctctttatggtaatggaaagaaagccta

SEQ ID NO: 74153 - DNA, 568 bp, Homo sapiens
acttgcaataagtttgtaaaatatattggcttctgtttcacgtataaatctcactgaaaggcactatccagtagctattyttctgagtcatttttgggattttctgttgcttgagtcccaactaacgttatttgaatcttagtgatttctttttctttttctttttctttttgagatggatttttgctcttgttgcccaggctggagtacagtggtgcgatcttggctcaccacaacctccacctcccaggttcaaatgatgctcctgcctcagcctcccgagtagctgggactacaggcaggtgccaccacgctgggctaattgtgtatttttagtagagtcagggtttctccatattggtcaggctggtctcgaactcctgacctcaggtgatctgcctgccttggcctcccaaagtgctaggattacagacatgagccaccatgcctggccgaatcttagtgatttctaaagccacagatgtaataacagaaagagaacaaaaatgaagccaagttaccccaacagttcatgtataatatattttgttttacggatgaaccaaaa

SEQ ID NO: 74154 - DNA, 568 bp, Homo sapiens
acttgcaataagtttgtaaaatatattggcttctgtttcacgtataaatctcactgaaaggcactatccagtagctatttttctgagtcatttttgggattttctgttgcttgaktcccaactaacgttatttgaatcttagtgatttctttttctttttctttttctttttgagatggatttttgctcttgttgcccaggctggagtacagtggtgcgatcttggctcaccacaacctccacctcccaggttcaaatgatgctcctgcctcagcctcccgagtagctgggactacaggcaggtgccaccacgctgggctaattgtgtatttttagtagagtcagggtttctccatattggtcaggctggtctcgaactcctgacctcaggtgatctgcctgccttggcctcccaaagtgctaggattacagacatgagccaccatgcctggccgaatcttagtgatttctaaagccacagatgtaataacagaaagagaacaaaaatgaagccaagttaccccaacagttcatgtataatatattttgttttacggatgaaccaaaa

SEQ ID NO: 74155 - DNA, 568 bp, Homo sapiens
acttgcaataagtttgtaaaatatattggcttctgtttcacgtataaatctcactgaaaggcactatccagtagctatttttctgagtcatttttgggattttctgttgcttgagtcccaactaacgttatttgaatcttagtgatttctttttctttttctttttctttttgagatggatttttgctcttgttgcccaggctggagtacagtggtgcgatcttggctyaccacaacctccacctcccaggttcaaatgatgctcctgcctcagcctcccgagtagctgggactacaggcaggtgccaccacgctgggctaattgtgtatttttagtagagtcagggtttctccatattggtcaggctggtctcgaactcctgacctcaggtgatctgcctgccttggcctcccaaagtgctaggattacagacatgagccaccatgcctggccgaatcttagtgatttctaaagccacagatgtaataacagaaagagaacaaaaatgaagccaagttaccccaacagttcatgtataatatattttgttttacggatgaaccaaaa

SEQ ID NO: 74156 - DNA, 671 bp, Homo sapiens
gatcccttatggctgttgctgcccagagattcygtgggagggtggagaagggagacggctaaagaatcccagaatcccctccccaccaggtgccaacctgatgaccacagcagaaaccccctgcaccaggctcctgggatatgtcgtccacaatgtcacaggtgtgtgtgttgtgtgtgtgtggtgggagagtggtgtaagtgtgtgtgtcttagtcttctctggctcccataacaacataacacagacaggtggcttccacaacagaaatttatttctcaccattctggagaccggaaagtccaagtctgaggtttagcaggtttcaattctctctccctcttttcctcttcatattagggcacttaatttcatcatgaaggccccaccctcacaacctcagctaaccctcctcacctcccaagggtcccagccccaaatgccactatcttggggcttagcactttgacatataagtctggagagggggggacacaatttggtccatggctttgcgtgtgtgatgtgtatgtcccaaagtgtcaccgtcttcaagcagacagggttgcttctaagtttacatgcccgtatgacgtgtgtatgggggtgcttgtgtggctgtacttgtgtgatttttgtgtattggggtgaataggcatttccattcatcc

SEQ ID NO: 74157 - DNA, 671 bp, Homo sapiens
gatcccttatggctgttgctgcccagagattctgtgggagggtggagaagggagacrgctaaagaatcccagaatcccctccccaccaggtgccaacctgatgaccacagcagaaaccccctgcaccaggctcctgggatatgtcgtccacaatgtcacaggtgtgtgtgttgtgtgtgtgtggtgggagagtggtgtaagtgtgtgtgtcttagtcttctctggctcccataacaacataacacagacaggtggcttccacaacagaaatttatttctcaccattctggagaccggaaagtccaagtctgaggtttagcaggtttcaattctctctccctcttttcctcttcatattagggcacttaatttcatcatgaaggccccaccctcacaacctcagctaaccctcctcacctcccaagggtcccagccccaaatgccactatcttggggcttagcactttgacatataagtctggagagggggggacacaatttggtccatggctttgcgtgtgtgatgtgtatgtcccaaagtgtcaccgtcttcaagcagacagggttgcttctaagtttacatgcccgtatgacgtgtgtatgggggtgcttgtgtggctgtacttgtgtgatttttgtgtattggggtgaataggcatttccattcatcc

SEQ ID NO: 74158 - DNA, 671 bp, Homo sapiens
gatcccttatggctgttgctgcccagagattctgtgggagggtggagaagggagacggctaaagaatcccagaatcccctccccaccaggtgccaacctgatgaccacagcagaaaccccctgcaccaggctcctgggatatgtcgtccacaatgtcacaggtgtgtgtgttgtgtgtgtgtggtgggagagkggtgtaagtgtgtgtgtcttagtcttctctggctcccataacaacataacacagacaggtggcttccacaacagaaatttatttctcaccattctggagaccggaaagtccaagtctgaggtttagcaggtttcaattctctctccctcttttcctcttcatattagggcacttaatttcatcatgaaggccccaccctcacaacctcagctaaccctcctcacctcccaagggtcccagccccaaatgccactatcttggggcttagcactttgacatataagtctggagagggggggacacaatttggtccatggctttgcgtgtgtgatgtgtatgtcccaaagtgtcaccgtcttcaagcagacagggttgcttctaagtttacatgcccgtatgacgtgtgtatgggggtgcttgtgtggctgtacttgtgtgatttttgtgtattggggtgaataggcatttccattcatcc

SEQ ID NO: 74159 - DNA, 671 bp, Homo sapiens
gatcccttatggctgttgctgcccagagattctgtgggagggtggagaagggagacggctaaagaatcccagaatcccctccccaccaggtgccaacctgatgaccacagcagaaaccccctgcaccaggctcctgggatatgtcgtccacaatgtcacaggtgtgtgtgttgtgtgtgtgtggtgggagagtggtgtaagtgtgtgtgtcttagtcttctctggctcccataacaacataacacagacaggtggcttccacaacagaaatttatttctcaccattctggagaccggaaagtccaagtctgaggtttagcaggtttcaattctctctccctcttttcctcttcatattagggcacttaatttcatcatgaaggccccaccctcacaacctcagctaaccctcctcacctcccaagggtcccagccccaaatgccactatcttggggcttagcactttracatataagtctggagagggggggacacaatttggtccatggctttgcgtgtgtgatgtgtatgtcccaaagtgtcaccgtcttcaagcagacagggttgcttctaagtttacatgcccgtatgacgtgtgtatgggggtgcttgtgtggctgtacttgtgtgatttttgtgtattggggtgaataggcatttccattcatcc

SEQ ID NO: 74160 - DNA, 671 bp, Homo sapiens
gatcccttatggctgttgctgcccagagattctgtgggagggtggagaagggagacggctaaagaatcccagaatcccctccccaccaggtgccaacctgatgaccacagcagaaaccccctgcaccaggctcctgggatatgtcgtccacaatgtcacaggtgtgtgtgttgtgtgtgtgtggtgggagagtggtgtaagtgtgtgtgtcttagtcttctctggctcccataacaacataacacagacaggtggcttccacaacagaaatttatttctcaccattctggagaccggaaagtccaagtctgaggtttagcaggtttcaattctctctccctcttttcctcttcatattagggcacttaatttcatcatgaaggccccaccctcacaacctcagctaaccctcctcacctcccaagggtcccagccccaaatgccactatcttggggcttagcactttgacatataagtctggagagggggggacacaatttggtccatggctytgcgtgtgtgatgtgtatgtcccaaagtgtcaccgtcttcaagcagacagggttgcttctaagtttacatgcccgtatgacgtgtgtatgggggtgcttgtgtggctgtacttgtgtgatttttgtgtattggggtgaataggcatttccattcatcc

SEQ ID NO: 74161 - DNA, 445 bp, Homo sapiens
gggttgcgtgtatactgtatcacctaagccatcagaacacagaaggtagctgtgctaaaatgtataagcacgttaattcaaatcaatgacagaagcctctactgaagcttagcaatcacctatttgaacaacataaacattcaatttctcctctggaaggtaattttaatagcaagcataatattcaagtgattttccacgtctgatggaagaatacaatggagaaagaaagaagagaaagagaaaagaaggaagagctagcaggcagaggggtggagtgtgtccagaagtttgtactagcctggatcgctagccaagtccagccgctttaactgagccctggcaatcaaaacaccactgaggatgaaggargcaaaagaaaagatcaaataaaaattaaatgctccattctgggaaatcagcaggtcatagattctttccctaa

SEQ ID NO: 74162 - DNA, 614 bp, Homo sapiens
atcccagcactttgggaaggcgaggtgggcagctcacccaaggtcaggagttcaagagcagcctagccaacatggcaaaaccctgtctctactaaaaatacaaaaaaaaaaattagccaggcgtggtggggcacacctgtaatcccagctactcgggaggctgaggcaggagaattacctaacccaggaggtggaggatgcagcgagccgagatcacaccactgtactccagcctgggcaacagagcaatacaccgtctcaaaaaaataaaaaaataaaaaataaaaaaataaataaataaataataaaagaggagagggagaggagcagggagggagggaagggaaggaaagaaragagagagagagagagagagaaagaattgaatgaataaacaaataaatggaggcaaacagacaaatctcttatgcagaagaattcctaatttgtgtagctacactgcgcttaaggagatagagagtaactctacacctcttgagtgtgggttgtgcatagtgacttccttcccaagactgcagcctggaaggagggggagggagagtcacttgacagtattgaaacctgacaagcagcagcgtgtttggcggtcccgc

SEQ ID NO: 74163 - DNA, 2526 bp, Homo sapiens
caaggatacacaggagttaaataggtgagggggggtaatataggccaaagccctgtggtggcagaaatagaaggccagtggagctgtccgagtatgaagctgagtggtcagaccacaagggtcttttaggccagggatagtttggtcttccccgcaaaaacaactgaagcatcagacaggagagggaagtggtcaggtttcacttaatattcactcctttttttttgagacagtctttttttttttttttttgagacagagtctcgctgtcgcccaggctggagtgcaatggtgctatctcagctcactgcaggctccgctctgcccccctccccggttcacaccattctcctgcctcagcctcccgagtagctgggactacaggcacccgccacctcacctggctaattttttgtattttaatagagatggggtttcaccgtgttagccaggacggtctcgatctcttgaccttgtgatctgtccacctcggcctcccaaagtgctgggattacaggcgttgagtcttgctctgtcacccaggctggagttcagtggcacaatctccatgcactacagcctcctcctcccgggctcaagcaattctcgtgcgtcagcctcccaagtagctgggactacatgcacacaccactaagcctggctaatttttgtatctttagtagagatggggtttcacccttttggccaggctggtctcgaactcgtgacctcaggtgatccacttgggattacaggcgtgagccactgtgccaggccaacttaatactcactcctattgtgtgccaagccaaatctcaagagtggctgagctcttctgggaatggggaacacagcaataagcgaaacagacattctggaggtggccagtctaacgtcaggactgctctgagggttacagagacttccctttttcttgctaacaccggatcrgcactgggaggccacaccaaacgacacagtatgctacaacaaacagaagcccttgggatcccaccaatgattatcctcaagaaaagattaatgaatatactcctgaggaaatgagcctcttgtcttgacatacttccaagcccagattttaccaggatgaccagctgtgccccccaacccagggtccctcaccccagacaaaaggccagttactcacgatcttttcataatactcccgtctccgctccgccctcttcttgtagtcgaccatcatgcctcgaagcttccgctcatgcttccgagcctcgtgccacattgtggtgaggccaagcctggggcctcaacctgagggatgaagggaccaggaaagtcagatggtctgtgaaacccgtatgggcagaatcaaagtcatctaacaagttggtggcagagtcgatcccaaacaacacatctcttagcttcagggagcagaagtgaagctgcagaacagtatgccagatgttcaagtccatccctaacaacttcgatctagaagcttgggcattctgaaaaaccctcaggtgattctgaggtgagcatcactgggaaaggggtgtcctagattccacgcgctggagtcgggaatgaaaggttttgaaacatcagcagtgtttgaagtagggtcagaaggcaaaccctgagcacttaaggctggagctcaagagaaagagaagaactgaaaaggctcccactaggggccatgcgtggggttgggtatgagtctgggtggtagagggataaggagaataaggatgaaggcaggtggaggaaatcggagaaagcttttaagggaacagtgcagttgtatgaaggtggaggtcgaggacaggtgaagggcgtggcggaagatgaagatgctagagggagtgggaacacggggagggagtgttgcaaggagaccagagtgaagctgaggtctaaagatgggatctagatggcggggtggggagagcatccaaagaaaaagagcgtagagcctgagagaggcggagctggctgacaggagggcgtgggctgagcttgggggcagggcttgcgggaaagggcggagaccgaaggtttggacggggcttgtggatcgcgtcgcggcctgaggatttgggctgggttttttttttgttgtttttttttttgacaagggggcggggcctgtgataagctgctgggccgaaggccgagttcgacgcggcaacttctggcccacagccggggcacgggctcggcctgaggcccgtcaggcctaatggggtgagggacgagcgatcctcggggccgggacgcagcagaagcccacagcagcatggggagagcctgaggaaagggagaagctgggctgaggcctgcccgaaaaccgggaggtcgagccgcagcctgcactcaccggctggtcgccgcctcccaccgctgcgctcgcgcgcggcccgcaccggaagcggaaatgaaaggccgcgctagggggagggggcggagcatggtggagggccgcgcagcgcacttccgccgacgagagaggcgggtcctagagtcgagaggggc

SEQ ID NO: 74164 - DNA, 2526 bp, Homo sapiens
caaggatacacaggagttaaataggtgagggggggtaatataggccaaagccctgtggtggcagaaatagaaggccagtggagctgtccgagtatgaagctgagtggtcagaccacaagggtcttttaggccagggatagtttggtcttccccgcaaaaacaactgaagcatcagacaggagagggaagtggtcaggtttcacttaatattcactcctttttttttgagacagtctttttttttttttttttgagacagagtctcgctgtcgcccaggctggagtgcaatggtgctatctcagctcactgcaggctccgctctgcccccctccccggttcacaccattctcctgcctcagcctcccgagtagctgggactacaggcacccgccacctcacctggctaattttttgtattttaatagagatggggtttcaccgtgttagccaggacggtctcgatctcttgaccttgtgatctgtccacctcggcctcccaaagtgctgggattacaggcgttgagtcttgctctgtcacccaggctggagttcagtggcacaatctccatgcactacagcctcctcctcccgggctcaagcaattctcgtgcgtcagcctcccaagtagctgggactacatgcacacaccactaagcctggctaatttttgtatctttagtagagatggggtttcacccttttggccaggctggtctcgaactcgtgacctcaggtgatccacttgggattacaggcgtgagccactgtgccaggccaacttaatactcactcctattgtgtgccaagccaaatctcaagagtggctgagctcttctgggaatggggaacacagcaataagcgaaacagacattctggaggtggccagtctaacgtcaggactgctctgagggttacagagacttccctttttcttgctaacaccggatcggcactgggaggccacaccaaacgacacagtatgctacaacaaacagaagcccttgggatcccaccaatgattatcctcaagaaaagattaatgaatatactcctgaggaaatgagcctcttgtcttgacatacttccaagcccagattttaccaggatgaccagctgtgccccccaacccagggtccctcaccccagacaaaaggccagttactcacgatcttttcataatactcccgtctccgctccgccctcttcttgtagtcgaccatcatgcctcgaagcttccgctcatgcttccgagcctcgtgccacattgtggtgaggccaagcctggggcctcaacctgagggatgaagggaccaggaaagtcagatggtctgtgaaacccgtatgggcagaatcaaagtcatctaacaagttggtggcagagtcgatcccaaacaacacatctcttagcttcagggagcagaagtgaagctgcagaacagtatgccagatgttcaagtccatccctaacaacttcgatctagaagcttgggcattctgaaaaaccctcaggtgattctgaggtgagcatcactgggaaaggggtgtcctagattccacgcgctggagtcgggaatgaaaggttttgaaacatcagcagtgtttgaagtagggtcagaaggcaaaccctgagcacttaaggctggagctcaagagaaagagaagaactgaaaaggctcccactaggggccatgcgtggggttgggtatgagtctgggtggtagagggataaggagaataaggatgaaggcaggtggaggaaatcggagaaagcttttaagggaacagtgcagttgtatgaaggtggaggtcgaggacaggtgaagggcgtggcggaagatgaagatgctagagggagtgggaacacggggagggagtgttgcaaggagaccagagtgaagctgaggtctaaagatgggatctagatggcggggtggggagagcatccaaagaaaaagagcgtagagcctgagagaggcggagctggctgacaggagggcgtgggctgagcttgggggcagggcttgcgggaaagggcggagaccgaaggtttggacggggcttgtggatcgcgtcgcggcctgaggatttgggctgggtttttttkttgttgtttttttttttgacaagggggcggggcctgtgataagctgctgggccgaaggccgagttcgacgcggcaacttctggcccacagccggggcacgggctcggcctgaggcccgtcaggcctaatggggtgagggacgagcgatcctcggggccgggacgcagcagaagcccacagcagcatggggagagcctgaggaaagggagaagctgggctgaggcctgcccgaaaaccgggaggtcgagccgcagcctgcactcaccggctggtcgccgcctcccaccgctgcgctcgcgcgcggcccgcaccggaagcggaaatgaaaggccgcgctagggggagggggcggagcatggtggagggccgcgcagcgcacttccgccgacgagagaggcgggtcctagagtcgagaggggc

SEQ ID NO: 74165 - DNA, 960 bp, Homo sapiens
tagggcatcagaaaaactcccctctccagggccccagagtgccaggcacaggcagaggagtttgagcgggtaattgggacacatctcaagcagatttatttagcccttcccgttttatcctgagcaacatctccgctgccaggacgatcccactcgccgtctcatggtctcagcctcctggtccaagccattccctgtgggccagggtgggtgggagccagcaagggtggcagcgggagggttaagttcacatccacgcctgctgtctcctctgaaggtgtgaaataacaatatcggccgggcacggtggctcacgcttgtaatcccaacactttaggaggccaaggccggcagatcacctgaggtcaggacttcgagaccagcctggccaacatggcaaaacctcatctctactaaaaatacaaaaattagccaggcatggtggtgcggccctgtagtcccaactacttgggaggctgaggcaggacagtcgcttgaacccgggaggcggaggttgcagggagccaagatcrcgccactgcactccagcctgggtgaaatagcgagactccgtcttaaaaacaaaccaaaaaaatggtgacatctattaagtgcctgctatgtgccgtgtgctactctaagaactgcatgtgattaaactcaactagaagccgctcatggatatttattgattgacttacacgctggtctgcatagtggttaacacggagtgggttgaattgcccattaagattgctgtttgctcaactttcagaaggatgtgctatgtgtccgaactatgtaaaccaagattaaccttattatagtctgagggaaaaatatggaaaacatgcaggaaaaaagaagttggtgtgccctgggaagaagaatatcattctcagtggccccacaacagttagggtgatctgtgccctacatcctttcccctcccccagctca

SEQ ID NO: 74166 - DNA, 960 bp, Homo sapiens
tagggcatcagaaaaactcccctctccagggccccagagtgccaggcacaggcagaggagtttgagcgggtaattgggacacatctcaagcagatttatttagcccttcccgttttatcctgagcaacatctccgctgccaggacgatcccactcgccgtctcatggtctcagcctcctggtccaagccattccctgtgggccagggtgggtgggagccagcaagggtggcagcgggagggttaagttcacatccacgcctgctgtctcctctgaaggtgtgaaataacaatatcggccgggcacggtggctcacgcttgtaatcccaacactttaggaggccaaggccggcagatcacctgaggtcaggacttcgagaccagcctggccaacatggcaaaacctcatctctactaaaaatacaaaaattagccaggcatggtggtgcggccctgtagtcccaactacttgggaggctgaggcaggacagtcgcttgaacccgggaggcggaggttgcagggagccaagatcgcgccactgcactccagcctgggtgaaatagcgagactccgtcttaaaaacaaaccaaaaaaatggtgacatctattaagtgcctgctatgtgccgtgtgctactctaagaactgcatgtgattaaactcaactagaagccgctcatggatatttattgattgacttacacgctggtctgcatagtggttaacacggagtgggttgaattgcccattaagattgctgtttgctcaactttcagaaggatgtgctatgtgtccgaactatgtaaaccaagattaaccttattatagtctgagggaaaaatatggaaaayatgcaggaaaaaagaagttggtgtgccctgggaagaagaatatcattctcagtggccccacaacagttagggtgatctgtgccctacatcctttcccctcccccagctca

SEQ ID NO: 74167 - DNA, 960 bp, Homo sapiens
tagggcatcagaaaaactcccctctccagggccccagagtgccaggcacaggcagaggagtttgagcgggtaattgggacacatctcaagcagatttatttagcccttcccgttttatcctgagcaacatctccgctgccaggacgatcccactcgccgtctcatggtctcagcctcctggtccaagccattccctgtgggccagggtgggtgggagccagcaagggtggcagcgggagggttaagttcacatccacgcctgctgtctcctctgaaggtgtgaaataacaatatcggccgggcacggtggctcacgcttgtaatcccaacactttaggaggccaaggccggcagatcacctgaggtcaggacttcgagaccagcctggccaacatggcaaaacctcatctctactaaaaatacaaaaattagccaggcatggtggtgcggccctgtagtcccaactacttgggaggctgaggcaggacagtcgcttgaacccgggaggcggaggttgcagggagccaagatcgcgccactgcactccagcctgggtgaaatagcgagactccgtcttaaaaacaaaccaaaaaaatggtgacatctattaagtgcctgctatgtgccgtgtgctactctaagaactgcatgtgattaaactcaactagaagccgctcatggatatttattgattgacttacacgctggtctgcatagtggttaacacggagtgggttgaattgcccattaagattgctgtttgctcaactttcagaaggatgtgctatgtgtccgaactatgtaaaccaagattaaccttattatagtctgagggaaaaatatggaaaacatgcaggaaaaaagaagttggtgtgccmtgggaagaagaatatcattctcagtggccccacaacagttagggtgatctgtgccctacatcctttcccctcccccagctca

SEQ ID NO: 74168 - DNA, 552 bp, Homo sapiens
cctaccttctgccaccttcatctctcacctccacactgtctccccttttctatcctggcaccccaaaaatccatttccttatggcagccaaacaaatctaagcctaagaaaggagtcttagaatgccaggttcgtcacacctctgtcctgctcataaatctgccatggctccccagtactcacagacagtctgagctccttaaccaacaggcaatagtctgtgtacctcactttcctcatctacacaaggatagtgttgggggtcatggggttatcagatggagggctgggagcattgggtagatgtggaatcaatacraggaggctcaggaatgggtggggctgggctaacacattctttcctcctgcagcctccctgcccctgctcatggactctgtcatccaggccctggctgagctggagcagaaagtgccagctgccaagaccagacacacagcttctgcgtggctgatgtcagctccaaactctggcccccacaatcgcctctaccacttcctgctgggggcatggagcctcaatgctacagagtt

SEQ ID NO: 74169 - DNA, 756 bp, Homo sapiens
tgactctccttctctctgtctattcacagatgggattgtaaaatatattttggcctagctcacagatgcaatggtgattctcgtacctcaaaccatctagtaggagagatgctgtcttttatagctaggcctagtgttgtagttatgatcctgggtcttcttttttttgtataaagtcatagagaattgtcactttcttgcatactatataaatttcttgtagtacagagagtgtcattccagggttcagcacacaggtgaaattgtggctctcatgtgtacaccccaccaattgttaggattgtcaccctcacacatggatggagaccactggtgagaccctgaatttcacacagacacagtccacagttaaaattgtaactgtcatatgtgaacatccagccaaagttggaatgatgacttatttctaaacccagttcattggcatgtgggaattctatctgaatctgtgaaaattttatctgggcttagggccagagtgaacacagtttacaggaggaatgaaagctctcatgcaccaatccaattcattggtgagattttcactaccatacttagacccaacatagaaaatgtggtgactctcatacctagaactgggacctgtgcaggattgttaattcattactggaatttcctgcgggtrtgattgttacatatgcctatgttcagcacctgagtggtttgatgttgctgtctgggcccagtccaaaggtaagattgtgatatatcact

SEQ ID NO: 74170 - DNA, 536 bp, Homo sapiens
tatgcatgagtgtggtaatcttctgagaactttctgcaagtagaagactcaggaccttacccattgccctaagcccagctacaagaatcaacacctcttctattggctaaatccaagtatatgagagtcatcattgcatctgtgagcttgatccagaaataagtcatcatctcacacattgctgaatttacataggacagtcacaactctaactgtggaycatgtccacatgtgagattcaggacctcaacagtgggttctgtccatgtgtgagagtgacaattgtaattgtcaggtgggtgtgcctgtgggatgcacaatctcacctgtgtgctgagtcctgttaggacactctctgtgtcactcaaggatgttatgggatatgcatgagtgtcatcatcttctgtgacattaccacaagtaggaaacagaagaccttacctattcccctaattctagccatgagagtcaaaatcttttctgtttgttgggtccacatatgagagtcatcatcacgcctgtgagctaggcctagg

SEQ ID NO: 74171 - DNA, 536 bp, Homo sapiens
tatgcatgagtgtggtaatcttctgagaactttctgcaagtagaagactcaggaccttacccattgccctaagcccagctacaagaatcaacacctcttctattggctaaatccaagtatatgagagtcatcattgcatctgtgagcttgatccagaaataagtcatcatctcacacattgctgaatttacataggacagtcacaactctaactgtggatcatgtccacatgtgagattcaggacctcaacagtgggttctgtccatgtgtgagagtgacaattstaattgtcaggtgggtgtgcctgtgggatgcacaatctcacctgtgtgctgagtcctgttaggacactctctgtgtcactcaaggatgttatgggatatgcatgagtgtcatcatcttctgtgacattaccacaagtaggaaacagaagaccttacctattcccctaattctagccatgagagtcaaaatcttttctgtttgttgggtccacatatgagagtcatcatcacgcctgtgagctaggcctagg

SEQ ID NO: 74172 - DNA, 3060 bp, Homo sapiens
agccacaggttggatggtgacaaatttctgtacccaactcacttgcacaatgaacctggccaatagaagatattttgactcttgtacctaggcttagggcaacaggtaaggttttgggttttctgcttgtataaatgtcacagaggattatcacactcacttatattgtataatgcccccagggttgtaaagaaagtgccattacataactcagcacaaagttgagattgtgactctcagatgcacactcagccaacagtagagaattgccattcatacacacggacagaacccactggtgaggtcctgaattttactcacagatgcaatccacagttggagtttttaatgtcatgtgtacmtctagccaccactgggatggtgactcatatctgaacccaactaagaggcagagcaatgacttttatacctggacacagccaatatgagaaatgttgactctcatacctgggagtggggcaacaagtaaaatcatgcatttatacagcactaatgtctcacaggggattgtgagtctcacccaaacaatgtgcagccctctggtggtacagagagtgtcataagaggacccagaacacagctgagattgtgattctcatatacacttccagcccacagtaaaaattgtcatcctcccacatgaatacagacaactcttgagcttctgaatctcacacctggacacagttgaaagttggaattataatccttacatgtagattttgtctccaggtagacggtaactataggaccaggattcattatacctgtgaggctttgcctctgataccagtacacagcctaccggtaaaattgagggtctcatgcatgaatctagtccgtcattgagattgtgactcacgcatttggatgcaactcatgggaggtgttgactttcccacctgaagctggaacatatgtggaactgtgaatctcatccctggaccttcccacaagtgtgattgtgacatatacttctgcataacccctgagtgattttactttcctgcctgggcacagccctcaggggagattgtgacatatacctgggtcaagcacctaggtgatgtgattctcttgcttgagccctgcccacagagggtattgtgaaatatcactgggtcatctgactcttatcattagcttgggccctgcccagaaagccatttgtgagatatcactgagcccagtacctcggtgatgtgactgtactgcctgggccctgcccacggtaggtattgtgacatacctctgaactcgttgcctaggtgatgtgacttttttcttttgcctgcattctgccccttgaaaatggactgtgacataccacaggcccaagtacttagatgatatgattctcctcttctgcctgggtcatggcaacaggaggatgaattattttagcaagcccagattacaggtgatgtaagcttctatcctaggccctgcccacaggaggtattgtgatttatctctgtggccataatttaggtgctgtgactcttctattctctctaagccatgccaatggagggggattgaaatatatctttgggacagcataaaggtaatgtgaaattcctgcccgggccatgcccatagaaggcattgtgacatatcactggtcacagcatgcaggtaatttaactctccttcctgggccctgcccacaggggatattttaacatatctttagcccagcacttaaaatacgtggctctcttagcttctttcttttccacaagtgggattttaacatataagtgcacccagtacacagatgagactgtgactcttgtatgctcatccagccaacagttatgagtgtcattctcacacatgaacagagacctctagtgaggtcctgagtctcgtatatggacacagcctacagctggaattttgactgtcatatgtagatccagccacaggcgtgatgttagctcacaggcaccatgatgactcttataactagacccagccaataaaatacatgttgacccttatagctgagcttaaggaaactggtagggtcctgagtctcctacctgtatgaaagtcacggcagattatgaaacttattcatattgtataatgccccctggcagtacagagttttattacaggggccagcacacaggtgagattatgactttgatatgcagacacagctaacagtattgtcgccttggtgctaggcccagcagtacaactcaattcttttttaggactgtgagccctaggagcagcaaaagtcacatcaactaggtgctgggtccagtaatatgtcaccatatcccttgacaagacagcacaggtaagacagtcacgtcaactaggtgagagtgagaacctggataatagaggagtgacatcagcttggtgctgggcccagtgaaatgtcatgttgggtataagtacatgagtcatgatctcaatggtgtactggatccatgcatgacagcatcaatctgtcctgtggactgtcttcttagtagagtgacagcctcacaggtttgctgaatgttggttggagagtcagaaacccaaatgtgaatgaaatctgcatatagagtcaattcactatttttgactggctttgggtgtgagattcagaacctcaagagtgggctgtgttcaggtgggatgatgacagtctatactgttggctgggtgtgcatatcactgtcacaatctcagctgtgtgcagtgctcaggcacaaaagaagagtcaaatcacctagatgaataattaagatattttattctcttttattagtcttttctaatacttctatgggcaaagccaatgcaggagagttgcatcccctatgttttggacacagccatatgtcacaatacacaatgtatgcagggcccaggcagtagagggaagtcaaataacctaggtgctggacccagtggtatatcacaatacctccttggacagagcccaagcagtagaagagagtcacatcacctcagtgctgtgtgcaaaaatgtgtcacaataccaactgagtggacggctcactcatga

SEQ ID NO: 74173 - DNA, 3060 bp, Homo sapiens
agccacaggttggatggtgacaaatttctgtacccaactcacttgcacaatgaacctggccaatagaagatattttgactcttgtacctaggcttagggcaacaggtaaggttttgggttttctgcttgtataaatgtcacagaggattatcacactcacttatattgtataatgcccccagggttgtaaagaaagtgccattacataactcagcacaaagttgagattgtgactctcagatgcacactcagccaacagtagagaattgccattcatacacacggacagaacccactggtgaggtcctgaattttactcacagatgcaatccacagttggagtttttaatgtcatgtgtacctctagccaccastgggatggtgactcatatctgaacccaactaagaggcagagcaatgacttttatacctggacacagccaatatgagaaatgttgactctcatacctgggagtggggcaacaagtaaaatcatgcatttatacagcactaatgtctcacaggggattgtgagtctcacccaaacaatgtgcagccctctggtggtacagagagtgtcataagaggacccagaacacagctgagattgtgattctcatatacacttccagcccacagtaaaaattgtcatcctcccacatgaatacagacaactcttgagcttctgaatctcacacctggacacagttgaaagttggaattataatccttacatgtagattttgtctccaggtagacggtaactataggaccaggattcattatacctgtgaggctttgcctctgataccagtacacagcctaccggtaaaattgagggtctcatgcatgaatctagtccgtcattgagattgtgactcacgcatttggatgcaactcatgggaggtgttgactttcccacctgaagctggaacatatgtggaactgtgaatctcatccctggaccttcccacaagtgtgattgtgacatatacttctgcataacccctgagtgattttactttcctgcctgggcacagccctcaggggagattgtgacatatacctgggtcaagcacctaggtgatgtgattctcttgcttgagccctgcccacagagggtattgtgaaatatcactgggtcatctgactcttatcattagcttgggccctgcccagaaagccatttgtgagatatcactgagcccagtacctcggtgatgtgactgtactgcctgggccctgcccacggtaggtattgtgacatacctctgaactcgttgcctaggtgatgtgacttttttcttttgcctgcattctgccccttgaaaatggactgtgacataccacaggcccaagtacttagatgatatgattctcctcttctgcctgggtcatggcaacaggaggatgaattattttagcaagcccagattacaggtgatgtaagcttctatcctaggccctgcccacaggaggtattgtgatttatctctgtggccataatttaggtgctgtgactcttctattctctctaagccatgccaatggagggggattgaaatatatctttgggacagcataaaggtaatgtgaaattcctgcccgggccatgcccatagaaggcattgtgacatatcactggtcacagcatgcaggtaatttaactctccttcctgggccctgcccacaggggatattttaacatatctttagcccagcacttaaaatacgtggctctcttagcttctttcttttccacaagtgggattttaacatataagtgcacccagtacacagatgagactgtgactcttgtatgctcatccagccaacagttatgagtgtcattctcacacatgaacagagacctctagtgaggtcctgagtctcgtatatggacacagcctacagctggaattttgactgtcatatgtagatccagccacaggcgtgatgttagctcacaggcaccatgatgactcttataactagacccagccaataaaatacatgttgacccttatagctgagcttaaggaaactggtagggtcctgagtctcctacctgtatgaaagtcacggcagattatgaaacttattcatattgtataatgccccctggcagtacagagttttattacaggggccagcacacaggtgagattatgactttgatatgcagacacagctaacagtattgtcgccttggtgctaggcccagcagtacaactcaattcttttttaggactgtgagccctaggagcagcaaaagtcacatcaactaggtgctgggtccagtaatatgtcaccatatcccttgacaagacagcacaggtaagacagtcacgtcaactaggtgagagtgagaacctggataatagaggagtgacatcagcttggtgctgggcccagtgaaatgtcatgttgggtataagtacatgagtcatgatctcaatggtgtactggatccatgcatgacagcatcaatctgtcctgtggactgtcttcttagtagagtgacagcctcacaggtttgctgaatgttggttggagagtcagaaacccaaatgtgaatgaaatctgcatatagagtcaattcactatttttgactggctttgggtgtgagattcagaacctcaagagtgggctgtgttcaggtgggatgatgacagtctatactgttggctgggtgtgcatatcactgtcacaatctcagctgtgtgcagtgctcaggcacaaaagaagagtcaaatcacctagatgaataattaagatattttattctcttttattagtcttttctaatacttctatgggcaaagccaatgcaggagagttgcatcccctatgttttggacacagccatatgtcacaatacacaatgtatgcagggcccaggcagtagagggaagtcaaataacctaggtgctggacccagtggtatatcacaatacctccttggacagagcccaagcagtagaagagagtcacatcacctcagtgctgtgtgcaaaaatgtgtcacaataccaactgagtggacggctcactcatga

SEQ ID NO: 74174 - DNA, 1130 bp, Homo sapiens
cgtgttctcggtcctgttaggacactctctgtaccacccgagggctttatacattatgtatgaaagtcacaatctactctgacacatttgtactgatatggacctgtgattgtacccgtggccctaagcccaggtatgagtcaacatctcttcaattaggagartccagattggaaagattttacctgcctataagctgggtttattaaacagtcactaacccaacagtggccaggtgttcacatatgacagtcacaattttaactttgaactgtgtctacttgtgagtttcaggacttcaaaattggaccctgtccatgtgtgtgggtgactttaaaggttggcaggttgcacacacaaaaaacaatctcatatttgtgctgtgtcctgtgatgagtttgtaccacttgacggctttatactgtatgtgagggagtggtataactttttttttgtataaatgtcatcatcatatcagtgatctcagcaaatatatatatcaacatccctcctgtgtgtagggaatgagtaagagagttacgtcaccttggcactggcccaggaatatgtcacaatattttcggagggcaaagaccaggcaggagagtcacatcaccttgatgcttagccaggaatatgttacaatccccacctgaaagcagggcacaggtggcagagttgcatcacctgggtgctgagccatgttatatcccaaaactttttgtggccaaggcccaggcaggagaagcatgtcacctgttttctgcgcccagtaataggttacaatcttcccagtagaaaaaagtagagtcactactttttgctgatgaacgcagatatgtcacaatttccttgtagatagggtccagacataagcctctaatctaattccactaatccacactaattccaactctggctctgacagcttatgacttatcatatacttctcatttctgttatgccccaggaatgagtttctcagtgacttttgaagcagtttgtccacctgctttggatgaacattattatcctcttgaatccaagggctgctgttttgttaagcatatgaagtcttcccttgagtattcctctcacttccgttcactttcttctgtagcctccatttt

SEQ ID NO: 74175 - DNA, 753 bp, Homo sapiens
aaaccctgtctcttactaaaaaaaaatacaaaaattagccaggcatggtggtgcaagtcccagctactcaggaggctgaggcaggagaattgcttgaacccgggaggcagaggttgcagtgagccaagattgcaccactgcactccagcctgggcgacagaggggactcaaaaaaaaaaaagaggctgggtgccgtgggtcacgcctataatcccagcactttgggaggccaaggtgggtggatcgcttgaggtcaagagttcgagaccagcctggccaacatggtgaaaccccgtctctactaaaaatacaaaaaattagctggatatggtggcacatgcttgtaatcccagctatttgggaggctgaggcaggagaattcttgaacccgggaggcagaggttacagtgagctgagatcatgccattgcactccagcctgggcgacaagagtgaaactctgtttcaaaaaaaaaaaaaagaaatgttgacaatggggcccacatatcgtggwgagtgccactacccctaacactgtcactgtcttattctctgccagtcctagttcaggtagcctctctcattccacatcccacatgagaagccttctgaacaggcagctcaggggagtcctctgggtgagggaaattaggaggcctaggctctggctctggctctggctctgcccatgaccagctggaggaccctgggccagccctttcccccatgaccctcagtgtgcctatctggatcc

SEQ ID NO: 74176 - DNA, 719 bp, Homo sapiens
gaacaagcttaggcccaccctgagccttcaacttggacacaggctcagtcatagcagtccctggcccctgcagtgctttataaacactgcagtagcaaagtccacaatcaactctgtgacaagtcaacaggccgagataatttgaaaacgtggagaaaaaagaatggtcaaacaaaaccaaagggctttgactcatgcctttcctctttccttctctcagggaaataaagtcacaccccctgctctcactcctgcctggaggcttccaaaaaaagggctcccttgttagccttcccttcagcccccatgaatatcacccagcattcaagcccagcctctcctctccctttgagcacatttcctaaagtctcaaataaatgtcaagtttagtgagtgctgatattctatgcccctaatgtttacttcaagtattattacctttcttcttttgyccggggccatttccaaacaagggctggagccaggcgccccagcagctgggcaaacacacttcagggctccttccctcctgtggctcctgtttctcaaaccctctgagacctaaagctctgggggtctcttcccccaacccagttccctcccctttagaccagaacaactaagccatggccaccttcccgatggacacacaaggaggcctggtgtcacccactgctccaggggcggtgttctcggcaggggagctgcctcttgtcccg

SEQ ID NO: 74177 - DNA, 489 bp, Homo sapiens
taattacaaaaaacaaaacaaaacacagcaacatcaacaaattttaaaacttaacatttcttggccctgttatacttgattcctggaaggtagagttttgttttttgtttttgttttttttttgagacagagtctcgcgctgtcgcccaggctggagtgcagtggcacgatctcggctcactgcaagctccgcctcccggggtcaggccattctcctgcctcagcctccctagtagctgggactacaggcgcctgccaccacgcctagctawtttttttgtatttttagtcgagacggggtttcactatgttagccaggatggtctcgatctcctgacctcgtgatccacccacctcggcctcccaaagtgctgggattacaggcgtgagccaccacgccctgccggaaggtagagttatagcttttttttttctgctctgtcacccagtctggagtgcagtggcgcgatctcggcttactgcaacccc

SEQ ID NO: 74178 - DNA, 680 bp, Homo sapiens
tcccgtgctagcctaaagcaggaggcggagctgggtgcagctgtctccagctgcatgtgttcagggctgggggacccgggcctggaggagcccagggatgtcatggctctgcctggagagtcagggaggggttttgtggaagaggggaaggagaagctggaatttatagcaagttagggtaggtcagaagagagccttcctcctcatcagaatcctcccatcctcagctcttccctccccgcagcagccaccagagggcacctgtgagcccctgagtcaggtctgtcccttctttacccacagccctctatggctcccacctcccttggggtccaagcccaagtcttccccacggccctgcacaacctgcctcggtctcctaaatgcttactgaggccagatcagtggtcctggaccccaccccgacccccagctcccccagctcccccagctctgaagaccaccatttctgtccttgcagatagaccacatgcagtgtggggtgacccccaccgccccggccygccctgggaaggtgcacgagctgtggggggaatggggccagcgccctccggagagccgccgccggagccaggtgagaccgcaggagtgccaggtgaggtggtgtctgccaccaggccgcggaggaagagggggagcgacggactgcgggtcagccc

SEQ ID NO: 74179 - DNA, 631 bp, Homo sapiens
tgaatgtcaggcgtgttgtctcctggctttacaaatggggaaaccgaggcccagaagagccgaagaacgaaggcaggagagtgagatggattcgtgtatggtgrgcactagggtcgggccgcgggcttcagggttaaacctggggcaaatgacttcaaccctctgtgcttcagtgaccacttctgggcaatggggatggctcagttttgacctcagaggcctgtgaccaggaaagcatggaagtgggaggtggagcacctaagacagtgccgagaccatgtcaagaggtccagaaatggctgccctggccgggcgcggaggctcacgcctataatcccagcactttgggaggctgcagcaggcagatcacctgaggtcaggtgttcgagaccaacctggccaacatggcaaaaccctgtctctactaaaaatacaaaaattagatgggtgtggtggtgggcgcctgtaatcccagctactcaggaggccgaggcaggagaatcacttgaacccacgaggtggaggttgcagtgagccgagatcacgccactgcactccagcctgggcaacagagtgagactctgtctcaaaaaaataaaaaaagaaaagaaatggttcctttttttttttt

SEQ ID NO: 74180 - DNA, 593 bp, Homo sapiens
ttctwggtcaaatgtctagagacattttggtcatcaagattaccagtgggcgctccttgcatggagtgagcagaggccagagatgctgctcaacaccctgcaatgcccaggacagaccctatgccagagaatgacctggccccaactgtcactgctatactctcttataaggtactgatgctgagaaaccgtggcctgggtctacaaggcttcagacaccagctgggtccctctgggcatctaagcaaatttttttttttttttttttttagacagagtctcattctgtcgcccaggctggagtgcagtggcagcatctcagctcactgcaacttccgcctcccgggttcaagagattccccggcctcagcctgtagagtagctgggattacaggtgcccaccaccacatctgggtaatttttatatttttgtagaggcagggtttcactgtgttggccaggctggtctgacctcctgacctcaggtgacccaccctcttggcctcccaaagtgctgggattacaggtgtaagcgtggctaatttttgtagtttgggtagaggcggggtttctttctttcttttttttttttt

SEQ ID NO: 74181 - DNA, 593 bp, Homo sapiens
ttctaggtcaaatgtctagagacattttggtcatcaagattaccagtgggcgctccttgcatggagtgagcagaggccagagatgctgctyaacaccctgcaatgcccaggacagaccctatgccagagaatgacctggccccaactgtcactgctatactctcttataaggtactgatgctgagaaaccgtggcctgggtctacaaggcttcagacaccagctgggtccctctgggcatctaagcaaatttttttttttttttttttttagacagagtctcattctgtcgcccaggctggagtgcagtggcagcatctcagctcactgcaacttccgcctcccgggttcaagagattccccggcctcagcctgtagagtagctgggattacaggtgcccaccaccacatctgggtaatttttatatttttgtagaggcagggtttcactgtgttggccaggctggtctgacctcctgacctcaggtgacccaccctcttggcctcccaaagtgctgggattacaggtgtaagcgtggctaatttttgtagtttgggtagaggcggggtttctttctttcttttttttttttt

SEQ ID NO: 74182 - DNA, 660 bp, Homo sapiens
aaggtgagaccaggaagggcagtgggcccagacctggcagggcccagaacctgacattcatcaaatctccccaccagaataagagtcccagaggagcttggtggagagatttccaccacatctttggaatctgttggcctttttgaagactagaaagctagaggaacaagtttagttggatctaaagtagaacccgctggaagtgggtggcttagargcccaaaatggaaccacagaaaagatatagcaggactcagctcttcaacacatgagggaggaagataacaaaaaatagttgatgttgccatttgcagcaagagacacagcgattttaggcttctgacctcccttcccctgcaaaataccaaactttgagtctgtttcatattgtctgggtaaccagcctatgtccccccttcaccataaaagccagtgagttcttagccccagaaaccccctttgtcatgtcaggggctgagttctgacccctcctgtcctgcagagccttactttgtccatgcggtggagtggggcagccatgtctacttcttcttccgggagattgcgatggagtttaactacctggagaaggtgaggccggtgcagtggggcatgaagttgagaggctctgatcatgcgaagtgagggggcagaggtgga

SEQ ID NO: 74183 - DNA, 660 bp, Homo sapiens
aaggtgagaccaggaagggcagtgggcccagacctggcagggcccagaacctgacattcatcaaatctccccaccagaataagagtcccagaggagcttggtggagagatttccaccacatctttggaatctgttggcctttttgaagactagaaagctagaggaacaagtttagttggatctaaagtagaacccgctggaagtgggtggcttagaagcccaaaatggaaccacagaaaagatatagcaggactcagctcttcaacacatgagggaggaagataacaaaaaatagttgatgttgccatttgcagcaagagacacagcgattttaggcttctgacctcccttcccctgcaaaataccaaactttgagtctgtttcatattgtctgggtaaccagcctakgtccccccttcaccataaaagccagtgagttcttagccccagaaaccccctttgtcatgtcaggggctgagttctgacccctcctgtcctgcagagccttactttgtccatgcggtggagtggggcagccatgtctacttcttcttccgggagattgcgatggagtttaactacctggagaaggtgaggccggtgcagtggggcatgaagttgagaggctctgatcatgcgaagtgagggggcagaggtgga

SEQ ID NO: 74184 - DNA, 556 bp, Homo sapiens
actacatttcacaagccttccttcctctcagtccatgttgattaagaccaactaacggctgggctccggagactgggcagggcacaagactgacggagtgcagtggctcacgtctataaccccagcactttgagagactgagaagattccttgagcccaggagtttgagaccagcctaggtaacatacaaaagaattttttaaattagccaggcatggtagcatgtgcctgtattcccagctactcgggaggctgaggcaggagaatcgtttgaacccaggaggtggagcttgcagtgagccgaaattgcatcactgcactccagcrtgggtggcagagggagactccatctcaaaaaaaattagccaggcatggtggcacgtgcccgtagtcccagctacttgggaggccttggacccatggtcaaagctacagttagctatgattgcaccacactgctccaagctgggtaacagagcaaaatgctgtctcaaaaaaaaaaaaaaatgacggggcatggtggctcacacctgtaattttagcagtttaggaggcc

SEQ ID NO: 74185 - DNA, 599 bp, Homo sapiens
tttctttctttctccccttccttccttccttccttcctccctccctccctcccttccttcttctcttgtcaatttgtttgtttgtttgagatagggtgtcactctgtcacccagggaggagtgcagtggtacaatcatggctcactgtggcctccamctcctgggctcaagtgatccttccacctcagtgtccccagtagctgggagcacaggcaagccccaccacgccaggctaaagggtggatgttctatcagcgcaacttgctctcatccattgcgctctttccacagggacacatgtacctctcattctttaatcttctgtactgcagtccactttacgaatacaccacaatttatttatccattctcttttcaatagacatttcagttgttcctctcccagcatcccactttttttcactacaaagaatatgaatagaccaggtgcagtggctcacacctgtaatccctgcacttcaggaggccaagaacaggaggaatgcttgagcccaggagtttgagaccagcctgggcaacacagcaagacctcactcatctctaaaaagatagacaaaattggctgggcatggtggcac

SEQ ID NO: 74186 - DNA, 599 bp, Homo sapiens
tttctttctttctccccttccttccttccttccttcctccctccctccctcccttccttcttctcttgtcaatttgtttgtttgtttgagatagggtgtcactctgtcacccagggaggagtgcagtggtacaatcatggctcactgtggcctccacctcctgggctcaagtgatccttccacctcagtgtccccagyagctgggagcacaggcaagccccaccacgccaggctaaagggtggatgttctatcagcgcaacttgctctcatccattgcgctctttccacagggacacatgtacctctcattctttaatcttctgtactgcagtccactttacgaatacaccacaatttatttatccattctcttttcaatagacatttcagttgttcctctcccagcatcccactttttttcactacaaagaatatgaatagaccaggtgcagtggctcacacctgtaatccctgcacttcaggaggccaagaacaggaggaatgcttgagcccaggagtttgagaccagcctgggcaacacagcaagacctcactcatctctaaaaagatagacaaaattggctgggcatggtggcac

SEQ ID NO: 74187 - DNA, 2720 bp, Homo sapiens
atataacatgtaagaataacctttatgatttcataaccttgctttctgtgtgtgtacccacagaaacatactgtaaaagaagccgttttccctccttccccctcctttccttccttctttccttccttccttccttcctccctcccacaactggtgacaacattttgtgaacacagcttcaaggcaagcctccaagcatccctattgtggctcaattgctactcttactccctcccatgtagaaattctagagctccaacagcttgtgaatcttgagaagaattcgagtatttatataaaatgcaaagtgtattctttgaggtgttttaggcaagggagggccatggttcagattttcctgtaagaaattccagtccgtgttctgtgtggacaactgatgaaagtcaagcatagtgggtgcaggtggcgggaaatgggtcccgggggaagagcacaaggggtgggcagagggagaaccacactcctgagtctcagctgactcaggagccacccggagaagtacctggcagccccggcggctggatgtccagggtgtgacagggagtcagggattccccagtttctgtctcagggaactgggactgggtggtgggggcttctttccttgagaagaggaatatatctatataatttttttcttttgaggcagagtttcactcttgttgcccagtctggagtgcggtggctcgagatctcagctcactgcaacctctgcctcccgggttcaagccattctcctgcctcagcctcctgagtagctgggatgacaggcgcccgccactgcacctaattttttgaatgtagtagagacggggtttcaccatgttggccaggctggtctcgaactcctgacctcaggtgatccactctccttggcctcccaaagtgttggcattacaggcgtgagcctccgtgcccagccgggaggaatatttaaatatacactaggtgttggttttctggaagttcctcctatgaaagaattttttttttttttttgagacagagtctcgcactgtcgcctgggctggagtgcacaatggcatgatctccgctcactgcaagctccacctcctgggtccaggcgatcctcctgcctcagcctcccaagtagctgggattacaggagcccaccactatgcctagctaattttttgtatttttggtagatacgggatttcactatgttggtcaggctggtcttgaactcctgatcttgtgatctccccacctcggcttcccaaagtgctgggattacaggcrtgagccactgtgcccagccaagaagtttttgattaagccatggtgttcttctgggaagagagaataaggttgtcagtatttcactgttccacagaaaggtagaacaacagccttatacactaacttgaccacatcatatgaaatcctcagagagaaatgaaaaagataaaaagattggatgtagaattattggatccaagagaataaaaggtgttaacgcttttaatttaaaataccagtttttacttcatattcagacagtctggaagtaatcatatttttattttgctatttattttcttggccttgtaaatacacatatatgcatacataaaatgtactacgtgctatcggaatcatactgtagttcaggagtgtgaaaaccatggcagttagagtgctaagaatgcttttcacattttaaaagatttatttatttattgttttgaggcagagtctctctctgtcacccaggctggagtgcagtggagtgatcttggctcactgcaacctctgcctcctgggttcaagcgattctcctgccttagcctcccgagtagctgggatcacaggcattccccccaacacctggctaatttttgcatttttgtagtttcagtaaagacaggttttcactgtgttggccaggcaagttaaaaggctttttagaaaaaggagaggacaaagaggaggatgaggagggaggagaaggaggaaggagaggaagaggaagaagaggaagatcagtaggaggaaggggggcagaagggggaggaagattaggaggaggagaaggaaaatgaggaggagggggcggaagagtaggaggatgaaggggaggagaaggaggagaaagagggggcagggggaagagagggaaggggaggaagattaggatgtggagtaggaaaatgaggaggaggggaaggggaggaagagaaagaggaggaagaggagggggaggaagaaggggaggaggaggaaaggcagggaaaggaggaaaagcagggaggagtaggaggaggatgccctttgccccttactgactcagccctcacctcctgtgagcccttgctgccaggggccactggcttccctcacacaggcatgtccccacaaactcccacctccaagctcttggccttgctggttcctctcctggaatgctcgtccctctgctcccttccctcacttctcgtcatggtctcgaggccctcccggacgcctacctaaaacagcctgcccaggtcactccgtctctcccccgattgatgtttcttggccacgctcatcgtgctgtgactttatgtgttctgtgctcaccatgtgtactccccactagaatggaaaccccaaggaggcagggatctctgcctagggctggttcctgtggcacccacccttgccctgctgagccctcagtccgtattggtcga

SEQ ID NO: 74188 - DNA, 969 bp, Homo sapiens
ggcatgtgccatcacacccagctagtttttgtattctttaactgcaacattgtatttcatggtacattaagccataagttaactagttactgtttctggatatttttaaaatttttagtctggtttgtttgctgtgataaataattctgcagggaacacctttgtgtccatgtcattgtgccagtgtgtttctgtggaataaattcctagaagagggactgctgatgagtggcagtcatttctgttattagccgttgtgtctcactgtttcctccttccaccggctcaccctgcagcccctgcagatcaagtcagtagtggcaccagagcatgtgaagggctacatctacgtggaggcctacaagcagacccacgtgaagcaggccattgagggggtgggcaacctgcggcttggctactggaaccagcagatggtgcccatcaaggagatgacagacgtgctcaaagtggtgaaggaggtggccaacctgaaaccaaagtcctgggtccgcctcaagcggggcatctacaaggatgacattgctcaggtgcccggggcggggtggcatgggggtcagggtccctccattctgttctcccttcctttccttttgtccttcccaccctctttgtgctgcagagaatagaaycccactcagatgagttgaagcagagcctgggttttgtgagcacacaggaaacggttggctgtcttctgtgcacattcccaggcgtgttgagtaaaggtctgaaggatcggagggcgtgaggcatgtggagctcttggggaggagtgttgtaggcagcaggagtggcctgtgagataggatggcacagtcactggctacagcagggatggcgtgagatgagttagggagctcacgagggcctgcggcccattggagagctttggtgtttactggcgtaggatgggagggctgtaagggacacaggcagacttcaatgtta

SEQ ID NO: 74189 - DNA, 562 bp, Homo sapiens
ctcctggcccaatatattgtgttttttttaagaggcaggcccatgtattgcactaaaaatactgtattaaagtaggtagccwtgtaagtttactgttttatactggattcattagccgggagtggtggcctgtgcctgtggtcccagctactcaggaggctgaggtgggaggatcacttgagcctggaagttacaggctgcagtgagctgtgatcccgccactgcactctagcctggatgacagagtgagtctccatctctaaaaaaaaataagttaaaatgagaaagtaaactggagtcaatatattcacttaaaccagggtttttcacccttggccctattgacgctttggaccagataattatagaggactgccctgtgcattgaaggatttttgcagcatcctgggcatctgcctactagatgccagtattgcgataaccggttatatctcccggcattgccagatttcccaggggtaggcagatagacaaaattgttcctagttctgaaccactgttttatggtatatggatgtgtttatatatttattgtggttta

SEQ ID NO: 74190 - DNA, 1044 bp, Homo sapiens
ctgaagaaattttctgtgtagttggggagaaaaaaaaatcaaaaagccaatgtagcccatggattgcaagtttctgcctcctgtcctcaccttacctggctgtgcccggctgccagataccaagatttgtttttaatcatggaagaaaaagccttacaaagtgatgacatcacaggtgtgagccaccgtgcctagctatatttttctatttttagtagagatgaggtctcactatgttgcccaggcttgtcttaaactcctgaactcaaacaatcttttcccccggcctcccaaaatgttgtgattacaggcatgagccagcacacttgacccaataagtacttttaaaaatatggcagagagcactttgggagtctgaagcaggaggactgctttagccgaggaaattgagatcagcctagacaatataacaagaccttatctctacaaaacaacaaaacaataaaaacagagaaggcttcttctatgtgaccttctacactttcaaccagtgacttttctgcaggtaaacactgtataagttcattttatctttacacatatttgcatgtgtatatgtgattttatggacctttagaaatagtattgcatgtgtgtttcctggatgacaccgtgtgttcaatggttagaagagcaggctcagagtacctgtgtaaccttgggcaagtytctcgacttctctgactcatttgttactcagggataataacgtgaataaaattagtgctgttctttgaatgcaataataaagtagataaactatttcaagaggagtaaaaattttacaaaagataaaagaagatatttagatatacattcaagattcaaacataatatttttttaaatgtcatgacattaaacttgaaaatttagatgaaattatctattttccaggaaagtatgtgacaaaaattgattgtggaagaaacatgagataaatagaaaaatcaaaaattatgtttttaattttacacccataaaaagcacatatattataaaataacagctttataagtttttac

SEQ ID NO: 74191 - DNA, 478 bp, Homo sapiens
ccagggtcccttgaaagattgcatctttgatctctgcctgggtggtgggaacctgagcattctctgcagcaacatccatgcctacgtgagtgcttgccaggcggctggaggccacgtggagccctggaggaatgaaactttctgtcgtgagtgagggagagccggaggggcagggaggggagagcttgaggcacagaaggggtagaccctgggcyttgcagcccctccctccccagggctctgatcggcaccccctccttgcagccatggaatgccctcagaacagtcactacgagctctgtgcggacacctgctccctgggctgctcggctctcagtgcccctctgcagtgcccagatgggtgtgctgagggctgccagtgtgactccggcttcctctacaacggccaagcctgcgtgcccatccagcaatgtggctgctaccacaatggtgtctactatgaggtaggaacctagtc

SEQ ID NO: 74192 - DNA, 661 bp, Homo sapiens
actggagcccaggaggcagaggttgcagtgagccgagattgtaccattgctctccagcctgggtgacagagaaagactccatctcaaaaaaacaacaaaacaaaagaaaatgtaaaagcaaactataggaagtgggtcctagacatgaggactctgtaatgtggtcttgcctgcagtaaccctcagatccctggcacagactgggtagatgtggagggagcggccatgctttacaatgggcagcccctcaaggtcctcctccctcttctgtccccagacccgtgccacggcgtgacatgccggccacaggagacatgcaaggagcagggtggccagggcgtgtgcctgcccaactatgaggccacgtgctggctgtggggcgacccacactaccactccttcgatggccggaagtttgacttccagggcacctgtaactatgtgctggcaacaactggctgcccgggggtcagcacccagggcctgacacccttcaccgtcaccaccaagaaccagaaccggggcaaccctgctgtgtcctacgtgagagtcgtcacygtggctgccctcggcaccaacatctccatccacaaggacgagatcggcaaagtccgggtatgtgtggcaggatggtcccctgaggtccccgggagggcaggag

SEQ ID NO: 74193 - DNA, 535 bp, Homo sapiens
ctcctgccctcccggggacctcaggggaccatcctgccacacatacccggactttgccgatctcgtccttgtggatggagatgttggtgccgagggcagccacggtgacgactctcacgtaggacacagcagggttgccccggttctggttcttggtggtgacggtgaagggtgtcaggccctgggtgctgacccccgggcagccagttgttgccagcacatagttacaggtgycctggaagtcaaacttccggccatcgaaggagtggtagtgtgggtcgccccacagccagcacgtggcctcatagttgggcaggcacacgccctggccaccctgctccttgcatgtctcctgtggccggcatgtcacgccgtggcacgggtctggggacagaagagggaggaggaccttgaggggctgcccattgtaaagcatggccgctccctccatatctacccagtctgtgccagggatctgagggttactgcaggcaagaccacattccagagtcctcatgtctaggacccacttcct

SEQ ID NO: 74194 - DNA, 1148 bp, Homo sapiens
caaactcctggcctcaagtgatcctcccaaagttctgggtgtgtgagccacggcaccagaccctctttacccttaatagttaatctcctattaataagtaagtgattctttaattaaactttcctcattcaaatggccatacgctttctgtctctcgactagatgctgagtgatataccccccatttctgggagtccccattatcctgctcatcagccctgagagtcttagcccccactccttggtgctggagctcccattctcttatccttagggggaggagagttctctgctcttcaccctaagaaatgagccctgggggtggctgtgtcccagatttagtctgggggattcccacatcagagactatacccccagaaatcctgatcttccagttaagaggggtccccatatccaatgtcctgccttggtgaggtctccgtgcgtgagactcagaactctgctctctgtccctgcccctgggatcccagtctctcccctgccctttggtgctagtgtctgaaccccaagtccaatcccacacatcagtgttccgctcatgatggccccctaggctgctgctcttgtattctaaagtcttataggagcctgacctcttcacttacatagtctacggctgctttcatgccacagtggcagagtgagtagctggaacgagaacctacagcctgcgagcttaaacatttaccatgtagcacattagagcaaaggcgcgcctgtccctgccttataccgagggtctctgacatycaccctgagaaaactatctctgagggtccccacagcctggattttccctaagggtccctacctcccaaagtaggtggccctggccctgtgaaacctggtctagggttccccaggtctgcaacctcaatcattagtcctgtacacctcccgccatggacaccccagttacactaccctcagccccagagtccccatcctccatccctagtcccatcagccccagtcccagcccagcccagcccagcacctttggtgacgcagctcaggatgcctccggagggctggcacacctgccccggcttgcagctgtgttcctggcacaccacgactttacccgcatggcacgtgcactgctgccgacagttgtcaatgaggac

SEQ ID NO: 74195 - DNA, 1148 bp, Homo sapiens
caaactcctggcctcaagtgatcctcccaaagttctgggtgtgtgagccacggcaccagaccctctttacccttaatagttaatctcctattaataagtaagtgattctttaattaaactttcctcattcaaatggccatacgctttctgtctctcgactagatgctgagtgatataccccccatttctgggagtccccattatcctgctcatcagccctgagagtcttagcccccactccttggtgctggagctcccattctcttatccttagggggaggagagttctctgctcttcaccctaagaaatgagccctgggggtggctgtgtcccagatttagtctgggggattcccacatcagagactatacccccagaaatcctgatcttccagttaagaggggtccccatatccaatgtcctgccttggtgaggtctccgtgcgtgagactcagaactctgctctctgtccctgcccctgggatcccagtctctcccctgccctttggtgctagtgtctgaaccccaagtccaatcccacacatcagtgttccgctcatgatggccccctaggctgctgctcttgtattctaaagtcttataggagcctgacctcttcacttacatagtctacggctgctttcatgccacagtggcagagtgagtagctggaacgagaacctacagcctgcgagcttaaacatttaccatgtagcacattagagcaaaggcgcgcctgtccctgccttataccgagggtctctgacatccaccctgagaaaactayctctgagggtccccacagcctggattttccctaagggtccctacctcccaaagtaggtggccctggccctgtgaaacctggtctagggttccccaggtctgcaacctcaatcattagtcctgtacacctcccgccatggacaccccagttacactaccctcagccccagagtccccatcctccatccctagtcccatcagccccagtcccagcccagcccagcccagcacctttggtgacgcagctcaggatgcctccggagggctggcacacctgccccggcttgcagctgtgttcctggcacaccacgactttacccgcatggcacgtgcactgctgccgacagttgtcaatgaggac

SEQ ID NO: 74196 - DNA, 587 bp, Homo sapiens
tgggacagccccaagagagaaggagcagaggtcagcagaaaccccctgcagctgttgagaatccagacacgctgctcactgcagaggctgcaccacatctggtggctgcagggggacttgccgtggctccttctagggaggtgcattagtcagggttctccctagaaatggaatctccttagatgggaatttcttcttacctstaatgcatgtatgtatggagacagaaagagacagagagaatttattatgggaattggataatgtgatgatggaggccaggaattcccatgatataccatctgcaagccagaaaccagggacgctggtggtgtaaattcagcctgagtccaaaacggcctgagaacctggagttctgagggcaggagaagacggatgtcccagctgcagaagagagagcaaattccccctttcctctgcctttttgtcctgttcatgccctcaatggatttgatgacacccacccacataaggaagggcaggtcttccttcctcagtttaccttcaaatgctaatctctcctgaaacacagacgcacacagaaataatgttagaccagatatctg

SEQ ID NO: 74197 - DNA, 754 bp, Homo sapiens
cagttccaccctcctggtgggaataggagacacagacttcgccagacacacagcacacctgtaactcaggcagaggcaaagyccgtggccattgtatgcccgcccccttccccacccacacgccttctcgtctgctcagcctctttggggcacctgggcccagaccctctccagatgaaatccttcccttgagtgtggcgtgctgagatctccacctggaggcatccccagctggtagatcagtcctgggaagcggaggagaccaagaaaggggccttgcctgggacagacgtgggccaagccggggctggaatctgggactccaggcggaggcccctttcctttgtttcagctgagcccagcacctctgagtgtctgcgtctgagttgggtgtctgagcgtctgcctcctgcaaatccctggcgggtgtgcgtctggcgggtggtgtatctgtgactcgtaggacctcagccctggtcttcccagctccaggccaccctgggcctcgctcagctgagcacgcagcctggtggggctctgaatcccacctcggcccatgccatgctagcctgagttccctctgtgcacctgcgggcgtcacctccccaacccttcggctttgccaacacctggtccgcctgggagtccagagctgggttgcaaatctctaccccgctccaagcttcctctcattgcttcctgccaggcggagattgtgaagcgtctgagcggtatctgcgctcagattatcccc

SEQ ID NO: 74198 - DNA, 511 bp, Homo sapiens
tgggtgagagagttagactccatctcaaaaaaaaaaaaaaaaaaagttagctcttctgagagtgccccaggttcctttcatcctcagtacctttgcacagtccctgtttcttttttctttttcttttcttttgtgtgtgtgtgtgtgtgtgatggattcttgctctgttacccaggctggagtgcagtggcatgatcttggctgactgcaacctccacctcctgggtkcaagcgattctcatgcctcagcctcctgagtagctgggattacaggcgtgcaccaccacgcccggctaatttttgtatttttagtagagacgggtctccctatgttgcccgggctggtctcgaacccccggactcaagcaatccgcccgtgtcaggctccgagtgttgggtttacaggtgtgagccactgtacccagcctgcactgtccctgtttctgtgtggtacgttctctcttcagagagacgtgaaagatagttctacttcagagtggatacactggga

SEQ ID NO: 74199 - DNA, 511 bp, Homo sapiens
tgggtgagagagttagactccatctcaaaaaaaaaaaaaaaaaaagttagctcttctgagagtgccccaggttcctttcatcctcagtacctttgcacagtccctgtttcttttttctttttcttttcttttgtgtgtgtgtgtgtgtgtgatggattcttgctctgttacccaggctggagtgcagtggcatgatcttggctgactgcaacctccacctcctgggtgcaagcgattctcatgcctcagcctcctgagtagctgggattacaggcgtgcaccaccaygcccggctaatttttgtatttttagtagagacgggtctccctatgttgcccgggctggtctcgaacccccggactcaagcaatccgcccgtgtcaggctccgagtgttgggtttacaggtgtgagccactgtacccagcctgcactgtccctgtttctgtgtggtacgttctctcttcagagagacgtgaaagatagttctacttcagagtggatacactggga

SEQ ID NO: 74200 - DNA, 511 bp, Homo sapiens
tgggtgagagagttagactccatctcaaaaaaaaaaaaaaaaaaagttagctcttctgagagtgccccaggttcctttcatcctcagtacctttgcacagtccctgtttcttttttctttttcttttcttttgtgtgtgtgtgtgtgtgtgatggattcttgctctgttacccaggctggagtgcagtggcatgatcttggctgactgcaacctccacctcctgggtgcaagcgattctcatgcctcagcctcctgagtagctgggattacaggcgtgcaccaccacgcccggctaatttttgtatttttagtagagaygggtctccctatgttgcccgggctggtctcgaacccccggactcaagcaatccgcccgtgtcaggctccgagtgttgggtttacaggtgtgagccactgtacccagcctgcactgtccctgtttctgtgtggtacgttctctcttcagagagacgtgaaagatagttctacttcagagtggatacactggga

SEQ ID NO: 74201 - DNA, 3645 bp, Homo sapiens
tgcataacttcaattctgtatttattactggtttcaaaatattccttatccacaaattggaagaaacaggaaacagaccctcaagtgtctttcacaatgcaagacctgccaatttcataacttgctcagccaccctcataaaagaaactaggcacactggtgaccccatctcacacacactcaaaggagacagaaggtcttcctctcactgtcctccagtacatgtggctcctccttcttaaaaagcaaaacaacaaagaaataatacctcccagagggtatgacacttgaacttggacaagtgtttttttttttgttgtttttttttaagatggaatctcgctctgttgcccaggctggagtgcagtggtgggatcttggctcactgcaaggttcgcccacgccaattctcctgccttagcctcccgagtagctgggactacaggcgcctgccataacgcctggctaattttttagtatttttagtagagaccaggtttcaccgtgttagccaggatggtctcgatctcctgacctcgtgatccacctgcctcagcctcccaaagtgctgggattacagacgtgagccactgtgcccggcctgatcttcaagtttttagattcgattagtaatcaagtcaattcaatttttgcccttacttggctcatatcacatattatggacctcttaggatcactctatgcaaattctgaggcaaaaccttgagtttccatattatgtaaaataacagtaacctgttatgaaacaacagtagagctgttcttaaggcattgaccctgcccaaagcacaacttaatttcccaaacagttatgagtttagtttcaaaatctcttcaaaaataggcttcatatgagtctttgaacagggctcagcactttcagtgaggttaaaagtgggtgtccacaaggaaggtttcaagagataagaaagccccccattaatcaccacacagaggactagcagaatcatagagtccatgcccaccctttttcacttctagaatatctcccaccatgtgaaaaaccacctctcttccacatgctatccttttcaatgagaacatggtaaacatttcatcctcagcaggatttgttcagggtttcactctactttcccactgggtctcagtctgccagctttctgctttagtgtctttttgaactccccctctttaagggcacagaaatcctcatcagtcagttcatctactaatatgacctctgcaagcccctcactctacaaaacaccattcctgaccatcacagaagggaaggtctaacttatgtggtcaaatattagctaaaatgtgttgttcaataggtaagctgtaatttaattctggaaaccagacccctgtcctggcacacttacactttttccttggtgtgccaatcttttcccttgatgtgcctaatagggaggactctgaacacaggaggttttcagttagtatttgtttggtgaatggatcatgtctctatggtaggtagtctggcatgggtcaggagcacagccctggagacaaacttaatagtttgagttctaatagctggctgcctctctgggtctttatatcctcatctgaatcctgaggataataattacatctacacctctctgtcgaagaattgtgatgaatgaaaaagatgatgcataaagaaaaattaggatgctggtagctagctctcagtaattgttagatctgatgacatttgctcctactgctatcaagctgagtgtgtttctatgtataaaagctaacaaccaacaagctgagtgtgtttctatgtataaaaactaacaaccaacaaagggtgaaaattaaagtaaaacttgattgttaacttgtcagactggagtcctatggattaacaggtctagcacaggtagaagagaaagaaatacttaacttctggtttatttgatttaatgcaaatacaggaaaacctggataagaaatgcttttcaccaaagtttgtctgcaacttgaatgctgtaggttaaactaatttaaaagtactctagacagattcatttgtaatataagcatgtcatagtttctggtgtttaggactggatttatgtttatttagttttctgaagagacacaagagacagcccaagctgctatcggaattcctagagacaagttgggcaaatgagcccttacaaaattccatttatggtaaagataataatgaaataaataattactgagaccagctccatcagsgagaccctaacccagcagtgctagaggaattaaagacacactcacagaaggtgtgaagtgggaaatcggggtctcacagccttcagagctgagagcctcgaacagagatttacccacatatttattaacagcaagccaatcattagcattgtttctatagatattagattaactaaaagtatcccttatgagaaatgaagggatgggtcaaaataaagagatgggttgggctacgtatctgcagcaggagcatgtccttaaggcacagattgctcatgctgttgtttgtgggttttttttttaagagacagaaaaattttattaatgagtatgcatacaaataaacctagacaaccatgaagagtccctcacagtttcatgtattcacaatattatttcatctctaaagccatcagtgaacgactagttctgctacttgttaaagttgtgcaaaaattctcaatttaaacatacagtcttaattataccagtgttctaatgtcccaagactgattgtaggtaatggaatctcaacaatatcttaaataataatttaaaaaactcaatatgatctacaagactaatatatttaaaggaaaataattcacattcactaaattcctcccctttcttccttcttccctattctccctttcacttgccaatttttttctacagtatatgatgatggccaaattacccaatatcaactgtttcaaaaaagaaatgttattttagaagataccatacagcaagagacttataggtgtaacaccactgaaattatttactaagccctggccgggcatggtggcttacacctgcaattccaatactttgggaggttgagcaggcagatcacttgaggtcaggagttcaagaccaccctgggcaacatggtggaaccctgtctctactaaaaatacaaaaattaagtggacatggtggctatcccagctactcaggaggctgaggcaggagaactgcttgagcccgggaggcggaggttgcagtgagccaagattgtgccactacattctagcctggatgacagaaccagactctgtctcaaaagaaaaaaaaattatttaccaagctgtgttttcatagtgttttttaattctctgaactgcttcagtatctgcagtgttttttttacatttcaaagacttcccacatgtaacatttcattggaattaccactttacatcatagttgatatggaaattattacatctaacagatgaagaaaatgtagacataaagaaccattcgctctaatgtcatccagtgtaactgctaagagttaggattagactcaagtcctattcctaatcctgtatactaccctaaactcctaagcccccatacattgtacttcacagaatg

SEQ ID NO: 74202 - DNA, 688 bp, Homo sapiens
atcctaccttgtgactttatttaacctaattacctcctaaagactcttatctccagatacagtcgtattgggggttggggcttcaacatatgaattttggggataaggggacacaattcagtccatagcataagacctctgttccctgcctgcagcaatttctggcctcttgtttccargtggttaaactgatgctggggagcaaaacctttaaggacccttttggccgtgccctggtgtattagaccattttcttttcttttcctttcttttttttttttttttttgagatggagtctctctctgttgcccaggctggagtgcaatggcatgatgtcagctcactgcaacctccgcctcctgggttcaagtgattctcctgcctcagcctcccaagtaactgggattacaggtgtgtgccaccaggcccagctaatttttgtatttttagtagagacagggtttcaccatattgaccaggctgatctcgaacttctgacctcatgatccacccacctcagcctcccctgctgggattacaggcgtgagccactgcgcctggcctattagtccgttttcacactgctgtgaagaactgcctgagactgggtaatttataaaggaaagaggtgtaattgactcacagttccacatggctagggaggcctcaggaaacttacaatcatgg

SEQ ID NO: 74203 - DNA, 688 bp, Homo sapiens
atcctaccttgtgactttatttaacctaattacctcctaaagactcttatctccagatacagtcgtattgggggttggggcttcaacatatgaattttggggataaggggacacaattcagtccatagcataagacctctgttccctgcctgcagcaatttctggcctcttgtttccaggtggttaaactgatgctggggagcaaaacctttaaggacccttttggccrtgccctggtgtattagaccattttcttttcttttcctttcttttttttttttttttttgagatggagtctctctctgttgcccaggctggagtgcaatggcatgatgtcagctcactgcaacctccgcctcctgggttcaagtgattctcctgcctcagcctcccaagtaactgggattacaggtgtgtgccaccaggcccagctaatttttgtatttttagtagagacagggtttcaccatattgaccaggctgatctcgaacttctgacctcatgatccacccacctcagcctcccctgctgggattacaggcgtgagccactgcgcctggcctattagtccgttttcacactgctgtgaagaactgcctgagactgggtaatttataaaggaaagaggtgtaattgactcacagttccacatggctagggaggcctcaggaaacttacaatcatgg

SEQ ID NO: 74204 - DNA, 617 bp, Homo sapiens
ctttcagagattctgatctttgtgtaaggcagcacacaatgaagtattttaaagacaaaatatcagcaaattctcaaagcaactttgagaagcagacatcattttgaaatcccattctacagataagtgcgctgaggctgcagtagcaaagctggagtttgaacctagatctgtgcgagtccaaaggctaaattctctctctctctctcttttttttttttttttttttgagacagagtcttgctctgttgcccaggctggagtacagtagtgcgatctcagttcactgccacctctgcctcctgggttcaagcgattctcctccctcagcctcctgagtagctgggattacaggtgcctgccaccatgcccagctratttttgtatttttagcagagatggggtttcaccatgttggctaggttggtcttgaactcctgacctcaagtgagcctgcctcggcctcccaaagtgctgggattataggcacgagccaccacacatgactcaaaggctaaactcttgagagtgggccatgctgccccaagaagctccactggatttatttgaaggtccttgccaaatcagttggggaaaaaaaggcagattcagcccat

SEQ ID NO: 74205 - DNA, 561 bp, Homo sapiens
agtgacctttccccaggacccctccccagagctgtctgaggatccgcaggagactatggatctgttctccagggatgctcatgggtccctttgagagcagcggctccctctcagagctaccagatgaggaaactcctcccgctccagccacatggggacacccccctccccgttgccccttaatcytgatggttcttctgtgccccatcacccaccgcaggaggcctgggctctgggaggggcctgtctctccctcctccattggctactgctgtttccatgacaaccgttttcaggctgttgcagggacagagcattttttgttataagaagcccactgaaaacgagactatgcatgttgtttgtttactggggtctttcgtgactctgggagacaggcctcacacagagagccaggcttagtcagtgggactgggtgggcctccctctggggcatcaggctccagatctagggtaagtttgatgtttaggacccagtgtgggccaggtgaaacagagactgagtgaaggttgtgcggcgggctgggcctgatgcagggg

SEQ ID NO: 74206 - DNA, 1375 bp, Homo sapiens
tggctgcgcggccagctggtaggcctcccgggggtggaggctgtgaccctctagaaggaccctgtgtatccatacaaaagacagaagtctcatggccaggacagctgtgtccctccctgatccgccctgggggctttccccagggctggcctggtcgtgccagggcgtatcacccagcaggcagggtcaccctggctggggctgctcctgcccgcttgactggcccgccaggatcgcagccctgagaagctctcatcaccgcgaaagtgtgtcacagggcaggctccaagtagcctgctcctccttcacctgggcatggaggtgtcaccagggcctgggacagctctgctggcctcttgtctaccgccccataggtctgccatgggagcgtgttcagatttatccaaaggaggtctcttgtaacagaaagagcagtggtgcctgcccctgccagggccactgagcagccaggcaggaagcaaaagtcagagggggcaccccgcaggttgccatacagggcctcactcccaccctggaggggacgctgctagccccatcttacagccctcgaagccaacgcagatagacacccacgctgcccagcctcagggtctcagcctattactgttattactctttatatagatggagcaaatctccacttcctccaaaggaagatgtccttgcttcagggtccctgcatccccaggcaggctgtgagtctccaaaaccaagacccagggctgtcctctgcctggtcccctccatgactgtgcagtgaaattcactccattctggtttttagctacttttttttttttgagacagggtctcgctctgtcacccacgctgcagtgcaatggcacagtgtgggctcactgcaagttccaccgctaccctagctcaagggatcctcgcacctcgggrttccaagtagctaagagtacaggcatgcaccaccacgcctgctaatttttgtatttttggtagagacgaggtctcaccatgttgcccaggctggtctcaaactcctgagctcaagccatgttgcctcggcctcccatagtgctgggattacaggcgtgagtcaccacttccagcctttagctactttcattcaacaaatatatgcacgtggctgggagaggtggctcatgtctacaatcccagtactttggggggccaacgtgaaaggatcgcatgagcccaggagtttgagaccagccttggcaacatagagaaaccccatctgtacaaaagattataaacattagttgggcgtggtggcatgtggttgttgtcccaggtactcaggaggctgaggtaggaggatggcttgagcacaggatgtcaaggctgcagcgagccatgactg

SEQ ID NO: 74207 - DNA, 1091 bp, Homo sapiens
ttgacccctgaacttcactcctgtcttctgcaaagtgggaggaataagtgggccttctcagatcgaatgggtgaataatcggaacaggcttagcttgagcctgactcgtagccagcatttgccattgggagctcttgaatttggtttatttgtcttaatatagacagaagacattttgctgctgaaaaatggtaaaagaacagtaaaccctggcttgacttggaacatcattccagagtagtgtggaaacctccgttttgatgcttgctttttccttttcctcataggatggtccagcagtttggggtggattttgagaagaggatcgagggctcaggagatcaggtggacactctggagctctccgggggcgcccgaatcaatcgcatcttccacgagcggttcccatttgagctggtgaaggtagtgccccccggggctgggccctcccgtctctggtcaggcaccctcctgctggcctcaagccaggcctcctcccaggcaataaggtctcaagctcctacctctaggcctgaacttgtggtgggcagggtgtggcctggatgaggtgtccccatggscttccttttctgacactcagctttgaggttttgggcagaacaatatgaaaacccctgtgtttttcctctgacaaaagccaatatacattctttgcaaaatacatagaaaatacagataaatttacatgagaagatgtccctagcatgtcattgaagaaggaaaaaataggcattggagccagcatgtgcaacatagcactgagctgatatatacaacatccttatgtatgaaactgaacatggatgtctgtctacaagtgtttctttgtatttgcaaggatgtttgcaaaaatgtcagccctgggtgctaggatttgggacttctttttccgtgtgtgtgtgtgtgtgtgtgtgtgtgtgtgtgtgatttgcttgaagttttatactgtttacaatgagcacatagcattttttattaaaaaaacaaacagttttttaaaatcagaggagcaagaccaaatgcagtggctcacgcctataatccgtgggaggccaagggggcctgatcac

SEQ ID NO: 74208 - DNA, 413 bp, Homo sapiens
cattagaggatctgctgcccggtcaaccttcagcccaatggccaggccacagccctcccatctcaacggccccyagagcccccagattgcctaagcccccaacctgcagcggcccaaacacaacatcgtcccaacccggcaccctcccttcctgctccctgggccccgcggccagccctggatggagtggagggaggcggccaccactcccagggtccctaccgtgagctgaatgccggggtcccggcctctctgctgtggcccctgccgtcccgcccggtaggggctgtagctggcacgagcccccagccgccgccccagcatgagccccgagcacagggcgggtccctgtccccctgcggcccggcgtcagctccgggtctcacccgggctccactcacccccgagggctg

SEQ ID NO: 74209 - DNA, 651 bp, Homo sapiens
tattttccctactgagattcaaagctatacaaaggaaaggactcttctgcctttttttttttttttttggtttttaactcattatgaaatccccactgctgagcacaatgctgaacacctttgaagtaattaataaataacgactaaattactgctgtgtagataaggcagataggattaggttctttcaacagtgaggaaatcagagctcattctaacttaagggtttagaagtatcagaggcaggactctgacccgggtctccagactcacaaaacacaatacactataaggtstacaatagcactgacagatattttttaaaggttcctctcatctcactatactaacacaaatgttttcagttctacaatctacatttccccctccaatttttctcctcttttttgactgccttgatggtttcagtgggtcctggttaagcctgtctttaagtttctaatcaaactaatccaagtgaatttggcttctgaccttgctctcacatatttgccatctctaaatgattgatgtctgcttgatccctgttggaaaagcgtctgaagatatgatccagaaaatctatagttgcaaatctagcataattttaatgaatcgtggtcagaatagtaagaagcattgcacagaagg

SEQ ID NO: 74210 - DNA, 651 bp, Homo sapiens
tattttccctactgagattcaaagctatacaaaggaaaggactcttctgcctttttttttttttttttggtttttaactcattatgaaatccccactgctgagcacaatgctgaacacctttgaagtaattaataaataacgactaaattactgctgtgtagataaggcagataggattaggttctttcaacagtgaggaaatcagagctcattctaacttaagggtttagaagtatcagaggcaggactctgacccgggtctccagactcacaaaacacaatacactataaggtgtacaatagcactgacagatattttttaaaggttcctctcatctcactatactaacacaaatgttttcagttctacaatctacatttccccctccaatttttctcctcttttttgactgccttgatggtttcagtggstcctggttaagcctgtctttaagtttctaatcaaactaatccaagtgaatttggcttctgaccttgctctcacatatttgccatctctaaatgattgatgtctgcttgatccctgttggaaaagcgtctgaagatatgatccagaaaatctatagttgcaaatctagcataattttaatgaatcgtggtcagaatagtaagaagcattgcacagaagg

SEQ ID NO: 74211 - DNA, 746 bp, Homo sapiens
tgggaagagtagggaaggttcaacatcccctgggctgctgaccaagaatgggtgagcattcagagtaacaccattcctcccccggatgatggctccctgggtagctggagaccctctgctgtctgggaacttgcttggactaactcctgaaaaccaagttgctgaagataggttcaaagtctagatttaagggttacctgtaaaaacactcgctttgacctcaggcctaagctgtgttctccagcacagctaataggagaccctaaatatgaaaggattggacactgtccttgctcattaatataatacatctgatgtttcacttgacagtcccctggttcttcaagtctgtgttcaactggataagagtttagaggggagaagagggaggagtagaactcttaaatctccaaaatgccacttttctcttcttttcttttcttttgagacggagtctcactgtgtggcccaggctagtgccatggcacaatcacagctcactgcaacctctgcytcccagattcaagtgattcttgggcctcagcctcccaagtagctgggattacaggcatgtgccaccatgcccagttatttctttggtatttttagtagagatggtgttttgccatgttggccaggctggtcttgagctccttacctcaagtgatctgcctgccttggccttccagagtgctgggatcacaggcatgagctacagtgcccggcccaaaatgtcattttcatat

SEQ ID NO: 74212 - DNA, 733 bp, Homo sapiens
taggtcattttcatcctcccagaatttgttttgatgtcacctcttcagaagaggtgctgtccctctccagtcacccttcattggcttatgtcctggttgtttccttcgtgtcacttcctatcatttgtcaccattttatttgttgttagctttttatgtttgtttccctcactagaatatgagttccatgatggcaactacatagctcttaatttattattggactccactacttaggaccatacctgcttcatgacaagcacttaataatctattcctttttttgttctttgagatggagtttcactcttgttgcccaggctggagtgcaatggagcgatctcagctcactgcaacctccaccacccaggtacaagaattctcccgtctcagcctcccaagtagcttggattactggcatgygccaccacgcccggctaattttttttgtatttagtagagatggggtttcaccattttagtcaggctggtcatgaactcttgacctcagatgatccacctgcctcagcctcccaaagtgatggaattacaggcgtgcaccaccgtgcctggcctaatctatttcttaagaaataaatgaacagatggtcttacagccaatgagagtggatggaccagtgactctctaaacgcattaatctcatcagaaataccaagtggcccaacgcttgatgatggcaggacactgccaaggaacctctgtgcaaaaata

SEQ ID NO: 74213 - DNA, 733 bp, Homo sapiens
taggtcattttcatcctcccagaatttgttttgatgtcacctcttcagaagaggtgctgtccctctccagtcacccttcattggcttatgtcctggttgtttccttcgtgtcacttcctatcatttgtcaccattttatttgttgttagctttttatgtttgtttccctcactagaatatgagttccatgatggcaactacatagctcttaatttattattggactccactacttaggaccatacctgcttcatgacaagcacttaataatctattcctttttttgttctttgagatggagtttcactcttgttgcccaggctggagtgcaatggagcgatctcagctcactgcaacctccaccacccaggtacaagaattctcccgtctcagcctcccaagtagcttggattactggcatgtgccaccacgcccggctaattttttttgtatttagtagagatggggtttcaccattttagtcaggctggtcatgaactcttgacctcagatgatccacctgyctcagcctcccaaagtgatggaattacaggcgtgcaccaccgtgcctggcctaatctatttcttaagaaataaatgaacagatggtcttacagccaatgagagtggatggaccagtgactctctaaacgcattaatctcatcagaaataccaagtggcccaacgcttgatgatggcaggacactgccaaggaacctctgtgcaaaaata

SEQ ID NO: 74214 - DNA, 1323 bp, Homo sapiens
cctcaaaagggaattttatataattttagctattgatggtcatttctaataacttgaaaatatcactctagagtatatattacacatatatataacaagatttctaaatctaggccaatttttttaaaatacttatttttaatgcctattgtcatgcatttttgcttgttaaatctgtaccttgtgtgtatgtcagatttattaaagagataaatgttaaaaaatgaaagaaacygaagacagatgttactgtctttactatgtaaagagctttcatgaatcaacatgaaagtgtatagcaactgaatataaaaagacaaagaacatgatgaagaaatttaatggggaataaatacaaatggttagactcaaacacatatgataaaatctttcatatcaattttaactataagaatgccaattacatattatattttaattattaatgaaaaagattaaaaactattttaattcctattatttcaaggacatagaagtatgaacactctcaaacatcactggtgagagtagaaattatttaaacataaacacccaaacacacagtttaaaatatgagttgaagttgtaagacttcaaaatgtttatactctttgagccaataatttgatttacagtagatgaagaaaattgagaggaatatcaaattttacttacaaggatatttattacagttttattttaaataaaaaatttaaataatttataagttcaacacaaaataaagacctggctaacacatttatgacatagtcataggatagcaatagtgtgaagactaattacaagttgaatatctcttatccagaatacttgggaccaggagcgtttcagatttctgattttttctgattttggaatatttgcatatatataatcatacaccttgggaatgggacccaaatctaaacacaaaatccatttatgttttatatacaccttataaacagagcctgaagggtaattttataaaacattttaaataatgttcttccttaaacaatgttttgatcacattttggctgtgatttgtcacatgaggtcagatgtggaatttttcatttgtggcatcatatcagcactcaaaaattttcagattttgaagcatttcagatttgggatttttaggttagggatgttcaacttgtaatataaaaacataatatagtacatttatttgcaatataccattaaggagaaaaagaatattaaaaatatagagtacgatctcaatttataaacaaatacctcctatatagctctacatataataaagctacatcacatattaaaaatccacattat

SEQ ID NO: 74215 - DNA, 2161 bp, Homo sapiens
atgtccaatacatatgatctttaaaaaaggacatggcacaaccatttgtatagtatgattcaactgaggtttaaaaaaatctgaatatatagaaaatatcttaagaaataaatcttaaatttaacagtggttatctctttggagggacacgaaccaaggatctttggaggcaatgaaacagggatttcgggttgaacttttattcttctatggtgtttgaaatttttgcagtgagaagtatttatgtataccatagaattagaatgatttaaaatgatcagtgactcaagaaaactgttagccatttgtttcaaccaaacactaaaatattggcagatatcatcaggctagttgaaactgtgaattactctctacaaaataagagtatttttgttctcttttaaaatattttaatttttgtggccggcacgaagctgatcttrgcaagagtggaaggcattctcacaggaggagaaatccatagagcaatatatccaatatattaagttgcaacagccctttatttaaggcttttggtggtatcatcatctcttaacaaaacatttttatttttccaattttaaaattctccagtggccattttgcttgatttctttcttgtctttcatttcttcatgacagtaatgcaaaacaaattttgataaaaatatcttgttcattttttcactactcaactctctgctttcaagcagagccaaggaacattgatattttgatataaaataatttttccctttgaattaaattgtttttcaaaatggaaaggatccctatttttaaaatagtacaagcatcttatgctaatttaaaaataacagatagtatgtaaaaatgcaatgaaactaaaatatccctctaatcctatcacaaagagacaggtgttagcattttggtgtatatattttgtgtgcatcagttttcctataacttgattttttttcatgtgatactccctttacccttatcatcattgatgatatcagcataagattctaccatacggatatttcatttttagacaccaaaatttctgccaggcccaactgattgccagtgtaattagcctctccctctttcttgttggcaaatcttgcctcccataatagaggccgaataacagttattcacgttctcagttttctttgcagctaaggtgtaggtatgagtccccaaactggctaatcatcgcaaataacaaagttccaggaacaggctttcctccttgatgaaaaatagacatgcttggagaaactgcccttcttcttgtctttgtgtaagatgtgatgcccggagctacaggagctgtcttgtgaccatgaggaatgaaacctaagaaaaaaactatgtcaatcataacagagttttaacaataaaagattctggatctttaatgacatttctgaactactgaacacactctagaagctccctttcagaaattcctatgggctgaaaaacaactattggttgatccactttaatcaagttattctcacctgtatccaaaagcaattcaactgatatatggttatttccaatttttcatcctctcaaacaaaactgaaatgttcattactaaatgtactaaatgtacaacgttatcaatttctccaaatgttttcctgaaataaattcttagtagtgtaattcctggctcaaagattagaataactttaaatataaattattttaagaacatcataaccagaatttatgattttattttttattcttatatttctttattgtggcagtggtttagagattaaggatcatggactaaagaggtatatgctacccatcaattaggtttctgcccactcttactacttggtctgcttaaggcagtgacttaacttgtcacttctttagttggctcatctgtaaaatgggtataaaaatatccacttcattgtgtttctgtgaggcttaaacaagttaacagctgtaaaattaatagaactctctagtgctagcatgggagcaggtgctctttcttcctctgtgtaccctcccatgctatcttagtaactgatatgtattagttgctaaatacacatttatctaataagtgaagaaatgaataataagtctgagatctttatctggacgaatattttgtcgtatttaagggtctcta

SEQ ID NO: 74216 - DNA, 747 bp, Homo sapiens
ataaatgttaccaacacatagaaataatactcaaggtgatataaatacctcgacttgatccttacatagtctatactcacatgtagcacatgcaaatataaaatatatgttttaaaaaccatagaaatggaagaaatcatagagktcatggagtcccgtcctatcccccagcatgaaatatcttaactacattcttggtaagagtttgtaagtactcaatgaagacatggtgaataaatgaaaaacagataaaagcctctagattcacattggacatttctaggaatcctcttcagaaggcagctcactctattttggacagttccaacatgcagagtgctcttttctatattaccttatggcatttattataatatcatctagatattcttcaatctatagatagagagctactgctttttaaaaaaaataactggatcactatgtcaaacttaattatccttagggtttttaagaggaaaaaaatccataaggaagctctaggaagagctacatatttttatgagttattaatgttccacgttgctttaatatgctgttatccagtccaaataatgagtacaaaaattaatgtaatccaatataaatataaatataaatacagaaaggaaatcttaacaaaatcatcctgaagactgaatggtttgggcaataaaaatcacatagatttattctgcacttcaggatatgtggataaatagcgttagtgacaatctgctaatccaa

SEQ ID NO: 74217 - DNA, 701 bp, Homo sapiens
tagattgaatcttgggatagaaatggttcatcagtggaaacactggggaaatctgaataaagtttataattcagtgaatagtattgtcccagtgttagtttttaatttttataaatgtgtcatgattatgtaagatgctcacataggagaagttgggtaagggtttactgcaactctctgtactatctttgtaacatttctatacattaaaataattttaaagcaaaaggttaacatttttaaaaatgaatcctgaatagagaaattaaaatagatcttgaatacattattaaataatcaaatgtggtttcagaaaactaagtgctaatccatcccgctttgaaagaaagatttcacctggtttctcagcctgccctggcattttgtcttcctgttgtcatagtcccactttgtatctaatctggtcccttttaccaggcttcatttcatccacaaggaaagaaaaatgcctgggtgaccatgccttacttagcctttcatattcttgatttagcaattctatttcctgaagcaaaaakgttcctctttaacctttcccatcaatgaaattaatccagcaattaatcatttctgttcttttcaagcttgcttcaaaatttcagttcctcctaagatcctatccatgcacgttcagtttaattgggtggaaaaatatctaatgtggactattaaatggatgt

SEQ ID NO: 74218 - DNA, 1074 bp, Homo sapiens
acaggaaatatcagaaaattctcatatctggttacatacttcaaattgccttattttatgtgttttatttttatttgtgtagcataaatcaatagaattttcattttctacttgtccacacaaaagcaggaaaagtaaaaggagagtctctctgtttgcctttgcatagattcgtacatgaaaaccagatagaataaaacaagggtatggtagtcagtgagttcagaggttcataaatgatcaaacctttcacctcactgtttcctttccatctctgagtatttattttaactcagagttttagtctttggccttcagtgccagaaatattcttacatgttcagataaggcactttcatccagttccaaaaatgtggagggtgggggtcagatttgaatccccacttaccctgaggtaaatatctctcattggacaaatacttggaatgtcttgactgacgtccctgcagctgacaagaggctatttggggtcttgcttttacctccaccatttcccttttctgaatttacataacagcaaagacaataaattgtgtctaggttcttcccattccctccaaagccaggctgaggacaggagggcttgcccatgttttcagcttgaccctacctgtgttaggctctggctgcccgaccatgtcagcattccaggaccatgagagaaggccatgtttgcaacccaacagraagaggagtaagccaggcattgacatcacctgacagatgcgtttctcaagtgggaaatgttattcaaggttttatcatggaaatcattgacagagaaaaggaataaagaaaaaaacgagagggagagagaaagtcagtgccaagatgggcatgttttgcaccctataaaaaaggaattaaaatgactcaacctcacctccctttctctacattccccccctcctcattcatcctttatgtctggaagtaaatgtttctgaaatactatagctaccggcagagcagcaacacataataacatggtagcaacacataaaactgtcagtcttcaaggaaaatagatggttaggttgagggggtaaatgg

SEQ ID NO: 74219 - DNA, 2024 bp, Homo sapiens
ttctatctcacattatactaaaaattaagtcacagtagatcatagacctaaaagtgaaaggcaaagcataagtttctagaagaaaaataggaaagaatcttcatgattttggagtaggcaaaggttaaacaggacacaaaaggtccataaaagaaaagattgataaaacagattttactctacatagtgcattttattctgtttaaattatacctcaataaaaagcaaaaaaggagcaaacagttatttaacctaatactaggaaaaagacaaaaattatacaggtaactacatccagagacagtgtgttccaggaaaccttacagaagctttgagaaggacacaaactataaaaaataattaaaaataaaagaatatgtacagtcagccctctgtatctatgagttttgcatccatggattcaatcaatcttggatcaaaaatatgtgagaaaaaactgcatctgtactaaacatgtacagactttttttcttgtcattattacctaaacaatatagtgtaacaactattcacayagcatatgcattgtagtaggtattaaaagtaatctagagatgatttaaagtatacgggaggatgtgcataggtgatacacaaatattacacgattttatataagtaactggagcatcctcaaattttggtatcttcaggagatcctggatccaatcacccacagatattgaggaacaactgtatatctaaaaaaaacgactgattttcacaggactctaagtagaagtggagtaagagattgaaagaaaagcctggcatacagcaaaccagtaagggcttgacagacaagtcatacaacccaacaactaagaaaatgcactcatctgaaaactggtttaaaaaaaaaaaaaaaagaaagaaagaaaaaagatcagtgtgtttaatctgccttttgtgcataaaatgtatttccagtaaccaaagagttgatgaaggaaaagtcttttatagaatttcaacaagtgcagaagaataaaataattagaaaattgccactttagctgggtgcagtggctcatgactataatcccagcactttgggaggctgaggtgggaggatggcttgagcccaggagttcaagactagcctgggaaagacggcgtgaccccatctctacaaataatttaaaacagccacttgtggtagtgtcgtggtagcgtcatggtggtgtacacctgtagtcccagctactctggaggctgaggcaggaggatctcttgagcccaggaggtccaggctgcagtaacctgtgattgtgccactgcaatccagcctgggtgacaaaataagaccccatctctttaaaaaaaaaaaaaaaaaaaaaaaaaagaccatcctggctaacactttcgaaaccccacctctactaaaaatacaaaaaattaaccaggcatggagaagggggaggaggaggaacaagtggaagaggaagaataccaccactttaatccctaatgaaataatggatctgggcaactatcatcaatgtctgatttttaaaaccattaggagaaaagttgataggaacttcataatggttggaccaggctgacagcatctgaattcacagattagtcttaaattaacaccaaaggttgttaagggtggggacagggaatgtcaaaagtcgaaagtgaatctaatcaagcctccctagctccaactacaaggaaattcaggagacagaaaaagaagttaaacaacaccaccaggaggcaatcatccaaatccaatacagatattttcaatttacgatgggtttattgggacataaccccaccatgaattgagcagtatactgactgtattactttcccaccatcgtaaagtcaaaaaacactaagatgaatcactgtaagttagaacaaatgacctggtctcctcaacaagtaaatgtcatggagatgaaaagaagagcaaaggaagagggttgctgttttccattagaagaaatttaataaacatacaaccaaattaaggacctttt

SEQ ID NO: 74220 - DNA, 1127 bp, Homo sapiens
tttgaaataatctcagatgtaaatttacagtcaaaataaagtagcatttggaacacagcaaaagaatgaatgtataaactgccttggaaaattatgtggtttctctcaatagcaatctttgagaagagtctgaataaacactcagaggaggatttggagattaataaaataaaataagaaatgagttatttagtgtctttcaaactctcagattttattatccaattagttcactttagtcatcaacatataatttcttctataacccaatattctacaaaatgtttatagtatattaacatataatagtaatattttacaaaacattaaaatatctaggagcataaaatatttaaattttgaaattgcatatcatataagaaagtctagtgttactgacttgttacatgatcaataagtaatataaacacacttacagacacatacacatatctcatagacacacagtatagactcccaaactccacccttgcacacagagcattgccacacacctgctaaaatacacatttctggggcaaaatgctgaactcaaatgatmtaaatgtttccaaatatgaaataccaataggggcagaatttttaaaattctggttaatgttttctataaagggctgcatgacagtcaaacacgttttttttttttttttctaggatcaaatttttaatgcaggacacacaaacgtgaaatatcaattaaaatatagaaaaacatgagatttcatctgtactgcaaggcttcttttacagtataatataggccacaaggaatactatattaaaaagaaataatattaattttactattaaaaatgaacatgaaagtatatttcttataatatagagctatatagtattggatcctgttaaataccaaatgacaatttaattatttattctaacaaaagtattacaatatgtctcataattatgtaactctaaaaatgactataattcataatagatatgattgtaatgaaaaatatctactcagataattataagctgtctctcaatggatgtatactatttacatacatctatttttatccaatctatctagagagagatacactacacacaacaaatacaatatttagaaatat

SEQ ID NO: 74221 - DNA, 1115 bp, Homo sapiens
  misc_feature (1)...(1115): n = A,T,C or G
gcatgtacacacatatataatatttcgtcatatttaagtaggcaatatttatcaattttaaaaattaataaaattatgaaaatatatggtcaaatgcctaaaactgaatcattacattaccaactagtgatagttgcatctattgccaaaatatttatgtactcagagtcctaaattttaacttatttttcaaagtcctgaattctttctaagtttacnnnnnnnnnnnnnnnnnnnnnnnnnnnnnnnnnnnnnnnnnnnnnnnnnnnnnnnnnnnnnnnnnnnnnnnnnnnnnnnnnnnnnnnnnnnnnnnnnnnnggaggtgattgagtatgggggcatgtctttacttcactggtctcatgataggtgataagtctcacaagatctgatggttttaaaaatgggagtttctctgcacaagctctctctttgcctgccacccatccatggggggacgtgacttgctcctccttgccttccaccatgatcgtgaagccttcccagtcatgtggaacaataaatccattaaacctcttttcttcctagtcttgggtatgtctttatcagcagggtgaaaacagtctaatactcccagtctgatcttgaactcttcccaaagggctaggattgcagatgtgagcccctgtgcccagctggaagtcacttttaatgttatatttattaatatggatcaataaggtctaagagtactgcgatattcggaggtagagagatttgcttcaggtttgacacaaactaattttaatatgacgatatatgacaattatgcttacatgttgacattgaggcagtggctcaaatgctttgaaaatataaattactaaataaataacagtgaaaattaacaagaaatcaatcaataaaaggtcaagtatattgttttttttaaaaaaatatgagtaagcgctctgatcacgttaaggtttatgtgtgagctttcttgttagttgtaaattaaggaaacacaaactcagatatcaaactaaactgctgtgggcttaattagttatttaagatcakatcaggccctgcattgcacaagtccttcacctgccttttataatgagttcatctggtagatttcacatgca

SEQ ID NO: 74222 - DNA, 1091 bp, Homo sapiens
tcctgcccctatccacttaaatcttacttatccttcatgaatcagaatgagatccctccaagatagtaatgtttcctttctttgtgttcacactctatcttgtacttagttcttacttsaaaataaaactgtttaaaaaacagttcctctatgaatgttaagatccacttctttgatttccagctaccagatggtactgagaattattcaaaaagtattcttaaataaatgaactatttttaaaatagcattttccccaacagctatatttctaaaatttagacagtgatattaggcttgaatgctttctagagaaattatggtgatgcaatggtgtgagtccaattttaataacatggtagaaaaacatgtttatgtgagtagacccattaaagtgttaaaacaataatcagctctgaaaaagggcacatgttgatagcaagataaaacaaaaacaaacaaaacacacaaaaacaaaagggaagagagaagacactatactttctccataatatgtttcatcttttttatatgtatatatgatatggattttaataaaattttggctgtatttatgttggataaatgtttacttccatggtctgattaaacgtggtagaattgaaggaggtggtaaaaatagcaaaaaagtttgtataacattttcaggtctaatgaaatagttcccagaagacttagcaaaaaatcttgaaaattttaaaaatgggtacagtttggttctagagaagacagatgaaatattggatcactgtcttcaaatatatgatagatcaattggtagatgatactgataaaatattttcctttttagcttgtataagaccagaaacaattaatttagagggcaagcaggaaatgctacaggaaggtgaggtattatgagttactaaataatgtagtgaaagattcctacagagacctttcgaacagaatagttactctttgatctagtcagttagatattaaatctaaacctaaacagctcttaacaagacaaataccaattcattcctaagtaggttatactgactgcggttctctaagtttaaccagtacaagtgtctttcttt

SEQ ID NO: 74223 - DNA, 1091 bp, Homo sapiens
tcctgcccctatccacttaaatcttacttatccttcatgaatcagaatgagatccctccaagatagtaatgtttcctttctttgtgttcacactctatcttgtacttagttcttacttgaaaataaaactgtttaaaaaacagttcctctatgaatgttaagatccacttctttgatttccagctaccagatggtactgagaattattcaaaaagtattcttaaataaatgaactatttttaaaatagcattttccccaacagctatatttctaaaatttagacagtgatattaggcttgaatgctttctagagaaattatggtgatgcaatggtgtgagtccaattttaataacatggtagaaaaacatgtttatgtgagtagacccattaaagtgttaaaacaataatcagctctgaaaaagggcacatgttgatagcaagataaaacaaaaacaaacaaaacacacaaaaacaaaagggaagagagaagacactatactttctccataatatgtttcatctttttwatatgtatatatgatatggattttaataaaattttggctgtatttatgttggataaatgtttacttccatggtctgattaaacgtggtagaattgaaggaggtggtaaaaatagcaaaaaagtttgtataacattttcaggtctaatgaaatagttcccagaagacttagcaaaaaatcttgaaaattttaaaaatgggtacagtttggttctagagaagacagatgaaatattggatcactgtcttcaaatatatgatagatcaattggtagatgatactgataaaatattttcctttttagcttgtataagaccagaaacaattaatttagagggcaagcaggaaatgctacaggaaggtgaggtattatgagttactaaataatgtagtgaaagattcctacagagacctttcgaacagaatagttactctttgatctagtcagttagatattaaatctaaacctaaacagctcttaacaagacaaataccaattcattcctaagtaggttatactgactgcggttctctaagtttaaccagtacaagtgtctttcttt

SEQ ID NO: 74224 - DNA, 1094 bp, Homo sapiens
gaaataccaaagattgagattgtgaagtgaggggaacaggtttgggaaagaaaacgagcttttcttttcagatatgtcaagtttgaagagcttgagagacagtcaagygattctactaggtggaaaaaatggagctagtgacaaccatttcttactaagaaatggactcccccagcatctctatttcttcttcgctttcttggaatctgaactttgttgttgttgttgttgttgttgttgttgctcacaggcttaatcttcagcttctatgcaccaagcgtggaaaaggagaaagtcctgcagaatcaatcccgacttccatacctgctgctggactgtaccagacgtctgtcccagtaaagtgatgtccagctgacatgcaataatttgatggaatcaaaaagaaccccggggctctcctgttctctcacatttaaaaattccattactccatttacaggagcgttcctaggaaaaggaattttaggaggagaatttgtgagcagtgaatctgacagcccaggaggtgggctcgctgataggcatgactttccttaatgtttaaagttttccgggccaagaatttttatccatgaagactttcctacttttctcagtgttcttatattacctactgttagtatttattgtttaccactatgttaatgcagggaaaagttgcacgtgtattattaaatattaggtagaaatcataccatgctactttgtacatataagtattttattcctgctttcgtgttacttttaataaataactactgtactcaatactctaaaaatactataacatgactgtgaaaatggcaatgttattgtcttcctataattatgaatatttttggatggattattagaatacatgaactcactaatgaaaggcatttgtaataagtcagaaagggacatacgattcacatatcagactgttagggggagagtaatttatcagttctttggtctttctatttgtcattcatactatgtgatgaagatgtaagtgcaagggcatttataacactatactgcattcattaagataataggatcatgatttttcattaactcatttgatt

SEQ ID NO: 74225 - DNA, 1094 bp, Homo sapiens
gaaataccaaagattgagattgtgaagtgaggggaacaggtttgggaaagaaaacgagcttttcttttcagatatgtcaagtttgaagagcttgagagacagtcaagtgattctactaggtggaaaaaatggagctagtgacaaccatttcttactaagaaatggactcccccagcatctctatttcttcttcgctttcttggaatctgaactttgttgttgttgttgttgttgttgttgttgctcacaggcttaatcttcagcttctatgcaccaagcgtggaaaaggagaaagtcctgcagaatcaatcccgacttccatacctgctgctggactgtaccagacgtctgtcccagtaaagtgatgtccagctgacatgcaataatttgatggaatcaaaaagaaccccggggctctcctgttctctcacatttaaaaattccattactccatttacaggagcgttcctaggaaaaggaattttaggaggagaatttgtgagcagtgaatctgacagcccaggaggtgggctcgctgataggcatgactttccttaatgtttaaagttttccgggccaagaatttttatccatgaagactttcctacttttctcrgtgttcttatattacctactgttagtatttattgtttaccactatgttaatgcagggaaaagttgcacgtgtattattaaatattaggtagaaatcataccatgctactttgtacatataagtattttattcctgctttcgtgttacttttaataaataactactgtactcaatactctaaaaatactataacatgactgtgaaaatggcaatgttattgtcttcctataattatgaatatttttggatggattattagaatacatgaactcactaatgaaaggcatttgtaataagtcagaaagggacatacgattcacatatcagactgttagggggagagtaatttatcagttctttggtctttctatttgtcattcatactatgtgatgaagatgtaagtgcaagggcatttataacactatactgcattcattaagataataggatcatgatttttcattaactcatttgatt

SEQ ID NO: 74226 - DNA, 918 bp, Homo sapiens
atattcactgagagtcgacaacattcataaaagggcagttaattagtctgtaatcaggtctaatcatattttatttgtgaaaacacttaaacaagcctgacattggtctgggtgttacctttttccaagagagtagagcccggctactggctctcccacctcccctgacttccacgtgacagttcactacacacaaatgcgctttgtagccttactagtttatgagaaaggaaaatgtaggcatctagtagttcctatgagaaatgaacattgactttctctgaagaaaatataaatggatttacttaactgggctccggtcattggagcaattaataatagattgtgtcatagtgagggctttgtttgtatttaaagcaataaattataagtattaaatgtatatttattccaagttaaactcatttctaattgacatgttacttagcccaaggcttttaagatcttttagtataattaaattaatagaaagctatagatcacagcatgataagcaaacagcccagattttaatatgacagatatacacaacaggccatgtaaggagatcattattatcggtttaggttcagcaaaaatacagccggaatgagaagaaaacaagcaggtgaagccatgctaaagtgggggacacgagggactccatatttgcccttgtctatctcaccagcatcagaaattccaggctggacaggaacttcattatgaaaatgtcctggttggatcrattccttaaaccagaagcttttaaaaccccacatcaaacatttaaagggtattatggtcacctcaggctttgggtagtcaaaaaatggaatagtattccacttacatagggccaaattagctatctctacttcttgtgaattttcaaaatctgaatttattcagtggtta

SEQ ID NO: 74227 - DNA, 973 bp, Homo sapiens
ccaattcaccaccctggctgcaatgaatatttggagtgttcattgcaccatggaaattgaataaagcattatctttactttcaatttgtcttttattactgcttcttttctagatgatcaggcacaaattcaggaaaaatgacctagtgagactatttttattacttcttctcaagagaggtattaaaatcaaggcaagaaaattgatcatgtcttatatctaagaaattggtattcattcttacaaagtgtaagaataaatgtaaaaattaaagttctggtttgcctggtcatggttctcctatctctttagaaagcttttcttttccaaacagctgatgtgtaaggaggatctgtgtgcaagttattaaggaattgaggaggatgaatctaatttgccttgccaaaaaagaaattacatcatgcagaattatttgacctaaaacttggagattatttattgattcagcaagtagaaatggggccagggtggggtggggtgggtgccatgcttttatgcactctgcaaatatctgtttcgtacctcacatatgctaggtcctatgacgtagagttgaagaaagaagatgcagccttttccctctggatctactaatctagtgcaggaaacaaacttgacacaaataatggtacaactacttttgtaattactaattgccrtgagttcaatggtataaaggtgaagggtactatggagtgaagtaatgaagaaattaatatatattgagaccatcagggagtattttgttgaagaaggggtcttaagtataagataagatcctgttggaaaaaaaagtgacaggaaataagccagaaggagcaaagggcaaatgtgaagcccttgtggattaaatgtgaggtcatcccaggaactcgaagaagacccatgtggttgaacatagagtggtagattacaggggagaatctagagacacgagtatattgtaatgtt

SEQ ID NO: 74228 - DNA, 800 bp, Homo sapiens
aaatattgtatgggtggttgtaccaagtctgtgagaagaatatgatttcagaagaaagcagctaacagagtagttccgacttgtcaggataaaattaagagcaactgctgcagcaaacaattacgtggtagcaaatacacatcactaatgggcagcatgctatgcgctggcaaaacatgatctgattaagccaccgtcaacatccacacagagattacaatctactctagkgggggaaggtgtttcttggtggttgtttttactgtccagcatcctttgttctccttcctattaagactcctaccattttctttcagaaagccaacatggtattttgagccacgtgggtattttgggtggcctgactgagtaagtcaaacagcaagacccaatcttttaggcaggagaatttgtgtgtttaagggcaggcagactttatctttcatagcaggttttgatggtaataatcactctttcttgggacaatatccacagccatgctggtactttgagatcaacctggagataacactgaacccagaggaaggcaaaaccgagtcttgcaaacaaatggagcttgaaaccacatgataaaattggaagtcctgaaacaaaccatattcaaacctaatgctttccatgagctattgtaataaaagggaaatgcagttctttttttttttcattttccagtttcattagttttgtttttctaaccagcattctaaatatttttatgttgtcacttaggaatactcatagagtaacaaagtgcggttgtctgggtttatgaaaattga

SEQ ID NO: 74229 - DNA, 1417 bp, Homo sapiens
cttctttctctcttccatccctccctccctgcctcccttccttccttccttccgttttttgagatagggcctcattctgttgcccagcctgagtacagtggcgagatctcggcttactgcaaccttcacctcccaggttcaagcgattctcatgcctcagcctcccaagtagctgggattacaggcatgcaccaccacgccttgctaatttttggcatttttaatagagacagcgttttgccaagagtctgaaactcttgacctcaagtgatcyacccgctttggtctcccaaagtgctgggattacaggcatgagccaccatgcctggcctgtctttctttcttaacttcccttttttcattggctcctgttgggtcttctcttcttctgccaaggtaatttttgattctaatattatttcacaagatgctgatcaccaattctacttctttatacagaaagcctctcgactaggatgatgaaaagcaattgtttccactaataattaaagtcctgaaatttgtaaactgttcataaacaaaaatagattaagataataacatctccttcatactctgtactgcaatacgcttactcaagtgggagagaaagggttaggtttacagctggcaggccggggcttacacacatctcaaaacactctgcagttggtaatctgggcaaagcacaggaacatgacccacatgacgtgataccatcagtcatgtctcctaaagtaggacaacattaagaaacactcatgctttaccaaaatcctatctctctactcaagctccttcggagactctctgagcatattttctattggcatagactatgaaataaagggaaaaacagtcgtcagaaggcctgggtttaagtcttatatctaatcactgatcccacatggctgtgggaaaatggacacatgttttctcatctgtaaaatggagcgacactggacaatgttgtgaagaatgaaatgctgtaatatatatggaagccctctacgcatgtaggacattacattggccaacagtttccaccttgtgctccagaaatactaggggctgcatgaaagggcttaaaggccattgagagtgaacctagaaggccacctgcagtccctgcacctccatctctggccgcacaaacacttggctcatagcagagccatcctgatctgttttgcaaatagggctcccaagaagaattactctgaaagatttagccaacaataaaaaggggaagagggctgaaaactactgacaaaaattattaatccaagtaagtaacttgtaattacaaaatgaccatttcggattcatgcatataatattcagatttgtacatgtaaggtacacatgatctagagatttgtacagttgtacatgtattgtacagatactaaaagta

SEQ ID NO: 74230 - DNA, 937 bp, Homo sapiens
  misc_feature (1)...(937): n = A,T,C or G
ggccacgcaagccacgccngcnccccccnnnncannccnccannnnnngnnagnntcntnaggcctccccccagccatgcttcctgtacagcctgtggaactgtgaggaaattaaacctcccttctttataaattacctagtctcaggtagtactttagcacaatgtgagaatggactaatacagtctccccagtttgaagtaagcttcttgaaaacaagaatgttgttagatgttggtcaacatgatttagaaagtacctgttgggtacttaataaatattagttgaataaaagaataaatgaacatgcagctctgaaaaggcatggtctgtattattagacatggaggaggatattttggagtgtcagcttctctccaaccaatggctgcttggtttttaccactagtttcttgcacattggacttgtctttaaaccatgaaaggatccctttaacactcattaaagtcaggcaagtgaaagtcttatttctagtacaggaaagcaaaagcgtgactctaactaaaatgtcaagtgccctaaggtgtgaaaaatatttaaaaactttccatttgctcttttgtggtagtaccctttgtcaaaaggttttctccaactttattcatgcctgataaatggaagaggagagttttcccagaataccataaaatacaccagytagacagggctatgagatttaagtggcttcctgcctgtcccagtgcctggaggggtaaaggggaggaaagaaacttttgagcttgaagactgctggagggaagaaaagagaaaacataaacttaggtcccagaagcttctgagatggaagggatcagaccccaacccttgtcaccaagggcccacattactgaagcccgctaggtgggctggctggtcctggtcaaagtccaatgaccagaaagggtgcaagcttct

SEQ ID NO: 74231 - DNA, 1505 bp, Homo sapiens
  misc_feature (1)...(1505): n = A,T,C or G
tgcaactacaaaaccccccaaaggaaacagtaaaccagccgcanagttgcagcgtccttagatgccactgctgggcagggggggtggtggtggaggagaagcctcgtcacccaggatgaaataagagcctggtggtttagatgggggaggagggaagggaagaaaagtctttctgggccatttcactcctctttaagtacagaagcttaggctaaaagagcatttcacggggctgagctgtggccccgggggaccccggctgcccccggaagggctctcgccccgcggcgtcccctcccgagtcccatgcagggacgtcaaagtgaagccttcaccatcatcacccaaaaagaacgtgtgcaagatgtgaccgtttgtcaccgagatggagtatatgatatgaaccatggcaaacaccgtaatgactaatttcaaacatttattacaattcttgagagacttgaaagctgtccccgctcttgattttaataaatgcagtcttgaagcagccgcttatcaaagtgacacaaattgtgtggtaaatagattatggcacagctgaaatactggaaaatgagatcagaaatgctccttctcctccatttaaaactccccgagatccttcagcctgagccgcaaggcgaggcaatcaccgggagcgtggaggtgagaggattagcccccagcggaggcagcttttcatctgctgctcactgaggccccctgccacaaagcccgggaggccagggtgccttcttcttgccccggcccaactgggatgggggtcccagaannnnnnnnnnnnnnnnnnnnnnnnnnnnnnnnnnnnnnnnnnnnnnnnnnnnnnnnnnnnnnnnnnnnnnnnnnnnnnnnnnnnnnnnnnnnnnnnnnnngtggtacaataagtaaaggagcagttttacttcaggcaggcttttgacaacaggctttgggcagaatacggcacgrggctaagatccatgggaggatgaaaacatacaaggtaagatccatttctacctaggatttttgcctgggagcatttccaaactgaggtatgggaaagaagaacccaaacagaaagctctatcattgggtggacaaagtagaaaacagaaagcaaggttgctggctgggagtggtacctcacacctgtaatcccggcactttggcaggccaagatgggcagatcgcttgaggccaggagtttgagaccagcctggccaacatggtgaaacctcatctctgctaaaaatacaaaaaaattagctgggcatggtggcagctgcctgtaatcccagctactcgggaggctgaggcaggagaatagcttgaacccaggaagtggaggttgcagtgagccaaggtcgtgccactgcactctagcctgggtgacagagtgagactgcagctcaaaataaataagtaaataaataaataaataaaataaaaaataaaaataaaaataattcaaggttgctgaggaatctggaatttgcagggca

SEQ ID NO: 74232 - DNA, 964 bp, Homo sapiens
tgcattgtctcatgtaataatgattacaatttttccaattctgtgcatttgaggttctttaaaatcatatatgaatttaccaccccatttaaatcctggagggcagctagaaagacccaggttagtctcctgcctccaatgttgacttctccatttcacttacatatttctaatacatcctctcaaaatttcttcatttaaaaaagacctggtcaagaggcccgatgatgcaaatgggattttccttctccatcctctcattaaactgttagagtaggcagctagtcagacataagcagagcagcagagggctccccccacaactcagacacagaaggaatgtcaggcaaccatcaggtgatggtcagaaggttgttaactgtctctttaaaataataattggtcacattcagtgccagggaaaggcagtttcccaataaacagaaatacctgaaactgacaatcagcagcttcccaaaaagatcttaaaagttgggtaagtgggctcaagcatgcccatcgatgtggtttggctgtgtccccacccaaacctcattttgccttgtagctcccataatctccacatgtcgtgggagggacccagtaataggtaattgaatcatggyggtgggttttcacatgctgttcatgatagtgaataagtctcacgagaactgatggatttacaaagggcagttcccctgcacacactctcttgcctgccaccatgtaagaggtggctttgttcatccttcgccttctgtcatgattgtgaggactctccagacctacggaactgtgcaacaattaaacctcttttctttataaattacccaatctcaggtatgtccttacagcagtgtgagaacggactaataccaacattaagaggcaaaatggtgcagtttaactggtatatgaccttctagggacatttgactggtaagggaaaaacgcctcaagt

SEQ ID NO: 74233 - DNA, 742 bp, Homo sapiens
gatcccggagccaggcatytcgctcacccctgtagccaccacagcattcagccctgcagcctgggaccttgctaaggtcttgctttacccctaaaaaccaaaaatagtgtgtcacctttagcagtgattgccaacgcctctggagtgctggctgggacaggcatctctattttcatcctcaccaatcctgccagggagctactctggggagccccatcctgctgatgaatgaccgagtctcgcagcgatgacggaacctgcaggtcccaggcttgggcccaggtaggtctttctccaggggcctcacatccatctctttcccagctctccttttctgtaagacttcacagaacaggttcaaaatccatttgctggccgagcacagtggttcacgcctgtaatccagcactgtgggaggcctcgaggcaggtggatcacctgaggtcaggagttcgagaccagcctggccaacatggcgaaaccccatctctactaaaaatacaaaaaattagccgggcgtggtatcaggtgcctgtaatcctggctactcgggaggctgaggcaggagaatcacttgaacccgggaggtggatattgcagtgagctgggatcatgccattgcactccagcctcggcaacaagagtgaaactccatctcggacaaaaaaatccatttgctaataccaggctgagggtgagctgctgttctcacctgggagagatgatttgtcagaacatgtct

SEQ ID NO: 74234 - DNA, 1387 bp, Homo sapiens
ctgtctacaaaagttacaaaaattgttaggatgtagtggcactcacctgtagtctcccagctacctgggaggcagaaatgggaggattgcttaagtccaggagttcaagattatagtgagctatgactgtgccaggatttcaaggttacagtgagctatgactgtgcactccagcctgggtgacacggcaagaccctgtctctaaataaataaataaacaaaaataaaatatgcartgtaacccaatgtttaatacagccttttcacaaaatgtaataaatgcacgtttctgactatgctgtggggattttttaagttttgagactcacatagaaaattgtactgagttttctacaagtgaaaagtggttttgaggatttaacagcccagccctcttaaagtgcaagaattctcttaatttccctcaacatgagagaattcatgcattaaaggtaaaccaatttcagcttgcatgattaggcaaatgctaccaaaaattcctctgagccttgtttttttcctcttatacttccagtttatacactgagcatctgcaaaataattttacccaagaagatacatttcacctgatgataccaaactgagatattctaagagaggttaatgctttaaaaccagaggaggagcaatacatttaatcccaaatagagcagaaaataattatttaaagccatccctatcaaactagcaaaaccattatgttacctaattaatcatatcttcgcatttgcacacactatgtgaaatagtcagaaaccatttactgtttccatccatattcctttttgctttcaacaatttattttttcgtttctgaaatacaagtcaaaatacatttttgttacataacatgccctaaaataattttaaaaaaacagcccgtgtatccacgtatttttttgatgagctctttcctccattcacactcttcgtctatgctctttggctagaaaatactatttgttatacccagcagtcacctccaccctatcccaatcttccttgttaacagatctccaattttgttgagatgccaacatgctcagggaaggggcccacctccaaggaattattcgtgattgttctcaacctgtcacaagcctgccctccccttccgtggaccgttgttgaagcatactttggtaggaggcttggtatctcattctgggcagtgacatgtaatgagaaatctgctaggaccttccaggacagaatttcttccctggtagaaaagaaaaatacagaaacctgataccactgagcatcaaatcagttctgaaactgcctgtctctgaacttatatgaaattgtaagcctttattaccaaagttgcatttagtatgctattatattacttgtagccaaa

SEQ ID NO: 74235 - DNA, 1387 bp, Homo sapiens
ctgtctacaaaagttacaaaaattgttaggatgtagtggcactcacctgtagtctcccagctacctgggaggcagaaatgggaggattgcttaagtccaggagttcaagattatagtgagctatgactgtgccaggatttcaaggttacagtgagctatgactgtgcactccagcctgggtgacacggcaagaccctgtctctaaataaataaataaacaaaaataaaatatgcagtgtaacccaatgtttaatacagccttttcacaaaatgtaataaatgcacgtttctgactatgctgtggggattttttaagttttgagactcacatagaaaattgtactgagttttctacaagtgaaaagtggttttgaggatttaacagcccagccctcttaaagtgcaagaattctcttaatttccctcaacatgagagaattcatgcattaaaggtaaaccaatttcagcttgcatgattaggcaaatgctaccaaaaattcctctgagccttgtttttttcctcttatacttccagtttatacactgagcatctgcaaaataattttacccaagaagatacatttcacctgatgataccaaactgagatattctaagagaggttaatgctttaaaaccagaggaggagcaatacatttaatcccaaatagagcagaaaataattatttaaagccatccctatcaaactagcaaaaccattatgttacctaattaatcatatcttcgcatttgcacacactatgtgaaatagtcagaaaccatttactgtttccatccatattcctttttgctttcaacaatttattttttcgtttctgaaatacaagtcaaaatacatttttgttacataacatgccctaaaataattttaaaaaaacagcccgtgtatccacgtatttttttgatgagctctttcctccattcacactcttcgtctatgctctttggctagaaaatactatttgttatacccagcagtcacctccacccyatcccaatcttccttgttaacagatctccaattttgttgagatgccaacatgctcagggaaggggcccacctccaaggaattattcgtgattgttctcaacctgtcacaagcctgccctccccttccgtggaccgttgttgaagcatactttggtaggaggcttggtatctcattctgggcagtgacatgtaatgagaaatctgctaggaccttccaggacagaatttcttccctggtagaaaagaaaaatacagaaacctgataccactgagcatcaaatcagttctgaaactgcctgtctctgaacttatatgaaattgtaagcctttattaccaaagttgcatttagtatgctattatattacttgtagccaaa

SEQ ID NO: 74236 - DNA, 1185 bp, Homo sapiens
aaagtataggcatcaggccctgggggaaaacccgtccctatctcaaccaggttggcatctgtgctggagtcttttgataaagagggtttcttctgcagacagctaagacatatctccctgagattcctccctcatcttcacacccatgatcctcatataaggaaagaactgagccctatacatataggtaccatttattcttaccatgtgccagccaccgtgccaaacactttatatgcattttcttatttggtcttcacaagcaccctgtaggttatagaagaggaaactgagacttggagaggtgaagtctggccagtaaagaaagaggcaggcttagactctcgtctgcctgactctagagtccaccttcctgcccactcttgctgtctttcctctttctaggcctggtggccttgaatgtcctcactgctycctgtctaaccccaagccccaccccagcatgcagaacctcatctaggtaagaatactcaatcacaagagttggggttgttcacatccagtaacttgtctttgttcaaactggttcctttctggttttttccttttcttctaatctcagattgaagacctattatttccaagccaggaaaaaagaacaagggaaaaaaaagggggctctgttccatgaactgtaacatctctctctgtgctgcccagttcctcaatttcctgactcttggacaagcccagccatgcctggcccccaaatttggcaggaccattggtcacaaaacctttttagggtcttctcttcctttagagccaaggctggggtgagagaacaaagaattgatgggaagaaaagcagatcaaagaaaggtgctggaaaatggtaataactcgaattcccagcctggccctccaatgtctaccctactgtcttgggactttatgtatctcctttccggcctaaagaactagctccagagagaatgtatggttagtcatacacagaaatacagatacacacacacacacacacacacacacggatgcccattctagaatcacagcctgtcataaccacacatcccaggccagtcttattctcagaggtacccaaaacctcaagggacccaaaaccccctaaagctaagaagctaatcatgagcacatgcacccaatcacatgttcccaaacattgccataaacatgcccttt

SEQ ID NO: 74237 - DNA, 601 bp, Homo sapiens
attcctaaataagtattttatttttggttaaattagtagtttttaagaagtttataatatcaatttaaatattctctaatatttgaacaattagtttccaagttttaactgttattagtactttaaaataaaaagtcttcagagagataaatacctcctagttttctattactgacttaaacacaatcccttgatacacaatcatgaatagtccttaaatgtagctagatgaagatgttaacaggggctcctaaaatttatatgatactctcccttggcttgaggggaatatttttttaaaycacactatgtatttcagtgatgtatgctacttcgtatttaaaggaaggcatcctttgtgttcctaagtatcattcatgttcttcacatttagtacagtacaacattgtaagattaagggaaaatattttcttgaatgtcaacttagtacagatacttcaacgtcactcacaggggtattgtggtggcgactctgcttagtgctgctaggaggccacatcggccttggaaatgggacaattgtgtgggcttagatttctaaggattgggcaacctcgagaatgttagctggagaatccat

SEQ ID NO: 74238 - DNA, 1208 bp, Homo sapiens
cttaggcttcgatgcagacctttgaatgaggctggatgcatcattcccagtgacagagaagctgcctcttttctttccaagaaaacagacccatgagaaaagcccagcagccccaaagggaactctgggcattgcataaaggaagagtctgtattctcacactgcaaacataattaaaacaactcctcctcccttatctgagacacggaaagaagatgaatgggaagatgacacagggagaaagcccttatctctcattttgtaaatgaaaaaaaagagactttttgtttagtttagtttataggaaaaaaagtcactgccaaattttgtccatagcaaaaggaggcctgagtgtgctgggagggacctggcacgtgggtgtgacagctctcagtgccttggtgggttccaggaaagccaggcacagctccaaaatgaggcagcaatgggatgcacctcagtggccacaccatggcgtggaatgcgctcttagattccaccttctaggacaggtttcctgccgtgggactaacaacacagctgctttgctcccatcctccagagggaatagagaggacacctcccttttctgtcctgccttcctgctacagtccactgtcccctgcccagactgcccccgacaccatcccaccccgttcttttccaagtactgggaagttaatccttgttcatgctctccaaacactgaaatagtcccccatgcattctccacacagctgtcagatcggagttaacagaaaagggagaacaacagcaaaagcaacaagggtgagaaaagcaagttacagagaagaggcagttggagaaagagtctccgctgtcccctctctccatactccacctctgtgatgtgagatggagttcacacctctctgccttctgtgcagaagccgggtacgcacccgagataaccccgcctggcaggatcatagcagagcgagccaaagtgaaacctgcattccctcggtcgagctacctttagaggctgcatggagtgctgcgagggttaagtgacaggtggtggccartgaatgtgaaatttaaggaaaacaacttcacaaaggcattttgaggtgatttaattaaaacattcagtcacaaagtcaacaacagaagcaacaaaaaattatgaggcgtgggcaccggagaaaagaaatgcatgggacgactggaaagtgcaggagttg

SEQ ID NO: 74239 - DNA, 547 bp, Homo sapiens
ctggaagggaatgtaaacagcgygtgggctcctcggggccccgtgcgtgaccagagccgagttggggaggactgctggctcacctcgggcttctggtcagaccccccacctcgagccctgggggcgccagggatgataccccatgtcacagccattccagaagtggaaaatgtaacgtgagaaacatctgctcctcttcttgggagtaattgggcctcggtgtgtgcatctctccttcctcctcacgcctccttcttcaatctctctttcctctcgacatttataaaaataaaatgtgatgccagggcttgtaaaccaaatcccagagataactgggctgtgggttgaacgcgtgcttcactggataccaccaaggccagcctgccagggggaggtgtatccccgagaagagggagggaagggaacaggaagcagagaaagagtcggaggtgtggaaggaatccagggaacaagaataagccgagctcacatcttggagatgtcaccaccttctcagtccatctgcctcgtgagagctgaagaggct

SEQ ID NO: 74240 - DNA, 605 bp, Homo sapiens
agatggtgccagagatttctttcttttctcttgattaggctttccttagtatcacacactgaaaagtgtacgtctatcctcttttatttacttagcattagaagccagttacgtttgtatttacacagagttgacaaatttgagggttaatcaccttcacccatgggtcaataggagagttaaccccagggtttggttcaagaaagacacatttgaaaggaattatttttgagattgggtgaacagcagcatcacttcagtgaagtcacagattttatgggcctgggggtattgtgattatataaaaatcaaattttcatggtgttctgcagtttagaaaacacttgacctatgagtttaacagatttgaaccscaaccttcttccttggatgctggcagaagtattttctaaaatgcctacaaagctaggattgaatgctctcagatatgtaagacagtaacctctatgaagactgggaattctacatatcacagggtcaagaacaatacttccctccagttaggggtctctgcagaccaccaaatgacctggttagtatcaggagcaccgagttctgagtgttgctgcctgggttcacctctc

SEQ ID NO: 74241 - DNA, 610 bp, Homo sapiens
atgggttcacttttgtgactatctcaaccaatagagtattcaaagtgatgctccatgacttcttaggccagttcctagaagacgactcacataccatcttgcctactaggatactcacccttgacatctaagccctcatgtaaacagtcagcttccctgagattgccattctaggaggaaatccaagctagcctatgcagggggacaacatggaacagccctgagactacacaaagagagagatgtccaatcagcccccctcttccccagccctgcattagtccaactccagccactgggtgcaaccatatgacagatcccaaaccagaattgaccagctgagcctttttctaattcatgacccaaatacrttatctgagataataaaatagttgttgtttgaagcgagaaagttttgtgattcattttttttaatgcagcaatagctaaacagaaccatattcaataggtacaaatggccagaattgtacaaagcaatactattcaaagtgtagtccctggggagaatgaactgtttgttaccaatgttaagtggaaaactttagaaaaaataaatttaacaatgtttatttgagcaaagaacaagtca

SEQ ID NO: 74242 - DNA, 2054 bp, Homo sapiens
atggtaatggcttatggtaacggaagatgctaggaaaaataaccaagttaaagttatatgtaatgaatgtagtctatggaatgcaatggagcaaaaaaggcaaaacaaaccatatatccacagagcaatgtggatagatttcaatggtgcagtattaacatgcaaaacaagcaagcaatccagaaacacatgaaaagatgtacaacctctctcataacgagaaaaaaatgcaaattaaatctgtactgaaatactatttctcacctattcaattgttaaaaatataaaagttcaacttcactgttggcaggactatggattaacaggcatcttatacattgctgaggagatgcaaatgacacatctcctatagaggggaatttgaaaatatctctgtattagtccattctcatgctgctatgaagaagactgggtaatttataaagaaaagaggttgaattgactcacagttccacatggctagggaggcctcaggaaacttacagtcatgacggaagatacctcttcacagggcagcaggagagagaatgagtgccagcaggggaaatgccagatgcttataaaaccatcagatcttgtgagaactcactcactatcatgagaacagcataggggaaacatccccatgattcagttccctcccaccatgcccctcccacgacacacagggattacagggattaagattcaagatgagtttggatgaggacccagcaaaaccatattaatttcataaagtgaggtagcatttgtgctttgaccctgcaagtccattaccaggaatccaccctggaaatgcatctgcacaaatacaacatgcatccagggttatccacagtggtattgtctgtaataaaagaatggaagcaacctaaatttcaaacaagaggaaattagttgaagaaactattgtacattgtcacaatggagtactatgcaaatgtaaaaaggatttttaaaatttctatttactgatttggaataatttcagcatatattcttggtaataattccagcatatatgtttggaataactccagcatatatatgcccaggtatagaacagtgtttatatgtgcactacatttcatgaaataagaaagagaaatgagaatatgtgtgtgtttacttttgatccaaaaaaagccagaaacataaaccagaatccagtaataatgattatgtttctggttatgaggggaaggaaataggaaggaggggtagggatgggaagaagccatctctgcatagaatttttaatttagatttgtcttttgaactaggtttatttatgtttatttaatttatttaaaataaattaaaccaaaaagaggggagaaaagactaactccaaaatcaaaaacaaatgtttgaacacaatatactaactattcatccttagtgggatatactctacaaaccaacacaacaaaaatttttgcagagaaatcttaaacttcattcagtagttttattgttagtaatatattcgtattagaaaaatagtattaagtgaaaaaaattaaaaagaattaggtttagagcatattatcatttgtgaaaattacagactcatagactggtaatattttacaagaacacaacctcattaattgtttatatgtgtgtgcgtgtatatatatatatatatatatatacacgcacacacatatatgtatatgtatacactttagggttagtacttattgtagggagagtaggacatagaagtcagaaaaaagggaaaaaacaaaatgagagagagccttcacagggactaatgatgactatgtgctatgagctgagaaaaatgacttacaaaattttctgaggcaaaaagcagtasagatattaaatatataaaatgaatgaattgatttgagaagttgctgaggttgctcctggctctgatctaaattttaaataaagaaagtttgaaaagaccttgagctacataatggcattcttttacttccacaatccattacaatgtctggcttataataggtacacatgaaatatttactggataa

SEQ ID NO: 74243 - DNA, 672 bp, Homo sapiens
cctgctagcaaatcaagcaaagcgacttgaatttgggctcgtgaaatcagacagacatgggttcaaatcccaactctactctttaccactggattaccttgggsaaattacttagtttttctgtgcctcagtttccctatctgtgaaattatgtaaataacagtacctaccttgtagagttgttgtaaagattgaatttaagtgatagcaggcaaaaatataaaatacatatgaaatatgtattggttgctaaaagtattgttatggtgatgattttagactatgagcttcctgaggagagacactgtatctcagtcatctcatcttacccagggaggaagaacaatgcccggcatatagtaggagatcaataactgcttgtcgcatttaattgtttgaactggacttggagctcaagcaaagagactcttccccaccagcctgccaggtaggaagtggctgccttatttccaggctgcggcttggagcaggttaagcctccatccggctgcaagacccaggccctgcatatcaatcgacgacgcaagggctttaccttaatattgcagttgtcatcgagcagtatattttccagcttcaagtcccggtggaccacaccgttctgaaatgagaagacaaagagggaattgaatgggagcggctgggatgaga

SEQ ID NO: 74244 - DNA, 672 bp, Homo sapiens
cctgctagcaaatcaagcaaagcgacttgaatttgggctcgtgaaatcagacagacatgggttcaaatcccaactctactctttaccactggattaccttgggcaaattacttagtttttctgtgcctcagtttccctatctgtgaaattatgtaaataacagtacctacmttgtagagttgttgtaaagattgaatttaagtgatagcaggcaaaaatataaaatacatatgaaatatgtattggttgctaaaagtattgttatggtgatgattttagactatgagcttcctgaggagagacactgtatctcagtcatctcatcttacccagggaggaagaacaatgcccggcatatagtaggagatcaataactgcttgtcgcatttaattgtttgaactggacttggagctcaagcaaagagactcttccccaccagcctgccaggtaggaagtggctgccttatttccaggctgcggcttggagcaggttaagcctccatccggctgcaagacccaggccctgcatatcaatcgacgacgcaagggctttaccttaatattgcagttgtcatcgagcagtatattttccagcttcaagtcccggtggaccacaccgttctgaaatgagaagacaaagagggaattgaatgggagcggctgggatgaga

SEQ ID NO: 74245 - DNA, 672 bp, Homo sapiens
cctgctagcaaatcaagcaaagcgacttgaatttgggctcgtgaaatcagacagacatgggttcaaatcccaactctactctttaccactggattaccttgggcaaattacttagtttttctgtgcctcagtttccctatctgtgaaattatgtaaataacagtacctaccttgtagagttgttgtaaagattgaatttaagtgatagcaggcaaaaatataaaatacatatgaaatatgtattggttgctaaaagtattgttatggtgatgattttagactatgagcttmctgaggagagacactgtatctcagtcatctcatcttacccagggaggaagaacaatgcccggcatatagtaggagatcaataactgcttgtcgcatttaattgtttgaactggacttggagctcaagcaaagagactcttccccaccagcctgccaggtaggaagtggctgccttatttccaggctgcggcttggagcaggttaagcctccatccggctgcaagacccaggccctgcatatcaatcgacgacgcaagggctttaccttaatattgcagttgtcatcgagcagtatattttccagcttcaagtcccggtggaccacaccgttctgaaatgagaagacaaagagggaattgaatgggagcggctgggatgaga

SEQ ID NO: 74246 - DNA, 672 bp, Homo sapiens
cctgctagcaaatcaagcaaagcgacttgaatttgggctcgtgaaatcagacagacatgggttcaaatcccaactctactctttaccactggattaccttgggcaaattacttagtttttctgtgcctcagtttccctatctgtgaaattatgtaaataacagtacctaccttgtagagttgttgtaaagattgaatttaagtgatagcaggcaaaaatataaaatacatatgaaatatgtattggttgctaaaagtattgttatggtgatgattttagactatgagcttcctgaggagagacactgtatctyagtcatctcatcttacccagggaggaagaacaatgcccggcatatagtaggagatcaataactgcttgtcgcatttaattgtttgaactggacttggagctcaagcaaagagactcttccccaccagcctgccaggtaggaagtggctgccttatttccaggctgcggcttggagcaggttaagcctccatccggctgcaagacccaggccctgcatatcaatcgacgacgcaagggctttaccttaatattgcagttgtcatcgagcagtatattttccagcttcaagtcccggtggaccacaccgttctgaaatgagaagacaaagagggaattgaatgggagcggctgggatgaga

SEQ ID NO: 74247 - DNA, 672 bp, Homo sapiens
cctgctagcaaatcaagcaaagcgacttgaatttgggctcgtgaaatcagacagacatgggttcaaatcccaactctactctttaccactggattaccttgggcaaattacttagtttttctgtgcctcagtttccctatctgtgaaattatgtaaataacagtacctaccttgtagagttgttgtaaagattgaatttaagtgatagcaggcaaaaatataaaatacatatgaaatatgtattggttgctaaaagtattgttatggtgatgattttagactatgagcttcctgaggagagacactgtatctcagtcatctcatcttacccagggaggaagaacaatgcccrgcatatagtaggagatcaataactgcttgtcgcatttaattgtttgaactggacttggagctcaagcaaagagactcttccccaccagcctgccaggtaggaagtggctgccttatttccaggctgcggcttggagcaggttaagcctccatccggctgcaagacccaggccctgcatatcaatcgacgacgcaagggctttaccttaatattgcagttgtcatcgagcagtatattttccagcttcaagtcccggtggaccacaccgttctgaaatgagaagacaaagagggaattgaatgggagcggctgggatgaga

SEQ ID NO: 74248 - DNA, 746 bp, Homo sapiens
ggcaaaaccctgtctctactaaaaatacaaaaattagccagttatggtggtgcgcctgtaatcccagctacctgggaggctgaggcaggagaatcgcttgaaactgggaaccagacgttgcagcaagctgagatcgcgccactgcactctagcctgggcgacagagcgagactccatctcagaagaaaaaaaaaaaggattaaaggattttccaccactcctgttgaactaattaagctccatatttttaaattaaataatgagtgaaggtgatatcagaggacaacttgaacacactctcctttctatttagaagcaaatcagctgcagacttcaatactagctattatagaataatcagttgttggacatgcccctcccaactgacctagaaggctttctctgctgtgttataaggaaggcttcggtcttttatttccatactccccacaaagtgaggcttttggagctcttctgatatggagagctgcccatgcaaggtggaaacaggcctccagggccaatcagtttgggaaacaccaggctgcctgtggtttacagcaggacttctcagagcctttactatgctaaatgcagtgggactctccaagatgtgacattgggatttggccctagaaatgttattttttggcaagggtggggaccatctttcaggaytggtattcatagccacctcttgcaaaacatggaaccgtttcattccatgccttcctcatctccttgca

SEQ ID NO: 74249 - DNA, 1882 bp, Homo sapiens
caagtcctccagattgaaaggaaaccaagaggtctgcaggcccggaaagttactctagcctaaggataatacacggcacaaggaaaataataaaaaacatctttactaaagagacggggagggttggcccagagactagaccggcagagtctacaattcttctgtgaagggaacttaaaagacttttccaccgaaccccttgacaggacagggagagccaagtggggaaagactggacgttaaggggcggagaggagcctttagaggagaaaaaatgccttctgactgatggatttacatttactggtattcctcattgacacgataaacgagtcgataagcccaacacgattgaataacaagtagaaatgcattctattagattcatcttctctgagaatgcattatggtagcttcgctcttcttgggtgtcatggactgatgacttttcaaatatatggtatcaattgtgccagccaatattctccttctggtgcttatattgtcccaactttggccaggaggagccctgtatagattgttccttgtgtaattttgaatgacccttatttaatgctttgctttctgtctcaaaaaggtataggtgttttaagattaccttgtacctttcaactccaaactgacatggcatccattactgctccaagaaactttggctcctttgggagaaaactaacactagaaaccaaaatcttagcattaagatgcattgtggaggtgacatttytcctgggccatttcagtggaaaaaagtcaaaatatttttaatgtcatgtttcataaagacatgacttcatattaatatgtttgattcagttccaacagtgccctgttcttagtcaaatttgggatcctaaaattagccttccttgtcactaatcctaaaatctagattcttatcaaaatatacaaaatatatattatttacttgctttatctgataagataatagttgcaaaaatacactatcaatacaaagggataaatactcaataaagtttttgttttagactacatacacctacggatttgttgccaaattactttgttctagaatctctcataatatctcacaccatgtggctatgcagggacttatctgacaggtagttctgggtccattgtttccatccactttcattttgaagaggctgcaacctgcccccagcccccgttttctgctctactttttcattttaccgtgacttacaaactcccaatatactaaataattcactgaataataatactgttattgtgttattatttctcccttaccccattggaatgtaagcctcatggagcagggattttattcactggaccctggcagttgcaccctaaaggcaggactaagaaagctgggcttgattctgggggctcaggggactctactgggttggcctgcaagagacagtcttcagtgaaacagcagaagccactctaggctgctcccaaatacttatccccccacaacacacacacacaagtacttcccccaattcccacaggactcaatgagaaactgtgaaaacaaagcaagccagtagtgctgagcctgagcccctggactcagtgactgggcatctggagggttggagcttctagaaaaagaatgtggcaggaagctgtgccttatgatgagagtgacctggctcctggtttgcccagaggagtcccgatttacagctgtggtcctgccgtaattactaatcacattccttttcactcatgtaagtgtccagatgtagggataaatgcattggaggggcagggaggaggcctggggacttgggatagaagtgctccaggggagagggaacagccagctgtagaggaggcagcccctccaccaatgggg

SEQ ID NO: 74250 - DNA, 894 bp, Homo sapiens
taaaagaaatctcaacatcaaactcaacgagcaaatacagacaaacaagaaatgagggcaaggcagccattcctccgtcaaacgtaggggagaaactttgctttaagtgaccacaagagaaaatgtgagagtgaaatcttagtttttcaccagtggaaaattagttaagggttttaatttagggttgtgggggctgggtgtgtggagaccgtaagggagctgggacaagcacagctgtgtgacaaatattaatggctatcgcaattctcaaactgagaaattcaggtcagcctgtagggcaagctgcctctaaatgcaacaacctttttatatggctgactacttcttccatgagtaatttttttattttttcacttagctcaagttggaattaatggttctagtgatttgtgttgccttagatgaaattcttaacattgcaattttattaatcctacctgcaaagagagagcactcgcgcctgtaatccctgcactttgggagggtgatttctcatttctcaaaactgagaaaatagtttttcatgtaagttaatatttaaattttcaaattaggggctgggcacagtggctcacgcctgtaatcccagcactttgggaggccgaggcgggtggatcacgaggtcaggagattgagaccatcctggctaacacggtgaaaccccatctctactaaaaatacaamaaattagccgggcatggtggtgggcgcctgtagtcccagctactcgggaggctgaggcaggagaatggcttgaacctgggaggcggagcttgcagtgagccgagatcgcgccactgcactccagcctgggtgacagagcaagactccgtctcaaaaaaatacataaataaacaaataaatttcaaatta

SEQ ID NO: 74251 - DNA, 894 bp, Homo sapiens
taaaagaaatctcaacatcaaactcaacgagcaaatacagacaaacaagaaatgagggcaaggcagccattcctccgtcaaacgtaggggagaaactttgctttaagtgaccacaagagaaaatgtgagagtgaaatcttagtttttcaccagtggaaaattagttaagggttttaatttagggttgtgggggctgggtgtgtggagaccgtaagggagctgggacaagcacagctgtgtgacaaatattaatggctatcgcaattctcaaactgagaaattcaggtcagcctgtagggcaagctgcctctaaatgcaacaacctttttatatggctgactacttcttccatgagtaatttttttattttttcacttagctcaagttggaattaatggttctagtgatttgtgttgccttagatgaaattcttaacattgcaattttattaatcctacctgcaaagagagagcactcgcgcctgtaatccctgcactttgggagggtgatttctcatttctcaaaactgagaaaatagtttttcatgtaagttaatatttaaattttcaaattaggggctgggcacagtggctcacgcctgtaatcccagcactttgggaggccgaggcgggtggatcacgaggtcaggagattgagaccatcctggctaacacggtgaaaccccatctctactaaaaatacaaaaaattagccgggcatggtggtgggcgcctgtagtcccagctactcgggaggctgaggcaggagaatggcttgaacctgggaggcggagcttgcagtgagccgagatcgcgccactgcactccagcctgggtgacagagcragactccgtctcaaaaaaatacataaataaacaaataaatttcaaatta

SEQ ID NO: 74252 - DNA, 983 bp, Homo sapiens
aaaaagagacagtccaaaacagtagataacttctgtttttgaataaattttctgagtagctactatctgagagtaaagtgaagaaggaaacatgataggtaccgaaaagtcaacatgaaattaaaaattagctatgaaaaaaatctaccaaatggatagcttgctggtataatcaactgtttattctacgtatttcattgctattaattcttggtaagcaattctgattttttaagccctcttcaaacctaaccattcgtttttaaaaacaaattagaaaagacaagacaaaataattttcttagaaatcaattctgacttacagaaacctgaggtggtggaggcaaagaaagagatggtgctggagaaaaataccccaatgaacattcagagaaaaatggcggttgcactggtgaaggagctgtaaaaaaattttttgttaagagtttaataacagaaatacttcatcaggaatatattaagtttatgttatgtttgaagaaatacatctaggtggagtgcaaattagattttatcaacctctgataaaatctttaaacccctcatgagtccacctccagccatttaaaattgtcatatcatcataaagtcagccattcactttaaactaataattagtccctcaaaactctcactttgttccacttttaacytaatgatgagagcagggaataaagcaggaaaagacagaaacatactttaaaaaaacaaacaaaaaaaaacacaagcatattttttaagaaataatgaaacaaaaaattcccttaaattctgccaaagtgccctagccaaaggaaaacaatgatgtggtgacttcattattcccttcttgtggagcaaaagaaagttgaggacatggaccatataagctgtgttgaaagtaaataaaactaggaatgagaagaattacttagtgtatttagtcaataaggtgcacattttttcacattttaattttgaaa

SEQ ID NO: 74253 - DNA, 714 bp, Homo sapiens
atataagtgctgcctgaaggctgggtttgggtattttatcaaaaagtagcaaataataacaaatgtactttgtgaaaaaataattagtggatgtgattattttattttcgaaatataaatttatgcataagaagaataaatgcaaggtattagtagcaaccaatttacttcttatacaatccttatttcaggcaacatttataaaggccaactgaaattgaagctaaggcaaatgcccagatataagctcaggccaaaatccccaaatttgcagttatcaatatatcctcaatatatcaatggctccttggctacagggtaatgtaaactaagacaaaataaatctggtttgcacaagctttggatattttattagccatgtggcatcttccaacctatggaaattaagctatggccaaggccaagtctggctaaaaaaaaaaacaggcaatcacacaattttaacaagctcacatgttttaacrtaacctcaaatctattttcatttttttccatttcctgcccaataacagctcccatactgaaatgcagggactgaagccttctttttttccccccactggagaaatcttatctaactctattaggccataaataaacactaagacccatgctaaacctcaaaaatcctaaacaaatatgcaatatattcttcatatgctcacctatttcattcttataatggctttccct

SEQ ID NO: 74254 - DNA, 714 bp, Homo sapiens
atataagtgctgcctgaaggctgggtttgggtattttatcaaaaagtagcaaataataacaaatgtactttgtgaaaaaataattagtggatgtgattattttattttcgaaatataaatttatgcataagaagaataaatgcaaggtattagtagcaaccaatttacttcttatacaatccttatttcaggcaacatttataaaggccaactgaaattgaagctaaggcaaatgcccagatataagctcaggccaaaatccccaaatttgcagttatcaatatatcctcaatatatcaatggctccttggctacagggtaatgtaaactaagacaaaataaatctggtttgcacaagctttggatattttattagccatgtggcatcttccaacctatggaaattaagctatggccaaggccaagtctggctaaaaaaaaaaacaggcaatcacacaattttaacaagctcacatgttttaacgtaacctcaaatctattttcatttttttccatttcctgccmaataacagctcccatactgaaatgcagggactgaagccttctttttttccccccactggagaaatcttatctaactctattaggccataaataaacactaagacccatgctaaacctcaaaaatcctaaacaaatatgcaatatattcttcatatgctcacctatttcattcttataatggctttccct

SEQ ID NO: 74255 - DNA, 968 bp, Homo sapiens
tattcataccaaaaatactattcaatagtaaataaaacgtcaagaatatgttgagcaataaaagtaaatcttggagaaagtttgaaatatgtaaaactgactacaattttgattggtataattttattgttaaattataatgaaaaataagagaatgataaaaacaatattcatggcagtaattacctgtaatggaagtaaaaattggaaaatggaagtgggggttgagatcagcacctgacaaaaaggtgatgacgatattcctattttgtaaaatgggtagtaagtgaatggatttccattgtgtttctttctttctttgtgttttttttacatttattctataaacaattgttttatattcttaaaatgagtaagtgtgaagcatcccgtttgtctcaagtggacatttctgagttactgagatattttagaatcagaccagtgacatgtcaacctgaaaattgttctcaggagtttggatttgaattgactttcagtaggaaatgtccatgaattctggattagaaagtattgctatgaaaattgtggttgatcatcgttaaactgtatattacatttatatacttcactgaaataagttaagaccagagaaaaggacagataaaatatcttttgtaggaggcaagtcatgaggatgattcctaacctaaattctaggggttgctatggagacacaaaggaaaaggcagcagctagatctattgcaaagaaaggagyggcagaatttggtttaagattctgcaattaaaggatttcagtttttttttctgtcattatctaggcagaccaagtgaagacatgaacaatataaggataattctgaccagaatatgatatgagagtattgtattaagagctgggagttggatctgagctacgttgttggataattgctctattttttttattttttttttttgctgctgctgcagaaaagagcaaaa

SEQ ID NO: 74256 - DNA, 968 bp, Homo sapiens
tattcataccaaaaatactattcaatagtaaataaaacgtcaagaatatgttgagcaataaaagtaaatcttggagaaagtttgaaatatgtaaaactgactacaattttgattggtataattttattgttaaattataatgaaaaataagagaatgataaaaacaatattcatggcagtaattacctgtaatggaagtaaaaattggaaaatggaagtgggggttgagatcagcacctgacaaaaaggtgatgacgatattcctattttgtaaaatgggtagtaagtgaatggatttccattgtgtttctttctttctttgtgttttttttacatttattctataaacaattgttttatattcttaaaatgagtaagtgtgaagcatcccgtttgtctcaagtggacatttctgagttactgagatattttagaatcagaccagtgacatgtcaacctgaaaattgttctcaggagtttggatttgaattgactttcagtaggaaatgtccatgaattctggattagaaagtattgctatgaaaattgtggttgatcatcgttaaactgtatattacatttatatacttcactgaaataagttaagaccagagaaaaggacagataaaatatcttttgtaggaggcaagtcatgaggatgattcctaacctaaattctaggggttgctatggagacacaaaggaaaaggcagcagctagatctattgcaaagaaaggagcggcagaatttggtttaagattctgcaattaaaggatttcagtttttttttctgtcattatctaggcagaccaagtgaagacatgaacaatataaggataattctgaccagaatatgatatgagagtattgtattaagagctgggagttggatctgagctackttgttggataattgctctattttttttattttttttttttgctgctgctgcagaaaagagcaaaa

SEQ ID NO: 74257 - DNA, 805 bp, Homo sapiens
taatatctctgtttttcaaggtcaaaattaattgcactctgtttcaatgacgcttaatcttgaaggctttgctcatataattggccttatttctctcatggtgtcatttttaataaaacctttttgttatttagtaactatataattaatttttattttatagtgaaaatacataatgaaatattgatctgtaacatatacccacttaaaatagcatttcataaccccttgtagtctcagtaagaaacatattttatatcattgttaacattttctgggttatgtttattatattgagttgattcccagcaaagctgtggatcacatgcaaaaatatttaagatatttggtggtaagacaagaagttaacatatttttgttcaacttgattcattttatcttctactatgagattctactattaacatattgacatattaatattttttgaaaagtattaacttctcacaccactttcaaaatgtcagtaaaaccattccattggtatgtacctgcaagcctgcatttcacgtagtttggacttctataaatttcaaatatttaatatatgaccatattttaatgctatttcatcagtgtttatggagaagaccaaagcaaaaaaaagcaatatatakttagttacgattataaggttatgtgctgtcaattataagtcaaaaggccatattcagtttcgcattaggtttgcgaaaatccaaattgcacaaaattatattgtataatttttttaagtctgtggttttgaaccattcatgtgaccaggcagatttacagtaccatt

SEQ ID NO: 74258 - DNA, 1358 bp, Homo sapiens
cccttgagcccaggagtttgaaaccaacctgggctacatggcaaggcctccctctacaaatgtaaaaaaaaaattagccaggtgtggtggcatgcgccatgtagycccagctacttgggaggctgaggtggaggactgtttgagcccagaagttcaaggttgcaggagctaggatcgcaccactatacaagcctgggtggcagcaagaccctgtttaaaaaaaaaaaaaaattcagctgtatatgcaatgaaaacctacaagtcactgaaaagttactgaagtttagaaaactagccaacaaaatcattgctttggtaaacaaatttgaaatggctaattgaaagtacattttacagctggcaatataaagttatctatcagcagcactggacagttcattttcttctcttggataaagtttatcacttggcttcaaggacatcactcagttttcctttacatctccagtgtctcctctatgaggtgctttctcttctctccaaacttttaatgttggaatgccccaagtctttgtctttggctctcttctttatctacactcattcccttgttgatatccagtctcatcacttttaataacatctatatgccagagtcccaaatttatacccccaacttatatccaactgcttactgccgaagaataaaacactgaagttaaaaaataataaacataccaggcaagggaacacttactagtaaagccatttactgagtagttcactaaaggtttaagtctgaggggattttaggtcataggaaaaaaaaaaaaaaactgaaaaagaacactcggatggtcagaggagtctgtaattcatacacaataggttttaacaaattcctacatggaactgctccagtttataggttagaattaactatagtgaaaaacagccttcagtttttatcaattccaggccagtgagtgctactataagttgaaaattctccatttacacttctctacaggacggcttgtgtagtctaaggaaatcaaacatgtgaatgagctcccaaactattttcctcaatctaacctactctacctgcagccccctttctcagttgacagcaatcctctgtacagatgctcaaactaaaaaccgtagatcagtactgcccttacaccaggcccaaggaaaggcccttatccaagggccctgagctttaggattgagtgctttagagtcaagatgacatgtcaatctagagagcatactcattctgcactacactctaggtactcaagaccccaaataccctgcccagaatagccccagctgttccaggaaatgcattacatcatcattgcatgcactgatgtgttagggggata

SEQ ID NO: 74259 - DNA, 3441 bp, Homo sapiens
gggggctgtaaacaaagagatttacagagtgcaccaacaatagcatgtgtggtgcaatcaaattgatggtcagatgcttctgaagcagctgggaggccaaaatgctacagagactgtagaggacagaaacaaactgcagcactcccatccaccacccttgaatctacagaaagaacttaggtgggcagcaatgcgccagcaaacagccatgatttgacttaccctcttatcgagtccccagttgtaaatggcctttctccattagaaccatctcgggttttttcccctgcaactttttcccaaacttagtatcaagctttattttttctttctgaataattctaaattattctaactggagtgagcaaaaatgaattaaaaatagctttataaaaccttctttatctgtatccattgagtcacaaaagcaggacatacacacaaggcagaattataatgaaagagaaaatctatgtataagtactgaagggattagctctggcttatcgccttgttgacattattgacatcacctagaagcatcctgataaaagatatcattccattatcaaccagaaattaccaaaatatggaggcagggagggagaaagtgtmctgctgcattctcttaaaattagcaatgaccttgctaattaaaacttaattgtgagagagtaacatgtagatgcccccctttgaaaaactggcatggatccccactcatttaaaagttgtcacttacaaacctaatgaaattggcttattaaaatgaacactaatggaaggttctgttgctcagagatgacaggacagaggattgaggggaggaaggaatgagtgtgtatgtcttgtattgccttttattatctgagaagacacctctgacagcaagaacaccgtcaggaggatgaaaacaaaatgagtgtggcagaagccacattctccttgtttattaatatgcattatatatagctctaagccactgggtgccacagataggtgggttattctattcaagtatatttattttaaacaagtgtatgaagagagattcaaggacaacacagtttggtataccttattttattttttatgtgtctgtttgggaagctcttttagtctggcatgaggcaagagagtagattattctttaaagaactaaaaaattcagggactgcattaacctatcttctcagtgagtcatccaaatagtgcttcaacaagtatacacacacacactctctctctctttctctctctctcttttcactctaaaatgcttttcaccttacatttttccatgctatccccaactgcctaacttcagaaaacctatgaatgctaaggtgttccttattatgaatgctaaggtgaaatggttcccattactcttatccaaacagccaataaaacaacctcccatttaaaaaaaagatatgcataataatagaaaaaaatgttctttctaatctaactcagcttctttttgattttctcagaatctgtcatattcaagggaccaccatgtgaggttgcacctcatttctgcacaaacccatattttcagatctgaaaaatctatagaaaatagtagtgagaaatagccttgggtttggagccaagtggcttgaatccatatgttgactatgccactttctaatggtgtaatctggggtagtaaaattattttctctggtccttagtttcctatctttgtcaggttattaaaagtatcttcttgttaaggctttactaaagcatttaacccagtacctatgaggtgaaaactcagtaaacattagcctttactcttctatgctctattgaacaagccacatagctttgatctgcttttcttccttctgcttaccttcagcacagtgacattttgtccttacccaagaattgctcattgttttagaagcctttctttactcattctcaataagcatcctatttatttgtctgaattattcttctctttgtcattatattaataaaatagtttattgaattcttaagggatgtccttctctagcaagccctttattaagtaaattctattcacagcctgacctgtccaatgagagatttaatagagtgacagaaggtgagagaagaggaaaagggagaaaagttaactaaaaaaacgtggaaggaagctgaagtgctcacaaggattttatcaagccttgacccaaataaagcctctacaatggcagctcctgcaatgagatgttacgagagcacagtttgcaagaattcttaacctggaaacaatcctagagaaaatgtgctacattcaaacaccttataaaagaaaagaaactaaggcatgaaaagtttaaatgcctatagcacaaggcatgtaactattaaatagtatacccaaatcctaaaccctagataccttactcttaggacagagtttctgcccctaaatctttgtatcctctagactattaacctaagaagccatttatttatccagtcacaagaaattatctttaatttaagacatctatttgcctatcttctcaacactggatggactttgcctggaacaggactgtctatcgcgtttcactagaattggatctccacgttctccaaatcttctgaagcactttggttacatgtcccccaaagacagccctaccttagtcaatagagtaagcacctagatgatgatataaatataaacacattatgaattgaaagagaacaaaagttatacatactcaaaattatcttcctaaaaatttttactatctttttaataattttttaggaaaattacttttaggcagacattgcattcggtattttaatctacctcttctcatttagtcattcaaaatattagatattccatatatacttttgaatgaaggaatataatttaggtgcctcaccgacactttcatcaagataggacatcaagatagtgtcttaggaaagagtgtatccaaaggcactagctaatgcatgacaagtccagatttcaatccaagcatctttgagaacaagcccatttactttcctctctacttgacatcattgtagccatttcagtgggtcaaagacatcatcttcagaaagtgtccattacttaatgggtcctcagagtagaaatgtatcaatcattttacacagtgaataccttagtgaaaatgaattgattgaagtgcctagtagaaaagaagcatttgagggaaaaagggctcaaaacaggtgagatttgattgaagcaagggagtcagcacagatatgaagtctcaggcaggcctggtcaatagagcaggcagttgcagcagtgcaggggaggccctggcaaagcaaggccctgcattgaggagcgatagtggggcagaggcactccacagtcctccatggaccggccctgactccaaccatcattgtaaatgtgaagtgctcctt

SEQ ID NO: 74260 - DNA, 609 bp, Homo sapiens
acatgagaaaattatcattgatacctacttgagaaacatttagtttctaattctattgctcagtttttattacatgcttgcaggtggaaatgaggtatgaatattcaaatacctttcacatgtaagttgccgtccttccaaccaccaccaatttacactctgccttcattgtctcccttctcttcatttaaaacatgaakccaatttcctccaaggcagtgacagctcttggcattaaggaaggtgaataggttatgagagatccctatgaatccataataaaaatgaaaaagaagataactggcttattttctccatagtatagttttacccttccatttgttcattctcctttatctttctccatttagtctcttctatcctgaatagaaatggagctatgttccatcagtgaagcagcttgatgaagtggaggacattagacaaacttttagtagggagacaatcaattaatataagcatggttttccatttttaaggtttcataatagtctcgacatccagattcatgtcttggcaactaactgtaacacacatggtaaaggcagaaggaaatgattttcagtggctcacaaactatcctcagga

SEQ ID NO: 74261 - DNA, 531 bp, Homo sapiens
gtaccatccgtatgcataccacgcatttacttcctagcctcaccagcgttttgggtgtggccacagctactccccaaacctttcatcttgcaagtccctagatgtcctcctcgggaaagctccctgcgcacagcttgtgggagactgcaggctcataaacagcataagccagcattccaatcagattatttctcacttgcaatattgcacaaagagaaaaaaataatgctgaacattctgttcgtggaagaaaaaatagcaggagaaaactgtcacattgtttggtctattttcaatttcattcccgagccctgcaaatagctatctgtgcaagcaggccagaagaggactccagcgacctgacatgcacgatctcagatcaggtctctagggcctgygaaaaagggagagacctttggctggcacatatctacacatgtgataaaattgcacaagactaaatacacactcgccaatgcaaaaaactggtgaaatctgaatggataagcttggtgggttgtaccagtcaat

SEQ ID NO: 74262 - DNA, 747 bp, Homo sapiens
cttgaaatttgctaagagagtaaatcttaagtgttgtcaccacacacaaaaaaaatggtaactttgtgaagtgatagatatgttaattagtttgaatttggtaatcaatgtatagatatatataaaacatcatattgctcaccttaaatatattccatttcatttgttaattatacctaaatcaagtgaaaaagaagtaaaatactcaatctagttgattgggctagaaaatcagagtccaggcagtagattatatttaatgccaggtggtatacctaccattaaagttaaaattttaatctgtcactcatttacagattgcctttcattgcttaatgaagggagcagggagcagaatcaagcctccagaaagagctacagtgtgtctgagaggcagtctagtggtctgtgatctataagtgtcctctcttccttggggagaatggaggtctgaaataaaagctggaagtaaagccctgccgtatgaaccacactaacttgcatggagataggaaagggctgttgctgggctgttaactaggttattaggactcacaccaaatatgtcactgctacgcagcaaaactagtgttgacccaaacagatagtaaaagtaagatgcccattattgtcttgctgtagtcagaattacctcagaacctgggaagaaataaacctgcaagtggaaggcatcaacgaatctgacttcgagttttggtaaaacagtacttmaacttcccttgtttg

SEQ ID NO: 74263 - DNA, 622 bp, Homo sapiens
gcctctagaagaggaaaagatgattcttgtgataatgtgggaatgttggctcttgagcaaaaattttaaaactgaaataggttggatcagttagttattattacaataaggctgtgcartgcatggcatttcaatagcattcagcaataagcattcttacaggttaatgtgctcactggagttcagctgatctaagctgagcacagctaggccactttgcttctcattgcagatctgcaggtgagctgaaaccgctttattctacatgcctcacgtccttcttggactatcaggctagccatggcatgttcctcaaatagtagtggtagaggcgccagaggggagattcaaatgcacaagtatattttaagaccctacttgtgttatgttttctaacctcctattagccgtgaagccctgtggctgagctcaaagggatggggcagaaaagtgtattccttccatagaggaacagaaaaacttgcatggcaaaagcataaaaactcaaagccaataactgaatctacaacagatgtgagcatattttatatcctgaattgaggaaaatggcttaacagataattacagatttggatgagcttcaaggttttatacaatgctt

SEQ ID NO: 74264 - DNA, 905 bp, Homo sapiens
tataaagatttctatttatgtgaactccaaccccaaacacagactgtgtatgtttgggagcttagtcagcaaaaagtcacaggcttttgcaggccacgcttgcagtttcattggtagtaatattccctcaaaatctctgtaggtatttgacctattttcattcagcttagttcctgtgtaagtaatcacagccaaaggttttcttcctgtctgtttttttctctcaattatatctatcttgcaataatttgaaacaatgggcttatgtgggaagaaaacactgttaatctgatctttggcactgagttctctcccattttctgaacaataataacacatgatgagagagggaggcaatacagacttgagaccccaccttcataaagtgtttcatcagcactacctctaatagctagcctgacttcaactctctgatagggttttgctaaatgtagaaaaaaaagaaaagaagctagctcacatcaacagtgtaactttttccaacaagcatggctagatatggtctgcctttctaaagcatttcagatgagagtttatcaaatgtcttattcaagtataacagggatctctggctttcaagcctaaaatgtgtgtgtcttaccccttacaaayaaatgctaagacaatggcatgtgttttccatacctgttaggacagtagtggtccaactctaagagacaaactctgtattaattgtagaaaacaaaatcagtgcataagacccaaaatacaatgcttaagcaagagacaaatttatttcttacatagcagttcaagattttgagagcagctttgacattttcaatgtggaactttcaactctaggtctaaaggtgacggctccccttctcatttcccaagtggtagaaacaagggaaggggca

SEQ ID NO: 74265 - DNA, 1510 bp, Homo sapiens
ttcagtttcaagcgatggaaatctttctcaaaatggaggaaacaatgattagctcctgtaattggtatgttcaataaaggggcatggctttagaaatcactagacctacagcctcaaaaaatgtcattaaaacattgcctgtctctccagctcctgcctccgcactctgtgtatttggctgcgttctcaggttctcatttagagtcagcaaaaatgatttccagcagcttcaaatttacatgctacctgcttagcgagactggtggatagtaatgccacttttccagtaattcataaagccttggatgtcctctgattggtgcagcttgtgtaacttgtccatcccggcgccaatcactgtggccaatcaaaatcatacatctctctgattggttagaactgggacacataactatggttggaatccaaagatgggattttctctgcccagatgatatagaccaagactggaagaggaccgattccctatataaaatttgaggtttcttttacaataagaaatgctaaagataagtaataatagtaaagtggataggaaaaacagaagctgaaaatatgggaaagcatcttgaatgtgacctggccaggactgaccsttgaccgaatcggtttgggggtgggaaatgcgagtgaaaaggggacattaaatctgttagaccacagaacagtcactaagtatcgcattatggaggaagttttgccaagtggtaactggacagttcaccagttgagctgagaaaggacagcattaatacacttattcattgtaggtgattgaatgaatacatacatgtatgaaatgaatgaaaggataaacaaatgaagaacaactttctaagacaggcattatttatcccattttacaatgaaataaaatgaagtccagaggctgaatagtaaagttcttataatgtcagcaacccgttattttagcttaagggctcaacttttgggtatccattcccatgtgctctaaaaattaagtacattaaaatgaggcttagtattgtgaatcagttttaatcctaaaatttaaaactgggaaagagactttcataattaaaagagcttaaatctgaactcttttactagccaagagtcataaggtaagttattgaatcccttttagcttccacttcttcattataaaacagtgataacacatcctttatggcaaatattaaataaaataacctatgtgagaagcacctaaataacatatttaaaattaaatttgaaatttaactaattaaatttatgagttttttttaaataaaatagaaactaagatccattctttaagacaaaatgaaacaacatcaaaaaaaaaaaaaaaaacacaacacacacaacttattctgtctttcccccaagcacaattccaaatcaccccatgctgttacttaagttaatataattatgtactaggaaagaaagaggcatttactaagcatataatgcctaaaaatatgggcccagctaactcatt

SEQ ID NO: 74266 - DNA, 1510 bp, Homo sapiens
ttcagtttcaagcgatggaaatctttctcaaaatggaggaaacaatgattagctcctgtaattggtatgttcaataaaggggcatggctttagaaatcactagacctacagcctcaaaaaatgtcattaaaacattgcctgtctctccagctcctgcctccgcactctgtgtatttggctgcgttctcaggttctcatttagagtcagcaaaaatgatttccagcagcttcaaatttacatgctacctgcttagcgagactggtggatagtaatgccacttttccagtaattcataaagccttggatgtcctctgattggtgcagcttgtgtaacttgtccatcccggcgccaatcactgtggccaatcaaaatcatacatctctctgattggttagaactgggacacataactatggttggaatccaaagatgggattttctctgcccagatgatatagaccaagactggaagaggaccgattccctatataaaatttgaggtttcttttacaataagaaatgctaaagataagtaataatagtaaagtggataggaaaaacagaagctgaaaatatgggaaagcatcttgaatgtgacctggccaggactgaccgttgaccgaatcggtttgggggtgggaaatgcgagtgaaaaggggacattaaatctgttagaccacagaacagtcactaagtatcgcattatggaggaagttttgccaagtggtaactggacagttcaccagttgagctgagaaaggacagcattaatacacttattcattgtaggtgattgaatgaatacatacatgtatgaaatgaatgaaaggataaacaaatgaagaacaactttctaagacaggcattatttatcccattttacaatgaaataaaatgaagtccagaggctgaatagtaaagttcttataatgtcagcaacccgttattttagcttaagggctcaacttttgggtatccattcccatgtgctctraaaattaagtacattaaaatgaggcttagtattgtgaatcagttttaatcctaaaatttaaaactgggaaagagactttcataattaaaagagcttaaatctgaactcttttactagccaagagtcataaggtaagttattgaatcccttttagcttccacttcttcattataaaacagtgataacacatcctttatggcaaatattaaataaaataacctatgtgagaagcacctaaataacatatttaaaattaaatttgaaatttaactaattaaatttatgagttttttttaaataaaatagaaactaagatccattctttaagacaaaatgaaacaacatcaaaaaaaaaaaaaaaaacacaacacacacaacttattctgtctttcccccaagcacaattccaaatcaccccatgctgttacttaagttaatataattatgtactaggaaagaaagaggcatttactaagcatataatgcctaaaaatatgggcccagctaactcatt

SEQ ID NO: 74267 - DNA, 1510 bp, Homo sapiens
ttcagtttcaagcgatggaaatctttctcaaaatggaggaaacaatgattagctcctgtaattggtatgttcaataaaggggcatggctttagaaatcactagacctacagcctcaaaaaatgtcattaaaacattgcctgtctctccagctcctgcctccgcactctgtgtatttggctgcgttctcaggttctcatttagagtcagcaaaaatgatttccagcagcttcaaatttacatgctacctgcttagcgagactggtggatagtaatgccacttttccagtaattcataaagccttggatgtcctctgattggtgcagcttgtgtaacttgtccatcccggcgccaatcactgtggccaatcaaaatcatacatctctctgattggttagaactgggacacataactatggttggaatccaaagatgggattttctctgcccagatgatatagaccaagactggaagaggaccgattccctatataaaatttgaggtttcttttacaataagaaatgctaaagataagtaataatagtaaagtggataggaaaaacagaagctgaaaatatgggaaagcatcttgaatgtgacctggccaggactgaccgttgaccgaatcggtttgggggtgggaaatgcgagtgaaaaggggacattaaatctgttagaccacagaacagtcactaagtatcgcattatggaggaagttttgccaagtggtaactggacagttcaccagttgagctgagaaaggacagcattaatacacttattcattgtaggtgattgaatgaatacatacatgtatgaaatgaatgaaaggataaacaaatgaagaacaactttctaagacaggcattatttatcccattttacaatgaaataaaatgaagtccagaggctgaatagtaaagttcttataatgtcagcaacccgttattttagcttaagggctcaacttttgggtatccattcccatgtgctctaaaaattaagtacattaaaatgaggcttagtattgtgaatcagttttaatcctaaaatttaaaactgkgaaagagactttcataattaaaagagcttaaatctgaactcttttactagccaagagtcataaggtaagttattgaatcccttttagcttccacttcttcattataaaacagtgataacacatcctttatggcaaatattaaataaaataacctatgtgagaagcacctaaataacatatttaaaattaaatttgaaatttaactaattaaatttatgagttttttttaaataaaatagaaactaagatccattctttaagacaaaatgaaacaacatcaaaaaaaaaaaaaaaaacacaacacacacaacttattctgtctttcccccaagcacaattccaaatcaccccatgctgttacttaagttaatataattatgtactaggaaagaaagaggcatttactaagcatataatgcctaaaaatatgggcccagctaactcatt

SEQ ID NO: 74268 - DNA, 1510 bp, Homo sapiens
ttcagtttcaagcgatggaaatctttctcaaaatggaggaaacaatgattagctcctgtaattggtatgttcaataaaggggcatggctttagaaatcactagacctacagcctcaaaaaatgtcattaaaacattgcctgtctctccagctcctgcctccgcactctgtgtatttggctgcgttctcaggttctcatttagagtcagcaaaaatgatttccagcagcttcaaatttacatgctacctgcttagcgagactggtggatagtaatgccacttttccagtaattcataaagccttggatgtcctctgattggtgcagcttgtgtaacttgtccatcccggcgccaatcactgtggccaatcaaaatcatacatctctctgattggttagaactgggacacataactatggttggaatccaaagatgggattttctctgcccagatgatatagaccaagactggaagaggaccgattccctatataaaatttgaggtttcttttacaataagaaatgctaaagataagtaataatagtaaagtggataggaaaaacagaagctgaaaatatgggaaagcatcttgaatgtgacctggccaggactgaccgttgaccgaatcggtttgggggtgggaaatgcgagtgaaaaggggacattaaatctgttagaccacagaacagtcactaagtatcgcattatggaggaagttttgccaagtggtaactggacagttcaccagttgagctgagaaaggacagcattaatacacttattcattgtaggtgattgaatgaatacatacatgtatgaaatgaatgaaaggataaacaaatgaagaacaactttctaagacaggcattatttatcccattttacaatgaaataaaatgaagtccagaggctgaatagtaaagttcttataatgtcagcaacccgttattttagcttaagggctcaacttttgggtatccattcccatgtgctctaaaaattaagtacattaaaatgaggcttagtattgtgaatcagttttaatcctaaaatttaaaactgggaaagagactttcataattaaaagagcttaaatctgaactcttttactagccaagagtcataaggtaagttattkaatcccttttagcttccacttcttcattataaaacagtgataacacatcctttatggcaaatattaaataaaataacctatgtgagaagcacctaaataacatatttaaaattaaatttgaaatttaactaattaaatttatgagttttttttaaataaaatagaaactaagatccattctttaagacaaaatgaaacaacatcaaaaaaaaaaaaaaaaacacaacacacacaacttattctgtctttcccccaagcacaattccaaatcaccccatgctgttacttaagttaatataattatgtactaggaaagaaagaggcatttactaagcatataatgcctaaaaatatgggcccagctaactcatt

SEQ ID NO: 74269 - DNA, 1510 bp, Homo sapiens
ttcagtttcaagcgatggaaatctttctcaaaatggaggaaacaatgattagctcctgtaattggtatgttcaataaaggggcatggctttagaaatcactagacctacagcctcaaaaaatgtcattaaaacattgcctgtctctccagctcctgcctccgcactctgtgtatttggctgcgttctcaggttctcatttagagtcagcaaaaatgatttccagcagcttcaaatttacatgctacctgcttagcgagactggtggatagtaatgccacttttccagtaattcataaagccttggatgtcctctgattggtgcagcttgtgtaacttgtccatcccggcgccaatcactgtggccaatcaaaatcatacatctctctgattggttagaactgggacacataactatggttggaatccaaagatgggattttctctgcccagatgatatagaccaagactggaagaggaccgattccctatataaaatttgaggtttcttttacaataagaaatgctaaagataagtaataatagtaaagtggataggaaaaacagaagctgaaaatatgggaaagcatcttgaatgtgacctggccaggactgaccgttgaccgaatcggtttgggggtgggaaatgcgagtgaaaaggggacattaaatctgttagaccacagaacagtcactaagtatcgcattatggaggaagttttgccaagtggtaactggacagttcaccagttgagctgagaaaggacagcattaatacacttattcattgtaggtgattgaatgaatacatacatgtatgaaatgaatgaaaggataaacaaatgaagaacaactttctaagacaggcattatttatcccattttacaatgaaataaaatgaagtccagaggctgaatagtaaagttcttataatgtcagcaacccgttattttagcttaagggctcaacttttgggtatccattcccatgtgctctaaaaattaagtacattaaaatgaggcttagtattgtgaatcagttttaatcctaaaatttaaaactgggaaagagactttcataattaaaagagcttaaatctgaactcttttactagccaagagtcataaggtaagttattgaatccyttttagcttccacttcttcattataaaacagtgataacacatcctttatggcaaatattaaataaaataacctatgtgagaagcacctaaataacatatttaaaattaaatttgaaatttaactaattaaatttatgagttttttttaaataaaatagaaactaagatccattctttaagacaaaatgaaacaacatcaaaaaaaaaaaaaaaaacacaacacacacaacttattctgtctttcccccaagcacaattccaaatcaccccatgctgttacttaagttaatataattatgtactaggaaagaaagaggcatttactaagcatataatgcctaaaaatatgggcccagctaactcatt

SEQ ID NO: 74270 - DNA, 1510 bp, Homo sapiens
ttcagtttcaagcgatggaaatctttctcaaaatggaggaaacaatgattagctcctgtaattggtatgttcaataaaggggcatggctttagaaatcactagacctacagcctcaaaaaatgtcattaaaacattgcctgtctctccagctcctgcctccgcactctgtgtatttggctgcgttctcaggttctcatttagagtcagcaaaaatgatttccagcagcttcaaatttacatgctacctgcttagcgagactggtggatagtaatgccacttttccagtaattcataaagccttggatgtcctctgattggtgcagcttgtgtaacttgtccatcccggcgccaatcactgtggccaatcaaaatcatacatctctctgattggttagaactgggacacataactatggttggaatccaaagatgggattttctctgcccagatgatatagaccaagactggaagaggaccgattccctatataaaatttgaggtttcttttacaataagaaatgctaaagataagtaataatagtaaagtggataggaaaaacagaagctgaaaatatgggaaagcatcttgaatgtgacctggccaggactgaccgttgaccgaatcggtttgggggtgggaaatgcgagtgaaaaggggacattaaatctgttagaccacagaacagtcactaagtatcgcattatggaggaagttttgccaagtggtaactggacagttcaccagttgagctgagaaaggacagcattaatacacttattcattgtaggtgattgaatgaatacatacatgtatgaaatgaatgaaaggataaacaaatgaagaacaactttctaagacaggcattatttatcccattttacaatgaaataaaatgaagtccagaggctgaatagtaaagttcttataatgtcagcaacccgttattttagcttaagggctcaacttttgggtatccattcccatgtgctctaaaaattaagtacattaaaatgaggcttagtattgtgaatcagttttaatcctaaaatttaaaactgggaaagagactttcataattaaaagagcttaaatctgaactcttttactagccaagagtcataaggtaagttattgaatcccttttagcytccacttcttcattataaaacagtgataacacatcctttatggcaaatattaaataaaataacctatgtgagaagcacctaaataacatatttaaaattaaatttgaaatttaactaattaaatttatgagttttttttaaataaaatagaaactaagatccattctttaagacaaaatgaaacaacatcaaaaaaaaaaaaaaaaacacaacacacacaacttattctgtctttcccccaagcacaattccaaatcaccccatgctgttacttaagttaatataattatgtactaggaaagaaagaggcatttactaagcatataatgcctaaaaatatgggcccagctaactcatt

SEQ ID NO: 74271 - DNA, 835 bp, Homo sapiens
ccccaggtagcccatgcaaacccctagcattctgtatgcccaaccccatagccatcacccagcattcccccacggatggtgtacatatgccactccaggtcatgcacaagcacacacagcctgttcaactctgccagagtcaccatgaagtgaaacacaatacccattatagaagtctcaggcaagagaagagagaggaaaaagggcagaatgctgatttaaacatataatagctgaaaactgtctaaatcttgggaagggtatgaacatcctggtcttctgtgctttggaagaaaacactttgaacacttctgggcactccccttgggaaaataaacagaacactctcagcacttaacctagatttataagaccatsataagacaaacaagactttctctaaagagggaagaaaaggagtggaatgagtgcatccatagaaaaggtctgagagactctaagaatcccaaaccaggatgactgatgaagatctttcttttctgaagccagtcgtacaacgagagtgtgactcctccttcatatgtgaagatagcaatgcaatacttgaaggagcatggaaaatctcgaaaatatgacactgcaaaagagcaagataatttccagtagctgattcaaaagaagtggagatctatgaattatctgacaaagaagccaaaataattgttttgaggaaactcagcaagctacaagagaacatagataactcaatgagaccaggaaaacaagactagaagtccaacaaaaaataaaaattatgaaaaaaaacctaacagaaattttggagctcaaaatacaatgaatgaagttttgaaaa

SEQ ID NO: 74272 - DNA, 835 bp, Homo sapiens
ccccaggtagcccatgcaaacccctagcattctgtatgcccaaccccatagccatcacccagcattcccccacggatggtgtacatatgccactccaggtcatgcacaagcacacacagcctgttcaactctgccagagtcaccatgaagtgaaacacaatacccattatagaagtctcaggcaagagaagagagaggaaaaagggcagaatgctgatttaaacatataatagctgaaaactgtctaaatcttgggaagggtatgaacatcctggtcttctgtgctttggaagaaaacactttgaacacttctgggcactccccttgggaaaataaacagaacactctcagcacttaacctagatttataagaccatcataagacaaacaagactttctctaaagagggaagaaaaggagtggaatgagtgcatccatagaaaaggtctgagagactctaagaatcccaaaccaggatgactgatgaagatctttcttttctgaagccagtcrtacaacgagagtgtgactcctccttcatatgtgaagatagcaatgcaatacttgaaggagcatggaaaatctcgaaaatatgacactgcaaaagagcaagataatttccagtagctgattcaaaagaagtggagatctatgaattatctgacaaagaagccaaaataattgttttgaggaaactcagcaagctacaagagaacatagataactcaatgagaccaggaaaacaagactagaagtccaacaaaaaataaaaattatgaaaaaaaacctaacagaaattttggagctcaaaatacaatgaatgaagttttgaaaa

SEQ ID NO: 74273 - DNA, 1421 bp, Homo sapiens
tcattaataggtattggaatttatcaaaaggtttctccgcatctaatgatataatcgtgtttcctttcctttattcataactacggtaccatacattcctgacaatgatagtcactcttaattttttatcagattcttagaccaccatatattttaccatacattatgtatattttaataagaaatagattataaatatttgtatgtttctgaccttatgttgctggtatcttactatatatatcctattaaagtttgtttttcccactcaataatatgtttttaaaatccatctataataatatgtgacactatggtttattttcaccaatctgtaccactcatttatctgaacattacagattaaaatcatccaatttcctgccaaagcatatttggtttgcttaccacttttttgccattacaaactttttcaagatgaaccttcttctgcatgtctccccgtgagtatgtcagtttcctgattgtacattgcttggggcggggattgctggatgaaataccctgcatgtgactacattgggactggacaaagagaaagtaaatgggtgggccaacaacaaaaaaacaacatacccttcagctttgcaagacaatgccaacttcttttccaaagtggttgcaacgatttacattcacacaaatgaatacgattactggttgttctgtatgcatagaactcagtacttactatctgccagtagatgttgatctcaattggtggatccctttgtkgttttgttagtaaatatacaccaaggtttcattggtaaatgtcttgcttgctgttgattcttgtttcttttctttaaaatacctattcatatcattttgaggtacactgcaatgatattacattttatagattaatttgagaagtatatttttataattgtgtggagacctattaaaaaaacaatttaattttacctttcttaatgctattacataaggatttatcactttctctttgtatttctgttgtcagatttatctaaaagttattcagttcttaatattttggcaatgcaaatagtatgttcgaattatactttgtaactgtatattgctagtgtgtaagaactcactttatttcaaattttggtcttatgtttagaaacaaagttatacattttgatgattaattttagtaatttgattatggattcccatgcttcttttacatgaatattaatatcaccccagaattgacagggttttctgtcccatttatgacaaggaattattcattttatttttcttacttgaaagggtaggactttgaataaaatattgagtgaaaatgatgattgccaatatacttattcatctctgatttttttccccctgctttttttttttttttttttttaagagtcagagtcttgctctattgccca

SEQ ID NO: 74274 - DNA, 1421 bp, Homo sapiens
tcattaataggtattggaatttatcaaaaggtttctccgcatctaatgatataatcgtgtttcctttcctttattcataactacggtaccatacattcctgacaatgatagtcactcttaattttttatcagattcttagaccaccatatattttaccatacattatgtatattttaataagaaatagattataaatatttgtatgtttctgaccttatgttgctggtatcttactatatatatcctattaaagtttgtttttcccactcaataatatgtttttaaaatccatctataataatatgtgacactatggtttattttcaccaatctgtaccactcatttatctgaacattacagattaaaatcatccaatttcctgccaaagcatatttggtttgcttaccacttttttgccattacaaactttttcaagatgaaccttcttctgcatgtctccccgtgagtatgtcagtttcctgattgtacattgcttggggcggggattgctggatgaaataccctgcatgtgactacattgggactggacaaagagaaagtaaatgggtgggccaacaacaaaaaaacaacatacccttcagctttgcaagacaatgccaacttcttttccaaagtggttgcaacgatttacattcacacaaatgaatacgattactggttgttctgtatgcatagaactcagtacttactatctgccagtagatgttgatctcaattggtggatccctttgtggttttgttagtaaatatacaccaaggtttcattggtaaatgtcttgcttgctgttgattcttgtttcttttctttaaaatacctattcatatcattttgaggtacactgcaatgatattacattttatagattaatttgagaagtatatttttataattgtgtggagacctattaaaaaaacaatttaattttacctttcttaatgctattacataaggatttatcactttctctttgtatttctgttgtcagatttatctaaaagttattcagttcttaatattttggcaatgcaaatagtatgttcgaattatactttgtaactgtatattgctastgtgtaagaactcactttatttcaaattttggtcttatgtttagaaacaaagttatacattttgatgattaattttagtaatttgattatggattcccatgcttcttttacatgaatattaatatcaccccagaattgacagggttttctgtcccatttatgacaaggaattattcattttatttttcttacttgaaagggtaggactttgaataaaatattgagtgaaaatgatgattgccaatatacttattcatctctgatttttttccccctgctttttttttttttttttttttaagagtcagagtcttgctctattgccca

SEQ ID NO: 74275 - DNA, 607 bp, Homo sapiens
gggtttcccccttttaatctgctaagatgggaaatgattaaaatattttctaaaatgaggccaatattaaatttgttgattaattgcccacttagtgctgggtgttctgttagcatctgagaagtatatagcaatgattaaaggaagaatggtgataaagattttattatttttttaaaactaagcaaataaataatatgacatatgacaatgttttgaataaaaayggaacaagatagagattggtaggtactattttaaagaagatgtttaagaattttctatctgatcaaaatgacatttaggcagggatcagaaggaagtgagaaaatgagctatatggacacatgcaggaagcactttccaggcaatggaattggcaagcgcaaaggccctgtggcagaaagaagttggtcaggatggcgaaggggtggcaagtaacagtgtgagtggggttctataaagtcaaagacacagcagcatatctgacctgacaggttctaaatatcagatgcttcattccagggtcttgggggccatggccagaactttggagttttattctgaagcagataaaactctggagagtgtgacttattttttaata

SEQ ID NO: 74276 - DNA, 1038 bp, Homo sapiens
gatcagtgaatggaaccccacctcctctggagatgacagaacttcccaaaattgtgagtggaaaaccagaggcttcaaacaggaggaagtgaagtgagcaaggacaactagcaagagaaagagaagctgagagacagctacagggttgtgggggagatgctctttgaaaaggcttcagttagtgaggctctctctatggtaaggaaaaatttaaatgaagtcctagattctggtctttcycaactggcctgtgagatcaaccatctcattagagatgaaagagttacccctctacaaggaagagccaccctgggagtctccagccttgggcagactagcggcctgagatggtgcctctcctttaaaaaggcttagaagccctctaggaagaaacaaaaaatattcatggtcaactgcagcagttttccttagtcagaacttcttgatgttgttcttttgctctccctccatggaaatatcttttataatgatacctcaaaatatttgcggggatttagtggcaaaagaaggaaagaaggagggcagaaaatagaaaagggaaggaagaaagaaaaatagagaagttggtgttcagtgatgcgttaaagatacaatcattgttgctttagaaaagtgatttatctctcatcaaaactggccgatggtccaaaaggccagttcatctagtgtctaatctactttaaaactatgaaaaaaaggaaacaattagatatacttcaaaaacaaccaattaattatactcttttattgaaagaaaaaacaatacaatggactttaaaaagctacatttgttatggttcataaggacagaggtttacacaggttttatatatgtacacactgacaatactatatcacaacatcagaggcaccatttttgccacagaattaggtaatgaataaaacttctccaaattaatctgtttaaaaaatatctaaaatggtacagtatatttgaggattatataaatatgtgagacatatttagatattttttaaaaatagtgtttatatata

SEQ ID NO: 74277 - DNA, 1038 bp, Homo sapiens
gatcagtgaatggaaccccacctcctctggagatgacagaacttcccaaaattgtgagtggaaaaccagaggcttcaaacaggaggaagtgaagtgagcaaggacaactagcaagagaaagagaagctgagagacagctacagggttgtgggggagatgctctttgaaaaggcttcagttagtgaggctctctctatggtaaggaaaaatttaaatgaagtcctagattctggtctttctcaactggcctgtgagatcaaccatctcattagagatgaaagagttacccctctacaaggaagagccaccctgggagtctccagccttgggcagactagcggcctgagatggtgcctctcctttaaaaaggcttagaagccctctaggaagaaacaaaaaatattcatggtcaactgcagcagttttccttagtcagaacttcttgatgttgttcttttgctctccctccatggaaatatcttttataatgatacctcaaaatatttgcggggatttagtggcaaaagaaggaaagaaggagggcagaaaatagaaaagggaaggaagaaagaaaaatagagaagttggtgttcagtgatgcgttaaagatacaatcattgttgctttagaaaagtgatttatctctcatcaaaactggccgatggtccaaaaggccagttcatctagtgtctaatctactttaaaactatgaaaaaaaggaaacaattagatatacttcaaaaacaaccaattaattatactcttttattgaaagaaaaaacaatacaatggactttaaaaagctacatttgttatggttcataaggacagaggtttacacaggttttatatatgtacacactsacaatactatatcacaacatcagaggcaccatttttgccacagaattaggtaatgaataaaacttctccaaattaatctgtttaaaaaatatctaaaatggtacagtatatttgaggattatataaatatgtgagacatatttagatattttttaaaaatagtgtttatatata

SEQ ID NO: 74278 - DNA, 1038 bp, Homo sapiens
gatcagtgaatggaaccccacctcctctggagatgacagaacttcccaaaattgtgagtggaaaaccagaggcttcaaacaggaggaagtgaagtgagcaaggacaactagcaagagaaagagaagctgagagacagctacagggttgtgggggagatgctctttgaaaaggcttcagttagtgaggctctctctatggtaaggaaaaatttaaatgaagtcctagattctggtctttctcaactggcctgtgagatcaaccatctcattagagatgaaagagttacccctctacaaggaagagccaccctgggagtctccagccttgggcagactagcggcctgagatggtgcctctcctttaaaaaggcttagaagccctctaggaagaaacaaaaaatattcatggtcaactgcagcagttttccttagtcagaacttcttgatgttgttcttttgctctccctccatggaaatatcttttataatgatacctcaaaatatttgcggggatttagtggcaaaagaaggaaagaaggagggcagaaaatagaaaagggaaggaagaaagaaaaatagagaagttggtgttcagtgatgcgttaaagatacaatcattgttgctttagaaaagtgatttatctctcatcaaaactggccgatggtccaaaaggccagttcatctagtgtctaatctactttaaaactatgaaaaaaaggaaacaattagatatacttcaaaaacaaccaattaattatactcttttattgaaagaaaaaacaatacaatggactttaaaaagctacatttgttatggttcataaggacagaggtttacacaggttttatatatgtacacactgacaatactatatcacaacatcagaggcaccatttttgccacagaattaggtaatgaataaaacttctccaaattaatctgtttaaaaaatatctaaaayggtacagtatatttgaggattatataaatatgtgagacatatttagatattttttaaaaatagtgtttatatata

SEQ ID NO: 74279 - DNA, 627 bp, Homo sapiens
agctagaaaatgtaaagataccaacaaaaatacacaaagtatttaaatacccacttcctctaaaaataacagaccctaagagcaagatatataattcctaccaaagtcttcaaaataggtaatcctcatattatttacaccatgttagaatattgaaaaataggaaaactgataccaaagctattaaaatacagacaaataaattttattgcataaaaatttaacactctatgaacaaaagccaaaaataattgcaaaatatagatgaaatactgtgaaaaagatacgcttaaataaaagtttctaagagttaatatatttaatgatcaaaaaggttacgaaaatgtgaaagcaacaactaacaaccaaataggaaaaagggtaaacatttaaagttattttaaataaatgttaaaaactacccacaagatgacaaatataagctaaatctataatgggatattatttttctctaatcraatgcaccataaaaagaaaactataaaaataatattttgtccagggtatggaggtaggttggagataaattaagtaatagttattcatttttttctttttttcttttagttggagtggtgtggcatgttacctcctcatcatcctgga

SEQ ID NO: 74280 - DNA, 627 bp, Homo sapiens
agctagaaaatgtaaagataccaacaaaaatacacaaagtatttaaatacccacttcctctaaaaataacagaccctaagagcaagatatataattcctaccaaagtcttcaaaataggtaatcctcatattatttacaccatgttagaatattgaaaaataggaaaactgataccaaagctattaaaatacagacaaataaattttattgcataaaaatttaacactctatgaacaaaagccaaaaataattgcaaaatatagatgaaatactgtgaaaaagatacgcttaaataaaagtttctaagagttaatatatttaatgatcaaaaaggttacgaaaatgtgaaagcaacaactaacaaccaaataggaaaaagggtaaacatttaaagttattttaaataaatgttaaaaactacccacaagatgacaaatataagctaaatctataatgggatattatttttctctaatcgaatgcaccataaaaagaaaactataaaaataatattttgtccagggtatggaggtaggttggagataaattaagtaatagttattcatttttttctttttttcttttagttggagtggkgtggcatgttacctcctcatcatcctgga

SEQ ID NO: 74281 - DNA, 818 bp, Homo sapiens
tttaaagaacacgtacaattttcctttctgctttctcaaccctttttaagtttatttgtttatttttgagacaggatctcactctgtcacccaggctaaagtgcagtggtgcagtcccatctcacrgcggccttcacctgccacgctcaagcaatcctctcacctcagtctcccaagtagctgggactacaggcatatgccaccatgtccagttaattttttaaattttcttttgtagagacagagtcttactatgttgcccaggctgatcttgaactcctgggctcaagggatccctcatcccaaagtgctgggatcacaggtgtgagacactgggcccagctcaatctttttatttaatagcccaacttcacaggatttagaaaaaatagtcaccaaatatcctattttagggtagcatgagcattttctttttcctgaactccatatgtttggcttaaggcaatgtggatattttctcattttattttattctcagcaatatagcaagaagtaattcatttattttgttaaatctctaatgtatagcttagctgaagtcaataaaagtcaaagttaccattcacataggctatggtccatttctgacaatctcaaaaccatgccatggcacttaaaaaaacctgctattttatatgtatacttaggtttctcattcaaaactaagcaaacatggaattcaaaggaagttaatcatgtgtgactgcagagtggaaataaaatgaaatttctaatggtaacaaatatataatcagatcattaatgtttattaagggcaaagggacattccaaacact

SEQ ID NO: 74282 - DNA, 1090 bp, Homo sapiens
atgggacgagctctgcttaagttcattatgtccaaggctggcctcattatcttctaaccctatcccaaatctgcttttcttccacaattttctctcacagccaatgccccattgcccttgaattatatagctcatggatatttaatattgtaatttatggatagcataattgttctttcattcttctattggacaaatatttattgagcatctactgatcaccagtcacccaactgatttgaatctctgtatcagcaaatacaacatataaaataatgatgtatagctaaaacttttttctaatgttttccaaatactagacacaatagttgaaagagaatcactaaaaaacctacatcgtattacattgtctttgtcaccttcccttctggagatgcttcctaattcctatccaagagggtctctaaaggcaaaggattgcagggtgaatcaccaggctcattcttgtgatttaggtacacttgggcctcctgaccctgtcctcttcttttgtgtctccatctttccacctctcttagctttctatacattttctcccatgaaacatctcaaaaaaaggagctaatgtcagtcatttagagatcagcatayacttaaatcatagtttctatgtttaagacctgttccctctgtaatctgagtcatgtgttgtctatagataataggttttcaataaacatagtaatattagctttatgatagtgtatgccatttgtttttaatagctttactgcaataaaatttatataccataaagctcacgtgttttaagtgtataatttatctagctcttaccgcacactaataatagaacattttcatcagcttcaaaagaaatctcatgtgcatatagtcactcccattgacactctccaccactatgcaaccactcatctgctttctgtctctacatatctgcccttctttggatattttatataaataaaagaatatatacttgcactcttatgtttattgcagcactattcacagtcacaaagatttggaatcaacctaagtgtccatcaatggaagaaaatgtggtgtgtgtgtatgtgtgtatacaccc

SEQ ID NO: 74283 - DNA, 1090 bp, Homo sapiens
atgggacgagctctgcttaagttcattatgtccaaggctggcctcattatcttctaaccctatcccaaatctgcttttcttccacaattttctctcacagccaatgccccattgcccttgaattatatagctcatggatatttaatattgtaatttatggatagcataattgttctttcattcttctattggacaaatatttattgagcatctactgatcaccagtcacccaactgatttgaatctctgtatcagcaaatacaacatataaaataatgatgtatagctaaaacttttttctaatgttttccaaatactagacacaatagttgaaagagaatcactaaaaaacctacatcgtattacattgtctttgtcaccttcccttctggagatgcttcctaattcctatccaagagggtctctaaaggcaaaggattgcagggtgaatcaccaggctcattcttgtgatttaggtacacttgggcctcctgaccctgtcctcttcttttgtgtctccatctttccacctctcttagctttctatacattttctcccatgaaacatctcaaaaaaaggagctaatgtcagtcatttagagatcagcatacacttaaatcatagtttctatgtttaagacctgttccctctgtaatctgagtcatgtgttgtctatagataataggttttcaataaacatagtaatattagctttatgatagtgtatgccatttgtttttaatagctttactgcaataaaatttatataccataaagctcacgtgttttaagtgtataatttatctagctcttaccrcacactaataatagaacattttcatcagcttcaaaagaaatctcatgtgcatatagtcactcccattgacactctccaccactatgcaaccactcatctgctttctgtctctacatatctgcccttctttggatattttatataaataaaagaatatatacttgcactcttatgtttattgcagcactattcacagtcacaaagatttggaatcaacctaagtgtccatcaatggaagaaaatgtggtgtgtgtgtatgtgtgtatacaccc

SEQ ID NO: 74284 - DNA, 1090 bp, Homo sapiens
atgggacgagctctgcttaagttcattatgtccaaggctggcctcattatcttctaaccctatcccaaatctgcttttcttccacaattttctctcacagccaatgccccattgcccttgaattatatagctcatggatatttaatattgtaatttatggatagcataattgttctttcattcttctattggacaaatatttattgagcatctactgatcaccagtcacccaactgatttgaatctctgtatcagcaaatacaacatataaaataatgatgtatagctaaaacttttttctaatgttttccaaatactagacacaatagttgaaagagaatcactaaaaaacctacatcgtattacattgtctttgtcaccttcccttctggagatgcttcctaattcctatccaagagggtctctaaaggcaaaggattgcagggtgaatcaccaggctcattcttgtgatttaggtacacttgggcctcctgaccctgtcctcttcttttgtgtctccatctttccacctctcttagctttctatacattttctcccatgaaacatctcaaaaaaaggagctaatgtcagtcatttagagatcagcatacacttaaatcatagtttctatgtttaagacctgttccctctgtaatctgagtcatgtgttgtctatagataataggttttcaataaacatagtaatattagctttatgatagtgtatgccatttgtttttaatagctttactgcaataaaatttatataccataaagctcacgtgttttaagtgtataatttatctagctcttaccgcacactaataatagaacattttcatcagcttcaaaagaaatmtcatgtgcatatagtcactcccattgacactctccaccactatgcaaccactcatctgctttctgtctctacatatctgcccttctttggatattttatataaataaaagaatatatacttgcactcttatgtttattgcagcactattcacagtcacaaagatttggaatcaacctaagtgtccatcaatggaagaaaatgtggtgtgtgtgtatgtgtgtatacaccc

SEQ ID NO: 74285 - DNA, 1090 bp, Homo sapiens
atgggacgagctctgcttaagttcattatgtccaaggctggcctcattatcttctaaccctatcccaaatctgcttttcttccacaattttctctcacagccaatgccccattgcccttgaattatatagctcatggatatttaatattgtaatttatggatagcataattgttctttcattcttctattggacaaatatttattgagcatctactgatcaccagtcacccaactgatttgaatctctgtatcagcaaatacaacatataaaataatgatgtatagctaaaacttttttctaatgttttccaaatactagacacaatagttgaaagagaatcactaaaaaacctacatcgtattacattgtctttgtcaccttcccttctggagatgcttcctaattcctatccaagagggtctctaaaggcaaaggattgcagggtgaatcaccaggctcattcttgtgatttaggtacacttgggcctcctgaccctgtcctcttcttttgtgtctccatctttccacctctcttagctttctatacattttctcccatgaaacatctcaaaaaaaggagctaatgtcagtcatttagagatcagcatacacttaaatcatagtttctatgtttaagacctgttccctctgtaatctgagtcatgtgttgtctatagataataggttttcaataaacatagtaatattagctttatgatagtgtatgccatttgtttttaatagctttactgcaataaaatttatataccataaagctcacgtgttttaagtgtataatttatctagctcttaccgcacactaataatagaacattttcatcagcttcaaaagaaatctcatgtgcatatartcactcccattgacactctccaccactatgcaaccactcatctgctttctgtctctacatatctgcccttctttggatattttatataaataaaagaatatatacttgcactcttatgtttattgcagcactattcacagtcacaaagatttggaatcaacctaagtgtccatcaatggaagaaaatgtggtgtgtgtgtatgtgtgtatacaccc

SEQ ID NO: 74286 - DNA, 1090 bp, Homo sapiens
atgggacgagctctgcttaagttcattatgtccaaggctggcctcattatcttctaaccctatcccaaatctgcttttcttccacaattttctctcacagccaatgccccattgcccttgaattatatagctcatggatatttaatattgtaatttatggatagcataattgttctttcattcttctattggacaaatatttattgagcatctactgatcaccagtcacccaactgatttgaatctctgtatcagcaaatacaacatataaaataatgatgtatagctaaaacttttttctaatgttttccaaatactagacacaatagttgaaagagaatcactaaaaaacctacatcgtattacattgtctttgtcaccttcccttctggagatgcttcctaattcctatccaagagggtctctaaaggcaaaggattgcagggtgaatcaccaggctcattcttgtgatttaggtacacttgggcctcctgaccctgtcctcttcttttgtgtctccatctttccacctctcttagctttctatacattttctcccatgaaacatctcaaaaaaaggagctaatgtcagtcatttagagatcagcatacacttaaatcatagtttctatgtttaagacctgttccctctgtaatctgagtcatgtgttgtctatagataataggttttcaataaacatagtaatattagctttatgatagtgtatgccatttgtttttaatagctttactgcaataaaatttatataccataaagctcacgtgttttaagtgtataatttatctagctcttaccgcacactaataatagaacattttcatcagcttcaaaagaaatctcatgtgcatatagtcactcccattgacactctccaccactatgcaaccactcatctgctttctgtctctacatatctgcccttctttggatattttatataaataaaagaatatatacttgcactcttatgtttattgcagcactatkcacagtcacaaagatttggaatcaacctaagtgtccatcaatggaagaaaatgtggtgtgtgtgtatgtgtgtatacaccc

SEQ ID NO: 74287 - DNA, 1469 bp, Homo sapiens
tctctgagtgtgtaccttgatttctctgaagacaacccctgttgttttgcatttgtattaaacttgcctctttccactctcaaaagtgccctcttatgagtgataaatgatgtggccattccttcgttattgaatctgagcaccatgatctaaatcttggcacaggaatgattcaaaaggggcccagattttcacatcttatagtcctcctgactccctgtgtacacaggccacccgtggtaacccagcacccatccttgctgctccaaatgtgggacaaccccattttataacatctgtgagcagtctccttgggaaggcatataagattgccattacactccctctctttctccttagggtaactccctgttgatagrtgcataattcaggcctgcatgtggctttcaaaaatcatgaatgcattagctttgtgctgatttggaagatacatataaatcttatcttattagtgttctgacaattctcaatagagccccatgcttctaaaattttagagttgagaaaatgcaattatatatctacattaaattcactgaaaatttcttgcagaatacaaatcttcataaaagcacaaaccagaagaaatgcactagagaggttcttttctacctgaatccttctacaaatgaagggaacagatgacacccccacagctcatagagggtttgagcttcttgggcccaaacaaacctggggctttggcaactcagtctgcagtgttctccaactcacatgctttggtggccaggtagggagtgaacgcatgacatccacagggctgtaaagatgcttgttttgtaaccagacctccacagcacattgactttatagactgtgagggaggaggagaagtatggagcatgtctgtgttggtttggggtctggtcagccattcatgacccaggcttctgactcagttttgttctgaatcaacttgctctgattgctgttttgagagtgctccagaaattctccctccccactaagaagtgtgagaaaagggtggcagggcctctgtgcctgtttagggtggaggcgagcagcacagagcagccccagagaaattagaggagggtggtgcatctctgagagatatagtgtgaacacagctgcacctgcttgcagacatctgaggctggtaagacctgacggacctgctcaaaaccttgagcagctccatattgcccaagggatgatattgccacatcttagcatatcctacaggtcctcctggtgcctctgcagcctctgccactccctttatctcatgctctgaacttcagaatgacacaatcatacatgatgttgctgcatctctccctgtttaaggaaatggaaactaccttcctctcctcagtcctctgccactcccactctatacactctaatgttcccagcaaaataagaatacttcaaaacccggctcagatgcccccttccaagga

SEQ ID NO: 74288 - DNA, 1469 bp, Homo sapiens
tctctgagtgtgtaccttgatttctctgaagacaacccctgttgttttgcatttgtattaaacttgcctctttccactctcaaaagtgccctcttatgagtgataaatgatgtggccattccttcgttattgaatctgagcaccatgatctaaatcttggcacaggaatgattcaaaaggggcccagattttcacatcttatagtcctcctgactccctgtgtacacaggccacccgtggtaacccagcacccatccttgctgctccaaatgtgggacaaccccattttataacatctgtgagcagtctccttgggaaggcatataagattgccattacactccctctctttctccttagggtaactccctgttgatagatgcataattcaggcctgcatgtrgctttcaaaaatcatgaatgcattagctttgtgctgatttggaagatacatataaatcttatcttattagtgttctgacaattctcaatagagccccatgcttctaaaattttagagttgagaaaatgcaattatatatctacattaaattcactgaaaatttcttgcagaatacaaatcttcataaaagcacaaaccagaagaaatgcactagagaggttcttttctacctgaatccttctacaaatgaagggaacagatgacacccccacagctcatagagggtttgagcttcttgggcccaaacaaacctggggctttggcaactcagtctgcagtgttctccaactcacatgctttggtggccaggtagggagtgaacgcatgacatccacagggctgtaaagatgcttgttttgtaaccagacctccacagcacattgactttatagactgtgagggaggaggagaagtatggagcatgtctgtgttggtttggggtctggtcagccattcatgacccaggcttctgactcagttttgttctgaatcaacttgctctgattgctgttttgagagtgctccagaaattctccctccccactaagaagtgtgagaaaagggtggcagggcctctgtgcctgtttagggtggaggcgagcagcacagagcagccccagagaaattagaggagggtggtgcatctctgagagatatagtgtgaacacagctgcacctgcttgcagacatctgaggctggtaagacctgacggacctgctcaaaaccttgagcagctccatattgcccaagggatgatattgccacatcttagcatatcctacaggtcctcctggtgcctctgcagcctctgccactccctttatctcatgctctgaacttcagaatgacacaatcatacatgatgttgctgcatctctccctgtttaaggaaatggaaactaccttcctctcctcagtcctctgccactcccactctatacactctaatgttcccagcaaaataagaatacttcaaaacccggctcagatgcccccttccaagga

SEQ ID NO: 74289 - DNA, 1469 bp, Homo sapiens
tctctgagtgtgtaccttgatttctctgaagacaacccctgttgttttgcatttgtattaaacttgcctctttccactctcaaaagtgccctcttatgagtgataaatgatgtggccattccttcgttattgaatctgagcaccatgatctaaatcttggcacaggaatgattcaaaaggggcccagattttcacatcttatagtcctcctgactccctgtgtacacaggccacccgtggtaacccagcacccatccttgctgctccaaatgtgggacaaccccattttataacatctgtgagcagtctccttgggaaggcatataagattgccattacactccctctctttctccttagggtaactccctgttgatagatgcataattcaggcctgcatgtggctttcaaaaatcatgaatgcattagctttgtgctgatttggaagatacatataaatcttatcttattagtgttctgacaattctcaatagagccccatgcttctaaaattttagagttgagaaaatgcaattatatatctacattaaattcactgaaaatttcttgcagaatacaaatcttcataaaagcacaaaccagaagaaatgcactagagaggttcttttctacctgaatccttctacaaatgaagggaacagatgacacccccacagctcatagagggtttgagcttcttgggcccaaacaaacctggggctttggcaactcagtctgcagtgttctccaactcacatgctttggtggccaggtagggagtgaacgcatgacatccacagggctgtaaagatgcttgttttgtaaccagacctccacagcacattgactttatagactgtgagggaggaggagaagtatggagcatgtctgtgttggtttggggtctggtcagccattcatgacccaggcttctgactcagttttgttctgaatcaacttgctctgattgctgttttgagagtgctccagaaattctcyctccccactaagaagtgtgagaaaagggtggcagggcctctgtgcctgtttagggtggaggcgagcagcacagagcagccccagagaaattagaggagggtggtgcatctctgagagatatagtgtgaacacagctgcacctgcttgcagacatctgaggctggtaagacctgacggacctgctcaaaaccttgagcagctccatattgcccaagggatgatattgccacatcttagcatatcctacaggtcctcctggtgcctctgcagcctctgccactccctttatctcatgctctgaacttcagaatgacacaatcatacatgatgttgctgcatctctccctgtttaaggaaatggaaactaccttcctctcctcagtcctctgccactcccactctatacactctaatgttcccagcaaaataagaatacttcaaaacccggctcagatgcccccttccaagga

SEQ ID NO: 74290 - DNA, 1469 bp, Homo sapiens
tctctgagtgtgtaccttgatttctctgaagacaacccctgttgttttgcatttgtattaaacttgcctctttccactctcaaaagtgccctcttatgagtgataaatgatgtggccattccttcgttattgaatctgagcaccatgatctaaatcttggcacaggaatgattcaaaaggggcccagattttcacatcttatagtcctcctgactccctgtgtacacaggccacccgtggtaacccagcacccatccttgctgctccaaatgtgggacaaccccattttataacatctgtgagcagtctccttgggaaggcatataagattgccattacactccctctctttctccttagggtaactccctgttgatagatgcataattcaggcctgcatgtggctttcaaaaatcatgaatgcattagctttgtgctgatttggaagatacatataaatcttatcttattagtgttctgacaattctcaatagagccccatgcttctaaaattttagagttgagaaaatgcaattatatatctacattaaattcactgaaaatttcttgcagaatacaaatcttcataaaagcacaaaccagaagaaatgcactagagaggttcttttctacctgaatccttctacaaatgaagggaacagatgacacccccacagctcatagagggtttgagcttcttgggcccaaacaaacctggggctttggcaactcagtctgcagtgttctccaactcacatgctttggtggccaggtagggagtgaacgcatgacatccacagggctgtaaagatgcttgttttgtaaccagacctccacagcacattgactttatagactgtgagggaggaggagaagtatggagcatgtctgtgttggtttggggtctggtcagccattcatgacccaggcttctgactcagttttgttctgaatcaacttgctctgattgctgttttgagagtgctccagaaattctccctccccactaagaagtgtgagaaaagggtggcagggcctctgtgcctgtttagggtggaggcgagcagcacagagcagccccagagaaattagaggagggtggtgcatctctgagagatatagtgtgaacacagctgcacctgcttgcagacatctgaggctggtaagacctgacggacctgctcaaaaccttgagcagctccatattgcccaagggatgatattgccacatcttagcatatcctacaggtcctcctggtgcctctgcagcctctgccactccctttatctcatgctctgaacttcagaatgacacaatcatacatgatgttgctgcatctctccctgtttaaggaaatggaaactaccttcctctcctcagtcctctgccactcccactctatacactctaatgttcccagcaaaataagaatacttcaaaacccggctcagatgcccccttccargga

SEQ ID NO: 74291 - DNA, 622 bp, Homo sapiens
ttctgcttccagcctcacctctgcaatggctacctacattgtataaaggaggactttcatttgtttaacatcttttttttgtgccagccgctatggtggatatgtgccaggaacttacatgagtgatctcattcaagtgtcttttccctgggatatgggcagaggctccaggagatggtgccatgcagctcggagagggaagccaggatctgacctaggactctcagatgcaaagtgccttctgctgcctttctttcaagctggccactacgttgtagcatgtgggcatggtctctgcaaagacaaaacccactaggcggagagagggcagattctctagcacatttctagtgttgatgccctaatgggagtacggaccctcattggggattccatgagtctgagaagtgaaggtgatttgttracagttgctctccctggggttagtgaatgcagtagctttaaaatgcactctcggaacttggcaggcagggcaggtgtgtcactagcaacccacagtggggaacgtgtggatgaaggatcgctggtgcattgtggaacctgcctctggggcatttctcttgaaggaatctcaccccagtaaggtcagattgcaaacacg

SEQ ID NO: 74292 - DNA, 622 bp, Homo sapiens
ttctgcttccagcctcacctctgcaatggctacctacattgtataaaggaggactttcatttgtttaacatcttttttttgtgccagccgctatggtggatatgtgccaggaacttacatgagtgatctcattcaagtgtcttttccctgggatatgggcagaggctccaggagatggtgccatgcagctcggagagggaagccaggatctgacctaggactctcagatgcaaagtgccttctgctgcctttctttcaagctggccactacgttgtagcatgtgggcatggtctctgcaaagacaaaacccactaggcggagagagggcagattctctagcacatttctagtgttgatgccctaatgggagtacggaccctcattggggattccatgagtctgagaagtgaaggtgatttgttaacagttgctctccctggggttagtgaatgcagtagctttaaaatgcactctcggaacttggcaggcagggcaggtgtgtcactagcaacccacagtggggaacgtgtggatgaaggatcgctggtgcattgtggaacctgcctctggggcatttctcttgaaggaatctcaccccagtaaggtcarattgcaaacacg

SEQ ID NO: 74293 - DNA, 1336 bp, Homo sapiens
cctcccaactccgataacccggggaagggctggggactgcaggcttaacgaatacccagcattttcaaatgcccagcatggtttgggaagcagcaggctgaactgtttgagagcctgcgtgatcgttcttatcagacgtcctgtggaaatgcctgccactgtcacgagcacacaggctcaactcatacaacaccagctggcctgaaaagtcatggccacaagaagcagaggccgcagaccagactccagcacaaaggtgcgggctccttggctttgactcactggcatctcttccgtcctttcacttctgcttctccttagtaacacgactcttcctatgttttacaataatctaataagcgccagtagcggtcagtgtgcagtcaacagacagaactgtggctgttatactgataggcagattttaaaatgaagagatgttgccttggccagtgcagacgggggacacctgcgcacacggaggagcccgtgaggccgctgccgccctgtgggatgggaaacggggaaggctttgggggggcctctggggaggaggccccacccagctggtgctggggtcctgagtgctgagcaggggttccaggggctgagacagagagctctgaggaaggaactggccagcttgtgcgggcgtctgaaggagaacgagaggctgactctgcaagtgttgagaaaaccgccaggcggatccagtgctggaacaaactgcactggggtgggggcaggaaactcagggaacaggaagagaaggagctgcccagagccaccctccagggcgcccctgttcagagcctccctgggggctgctgactgcgcggccatgacgtttcaggccagctggtgttggcagagctgagccgggtttgctcagccagcgcctcagagctgggggtggaggagtggaactgggggtgaggcatagttgacgggatcacggcgccccatgggccctccaccccaaacaagaccttggtgcttggtagcagtcagcctagggccctgcagccccagctcagacctcacgcagaccttcttccagccccacaattgccatctgccgccccacgcgcaacacgtcctgctctccttttcaagtaatttattgcatctgcgataaataaaatcaaataaaagtatawtttaagtgttcgtttttaatctttgtggaaaaaggtagagtgttggaagcaatcttgggagttcgttcttggaatttaagattatgtcctcaggactcaggaggcttcttcctgccgtgcctgttttctttggctgggctgtgttcccttctgcctgttccgccctctgcccctct

SEQ ID NO: 74294 - DNA, 1355 bp, Homo sapiens
ctcattgacacctggtgcagagggaaaattcggttggctgcactctgtgagcgcagggaacagtatgcttggaactgagagaattttctgggacagctcttagttcttccgcatccaatagtaaaagttagtgaaaaactacaacaacccaaaagcggataaagaagaaatgagcggagccattgcaggctcacactccaggaatgaaggtttatatcacctcattaggaaagcaggtctgagcagtggaggaagtcatggagcagaagggagtggaaggaggaggacgcgatgattacctgcggcctccatcacagaaaaagccacaaaactgcggggcagccatgcatcccatggccttctgtttcttctacagacaaatctccccttgccttcttttttaaggatctctgtcatgacactgggcctgcctggatgatctgggataatctccgcatctcaaaaccctttatgaatcatatctgcaaagtcccttaaggatcctcaggtcccagggattctgcaccttgattttagatgtttgacctccagcaccataggaggtaaacgtgygctgcttcaagctactgcgtgtgtggtcctgagttacggaagccacaagaagcaattacagatggagagtgtgaatgtctcccaggtgactgctgggacttttgttcctcattttgggaccaggataagagctggtgcctcctgttttatgactggactctgacttctatcttctgctttctgcagagtcctcgtaatagctctctggacactggcacagaggccatgggatgctgagttgagacccaatttctgggtagcacgtcccatgacagtggatggcagttgacaggtggcattcatagagcctgacttgataccagtttttcacagcaacatgaaccatccatcatcattgatgccaaaggtggggtctacccttccctgggcactgctgcaggataccaagcccactgcccacacaaggaatcctggtcaccaccagggtcccccaggggactcggacaagtggctgacgatggtgtcaccagcatcaggacgcatatggttgtgtcaagagaagaaatgagaattgttttatgttcagtcaggatgacagagaagacttaaaatgggatagctacctggattttgtttctgagctcagctgccatttccagaacacctgggcctctaacaggatgacaccaccattctcctctgtggtgatcgcattgcttcagaacagcaaagacagtcacgcacttagtgctgtgttcaaaagcaaggaaaaataagttatctctcaaaatgtatgcagattcaactcccaccctttaata

SEQ ID NO: 74295 - DNA, 1355 bp, Homo sapiens
ctcattgacacctggtgcagagggaaaattcggttggctgcactctgtgagcgcagggaacagtatgcttggaactgagagaattttctgggacagctcttagttcttccgcatccaatagtaaaagttagtgaaaaactacaacaacccaaaagcggataaagaagaaatgagcggagccattgcaggctcacactccaggaatgaaggtttatatcacctcattaggaaagcaggtctgagcagtggaggaagtcatggagcagaagggagtggaaggaggaggacgcgatgattacctgcggcctccatcacagaaaaagccacaaaactgcggggcagccatgcatcccatggccttctgtttcttctacagacaaatctccccttgccttcttttttaaggatctctgtcatgacactgggcctgcctggatgatctgggataatctccgcatctcaaaaccctttatgaatcatatctgcaaagtcccttaaggatcctcaggtcccagggattctgcaccttgattttagatgtttgacctccagcaccataggaggtaaacgtgcgctgcttcaagcyactgcgtgtgtggtcctgagttacggaagccacaagaagcaattacagatggagagtgtgaatgtctcccaggtgactgctgggacttttgttcctcattttgggaccaggataagagctggtgcctcctgttttatgactggactctgacttctatcttctgctttctgcagagtcctcgtaatagctctctggacactggcacagaggccatgggatgctgagttgagacccaatttctgggtagcacgtcccatgacagtggatggcagttgacaggtggcattcatagagcctgacttgataccagtttttcacagcaacatgaaccatccatcatcattgatgccaaaggtggggtctacccttccctgggcactgctgcaggataccaagcccactgcccacacaaggaatcctggtcaccaccagggtcccccaggggactcggacaagtggctgacgatggtgtcaccagcatcaggacgcatatggttgtgtcaagagaagaaatgagaattgttttatgttcagtcaggatgacagagaagacttaaaatgggatagctacctggattttgtttctgagctcagctgccatttccagaacacctgggcctctaacaggatgacaccaccattctcctctgtggtgatcgcattgcttcagaacagcaaagacagtcacgcacttagtgctgtgttcaaaagcaaggaaaaataagttatctctcaaaatgtatgcagattcaactcccaccctttaata

SEQ ID NO: 74296 - DNA, 1355 bp, Homo sapiens
ctcattgacacctggtgcagagggaaaattcggttggctgcactctgtgagcgcagggaacagtatgcttggaactgagagaattttctgggacagctcttagttcttccgcatccaatagtaaaagttagtgaaaaactacaacaacccaaaagcggataaagaagaaatgagcggagccattgcaggctcacactccaggaatgaaggtttatatcacctcattaggaaagcaggtctgagcagtggaggaagtcatggagcagaagggagtggaaggaggaggacgcgatgattacctgcggcctccatcacagaaaaagccacaaaactgcggggcagccatgcatcccatggccttctgtttcttctacagacaaatctccccttgccttcttttttaaggatctctgtcatgacactgggcctgcctggatgatctgggataatctccgcatctcaaaaccctttatgaatcatatctgcaaagtcccttaaggatcctcaggtcccagggattctgcaccttgattttagatgtttgacctccagcaccataggaggtaaacgtgcgctgcttcaagctactgcgtgtgtggtcctgagttacggaagccacaagmagcaattacagatggagagtgtgaatgtctcccaggtgactgctgggacttttgttcctcattttgggaccaggataagagctggtgcctcctgttttatgactggactctgacttctatcttctgctttctgcagagtcctcgtaatagctctctggacactggcacagaggccatgggatgctgagttgagacccaatttctgggtagcacgtcccatgacagtggatggcagttgacaggtggcattcatagagcctgacttgataccagtttttcacagcaacatgaaccatccatcatcattgatgccaaaggtggggtctacccttccctgggcactgctgcaggataccaagcccactgcccacacaaggaatcctggtcaccaccagggtcccccaggggactcggacaagtggctgacgatggtgtcaccagcatcaggacgcatatggttgtgtcaagagaagaaatgagaattgttttatgttcagtcaggatgacagagaagacttaaaatgggatagctacctggattttgtttctgagctcagctgccatttccagaacacctgggcctctaacaggatgacaccaccattctcctctgtggtgatcgcattgcttcagaacagcaaagacagtcacgcacttagtgctgtgttcaaaagcaaggaaaaataagttatctctcaaaatgtatgcagattcaactcccaccctttaata

SEQ ID NO: 74297 - DNA, 1355 bp, Homo sapiens
ctcattgacacctggtgcagagggaaaattcggttggctgcactctgtgagcgcagggaacagtatgcttggaactgagagaattttctgggacagctcttagttcttccgcatccaatagtaaaagttagtgaaaaactacaacaacccaaaagcggataaagaagaaatgagcggagccattgcaggctcacactccaggaatgaaggtttatatcacctcattaggaaagcaggtctgagcagtggaggaagtcatggagcagaagggagtggaaggaggaggacgcgatgattacctgcggcctccatcacagaaaaagccacaaaactgcggggcagccatgcatcccatggccttctgtttcttctacagacaaatctccccttgccttcttttttaaggatctctgtcatgacactgggcctgcctggatgatctgggataatctccgcatctcaaaaccctttatgaatcatatctgcaaagtcccttaaggatcctcaggtcccagggattctgcaccttgattttagatgtttgacctccagcaccataggaggtaaacgtgcgctgcttcaagctactgcgtgtgtggtcctgagttacggaagccacaagaagcaattacagatggagagtgtgaatgtctcccaggtgactgctgggacttttgttcctcattttgggaccaggataagagctggtgcctcctgttttatgactggactctgacttctatcttctgctttctgyagagtcctcgtaatagctctctggacactggcacagaggccatgggatgctgagttgagacccaatttctgggtagcacgtcccatgacagtggatggcagttgacaggtggcattcatagagcctgacttgataccagtttttcacagcaacatgaaccatccatcatcattgatgccaaaggtggggtctacccttccctgggcactgctgcaggataccaagcccactgcccacacaaggaatcctggtcaccaccagggtcccccaggggactcggacaagtggctgacgatggtgtcaccagcatcaggacgcatatggttgtgtcaagagaagaaatgagaattgttttatgttcagtcaggatgacagagaagacttaaaatgggatagctacctggattttgtttctgagctcagctgccatttccagaacacctgggcctctaacaggatgacaccaccattctcctctgtggtgatcgcattgcttcagaacagcaaagacagtcacgcacttagtgctgtgttcaaaagcaaggaaaaataagttatctctcaaaatgtatgcagattcaactcccaccctttaata

SEQ ID NO: 74298 - DNA, 1355 bp, Homo sapiens
ctcattgacacctggtgcagagggaaaattcggttggctgcactctgtgagcgcagggaacagtatgcttggaactgagagaattttctgggacagctcttagttcttccgcatccaatagtaaaagttagtgaaaaactacaacaacccaaaagcggataaagaagaaatgagcggagccattgcaggctcacactccaggaatgaaggtttatatcacctcattaggaaagcaggtctgagcagtggaggaagtcatggagcagaagggagtggaaggaggaggacgcgatgattacctgcggcctccatcacagaaaaagccacaaaactgcggggcagccatgcatcccatggccttctgtttcttctacagacaaatctccccttgccttcttttttaaggatctctgtcatgacactgggcctgcctggatgatctgggataatctccgcatctcaaaaccctttatgaatcatatctgcaaagtcccttaaggatcctcaggtcccagggattctgcaccttgattttagatgtttgacctccagcaccataggaggtaaacgtgcgctgcttcaagctactgcgtgtgtggtcctgagttacggaagccacaagaagcaattacagatggagagtgtgaatgtctcccaggtgactgctgggacttttgttcctcattttgggaccaggataagagctggtgcctcctgttttatgactggactctgacttctatcttctgctttctgcagagtcctcgtaatagctctctggacactggcacagaggccatgggatgctgagttgagacccaatttctgggtagcacrtcccatgacagtggatggcagttgacaggtggcattcatagagcctgacttgataccagtttttcacagcaacatgaaccatccatcatcattgatgccaaaggtggggtctacccttccctgggcactgctgcaggataccaagcccactgcccacacaaggaatcctggtcaccaccagggtcccccaggggactcggacaagtggctgacgatggtgtcaccagcatcaggacgcatatggttgtgtcaagagaagaaatgagaattgttttatgttcagtcaggatgacagagaagacttaaaatgggatagctacctggattttgtttctgagctcagctgccatttccagaacacctgggcctctaacaggatgacaccaccattctcctctgtggtgatcgcattgcttcagaacagcaaagacagtcacgcacttagtgctgtgttcaaaagcaaggaaaaataagttatctctcaaaatgtatgcagattcaactcccaccctttaata

SEQ ID NO: 74299 - DNA, 1355 bp, Homo sapiens
ctcattgacacctggtgcagagggaaaattcggttggctgcactctgtgagcgcagggaacagtatgcttggaactgagagaattttctgggacagctcttagttcttccgcatccaatagtaaaagttagtgaaaaactacaacaacccaaaagcggataaagaagaaatgagcggagccattgcaggctcacactccaggaatgaaggtttatatcacctcattaggaaagcaggtctgagcagtggaggaagtcatggagcagaagggagtggaaggaggaggacgcgatgattacctgcggcctccatcacagaaaaagccacaaaactgcggggcagccatgcatcccatggccttctgtttcttctacagacaaatctccccttgccttcttttttaaggatctctgtcatgacactgggcctgcctggatgatctgggataatctccgcatctcaaaaccctttatgaatcatatctgcaaagtcccttaaggatcctcaggtcccagggattctgcaccttgattttagatgtttgacctccagcaccataggaggtaaacgtgcgctgcttcaagctactgcgtgtgtggtcctgagttacggaagccacaagaagcaattacagatggagagtgtgaatgtctcccaggtgactgctgggacttttgttcctcattttgggaccaggataagagctggtgcctcctgttttatgactggactctgacttctatcttctgctttctgcagagtcctcgtaatagctctctggacactggcacagaggccatgggatgctgagttgagacccaatttctgggtagcacgtcccatgacagtggatggcagttgacaggtggcattcatagagcctgacttgataccagtttttcamagcaacatgaaccatccatcatcattgatgccaaaggtggggtctacccttccctgggcactgctgcaggataccaagcccactgcccacacaaggaatcctggtcaccaccagggtcccccaggggactcggacaagtggctgacgatggtgtcaccagcatcaggacgcatatggttgtgtcaagagaagaaatgagaattgttttatgttcagtcaggatgacagagaagacttaaaatgggatagctacctggattttgtttctgagctcagctgccatttccagaacacctgggcctctaacaggatgacaccaccattctcctctgtggtgatcgcattgcttcagaacagcaaagacagtcacgcacttagtgctgtgttcaaaagcaaggaaaaataagttatctctcaaaatgtatgcagattcaactcccaccctttaata

SEQ ID NO: 74300 - DNA, 1359 bp, Homo sapiens
aataatagctatttacctattcattttatagttcttttaatgagcatattttgctggcaatgttgtctttatgtttttttcctactgtatttaaagttgttgtcttggatacagagaacgttgaagctgataaattacatttcacacctaaagcaatctacatttctggtagagtggacatttatagaaatgttctttgccaaaactttggcaaaagttttttctaagggatttgaaaactcttttttatccccattaaaaaatgaaaatcttggtacatctcaatttatcctcaacaaaaatgtttagtttcacaatttttcaagacaacttagtgtcacgttgctccagtagacttagtgccttcctgcttgtcttcaccctttgttctgtcttcttggggtacgggtgagcagactctccagtgtgacacagaacctcagctctcagattgagtaaagttatgcagacactgtcacagcacagaagtctcctggctctgcattgcaccaacgtctacctttgcttttggcctgaactttcagtcaaacaattctacccacatcaaaattccataaagaacctgcttttgacgatcagtggcatgaggaattctgaaatgggcatccctacgcctcctgtgaccatgctctctcataaacaatcccaaccataaccactgagcagtgcacttgctcttggctaccgtgctagtcctgtatccctagaacatcccaaaagccatcagaatgtcacgcatgataaactgctctgcaatatccacagctactggacgtacagtgtcctggctgtgtgcatagtcatgttgccctggttccacagtgagaaccctcacgtcctgcccagggatcctttggccgtccacatggagaaacaggcccctcctgatagcattcttgggagcagtggttggaccgggcaacagttatagtcaagattcaggggagcagagcaaggagaccaggcaggcagcccatcagttgcacgctacagagacctttagactcctgcttccctgctgccaaagctccgtggtgaccactgcccagctcatcctcacaaccacagagctctaggttttaccrcacttggtttaccactcttggttttaccactgtgcttcttgcacaaggatgctaccatttattgtactgaagctgcagtttcctctatgagtttcatagaattaccctttgtctttataaatgatatttaattgctattcagcattccattgatacccctacatggtctgtgtatatgtgtgtttttgtctgtttattttctctcctagaccgctcctctccaggtgaggcagtctcacagtgacattgatgc

SEQ ID NO: 74301 - DNA, 435 bp, Homo sapiens
cccacatggtgaaaccccatctctactaaaaatacaaaaattagctgggcatggtggcgggcgcctgtagtcccagctactcaggaggctgaggcatgagaatcgcttgaacccaggaggcagaggttgcagtgagccgagatggcgccactgcactccagccaggcaaaagagtgagactccgtctcaaaaacaaaacaaaacaaaacaaaacaaacaaacaaaaacaaaaaacattgcatcgtacaccttaattttatataatttttatttgtcagtataccgcaataaagctggaagaaaagcaaaaaagaataaaacgtgcttaggtcaaatcmctctatcaatatgccacacaattgtcatcactatcactgtagctgccttctgttgagcacgctctgtgctcggctctgtgtagggagtgtgtatcca

SEQ ID NO: 74302 - DNA, 667 bp, Homo sapiens
tcttcactggagttgtctcttgtctcctctttaagacctgcactggccccagcagggctctctgcgactgtctctttctgtggctctctgttgggtttctagctggctcaccattttgcttgctgccatatgcagctgccrgccttctctcaattgctcccactagacatgacagtggcattgacttgggctgtgggtgataggcagttcccctaactcttgcctctctctgtttctctcccattgaggatatcatgagaatccctgctttgtgtcactgtattccagagtctcaggtaacctggaataaaacagaactagagtaaatgacactgagtctcttttttgtgttttaatcagaaaccttttggggagtttatgtttattttttcttgatgccaaatagcctacattaggtccctctctctttataaaagcccgcatcctgttcatttgatagttcacactcatggcttagttttattgtttctcctccccctttcttgattgatactggtgacagactgcttcaaaaattaaagttgtgcaccaatatttgttcatggaatgatgcattcatactatatttttgtaatatgagcctcaaattggcaactgatcctatttgaaatgaatttgccctttgctgtgcctggaagaagcctca

SEQ ID NO: 74303 - DNA, 667 bp, Homo sapiens
tcttcactggagttgtctcttgtctcctctttaagacctgcactggccccagcagggctctctgcgactgtctctttctgtggctctctgttgggtttctagctggctcaccattttgcttgctgccatatgcagctgccggccttctctcaattgctcccactagacatgacagtggcattgacttgggctgtgggtgataggcagttcccctaactcttgcctctctctgtttctctcccattgaggatatcatgagaatccctgctttgtgtcactgtattccagagtctcaggtaacctggaataaaacagaactagagtaaatgacactgagtctcttttttgtgttttaatcagaaacctttyggggagtttatgtttattttttcttgatgccaaatagcctacattaggtccctctctctttataaaagcccgcatcctgttcatttgatagttcacactcatggcttagttttattgtttctcctccccctttcttgattgatactggtgacagactgcttcaaaaattaaagttgtgcaccaatatttgttcatggaatgatgcattcatactatatttttgtaatatgagcctcaaattggcaactgatcctatttgaaatgaatttgccctttgctgtgcctggaagaagcctca

SEQ ID NO: 74304 - DNA, 667 bp, Homo sapiens
tcttcactggagttgtctcttgtctcctctttaagacctgcactggccccagcagggctctctgcgactgtctctttctgtggctctctgttgggtttctagctggctcaccattttgcttgctgccatatgcagctgccggccttctctcaattgctcccactagacatgacagtggcattgacttgggctgtgggtgataggcagttcccctaactcttgcctctctctgtttctctcccattgaggatatcatgagaatccctgctttgtgtcactgtattccagagtctcaggtaacctggaataaaacagaactagagtaaatgacactgagtctcttttttgtgttttaatcagaaaccttttggggagtttatgtttattttttcttgatgccaaatagcctacattaggtccctctctctttataaaagcccscatcctgttcatttgatagttcacactcatggcttagttttattgtttctcctccccctttcttgattgatactggtgacagactgcttcaaaaattaaagttgtgcaccaatatttgttcatggaatgatgcattcatactatatttttgtaatatgagcctcaaattggcaactgatcctatttgaaatgaatttgccctttgctgtgcctggaagaagcctca

SEQ ID NO: 74305 - DNA, 526 bp, Homo sapiens
tgggtagagtttgctcagacagagtctctgtcatgaagaagccaaaacagaggccctggccaggagacacaattctctccagcccagaaccacttcagagcacttgccaaacaagatctaagatttgtagcagcaagctcttcagcaggctgacaaatacttacccgtgaaacagatcactgtttgcatgcggagcgccgccctctggggatgcagctcctagttgtggttcctcatttgttatgtgattgaaatatgaaaatcatttwatctggctacatagcttcaatatattgatattaactataaaaacaaattccgtccgcaggccaaatcagcagatgggtttcaaacattttaggaatataaagaggtcacttggcatgcggtaactcagataagcactgagcccagtgcatagcaggaggcccagggagtggcctcattcctttccccccacctcctgctgtgtccttgtcatttctgtacataataaaatgtggctcttgcgcttaggagcatgtca

SEQ ID NO: 74306 - DNA, 526 bp, Homo sapiens
tgggtagagtttgctcagacagagtctctgtcatgaagaagccaaaacagaggccctggccaggagacacaattctctccagcccagaaccacttcagagcacttgccaaacaagatctaagatttgtagcagcaagctcttcagcaggctgacaaatacttacccgtgaaacagatcactgtttgcatgcggagcgccgccctctggggatgcagctcctagttgtggttcctcatttgttatgtgattgaaatatgaaaatcatttamtctggctacatagcttcaatatattgatattaactataaaaacaaattccgtccgcaggccaaatcagcagatgggtttcaaacattttaggaatataaagaggtcacttggcatgcggtaactcagataagcactgagcccagtgcatagcaggaggcccagggagtggcctcattcctttccccccacctcctgctgtgtccttgtcatttctgtacataataaaatgtggctcttgcgcttaggagcatgtca

SEQ ID NO: 74307 - DNA, 526 bp, Homo sapiens
tgggtagagtttgctcagacagagtctctgtcatgaagaagccaaaacagaggccctggccaggagacacaattctctccagcccagaaccacttcagagcacttgccaaacaagatctaagatttgtagcagcaagctcttcagcaggctgacaaatacttacccgtgaaacagatcactgtttgcatgcggagcgccgccctctggggatgcagctcctagttgtggttcctcatttgttatgtgattgaaatatgaaaatcatttaatctggctacatagcttcaatatattgatattaactataaaaacaaattccgtccgcaggccaaatcagcagatgggtttcaaacattttaggaatataaagaggtcacttggcatgcggtaactcagataagcactgagcccagtgcatagcaggaggcccagggagtggcctcattcctttccccccacctcctgctgtgtccttgtcatttctgtacayaataaaatgtggctcttgcgcttaggagcatgtca

SEQ ID NO: 74308 - DNA, 526 bp, Homo sapiens
tgggtagagtttgctcagacagagtctctgtcatgaagaagccaaaacagaggccctggccaggagacacaattctctccagcccagaaccacttcagagcacttgccaaacaagatctaagatttgtagcagcaagctcttcagcaggctgacaaatacttacccgtgaaacagatcactgtttgcatgcggagcgccgccctctggggatgcagctcctagttgtggttcctcatttgttatgtgattgaaatatgaaaatcatttaatctggctacatagcttcaatatattgatattaactataaaaacaaattccgtccgcaggccaaatcagcagatgggtttcaaacattttaggaatataaagaggtcacttggcatgcggtaactcagataagcactgagcccagtgcatagcaggaggcccagggagtggcctcattcctttccccccacctcctgctgtgtccttgtcatttctgtacataataaaatstggctcttgcgcttaggagcatgtca

SEQ ID NO: 74309 - DNA, 637 bp, Homo sapiens
atccttaagttatattaaaaagaaccaatccaaagatcaaggctccggaaactcccagaatcctcgctgccttcagcttgacaggaaaaatccaggtttgaaaattgcttctgatatacaaatggccttattgaacctctggagccagagagccaggacttaaggcttgtaatcctcccctatttcaacagctcccatccatcagctctccagtcgctgagcagggagctccagcgagtctggaagaagcagctcctcctttttgctaggctgggcgagcctggtgcagtgcggcctcatccatcaaccaggagtggggcccggcccagccttctggccagcattggtggggaagcctgttaataaacaggctgtggcctctccaggaagtctcttcttcctccctgtgcttgtttgtgtgtgtgtgtgtgtgtgtgtgtgtgtgtgtgtgtgtgtgtgwgagagagagagagagagagagaggatggatggatggatggatgggtggatggatggatggatggatgaagggatagtgatatagtttagatattcatccccactcaaatctcatgttgaattgtaatccccagtgttggaggtaggtcctggtggcaggtgatttgttcatggggct

SEQ ID NO: 74310 - DNA, 637 bp, Homo sapiens
atccttaagttatattaaaaagaaccaatccaaagatcaaggctccggaaactcccagaatcctcgctgccttcagcttgacaggaaaaatccaggtttgaaaattgcttctgatatacaaatggccttattgaacctctggagccagagagccaggacttaaggcttgtaatcctcccctatttcaacagctcccatccatcagctctccagtcgctgagcagggagctccagcgagtctggaagaagcagctcctcctttttgctaggctgggcgagcctggtgcagtgcggcctcatccatcaaccaggagtggggcccggcccagccttctggccagcattggtggggaagcctgttaataaacaggctgtggcctctccaggaagtctcttcttcctccctgtgcttgtttgtgtgtgtgtgtgtgtgtgtgtgtgtgtgtgtgtgtgtgtgtgagwgagagagagagagagagagaggatggatggatggatggatgggtggatggatggatggatggatgaagggatagtgatatagtttagatattcatccccactcaaatctcatgttgaattgtaatccccagtgttggaggtaggtcctggtggcaggtgatttgttcatggggct

SEQ ID NO: 74311 - DNA, 881 bp, Homo sapiens
tccatgcttcttcaaacatcacagctagaaaggatttgagtgaaattgacacatgaaaaatcctcttttgtgggtcccaactctgagcaagcaaggctggcctggtgcttccctggacttcaggagctggcagaggtcttcagggagacrcagagctcaaatcagggtggtcgttgccctggaggtcaccttgagggaagcatggtgtggtttggcacagattgactctgaacatttgtaaagccttagttcatgccaaagtctggagatgcaggggcttattgtcacagcccttgggggcatgcagtctgagacctggtcatattctaggatgccctcagaagccccatttggtaaaaggtgtaataagccaagtggaacctcagaccctcacccagattacgatttggattaaattttctttgcattaagaacagctggaagactactggagtgggtgagccctgtttgcacctttttttttttttttttgagatggagtctcaccctgttgctcaggctggagtgcagtgatgcaatctcagctcactgcaaactctgcctcctagggtcaagatattctcctgccccagcctcccaaatagctggaattataggtgctcgtcatgacacccggctaatttttgtatttttattagaggtggggtttcaccatgttggctggcattgaactcctgacctcaagtcatctgcctgccttggcctcccaaagtgctgagattacaggtgtgagccacctcactggccttcctccacttttaaagtatattccagctttgtgtttttaccactaccactcagggccaggcccacttcctctctttcctggactagccccaagagccttttgaccctctgct
